United States Patent Application Publication US 2015/0376612 A1 - sequence listing, part 38

SEQ ID NO: 91171 - DNA, 1058 bp, Homo sapiens
ctggggaacatagcaaaaccccatctttatattttaaaaaaaagtaaaaactattagctcataggccatccaaaaacaggtggaagaggctgctggatttggcctgtgggcactgagcttactgagcttacatcttcccagctcagtaagcctggcagaaggtatctctttcccagtagttgggggaaaagtcccagggtggactctcattggacagacttgggtcacatgccccttcttgagccaatcagaggcagaggggcttggtgctttcaggggattggtcagtggtagacacagcctgatgagggtagggaagagggagaaaccaaaaggaaaagccacactgttgccgaagttggaggcagcaagcgccgggtgggtggaagtcacaaaaatccactgctgaggtggcagtagggatgggatgttagctgtgccataaaagtgctttctgattcttccaggtgacaacatccgggaattcttgctgagcctcagatactttcgaatcttcatcgccctgtggaacatcttcatgatgttctgcatgattgtgtgagtccagcctgccctttcctttcactgtcgtctcttagtctccttctccagggtgacccacctgatggtcattctctgtcttttcagtcatcactcttgtatcctggtttctgttttctttattttttgttttgtttgagatggaatcttgctctgtcgcctaaactggagtgcagtggtgcgatctgggctcactgcaacctcggcctcttaggtctaagcgattctcctgcctcagcctcccgagtaactgggactacaggtgcgtgccaccacacacggctgattttttgtatttttagtagagacggggttccatcgtgttatccaggatggtcttgatctcctgaccttgtgattcgtccaccttgggctcccaaagtgctgggattacaggagtgagccactgtgcacggccctgttttttttgtttgtttgtttttgtttttgagatcgagtcttgctctgttgcccaggctggagtgcagtggcgtgat

SEQ ID NO: 91172 - DNA, 1147 bp, Homo sapiens
gtgggaacccccgttccccatggggcccaggaggatctcattttagagcccagttggttggggcacccgtttctagggaccccactgcgtcaggaccccgcaccctgtgcagctcaggagtcaaaggattccttttgtccagaagcccaatttgggaccccagaaagtgagtaggaattgctgcccagctaaccctacggcatcgagacctcacgcatgcgcggcacgcttcgaacgcgtgacccaatcccgcccccaggagaccccgctcctcccattctggctctcggggcctccccagcgaggtggggcgctcgcgctcccctaagggggtctggcctgcagagggcgggaccctcccagccttgaccttcgattggcccagccctcgccactgttgctttaggattggtcggcttgtgctcctctcccctccctccctggggcttccgcttccggttctgacggacgcttcggccgtaacgatgatcggagacatcctgctgttcgggtaattagggggaccagaggctgggaagagagagccaggcaggacgcgggggcgcccctagtaactgtaattctccctctgcaggacgttgctgatgaatgccggggcggtgctgaactttaagctgtgagtaggtcgcggccggactgcggctccatccggggaacccgtagccccgccctcataagcgtgatctcggcgcacttctcaggccccgcccccaagccgcaggccccgccctatccgccctctgggcacgcctccagcctggtttatcttcctcgccccccaccccccgagagaccttaaacccatactctccgttccttggttgtccctctgttcaccttcctggagagcttaagccccatcccccaagaaatagccccaccgcggaccttccgccctgcacccgcactgtcgggccactttgtaaacggtcggtggctgctgacctggctgtgattgtccgggcagtgggggcccagagaagggtattgaacgtcagaggtcacacagcaagtttgcggcagggccagggctgaaacttagtgtttgtggccttctgagctgggggtcagggggctgaggactctatgtcccattgaaagtggacactgtctgctcctctttgta

SEQ ID NO: 91173 - DNA, 1067 bp, Homo sapiens
gggtgccgctcttccccgtcttcgacctcagttacttcatcgtctccatcctctacctcaagtatgagccaggtgagccggggcggggggctggaggggaccggcagcgggtggcgcgggccggggcagctcgggggtcgcagagaggggaagcccgtgcgtggtggagggagcgagggacaggttcaaggattgcatcgtgggagtaggcaggcgctagaatcgtggggttctctcacgccggggtgagcccgggggagaagcccccaggacgatgaagctgggggaggggaaggagaggcgtgcgcgggtttagaggagggggaacaggtgcttggggtcggggctcctggttgggtcagagctgcaggaacttgggcaaggggcgccggctgtggcgagggtgcaggtgggggtcggtgcatctgttctggccgcgcgcaggtgtgacctccctccttgaccttggcacgcggattgagagcgccagcggagtgtctataagggccactgcgctgggggctgcggtcaggttcagcgaaagtgacaccggttctcctccccactgcaactgcccagcaccctccactcccctcccttcccccacggtgctgaatctccgagcccccacgggaattcttccagccctggctccagatcctttccacttacggagcagaaccggccccaaggctgggtgacttggggtcagtgtcctccatctcagctccagactccacgctggggaggtcacaggagggtacagcctgcttcttaatttttaaaatgaggatgaatggcttccttagaacgtgttctatttttataaaaggttcaccgtgaacaaatgtttaaatgtttcttgttcaccgttattctagaacaccagcaacttactagataatagattttaggcttagaaaaataaaggaaccccaaacttcataagcctttctcccacttagatgtaaattaccactatagctcagaaaggaaatagctttattctcagaggataaaaataagcgcccctgtttactaaaaactcaaactgaaaagggcaaagg

SEQ ID NO: 91174 - DNA, 1034 bp, Homo sapiens
cacagtgttgggtgggcgctctggattaggataggctgaccagagcatatgggagtgaagcctgcccttggcatgctggtgatgatgggggacactcctgtgcctcccaggagcagtcgaactgtcccggcgccaccccatcgcgtcctggctgtgcgccatgctgcattgcttcgggagctacatcctggctgatctgctccttggggagccactgatcgattacttcagcaacaactccagcatcctgctggcctcagctgtctggtaagccatgctgggcatgggagagcagagccgggtgggggaaacaacaacctgggcaccagggaggagagaggttggaggaattagaatgcaccagcaacagccctcatgatggccctgaatatgctgccctccatgcccatctctggtctaggcacagcacgttggggagggtggtctgatataaccacagctccctacccccatccttcacagtctgcccatcccctggcactcactgttctctccccaaaaggtacttgattttcttctgccccctggacctcttctacaagtgtgtctgcttcctgcctgtgaaactcatcttcgtggccatgaaggaggtggtgcgagtccgcaagatcgcggtgggcatccatcacgcccatcaccactaccaccacgggtggttcgtcatgattgcaactgggtgggtcaaaggtaaataggatgatgacaatgaaaaatcatcccagtggagaacttttggttcagtggtactaccaggcaccccagctaggaaagccattgctccaggcacaggggcataaagactgcagtaggtgttcaaacctccctacaggtatcagccgatacctttagggtaaatgggaagattcttctagaaatgttactgtcaggggtacctaagacagtgatgatgatgacaaaagccagcattgccagagcaggttttctcacttgcagcactactgacatgtggggctggatcattctttgtggtgggggctgccttgtgcactata

SEQ ID NO: 91175 - DNA, 1132 bp, Homo sapiens
tgatctgggctcactgcagcctccgcctcccgggtgcaagtgattcttgtgcctctgcctcctgagtagctgggactgcaggcacgcaccaccactccaagttcgtttttgtatttttagtacagacagggtttcaccatgttgaccagtctggtctcgaactcttgacctcaggtgatctgcctgcctcggcctcctaaagtgctgggattacaggcatgagccactgcgcctggtgggtcacattttaggttcctttgttgtctgttgagaaggtttttatgtggcagtatcaagggagtggggaatagattatatttttcatttatttcccaagacccttttgcccacttccgttgtttcttctagcatcgatactcctggagtcatcagacgtgtctcgcagctcttccacgagcaccctgacctcattgttggattcaacgcttttcttcccctcggatatagaatagacattcccaagaatggcaagttaaacatacagtcgcctctgacaagccaggtatgccactacagtggttcgggtgatctcagccttcaccgagtatgtcttgctactcaggttgggccacgtgtctctcctgtatcattgctagaaagccacttaagatctgttctttttctagacgtgctcattgcttctagcacaaatcaaaatagatatggaaacacctacacaagcagcctctgcctcccaaattgatctgtttggaagatttaaatcaagagtggatgtcagggaggtatcctcctaacgcagaattttgtgtgaagtctaaataaccacctcagcagttgctgaggtcttggcttgaggctttcccagcgagcataccaggcaggcttgcccttgtatttaagcatgtcctcgtctgcctctgatcactctcagtaccacctacaaaataaagtggtcgagatggtgtgtgagtagccacgtttatgttggctgtgtttcatttaattgttgataggatcattagctcagctgggactcctggctttgctttggtcccttttttcttgggtgataggtgctggccctctttttttttttttttttttttttggagacggagtctggctctgtcacccaggctggagtgcagtg

SEQ ID NO: 91176 - DNA, 1132 bp, Homo sapiens
tcccttgaagtccccaacaacctggacagtgggtcgcctctaacctccagggtccccatcttatatatcctaccttggcatcactgctggcagcagttgcctttccacgtgaaagcaatcttgctgaaacagattgcaggaggcgtgggagacttctctattatatgcagcccagcacttggcaccacagaggcttaaacatccactttgtacatttctcctgaatgtgaagttttccaaatgcaaggtgctcgttgaacttgttgtgttccttgagtagattggtaaggatcgggtggaggtgagctgggaagactcacctgtgcaccccgccctgcttgcctccaggctctcagaagtaacctttccctgtctctaatacagcttggctccgtgctgagttttttctgttcctgtgcagacagtggctgggcctggtgtttttcacaatctgtttccagtgtcgggcctggcagtaactcattgtcgccttgtcaggagaattcgcacaaccacggggacggtgcagaggacttcaagcagcaggtgccgtataaagaggacaaaccccaggtgcccctggagtccgattccgtggaattcaacaacgccatcagctatgtgaataagattaaaacccgcttcctagaccacccagaaatctacaggtcattcctggagatcctgcacacgtaccaggtaagaactcagattacaattccttgtgggttttggatttcatccagtttggggccctgcagatattcagattttcttgtcggaattcataaaatcctgtaaaattctaattagttgtggggttttttgtttgttttttcttagagtctggctctgttacccaggctggagtgcagtggcacggactcggctcattgcaacctccacctcctgggctcaagccatcctccaacttcagcctcccaagtagcggaggctacttggggctagaacatgggcgcacatcaccacacctagctaatttttgtaatttttgtagagacagggttttgccatgttgctcaggctggtcttgaactcctgaactcaaacgacccatccacctcagcctcccaaagtgctgggattacaggtgtgagccaccgtgcccagc

SEQ ID NO: 91177 - DNA, 1436 bp, Homo sapiens
tcattcatagaaaagacttcaaaacctggccccaaggcccccaccagtgccctggcaaacatcagccacttccccttgctgcctgtttctctgtccactgcaccttgtgtttctgtggtgccggcatgcacacggcgagatgccccaccagtggccgccacatgagcccccgcacgggaagacccaactcagctgtctccctcctgaaacccccagcccttctccctcccttatccataaaggcctcacaggagctttctcccagcctggcagtgttagtctgtgatgattcggttaccttggaatgtgagcatcttgctggagtcacctcacgcatggacggagcatctggcctggtgcccgtggccaccattgcccaccgggctgtgggctgagctggaagcagctctgcatgctcaggtgcatgggtccagccacgtctccggtgctgaccacctcccacatgtgtccttagttcacaggaaacgggccgtgcgagatgcacagcgtgcagaagaacgagcacgacaagaccccggagcacagcaggaagcgctcccggccctcgctcctccgccccgtgtctgcacccgccaaggtacctgtgagccacatgcagccatgcctgcacgcggggcccccagcaaatcgggccttcccagcatgtgaccagggaacagaggccccagcaggggttcggggctggaccgggggctgtgtgaggttcaccggcagtgggaccgttggaagtcagctctcctctaaggtggctgttcttccgttctccctgtcctgtgagattgttttgaaaaggaggaggaggaaggagtgttaaccctgccctaggtcccaagaaacagggtgtaccacccagtctccttttcaccctcaggactctctcacaggcaaggccgccatgtacgtttgttcaggttggtcactgcacagctgagggcagagaggggctgggatccagctcctgtcacgcctttcacctgcaatggtggttttccgattccattattccttgtgcagttactacttggctttctactattggtgggaactttgtcgtcctcccatttatttagttatgtatattagatatggactctgggttataatccattctagtgttgatgtccatactgttccagattgggccagcggggtccctttggctcttgtgtcctttttttctttcctttgagacagagtctcgctctgtcacccaggctggagtgcagtggcgcgatctcggctcactgcaagctccgcctcccgggttcacgccattgtcctgcctcagccttcctgtgtccttttggcatgtcctcatcattctttctcctgtggggggatggggtttcactctgccacctaggctggagtgcagtggcacagtcagccttgacctctgggctctagctgtcctc

SEQ ID NO: 91178 - DNA, 1040 bp, Homo sapiens
ctggttttggtctggtttgggtctggtctggtctggtctgtttggtctggtctggtctggtctgtttggtctggtctggtctggtctggtctggtcggttcggtctggtctggtctggtttggtctggtctggtcggtttggtctggtctggtctgtttggtctggtctgtttggtctggtctggtctggtctggtctggtctgtttggtctggtctggtctgtttggtttggtctggtctggtctggtctgtttggtctggtctggtctggtctggtctggtctgtttggtctggtctgcccacagcctgtcaggattctggtctcttcatccctgtgtcatgcactctccatcctgatgtgtttctggcctttgtcgacttcctctgtgggtgaggtggggactcccgcaggaggcggggtggccgcaccacctgctttcctcccgccagctgcaccacctcgtgagcgatgacgtctgcctgaaggtggtggagctctacctgaacgagaagaagcggggtgccgctggtgggaacctgtcctcccgctgcgtccgcgctgctagggagaccagctaccagtggaaggctgagcgctgcatggccgacgagaactgcttcaaggtgagaggaggcctggggctgggaacacgccgggaggcccggccgctcactccgctctggactcagtcctgggtggaccctggttcagcggctgggacaccggccctgctgcagagcccatgaggtacctttgacctgcaggaagcatcagggctttgggagggtggcaaaggcgggaggcgggtggccttgcgagcctgcgctgtgccggctgggctgtgccggcagtggaggctgtcagcgttcctgctccgcaggtgatgttcctgcagcgcaaagggcaggtgatcatgaccatcgagctcctggacaccgaggaggcccagacggaggaccctgtggaggtccaggtgaggccctggccccagtctgtgccacgcataccagggagcgcctgagggcagcagcatgggg

SEQ ID NO: 91179 - DNA, 1035 bp, Homo sapiens
ggatccttagtaacctttaactggggaaacccaaatctccagggccgtttctcacccgcatcaccattgacagttggggctgtgcactgtagaatgtggaatagtgtccctggctgtcacccatgagatgccagtagtattccatcccctccaaggggtaacaactgaaaatgactccagccatggccacgtgtcccctgggggcagaatcacctcccccgccaggtgaaatgtgatgctcattagtaaaacctggttcccctctagggcccatcattgccttggtgggtccttggtgtttgtggagcccctgaggaactgccactaagagtgggaacaggggcagagaccaggaactgaatcctgccatccagtcagttcttaatcaggagggagcgggtcttgataaaaaggaggaaccgttaggaacggactgtgggagggtaggcaacgtgcccgagggtggacagcgggtgcccttgtcttttctttgtcttgtgactgacctggatttctggaggaactgtcctcgtcttagaatgatctgttgcttttcttctgagattagaggtattagattctctcccaagagctactttggaggttgccccggataaacgtcgcttttgtaagctgcattatctcttccatgggccctttcgcccgcccgttcccaagcacatactgctgaatttttgttcttggtccatcttgctgtccccttccctgcttggccccctccttgaccgtgactttgctgctttaccttgattggaggagacgctctggggccacgggactgacggtcccttctgggtgctgcccccacaccccacccaccagccctttgtgtgcccggcatccccagcccagctgtgccaggctgcccctgctcggccggccattcagacggccccaggcggcctctcggcaaagcaagacaagcccttctcttctgccctcgtggtccctggagtggcagaacaaagggctctgtctccacaccagcccaccgccgcagcccagagccccgtt

SEQ ID NO: 91180 - DNA, 1026 bp, Homo sapiens
agattaggcatgtttcagaaatgcagctgacgagtttgggttctactcatttcctcagcgagactttctgagcccgagcccgatgataaataaagtagtgattcaagggttcagcccatgggttcgtcggagtgatgaataagatatccttgtctgactcacttgtttaaaacccatctctgccctgctgcacagggctgtatgtgcaagagaaggagccccgctaggggtgtttcatgactgttgttgctgggtgcctgagtttgctagggctgctgtaacagaaccgcacgctgggtggccagaacgacagaagtatattggcttgcagttctagaggccagacgtttaagatcacattcaagatcaaggtgttggcagggttcgtgccttcggagggctgtgagaatctgttccacgcctctctctgttggctcatacatagccgtcttcccctgggtcttcacatcgtcctccctctgtgcctgtctctgtgtccaaatttcctcttatgaggacagcagtcatatggaagggggcccaccctaatgacatcattttaactgaatcatccccataaagaccctgtctctaggcgaggcttggtggcacacgcctgtaatctcagccctttgggaggctgaggcaggaggatcacttgaggccaggagtttaagaccagcctggacaacatagcaagatcccatctctacaaaaaaatactaaaattagctagacatgatggtgaatgcctgtggtcccagcactttaagaagctgagacagacagatcgcttgagcctgggagtttgaggctacagtgagctatgatcatggcactgcattccagcctgggtgacagaacgacacccccatctcttaaaaaaaaaaaaaatcccaaatatactcatactctgaagttctgaggtttaggatttcaatatgtgaatatttctttgtggaggggagtggtggacacagctcagcccataatactgagaaaaggacaaattcaaattacattttt

SEQ ID NO: 91181 - DNA, 1074 bp, Homo sapiens
aggctgaggctgtagaatcacttgagcccaggagttggaggttacagtgagctatgattgtgtcactgcactccaacctaggcgacagagccagatcaaatccaggaaaaagataactgtctgcaaagtcacattccacagaggccatcctcaacagaggccttagacatttttcaaatttcatgcgttccgaccagaatttgctggttttatggattcagcccggttccctgggaagtatctgctgtcttaggaacgtagaaactacccaaatatgagtgccttttctttcccaggatttttgccgtcctctcggccatcctgtacctgggcaacgtcacttataagaagagagctacaggccgagaggaagggttggaggtcgggccacccgaggtgctggacaccctgtcgcagcttctgaaggtactgattgccacctctgtcccttctcaggcctggctcagggccgctggctatctctcagtacgagggaccatacccagaacttcctacgtcagctgaggtttcatcaaccaggacctcacgtcttccgctatcatctctacagtgttccttcctcatttctgatgagctctgtggacaggggcacctcctcctcccaccctcaagtgaaagcctctttaaaactacagctcaggggccgggtgcggtgtctcacctgtaatcccagtactttgggaggccaaggtgggcggatgacctgaggtcaggagttcgagatcagattggctaacatggcaaaacctcatctctactaaaaatacaaaaagaaattagccagtggtggtggtacatgcctatagtccaagcaacttgggaggcagaggcacgagaatcacttgaacctgggaggcagaggctgcagtgagccaagattgcgccactgcactccagtctgggcgacagagcgagactctgtctcaaaacaaaacaaaacaaacaaaaaaaaactacagcttggggctgggtgcggtggctcatacctgtaatctcagctactcgggagaccgaggcaggaggatcacttgaggccaggaggtccagactagc

SEQ ID NO: 91182 - DNA, 1039 bp, Homo sapiens
tcactaccaatatccttggtgggcgacctggaacatccggagccgaggcatctgcaatcaagaggctgtttccccacaaggacaggcccaggaaacaggacaggctacgaaattcaacaggcccagggcagaatgaaaacataaggccccttattcaaaaacgacagattctggcatgtacctgtggtcccagctactcaggaggctgaggcagaaggattgcttgagcccaggaggtcaaggctgcagtgagctgtggtggcgccactgcactccaacctgggcaacagagcaagaccccatctccaaaaaaaaattatggattccatgctggtaatggcaaagtgttctgccgagcaacagggactggggacctaacaggtcacagcctgtagagccaacccctctcatgaaggctggctccctcggggtgcacctgcgggcagtgaccattttctctgtctctcccagtgcctgtccattggggtcctggacatcttcgggtttgaagacttcgagaggaacagctttgagcagttctgcatcaactacgccaatgagcagctgcagtattacttcaaccagcacatcttcaagctggagcaggtgcggaaagggcttttttgtcaattttttgaacttggtaaatcagacatcacgtgaaatttaccatcttaaccatttgtaaatattcagttcagcggcggtaagtacattcacatattcgcattgttatgcaaacgccaccaccatacatctccagaactctttcattttgccaaactgagactctgtccccatgaaacactcactccccattccccctcttgcaagccctgaactcaccccattccacttttttttttttttttttttttgagacagggtcttgctctgtcacccagctagagtggtataatcatagcttactgcagcctcaaactcctaggctcaagtgatccttcctcggcctcccgagtagctggaaccacaggtgcacactaccatgcctggctaatttttgtattttttgtagaga

SEQ ID NO: 91183 - DNA, 1117 bp, Homo sapiens
ttcatgcctgcaaaggttccatgttctgttcccagcttcccccacgccacgagccagaccctgctggccaagttcaaacagcaacatgaggacaataagtacttcctgggcaccccggtcatggagccagctttcatcatccagcacttcgcagggaaggtgaaatatcagatcaaggtaggtgtctgcccatcaccactggtggaagcctgagggaagccacagtcagcccagaagcccatgtgggaggatcctcctgtgggcgaggttccaggtgctcagaacccaccgcgaatccccggctccaatgtccaaggcgccatagttcaagaactgccatttgcacttaggatgggccccaccccaccgtcagcccttcctgcgccagcccggggtctttggtaggcgccggtgagtgactatccccgagtgaccgcccacatccatcccccaccaggacttccgggagaagaacatggactacatgcggccagacatcgtggccctgctgcggggcagtgacagctcctacgtgcgggagctcatcggcatggaccccgtggccgtgttccgctgggccgtgctccgggctgctatccgggccatggcagtgcttcgggaggccggacgcctgcgggccgagagggccgaaaaggctgcaggtgggagctggggcgtgaacccacaaaagcgtcactgtcgagaggggggcacatcctgagttcatcttaaagtgaacacttcagtggcatttagtacattcattatgttgtgcaaacgccacctgtctacctgaagtgttcctgtcaccctgaacagaaactcgacctgcgtgtgtaatttaacctcagggcatgctatcagcaactccatcaggcgtctcctttgcaaatgatgccctctgatcccactggccctgggagtttgctgattgtgataatgtagctcttcctagtgttttgcctcttgtttctctctctctgtcttgctctttttttttttttttttttttagagacagggtctctctctctctctctcttgcccaggctctagtgtaatgacgcaatctcggctcactgcaacctctgcctcttgggttcaagcgattctcctgc

SEQ ID NO: 91184 - DNA, 1106 bp, Homo sapiens
ttgaactcctgacctcaggtgatccgctcacctcagcctcccaaagtgctgggattacaggcgtgagccactgcgcctggccagctttggttttcttctttcccaccagcatgatcctgaaaggagctcccacccaggccccattttggttattttgcagggcaagtccctgccctgccagcagagggttccagaagggcctctgtgggcctgcttggcatctaccagcacatggcaaagacagcctggtcacctggtcaccaccaggactgctcaggctccctccgccccactcggcatcctgctgtgatctgggggatatgtcagttcctccatagcaagccccgctggatgcacgtcccaccctgtagattcctagccagcccctcctacttctcagacatccgaatggcccccagactaaacactttactcagctttggggcagccaccagcagagtccgggtgccgccaacccagggaaactggtgtccacagacagtggctgaggcacgccacggtgtgcagcgtggagaggtggcggtggccttgttgcacttgcgccttctcactctctcccctctctctgtgtctctcagtctaacccgccaggcgtggcttgctgaactaacccaaatcccgacactgtgttccttttgttcacaaaaccatttttaatattttgacaggaaaagtaaaggtatcaaacaaaagcagatcattccaaaggtaaaaaaaaaaacacaccccgcgcgacacgttccaagatatcttgcttctctgcccgtcttgagagctttcacttctgcaacttcatttcctcctccttcccactatctccccctccctccaagaaaaaaaaaatgttctcgtgttgagatgatttagagctgtctctttatgggtttcccagaagcagggtctgagatggggtatttgcacacacagcggcttatggaagagggcttacgtgagaaggcagagagaaggggtgagggaggaagctaggggcgtaagcatagctgaagtctggcctcagcctggtcccatggggagctctagtgggttcatagcaccacagagctcatcctgccccaacgtaatgg

SEQ ID NO: 91185 - DNA, 1526 bp, Homo sapiens
cggtacctggacgccgagcggctggccagcgccgtggaactgtggcggggcaagaagctggtggccgccgccagccctagtgccatgctcagccagtccctggacctcagcgacagacaccgggccacaggggccgccctcacgcccacagagtaagccccacaccctcttttgtctgagcaccagggtccaggccaggtgggcaaggccaggggcagtgccacacatcctggaaacacatgtgtaatcatgcccagtgggtgtgcgggaggcctgagggaggaggacgagcaggacatgctaaagaccaagtgaagacaaggcagccagccagggcccaggctgggacctggagccttgaggggtccccagaaggagctgtgctcacacagaaaggccccggccttgagagaggtggctcctcaggtcaaggtccctgctgcccagaaatcttgggccttggtttctaattggtgaacaggactaactgcactcctcggggttaaaggagcaggggcttgctctgcctgagccttagtaagccaagtgtcagtgacttggaatctccagctccctcttccagagggcctgcaggaccaaaggaaagaaatcagggaggagacaggccttccctgcagcaggcctgctcagcctcccactgctcgtattgggggccagatcattctctgcggtgggggctgtcctgtgtatcataagatgttgagcagcatccctggcctccacttaccacatgccaggagtattatcgatagatgatggatggagggagggagggagagagagagagagggaaggatgtgtgggtgggtgggtgggtgggtggatggatggaagatagagatgatggaaggatggatggaaggaagatagagatgatggagggatggatggatggaaaatgatagaggtgatgaatggaagacagatatagatgatggatggatggaagatacacatgatggatgaagggatggatagatagaagacaggtagtaatgatggatagaggcatggatggatggatgatacagatgatggggagatggatggatagaagatgggtagaaattaggctgggcgcgatggctcatgcctgtaatcccagcattttgggaggccaagagtttgagaggagttcgagaccagcctggccaacatagtgaaaccctgtctctactaaaaatacaaaaattagctgggcgtggtggcgcatgcttgtaatcccagctacttgggaggctgagacaggagaatcgcttgaacctgggaggcagaggttgcagtgagccgagatcaagtcactgcactccagcctggatgacagagatgagactccgtctcaaaaaaaaaaaaaaagtagagattatggatagaaggaagatagatgccgacgatagatggatggaaggaagataggtaggtagagacaatgaatggagggatggaagataggtagagatgatggatggctgggtgggtggatggatggatggatggacagacag

SEQ ID NO: 91186 - DNA, 1092 bp, Homo sapiens
tgtggcctctggttctgcagaacacaccattgtccccggttctgtacaaactccttgaggccctcaggcagggcccaggcctgtgtgtgtgtctcagctcccccagccctgctcatccttgctcctgagagagtcctgagccatgcagagggaggccccccaactctgtgcataaggttggggtcctgggtgctgggggtgcagcaagagtcagggtctacttctgtgaggtggctgtgggggctaggttatagctctctccccacgaaggaccacccatgccttgggtggcctacaaaggaagcccctgcccagtggctgccatgctggccttgacttctgcagccccacacccccaacaaccacgcagaaggagacagggagggacagaacagcagaggaagccctgagggccttgtgcgggaccaggaggcagaggcccccagagacagctggagaggaagacagccaggcccagacctgacccccaaccccggcactgcagggcgagccaggcgttgagcctggccacttcggcgtgtgcgtagacagcctgaccagcgacaaggcctcggtgcccatcgtgctggagaagctcctggaacacgtggagatgcacggcctgtacaccgagggcctctaccgcaagtcgggtgctgccaaccgcactcgggagctccggcaggcgctgcagacaggtgggcgctgtgggcaggtgggtgcagtgccaggccccaggcacagccgtcctgccagtgcgccgctcaccagacccaccccacccaccccacagaccccgcagcagtcaagctggagaacttccccatccacgccatcacaggggtgctgaagcagtggctgcgggagctgcccgagcccctcatgaccttcgcacagtacggcgacttcctccgagccgtcggtgagccccatggcggtgcgggtggcagcaggtggccacagccaggatacagcgttcgctgtgaccagcccaggaggcaggaccacccagttcacaaactgagaaactgaggcccaaagcagtcggcccagccaaaccgggtccccagtttggggtggggccaggacacc

SEQ ID NO: 91187 - DNA, 1046 bp, Homo sapiens
tctctctcccagccatggcctctcaaactggggttttcgtctccctatgagggggtcctggtatgtacgcgttcggtgggcccgcggtgcatgtctcccggtgcagtgcatgctggggttccctggggccctgggcccctcgtaggatagacagagcctgtcctaaccttccggaagtgcatgctggggaggccccttgcctgctgaccttctgtgctcaggacgactaatcggccacatgaccaccactctgtcccatgggattcctagagaagtctcactaagagcccagcacactcacatcacaactaacctcctgggatctgctcacacctccggcagtaacctcgcccactcagagatgtcagtgggaccccttgcttctttgtttcagaacaagagccccaagacccgggacatccaggaggaggagctggaggtgctgctggaggaggaggcagccggcggcgatgaggaccgggaaaaggagattctcattgaacggatccagtccatcaaggaggagaagcaagtggctcagtcccctccctcagtccttcatgtttagggcaagctggagtgcaggttccatccctggtggtccgcttgacctcgccaggtttggtcctgtcatccctaacactgggcaaacaacactttttttttttttttttttttttttgagacggcgtctcgctctgtcgcccagctggagtgcagtggtgctatctcggctcactgcaacctccatctcccgggttcaagcgattctctgcctcagcctccgagtagctgggattacaggtgcccaccaccatgccctgctaattttgtgtttttaatagagacagggtttcaccacattggccaggctggtcttgaactcctgacctcaagtgatccacccaccttggcctcccaaagtgttgggattacaggcgtgagccaccgcactcggcctttatttctgagacagggtctttctctgtcacccaggctggattgcagtggtgcgatcacggttcactgcagccacaatcccctag

SEQ ID NO: 91188 - DNA, 1181 bp, Homo sapiens
cgtgtacatcacgcccggggcagacctgccagtgcagggcgccctggagcccctagaagaggatggccagccacctggggccaagcggaggtactcggatcccccaacgtactgcctgccccccgcctcgggccagaccaatggctgagagccacagctgacaaagtctgcatgtccgaggacggcccctgcactggagctgggcgccagagctgcagagctagtgttcggccctcagagaaggatccagaatcaaaagctcaagagtgacgtgaggtgggcaccggccccaagtgcagagtcaaggcagggagaggccggctggagccaggccccctcgcacgcagcccccaaatcatggacgcacctgtggggagcaccacatctccacctgcggcctcacatctccccactcccctttttgtacgtttaactgtttctttgtacgtggtttacgtaactttaaactgtaacagccttaatggaagaccaaatggttttttatatgtgtatgtacaaagttttctattaacgctgcccgtctcccttataacctggacgtgagctgtcagagcagaagccactaggccactgcgcgtctgaggctcagaccctgctgtggttggcttggggtggccaatgggctgggaccctccatgagagttttggacacttgggtcacctgacccgtgcctctctgacacatgtctccggggggcagccacctggccaatgtgcatttttgcacatgctggaaccttccatgggggtctgggctattggctggagccaggacatgagtcaggggcaccatggacctcacgtgccagggagacttgaatgtggctgtcactcttccggacgccaagggctgcaggaggctgcttttggcactacccaccccgtgtgacagaataggagccagcgactcaggactgctcacgggtcaggagggcaacgcctgaagtcagacctccctataggtcaacagggacaacctggggatctctggagcagggccctcctctctcaggcttggcccactcccccagacacctggacacgtggccacaaatctgggacaaggggcccccgcacagcatgaaataaaaagtgcctgagaagtgtgtgcatgggacgcctgctcatatgggatcgggcttggaagaacagggccggtg

SEQ ID NO: 91189 - DNA, 1056 bp, Homo sapiens
aatcccaggctacagaaatcgggaagggtgtgtggacgtgaaatagctccgactgggaagaatccaggtaggagtggggtgcggggaggtactttgagcaggcaaaacagaacaaaagggcacactgcacgcgggtctgacaccagaagaccccggtcgtcctatcattcccgaagggttaacatgctctcgaggaaaagcaagtgattcgcctaagtaagaatggggtggcgcctctcctatttttttaaaatagagatagagtagcgctatcttgcccgggctggcctcaagcaatcctttcccacctctgcctcctaaaatgctggcattacagccctgagccaccgcgcccggcccagcgccccgtctcaaaacaagatattacttccgctccaaacaaagatgggccagctaacgagcgcgggggaaacatccgcccggaaggccacttgaaggcacttccgccctctcttaacatggagccggcggaaggggtggtgtagggccgggcgataatggcggcgtcgaggctggagctaaacctggtgcggctgctatcccgctgcgaggcgatggcagcggagaaacgggacccggacgagtggcgcctggagaaggtgaggggatctcgcactgccgcgtagagcccgactcccggggggtgattcctagggttggaagccacctggcccgactccccggccccagtagcctctcgggcagcgccctttccggtcagtcccgccacgtccacctgtagcttccgcccccgtccctgggactccgcccctcccccactggccccgcctcctttacgcttgacccctcccatttgtcggccccgcccccccgactcccatgatcaggacatgggaaagacccccgggtgacaatccacttttcctccccagtacgtgggagccctagaggacatgttgcaggccctgaaggtccacgcgaggtgagtgcaggcagcctcagggctttcacatcagcacgtggctgtgctactggacatcccagtaccgctatcccagctgggacccttccctg

SEQ ID NO: 91190 - DNA, 1033 bp, Homo sapiens
tcacaccactgcactccagccggggcgacagagcaagactccgtctcaaaaaaaaaaaaagcaaaaaaattagccaggcgtggtgacgcacacctgtagtcccagcatacttgggaggctgaggcaggaggattgcttgagcctgggaggtagaggttgcagtgagctgagattgcgccagtgcactccagcctagttgacagagagagactctgtctcaaaaataagcaaataaataaattttttaaagctaggcactcccagcctatgggaccaaggctaggctggagggagggacctggggtctgagggaaccgagacaggagtaaggagaccctcctagaagagggggtattcaagcatggtcagaagccaacggggcagcagacaagatgaggaaacagcattccaagcagtagacccagcacaggcaatgctcaggatgccggaaacgggaaaccaacactcgccttttttgcttggcctgttttgctttcagagcctgagatggacgtaaggaagagaacgtgagtgtctgcggccctggggcagtagtggcaattgggcggtgcggcagggacggggtagcagtggccaaaccctggaccaccgaggcactaccacaaggatctaaaccaaccagaagccacttctgtggatgctcttcccagaagtcaaaggccaggcgcagtggctcacgcctgtaatcccaatactttgggaggctgaggcaggcagatcacctgaggccaggagttcaagaccagtctggccaacatggcaaaaccctgtctctactaaaaatacaaaaaattagccgggcatggtggcatgcgcctgtagtcccagctactcaggaggctgaggcaggagaactgcttgaacctgggaggtggaggttacagtgagccgagatcacgccattgcactccagcctgggtgacagagcgagatgctgtctcaaaaaaaaaaaaaaaaaaaaggtcgggcgcggtggctcacgcctgtaatcccagcactttgggaggccgag

SEQ ID NO: 91191 - DNA, 1046 bp, Homo sapiens
tggcacgatctcggctcactgcaacctccgcctcccaggctcaagcgatcctcccattagccttccgagtagctggaactgcaggcacgcactaccatgcctggctaattattcttatttttagtagagacggaatatcatcatgttggccaggctggtcttgaactcctgacctcaagtgatccacctgcctcagcctcccaaagtgctgggattacaggcgtgagctactgtgcccagccccagctgatttgtttttgcagagaagggatcatactatgttgccctggctggtctcaaatcctggccttaaatgatgcttctgccttggcctcccaaagtgctgggactgtggccgtgagccatcatgcccggccccctgttcttacccacagtggcgagtggtgtcccctagtcacccctgtgggctctgtgttctctagctgcctcccacctgtctgacttgcctttgtccccctagacgcctgtggcctctcagacccggcccacgttgagagcctgcaggagaaggcgcaggtggccctcaccgagtatgtgcgggcgcagtacccgtcccagccccagcgcttcgggcgcctgctgctgcggctccccgccctgcgcgcggtccctgcctccctcatctcccagctgttcttcatgcgcctggtggggaagacgcccattgagacactgatcagagacatgctgctgtcggggagtaccttcaactggccctacggctcgggccagtgaccatgacggggccacgtgtgctgtggccaggcctgcagacagacctcaagggacagggaatgctgaggcctcgaggggcctcccggggcccaggactctggcttctctcctcagacttctattttttaaagactgtgaaatgtttgtcttttctgttttttaaatgatcatgaaaccaaaaagagactgatcatccaggcctcagcctcatcctccccaggacccctgtccaggatggagggtccaatcctaggacagccttgttcctcagcacccctagcatgaacttg

SEQ ID NO: 91192 - DNA, 1074 bp, Homo sapiens
tggggtcaaatatcacttccaaagtcgctgtggctacggaggcggcagacggagggaggctggggtggcacggggcggccttcttcgcatgaggggcccagcggtgggggtgggggtgggagctgggcttgcccatctcagggaacccctctgggctcactctgggccttgggtcaccggaaatcgccactggaaggccggcagggccaccggaattgactgaaacgtccctctcccccaggggtgggtgcagacctggggctcctggaaaaatccctcaaactttgggtgtctctgagacgggcagggagtgaaacgtttccgagcaggagccttgggctgtcccaggtcggagacctctctggcagggcgtggccttgctagctgttctggcggaaggtccccagggaaagcgatcggggttgtccagcccgggagttcttttctcaccgttcccgggcgagcatccgatctgtccgtttataagcccctactctgcaccccaggaacatgcagggtctctgtggagcccgtctagacggtctcagttcccagctgcccaaaacagaggcccaaaggcccagagagaggtcctggtgcctgctttgcgttggacatggagggacgctgcccgagttgggggcactgtgggggaactgtggggctagggtggggaccgctgagttcggatcggagtggccccagggagaacggctgatggaaggcttgttggctgaggccaccaaatagggccccaggtacccgagggtggagtttggccccaggtcccgggtcagggctggcctggtgtggccatgtgtggcagagctgccttgctccctcctccagcacaaagtgggccactagactttggcctcattcttgctgctggaaaaccgcctgctctctggtcatatctttagggagggtaagggaggggggctcaggcagttttggggtcccaggagcttcctgagggtggtgtcagggagcagcaattttgggtggggggggccttgcttggagctgacaggtttgtgctgtgtcagttgtgtgacctggtgaaatcaccat

SEQ ID NO: 91193 - DNA, 1373 bp, Homo sapiens
gagtagctaggactacaggtgcctgccaccacgcccggctaattttttgtattttttagtagagacggggtttcactgtgttagccaggatggtcttgatctcctgaccttgtgatctgcccgcctcagcctcccaaagtgctgggattacaggcgtgagccaccgcgcccggcccacactggggactctttgggggccatgactgggacctcttcagatccttaacactgggtccatggcggggaatgtttgctgaatgtgtgaatggtttctgcttggcaaactcctcttcaccctttagaacccaccccagatgtcccctcttctgagaagccctccagggatatgaagggcctgttggggtaacctctgcctgaacagcccttcactgacccccgcctccccggcaggatatgtttgccttcatgggcagcctggataccaagggtaccagctacaagtatgaggtggcactggctgggccagccctggagttgcacaactgcatggcgaaactgttggcccaccccctgcagcggccttgccagagccatgcttcctacagcctgctggaggaggaggatgaagccattgaggttgaggccactgtctgaaccatccctgtacatctgcaccttcttgtgcaaggaagtccttggcctaaagccttggttctcaaactgggttccttgggacctccggggtgggggggttccaggaggcacgtagggtaccttgcagggtcctaggagggaaacccaggattccaggagggatcccaggaactgtgggcacccattttctgtgtctcccagcccatttccactcctagtttgtcatggataatttttgttcttccctgtgtgatttttgccatcaaaataaaaatttgagactcgttaaccgaagtccacgccaatcactttgtgttaatggggatcatcttcattgcaagtgatggaaaacttagccactgagcaaaggtgagtggctgctttcttgtagatgaaaaagccccgggatgtggaggttgcagcgagttgagattgcaccactgtactccagcctggtgatagagtgagagcttttctcaaataaaaaagaaaaattcaaaaataaaaaagatgaaaaagccaagagaacagcttcaggcttggctgtgtccaggtgctaggacaacattgccatttgggagggtactacatggttgctagtcaatgtgccctgcttaccccccaaccaatggaaaggtgtgtgatggcttcaaccactccccagaccccaatccaggtcaaggcagagttctctcagcatctggatatgattggactcccccggggggatacatgaccttcaattaagagctagtcat

SEQ ID NO: 91194 - DNA, 1558 bp, Homo sapiens
gatgagacgctggactccatagcactccaaaagcagccatgcagaggtgacaacagggacattggcttggaggctgacccaggaccccccagcctccctgttccccttgaaactgtggacaaacatgggagctcggcgtcccctccagggcactgggattacagctcagacgcctctttcgtcacagcggttgaggtctctggagctgaggacccagcctcggacactcccccctgggctgggtcattgccaccgaccaggcagggacttctgcatgttgtccatgccaaccagagggtacctaggtctcagggcacggaggcagaactgaatgcccgtctgcaggccctgactctgaccccaccaaatgctgctggcttccagtcctccccttcctccatgcctctcctggacaggagtccagctcatagccccccacggacaccaacccctggagcttctgactgccactgcctgtgggagcaccagacatccattgatagtgacatggccacgctctggctgacagaggatgaggcaagctctacaggtggcagggaacctgtcggcccttgccggcacctgccagtctccactgtgtctgacttggagttgctgaagggactccgagcacttggtgagaatcctcaccccatcacacccttcaccaggcagttgtaccaccagcagctggaagaagcccagattgctcctggttagtcttcccagggcacatggagtccagggagcctccaggaatctcccggagaaccccagctctcagccccactttcctccccatctcagaatcatcccttcctccatctcccttgacttccaggcccagagttttcagggcacagcctagaactggctgcagccctgcggacgggctgtattccagatgtccaggcagatgaagacgcgctggcccagcagtttgagcagccagatcctgccaggaggtggcgggagggggtcgtgaagtctagcttcacctatctgctgctggaccccaggtactcagggcaggaaagccccagaaatagaaactagaaaatttggggattggtttttatttgctgtgtgcccttaagaaagggactggccctagaatcatcagctgcttcttcttctttttttttatttttttaagacggagtttcactcttgttgccaaggcaggagtacaatggtgccgtctcggctcactgcaacctccacctcccaggttcaaacaatcctcttgtctcagcctctcaagtagctgggattacaagcacctgccaccacgcccgactaatttttgtatttttagtagagacgaggtttcaccatgttggccaggctggtctcgaactcctgacctcaggtaatccacccaccctggcctcccaaaatgctgggactacaggtgtgagccaccgcaccggcctctttttttttttttttttttgaggcggagtctcactgtttcgcccaggctggaatgtagtagcgcaatcttggctcactgcaacctccgcctcctgggttcaagtgattcttgtgcctcagc

SEQ ID NO: 91195 - DNA, 1059 bp, Homo sapiens
cctggcttcatgtgatctacccaaagtgttgggattacaggcgtgagccaccatacccagccgcctgctgtcacacacttctgctggatggggaggtgtccccatggctgcccctgtgaccccacatccaatttctccagggatccagacgctcaccaaccagaagcaagggcactgctatggagtggtggcaggctggccacctgctcgtcgccggcgcttgggggtgcacctgctgcaccgtgccctccttgtcttcctggctgaaggcgagcgacagcttcatccccaggacatccaggcccggggctgagtgctggggagttggccatccagcctggggagaaatgtttgaatgttccagctgccccatgctgacagcagcccccatctctggtttcagaaggggtgtgtgtgtgtgtgtgtgtgtgtgtgtgtgtgtgtgtgtgtgtttgtgtgtgtgtgtgtgtgtgtagggagcacccaggcagatctcccccaggctgagagaggactttgttacagatggtactgctggagaggtagtaagtagtgagctccccatcgtgggaggaggacaagaagggaagcagaaggtgctttggaacagtccggtgcttctgtaagaggcgtttgaacctgggcaactccacctggaataggagctgggtaaaatgaggctgaaacctactgggctgcattcccagatggttaaagcattctaagtcacgggatcaggtaggaggtcagcacaagataacgggtcataaagaacctgctgataaaacaggttgcagtaaagaagccggccaaaacccaccaataccaagatggcgacaagagtgacctctggtcgtcctcattgctacactcccaccagcgccatgacagtttacaaatgccatggctggccaggcgcggtggctcacgcctgtaatcctagcattttgggaggccaaggagggcagatcacctaaggtcaggagttcaagaccagcgtggccaacgtggcgaaaccctatctctactaaaaataccaaaattagctgggcatggtgg

SEQ ID NO: 91196 - DNA, 1050 bp, Homo sapiens
gctacctgttggtgtgtatgcagagcatccctgtgccccgcggatatagactggcgcgcctctgttgcgcaggcgcagaactacaacttcagggttttccccaacggcctcttttttgcacgttaggagaaactacatttcccataatcctttgttccagggctggagcggctctgggctccggaatcgcccgcagccggtactgcgggacccactgcggatatggctgtcttggctggatccctgttgggccccacgagtaggtcggcagcgttgctgggtggcaggtaagtcctcagggggacccttccccaaatcagggaataagggcggcttcggaggctggcgccactcttcactgcccgcgtgacctgccagtgccttgcgcattttgcagccaggctctgtctccgggagccgaggctcagagaggttgagcgccaaggtcacccagcgccccgtctgacctttctcgccgtccctctacccacgcaggtggctccagccccgggcctggctggggttcccagacgcctggggcctccccaccccgcagcaggcccggggcaaggctcgcgggaatgagtatcagccgagcaacatcaaacgcaagaacaagcacggctgggtccggcgcctgagcacgccggccggcgtgcaggtcatccttcgccgaatgctcaagggccgcaagtcgctgagccattgaggatcgcgacgcagtcggcgggaccctcatggaagcatcgccctcgcctcggaccttgcctggcgctatttttgcagggagctggggagcaggaacgcctcggacctgagtgctctccatattgtggggttgaagtctggatgggagcttgccaagtccctttttaggctttttaattaggaagcatttcgaacctgcgcaacagaccaaagaacagtacaaagaacatccgtgtacccagtaccctgactaccgactacctacaacccgtccctgccccatcctgagttcttttgaagctgatctcaggcatcggattatttcttctgtaaatatttcag

SEQ ID NO: 91197 - DNA, 1021 bp, Homo sapiens
atatatatatatatatatattagccgggcgtggtggcatgcatctatagtcccaggtgggaaaatcagttgagcccaggagctccaggctgcagtgagctatgattattccagcctgggtgacaagagtgagaccctgctcttaaagcatttatccatctggagcctgtggggtgggactgtgtggtcactgggcacagatatgcggtatgtgctcctagtcagcctgggagaaacataggcatgagagtctcagttgcggggcttggtcccccaccaagggtggaatcccttgcagggagccgggaccctgaaagcagctggctcaggcctctgggagtagctgcgagtgtgctcagaagcaaaaacatgggacttttggagatctctggagttgggggtactgagttccagccccaaaaagacctcccagggcagtgtcaggggaggagcctggggaggggaggcgtctgcgactttctctatctttcctccttagtcatcgtgacagaaaagacaaacatcctcctgcgctacctgcatcagcaatgggacaaaaaggtgaggcccacagggctctggtgcagggattgtgggtggacagagactgggcacctggcaggggcttctgagcacaggaaggactctagtgattggagcagggccttgagggctgggtaggagtgccctgggcgatccaggagagggaagagcgttccagtggagggaaccgctgtgcagaggccacaggacaccagtgctcaggaggctggaggccaggcccaagtagccgccaggcccagttttccatggctctggcattaggtagactgtattggtatgaactagatagaatattttctgaggccgagtgtggtgacgcatgcctgtagtcccagcgctttgggaggctgaggcgggcggatcacgaggtcaggagatcgagaccatcgtggccaacatggggaaatcccgtctctactaaaaatacaaaaattagctgggcgtggtggcacgtgact

SEQ ID NO: 91198 - DNA, 1014 bp, Homo sapiens
ttgaaggttgcggtgagcggagatcacgccactgcactccagcctgggcgacagagtgagactgtctcaaaaaaaaaaaaaaacatggttcctcaccagaaccccactctcccagttcctttacattctccccgcctgcccctgcacctacaatttctgaaggagaatcagatcttctatccgtctagaacttctcccctggaaagagctctagaggtttaagagcaggcaaaaagctgtgacttgggtttcagacaaagaggggctagccaggctaggcacaggtggaggggcggggatcacctgtgctcctccctccacagtcccggagctggcagcacgtgggatcatccagcaggtgttccctgtccacgagcagcgtattctgaaccgcctcatgaagtcatgggtgcaggccgtgtgtgaaaaccagcctctaggtgctgcctgggctggggggtgggagggagtcccagcagacaggcagggggtgactgagacccacttgtcccctggcagatgacatctgtgattactttggtgtgaaaattgccatgtacttcgcctggctgggcttctacacgtcggctatggtatacccagctgtcttcgggtctgtcctgtacacattcacagaggctgatcaggtactgggcagggaccctgcaaggtctgggggatccagaggcgccctcctttctggactggcacaaacaatgactcaactcttctctgccactcacagacaagccgggatgtttcctgcgtggtctttgccctcttcaacgtgatctggtcgacgctgttcctagaggaatggaagcggagaggggctgagctggcatataagtgggggacgctggactcacctggggaagccgtggaggagccacgcccccagttcagggtcagttgggggctgagtccagggtcatggagacaggacaaaggtaaatggtggggggcactgcaggagcaaaggcagagaggtgtgaaacaggattgtttcatcaa

SEQ ID NO: 91199 - DNA, 2297 bp, Homo sapiens
acagatgaatacaggctggcacggcctaggcactcagtaacacacagcagaggcacagggacttaagatggagtgtcccaggcagccacagttggctggcacccagctgggaagggcccaagggcttttaaagcagggtgaaaaaaaagcccacctcctttctgggaaactgaaactgaaaacctaattaatcctctgcctgtaggtgcctcatgcaagagctgctggtcagagcacttcctggaacttgctattggtcaggacgtttcctatgctaataaaggggtggcccgtagaagattccagcaccctcccctaactccaggccagactctaaaggggagatctggatggcatctacttcgtatgactattgcagagtgcccatggaagacggggataagcgctgtaagcttctgctggggataggaattctggtgctcctgatcatcgtgattctgggggtgcccttgattatcttcaccatcaaggccaacagcgaggcctgccgggacggccttcgggcagtgatggagtgtcgcaatgtcacccatctcctgcaacaagagctgaccgaggcccagaagggctttcaggatgtggaggcccaggccgccacctgcaaccacactgtggtaagctcctcaactcctttggatggcctagtactaggcggtgggagggacaagaatctctccccagaaatctgacccagggtgggtctccagggagatgcaggggaggtcctgaaactgctcctgggcccccacatcaagggacctaggttcccctaccagggtttgtgggcccctaacccagtccagggcactggtgtaggggcagggtgttaaaactctccagatcccccaaatcggggacctcagtatccccctgggacttaggtgaatttataaattctttccagggcactggtgtcgggggccttgaaactcctcgtgggcaccagtcctgggggagtagaaatccctattcagggttgaagggggacctcaccagaccctgaaaaagggggcttttgaaattttcacttcatccctaagaaactgaaatattcacctgggtcctgatatgggggatcttgaaactctcgctgggcatgtcacttgggcggggaaatcccactgcattctggatttggtagggccctctaacttttcttgggccattgctcaggcaatctggaaatgtccactaaactttggttatcgatagcctccaagtttccacgtggggtggcctcaaaactcccattttgaggacccacatgcttatgggtggccctgggagagtgtgtggttgtggctgttctttaaggttggagaccatggtgcagagagggttggaagaaaacctgaaaggggtttgcatttaagcccctctgtccccaggacctagggaggaggcccaggtcccaggggcagcagccaaactccccaggccaaaaccccagattctaactcttcttagatggccctaatggcttccctggatgcagagaaggcccaaggacaaaagaaagtggaggagcttgagggtgagaaagggagaagggagagggccggggaggggtgagtcaggtatggaagagggggtgggggcagggagaccagggctggaggttggggtaagggggaggttctgtcccagagtggagcagggccccagcatggccacatgctgacccgccccctgtttctgtcctcccaccctaccaggagagatcactacattaaaccataagcttcaggacgcgtctgcagaggtggagcgactgaggtcagagatagccttcccccgctaccctccacctgccacattcctctcacccccacatccctagcccaagacccaggatctcctttgctcccaaaatccccattgccccaagggataaagtttgagtcccacaaaaggataacttagcccctagggtcacagagccatgggtggccgctgtccattccctccccggtgacttggattggggcggtgcggggggaactcccgggggcggtgggcttacagggagggcggcaggagccaggacgagcagatgcctgatttgccatctgtaccgcagaagagaaaaccaggtcttaagcgtgagaatcgcggacaagaagtactaccccagctcccaggactccagctccgctgcggcgccccagctgctgattgtgctgctgggcctcagcgctctgctgcagtgagatcccaggaagctggtcagtgaggagggggcggccccgggagggagaagaaagctggggaagcgg

SEQ ID NO: 91200 - DNA, 1506 bp, Homo sapiens
ctataaaaaaaggaaggaaggaaggaagggaggaacggaggaagggggaaaagcagaaagaaacacaccagacagggtgtagtggctcaaacatgttggagaagcatttctgttcatagaaccatgccaagcagggcggcgggcagcaggtgaagctctgcagtgtctgacgtagctgtagtgtccacacagaggcatctacttcctgccagcatggagggttttgtggatcaggaagtgggtgccagccagaggtcttctcttgactgaatgcaggctgggaaggtgggaggaggggccctgagttggaggcgacgcttactaccctgcttttgcagatcagccaaggtcacagagcttagaatgacactggaggtgctaggtccaagccccagggcaaggcaggcaaagtgttactgagaaggaccccgcatatccccggctccttccaactcagttcaccccattccaggtcggctcctgtggtttcaacagccgcatcctgccccacgtgtaccccatccggctggtgaaggtcaatgaggacacaatggagctgctgcgggatgcccagggcctctgcatcccctgccaggccggtgagcagggcccccgcatggtccccacccggagcaggggtccccacgccctgcctgcctagcgcagcctgaacatggccttctccctaggggagcctggcctccttgtgggtcagatcaaccaacaggacccgctgcgccgcttcgatggctatgtcagcgagagcgccaccagcaagaagatcgcccacagcgtcttcagcaagggcgacagcgcctacctctcaggtgcgcagcctgctaggccccggtgactggctgtgcggatggggatcctccacccatctgcccctctcccctctgccaggtgacgtgctagtgatggatgagctgggctacatgtacttccgggaccgtagcggggacaccttccgctggcgaggggagaacgtctccaccaccgaggtggagggcgtgctgagccgcctgctgggccagacagacgtggccgtctatggggtggctgttccaggcaagctggggttgcagggggtggtcctgaggcatggtcctgagggagctcagccaaaaggggcttagaagtacacatgcctttgggcagtgcacaacctggacaactgctcatggcagcccaggaggaagcactggatctggagccagttcacctgggtgatgttgagcctcagttttgtcatccagaaaatgggatcatgaaagcccacctgtcttagggcttcaatgagccaagcaggagctccacaaaatgtgtggctgcttccataaatgtcatcccaggttgggagagactggagattacagaccaggggctactgcttgacagtgtatctggtcctgctggtggggaggatgagaggcggggtgtcctcagctgagcctctgcctccaggagtggagggtaaggcagggatggcggccgtcgcagacc

SEQ ID NO: 91201 - DNA, 1024 bp, Homo sapiens
gcccaccttggcctccaaagtgctgggattataggcgtgagccaccatgggccttttttttttttgagatggagtcttactctgtcactctgtcacctaggctggagtgcagtgatgcaatctcagctcactgcaacctctgcctcccgggctcaagtgattatcctacctcagcctcccaagtagctaggactacaggtgcctgccaccacgcctggctaatttttgtatttttagtagagacagggtttcatcatgttggccaggctggtcttgaactcctgacctcgtgatccacctacctcggcctcccaaagtgctgggatttcaggtgtgagccaccatgcccagccacagctacttgtatttttttatctgacaactgtttctgtgtcctctgagtctcccctgcccctgccacctacaacctctcaaggctgtcttctccccacgcccaggcattccaaggggactccatcccggttttcgacctgctgatcctgggggtgggccccgatggtcacacctgctcactcttcccagaccaccccctcctacaggtgagcacaccaatgcggggttccaccctagtcctgagcccagtccctaacatctgggacttccagagggagagccacctgccgggtggggtgtctagagccagggttcaagtcagcctccaccaacatacctgcctgctgggctcaatcctttcaggtctcagttgagccccttaaaacagggaccttaaactacccaccatgggattgttagtaggatgggatggaacagtggctggaccaggcctggtgtgtgtaagtgtccaagaagctgaagtgacattgtccttctgcctccatccctgggcttcctccccaaggagcgggagaagattgtggctcccatcagtgactccccgaagccaccgccacagcgtgtgaccctcacactacctgtcctgaatgcagcacgaactgtcatctttgtggcaactggagaaggcaaggcagctgttctgaaggta

SEQ ID NO: 91202 - DNA, 1101 bp, Homo sapiens
tggccaacatgatggtaccctgtctctattaaaaatacaaaaagttacccgggtgtgatggtgcacggctgtagtcgcagctactcgggaggctgagacaggagaatcgcttgaacccaggaggcggaggttgcagcgagctgagaccataccactgcactccagcctgggtgacagagcgagactccgtctcaaaaaaaaaaaggttttgctaccttcttgctcattggttgttcatttatttctcagggctatctcagtgcctagaattttctttgaaggaactgaagacctttgctttatttccatgatccaggggatcctgcaggcccccaaaacggggtccctgcttcatttcatccggtgtagggggtgcttccagaggtctttgccagacccccagggcactggcctttgccccagctgttctgaatggtagcctgacctggcagcccatgctgatgctttgtggggtgttctgcagtttgtagatgcggacaacctgatcctcaaccctgacacactgagcctgctcatcgctgagaacaagacggtggtcgcccccatgctggattcccgggctgcgtactccaacttctggtgtggaatgacttcccaggtagagtgagggcctggggactgtggggactgggctgagcaggggggtgccgtggctagagtgtaacttactgtcacacaacctcgtggtgtgtgttttacaaaaatcatcatggaagctgggcacggtggctcacacctgtaaccccagcactttgggagactgcggcaggcgggttgcctgagctcaggagtttgagaccatcctgggcaacatggtgaaaccccatctctactaaaaaaaaaaaaaattacagaaattagccgggtatggtggcacatgcctgtcctcccagctgctcgggaggctgaagcatgagaatcacttgaacccaggaggcggaagttgcagtgagccgagatcacgccactgcactccagcctgggtgacggagtgagacttggtctcaaaaacaaaacaaaacaaaaactcattatggtaatctttaaacagccctctgaggccagacaggagggaagaat

SEQ ID NO: 91203 - DNA, 1649 bp, Homo sapiens
gtgaggctgggacctggggcgagtccagggttgagtagcggggccttgggcgcggtgaagctggggcctggggtgtggccagggctgagaggcaggactgggggcggggtgaagctggggcctggggtgtggccagggctttgggctgctgtgcagggttcaaatgacatgggaggggctcctagagggcagcgctgatgtgggcggagccaggtcgactttgtgggccgagccagtctgactgggagccatggagtgggtggggaaagcgtgttggagagaggctggaggctccttaccccagcgactcctcaacgtctgtgccccacagtgaagcacccgcccgcagagccctcccgcttcatctcggctcccaccaagacaccggacaagatgggcttcgacgaggtgagctgggccttccctggaggcggggcgggggctggagggcccttgtttgcaggggctgatctggctggggactctccgggctgcaggtcttcatgatcaacctgaggcggcggcaggaccggcgggagcgcatgctgcgggcgctgcaggcacaggagatcgagtgccggctggtggaggccgtggacggcaagtgagtccgaggcctgggggtgggggggcgggtccgcacgtggatgtgggtgtagacctcgctggtagacggcaagtgattcagatgggggcgggcgtggtgtccaaacagatgtagacctcgtcagtgggcgtcctgaaggggaagtgaatgggaccctggggaaggggcagatcctcacagttgtagaccatggaaggcaagtgagtcctgacccaggggaatgggtaggtttgcatgctgccagtgtagactggtggggactgtggaggggtaagtcagtcagaccccaggagaggaggagagcaggtttgcccgcgagtgtataccatgtgcaggtgagtgaggccccatgtgcccggaaggggtgccagtgctacaagaggtggaccagctgctcaacgccgcagggggtggtggaatggccggggatggcagaatggcaggcagggtgaaccttcttcgtgaccctctcctcctcctctccagagccatgaacaccagccaggtggaggcgctggggatccagatgctgcctggctaccgggacccctaccacggccggcccctcaccaagggtgagctgggctgcttcctgagccactacaacatctggaaggaggtgtgtcctgagtgatgggcggggccagagttatgactctagatctcatcggagatttggacgggaaaggggttgaaagagttccccaaagccccggctaggcatccagcctcagccatgggacccatggcctctctttagtgaatgatgcgccacaccagctgtatcacccccaggtgtacctgccatccttccattgcgcaaatgtggaaactgagcctgggggtaggggtgagcccttttgagcagcaggtggtgtctggggcctgggacctgtaaacaaatcctcattactcccagcctggtctctgtgcttgatgtttagtactagaagtcatggccacagagccactttaaaccagcacctgcccagtgctgctgggggcactcaccagcccaggcatcctcatccaccctcagagg

SEQ ID NO: 91204 - DNA, 1097 bp, Homo sapiens
aaaaataaaatccgggcgtagtggcacatgcctgtaatcccagctgctcaggaggctgaggcagaattacttgaacctgggaggcggaggttgcagttgagatcgttccactgcactccagcctgggcgacagggcgagactccgtctcaaaaaaaaaaaaaaagaaaaagaaaagaaaaacttgttatcgaatgtgaagccaaatgggggtgtgcggctgcaaggcgggaggtgcatgaggcgtgggcatttgaggggctgggaggcctttctcttctgagatccattatggacggcagagggcagaggtttggatgtccagatgtccctggagctaggagaggcagggagatgcactggcttctctacgggtctttcaaaccttctcaaagcaaagctctgtgctttagggtcaggcctggccttggcctccctgtgatgtggcggggcttcctccctcaggtggtggaccgggggctgcagaaatcgcttgtgtttgaggatgacctgcgttttgagatcttcttcaagagacgtctgatgaacctcatgcgggatgtggagcgggagggcctggactgggacctcatgtgagtgggggtctgaggatggggtgaagctggggcctggggcaaggccaggacttagaggtgggggtgggggcagggtggagctgggacctggggatgggtcatggcttagaggcggggcttgaaggtggggtggaactggagcctaggtacatggccagggcttagaggtggggctgggaggcggagtggagctgaatcctacgggcgtggccacagcgctgcagctgagcctagagcctgtatgtctgggtgtggtcagggtggcaggcgtggccaacccttggaagcgtagcaggagggctcacgtggttcctgggcctgaaggcactgtcagggctgtagcctatagggaagggcgttggaaggatcacccagaactcaagggacctggccggaagcctgcaggcttggtcaaggcttagagacttgactgaggcctgtggaggtggatgtggctaaaatttgaccgggcagcctgtgggcgtggctgaagagcatggggg

SEQ ID NO: 91205 - DNA, 2360 bp, Homo sapiens
ggcctacgtgatctccctgcaaggcgcccgcaaactgctggctgctgagccgctctccaagatgctgcctgtggacgagttcctgcccgtcatgttcgacaaacacccagtgtgagaggggcaggcggctgctgggctggggtttcacggtgggtctgtcctgggagaatggggatgtgagactcacggcctccgagaagatgtctcttcttttgcctacttctccctccgtttgccccctcgcagatctgtctccatttgtatcccctgcacacttacgttttaatctgtccccgctgacttcttcacccccaatttttcctccagctgtcccgtcccctgaagccattgctgcccctcactcccctcctcctccccccaggtccgagtacaaggcccacttctccctccgcaacctgcatgccttctctgtggagccgctgctcatctaccccacacactacacaggagacgatggctatgtgagtgacaccgagacctcagtcgtatggaacaatgagcacgtcaagaccgactgggaccgcgccaagtcccagaagatgcgggagcagcaggcactgagccgtgaggccaagaactcggacgtgctccagtccccactggacagtgctgcccgggatgaactctgaggggtagcagccagaaagccaaagcagccatcggtggcccaggctccacgtgcttactgaggacatcaggtccacctctggaccccttggcaggccacagagggctctcgtgtggggtggtgtccagccagctcttgctaagcaatcacgtgcacacaggcagcattaatggagtgcctactgcatgccagcaacagggcttggccctggggaattgggaggaaccaagccctcttcatctgttcatgtgcccagcatttattaagcacctgctgtatgcaaggttcccatgttacggcagtgaatgaggcataattgttccctccatcagcgattgattcagtcatcaagcagttactgatcagattaagaatcaggcactagtgatacacattcatttttaaaattcattcaaggatttattgagtgcctactgtgtgttgggtgccattccaggctctgggatttttttttttttttttttaagagtagagtctgtctctgtcacccaggctggagtgcagtggtgtgacggctcactgcagcctgcgcctcccagcgtccagcaattcttgtttctcggcctcccaagtagctgggactataggtgcgtgccatcacatctggctagtttttgtatttttagtagagacggggtttcaccatgttggccaggctggtctcgaactcctgacctcaagtgatctgcccgccttggccacccaaagtgctagggttacaggcatgagccactgtgcccagcccaggctctgggaatattgagataaataagatgcttctatccatttattcaagcacatattggtcacctactgtgtgcctggcactcatgtcacaaagataagttcctgattcggtacacttactgagcacctgctgtgtgcagggagctgagctatgggatgggaatgggagtaaacaaggtactttttacttttttctttttttcctcactgctagacggtgtgggaacttctcactcattggcttctttcccacacacctgaagagcactgactgtgtgccgggcactagtgatacaaaagagtgtgacagttgttcagtctgcattttcgatcatgggctacatgccgagtgctggggcacagagatgaacaagatcggttccttcacttcttcatgccacaagtgtttattgagcacctgtgtgccaggcctcacagactcccagttgggttgaagaatggttgactgagtttgattcttcctgtaccctcggtcgtctgagctgtgtgcagacaacatccccccaccacccaagagggagggtagctcttccgccaccaggggcaagcacaggtcctggtggccccacgccacatgttagcccccctggagggggcgccagttggagacgggggctgggtgtccctggcccactcccggtcccctgtgctttacctccttgcccttgtgtctcaggtgtggtccctgcctgcttgatgaagttgctctgttcaagcctttggtgggatcatgtgtttgggggcttttaggggacccagctgcactggggcactgcccgtggcctgggtaggacatttcccagcaagggctggaggagttgccgtgccttcagcctgaatcgaatgtcagaaccagccagcggtgcttcaccctcttggggataacttgcttagttttttaataaatgttcctggttggttt

SEQ ID NO: 91206 - DNA, 1017 bp, Homo sapiens
cgtcacaggcctggaggtgatcgtcaacccctgggaaaatctgtgatgtcctggggccagacaatgattaacagctctgggatggaatgtctttgacatcaaggaccagggtaggattgatgactcttaggtgtggaacctgtgacgtcgtagggccacaaggtgattgtcatctcctgggaaaatcaatggtgtcccagggccaatgaatgattgtcagctcctgagggacctggacagtcatgggtccagggaatcgttgacagctctgggagacttcaggagtgattgacagctcaggatgggcaggacctctgatgtcaaggggtcaaggaatgattggcaggtccatgggtgggaactttgacgtcatggtcccagagagtggttgaactcccctgaggagggacctctgtgatgtcatggggctaaggaatgattgacagctccgagggcgggagggacctcgacttggtgggggagggtggacggagagggagttcccatttctcaaactctctctttctctctgtattttgcttcggtctcctgtccctctctgagcgcacacacacggcagctggggctggatggagggcaggattccctggggacccccccttttcaaaattggtcccgacaaggggaagaagtttggcggcttgaactcaggagggggagggagaatcgccatcgacacccagcctggggcgaggggagcaaagccctgtggcctccaacggcccccttctcccccgatccagccagcccaagggccctccgtgggcgctgggtctctgagctcagcttcccttccagtcctggctgcttttagtgtccctggtgtccctggagcaggaggctgtctgtctctccgtctgtctgcagctgacgtttctctctctcttgtttttcctccctctcactcgccgtcccctctccgcgcctcccctgccccctccacacacactcctccatcctcacctctcactggctcgtctctccccgctccccatg

SEQ ID NO: 91207 - DNA, 1053 bp, Homo sapiens
ggtggcaaatggaccccgcagcccgcccagcctccgatgtggagaagccagcccccccagtgcagcctgcggctctccggcctcccagctggtggccacgcccagcctggagctggggccgatcccagccggggaggagaaggcactggagctgcctttggccgccagctcaatcccaaggccacgcacaccctcccctgagtcccaccggagccccgcagagggcagcgagcggctgtcgctgagcccactgcggggcggggaggccgggccagacgcctcacccacagtgaccacacccacggtgaccacgccctcactacccgcagaggtgggctccccgcactcgaccgaggtggacgagtccctgtcggtgtcctttgagcaggtgctgccgccatccgcccccaccagtgaggctgggctgagcctcccgctgcgtggcccccgggcgcggcgctcggcttccccacacgatgtggacctgtgcctggtgtcaccctgtgaatttgagcatcgcaaggcggtgccaatggcaccggcacctgcgtcccccggcagctcgaatgacagcagtgcccggtcacaggaacgggcaggtgggctgggggccgaggagacgccacccacatcggtcagcgagtccctgcccaccctgtctgactcggatcccgtgcccctggcccccggtgcggcagactcagacgaagacacagagggctttggagtccctcgccacgaccctttgcctgaccccctcaaggtccccccaccactgcctgacccatccagcatctgcatggtggaccccgagatgctgccccccaagacagcacggcaaacggagaacgtcagccgcacccggaagcccctggcccgccccaactcacgcgctgccgcccccaaagccactccagtggctgctgccaaaaccaaggggcttgctggtggggaccgtgccagccgaccactcagtgcccggagtgagcccagtgagaagggaggccgggcacccctgtccagaaagtcctcaacccccaagactgccactcg

SEQ ID NO: 91208 - DNA, 1041 bp, Homo sapiens
caccccacccaagtccccggtctacctggacctggcctacctgcccagcgggagcagcgcccacctggtggatgaggagttcttccagcgcgtgcgcgcgctctgctacgtcatcagtggccaggaccagcgcaaggaggaaggcatgcgggccgtcctggacgcgctactggccagcaagcagcattgggaccgtgacctgcaggtgcgtgtcaccccagggcctctggtggtaagtgtagttagcacagatgggtaaaaccaccctcgaccctcagagactaagctgtgttccccaggccacacgggaatgggggcgaatgtgggagtctcacatggctcagcccttaggggtctcttcggactctgattctgtcgtgtcactgttgtcattggctgtgctggaagcctgggggaggacgcagggcctcgtgaagcctcatggttctatcccttccccagacaccttgtcacttagccattgttccgctgtgagaattagtcgggatggaataggtgggctgggtggtatctgtgcggctgagaaccctcccccatggctgcatgaagctgagagactgaaaccaagccctgcagggcgaggtgcatgtgggcagagggaggaccgcctcacaccgcggcccctgccctctcatagctgctaggctggcttcaaaggagtgtccctgtagggtgcacgacccaggaaaaggcccagaggtaggaaagaggttggtgtgttcaaggagcagggggagatccaagtgagtagagaggggtctcaggccaaggaaggccttgcagaggaggagctccgtctcctgtgtgctgagaaggctctttgggtgctggttgggaggaacagggacctcacagacgggctgaccacccattgcagacctcaaggtggagcacacaagatcagggaaaagccaggaggggtctcaaatgccaggaaaggaaggcgacttgggcccaggccagaagggcagggggcacccccctcactggtggtccactctccccacacaccccccctcc

SEQ ID NO: 91209 - DNA, 2796 bp, Homo sapiens
ggctggggagagacctgaggtcttgtcctagttctgcctggaatgggctgtgagatcccatgctggtcactgggcctcagggtgaaagaagatgttggctggatgttttgaggtgcagagtggctgtttgacggcgactgcaaagcaattcaggactgcagcatgaagaaaggaggctgtgggtctaagccacagctttcctggtctgaaacccttagcccaggcaaaggagaggcaggcaactcaattaatcctccctggagacctccctctcctcagttcattttgtgtataaagttgtggtcgggagtgtgacctacagtcaccaagaatccacatggaggccctagggtggccctgcctcctgcttcccgaatctgtggtcactagatgtaggaaagggagtgaggtggatctccacagttgcctctgggtgctggccttaccctcactcctgtttcctttcagctacgagagtacaaggtagtgggtcgctgcctgcccacccccaaatgccacacgccgcccctctaccgcatgcgaatctttgcgcctaatcatgtcgtcgccaagtcccgcttctggtactttgtatctcagttaaagaagatgaagaagtcttcaggggagattgtctactgtgggcaggtatggagaggccggggctacgtggggtctggagtggatttgcgcctcttgggacatcgtgcatctcaagaattaatcagacatcgaacgggtgcggtagctcaacgcctgtaatcccatcacatcagacatcagagccccgggttgtgtttctgcctgggtcacgggactggagcagagcttatgtgccatttccctgattagaaagccagggacccagggagcgggtgggtggcatggtgggacaccttggttggtgctgtcttccctgggccctgtctgttaagtgaggagaggtgatggctatctggtcagtgggtggtagctaggttggcccagacaggttccaggagacttgagttcaggaactgcatctggggctgggttggtgtccgtggcagaagcctggacttcaggctgttgccatgggaagttcccttacctcacgctccctgaggatgcctgaaggtaggtggggctgggaaactgaggcacaagagtctggccatagagtaggcctggagcctggggtgtgctttagaggcagagggttcagtgaggatggggctagggcacatcggcttgctgctctcacatctccctgtggcctctccttggcaggtgtttgagaagtcccccctgcgggtgaagaacttcgggatctggctgcgctatgactcccggagcggcacccacaacatgtaccgggaataccgggacctgaccaccgcaggcgctgtcacccagtgctgtaagctgcctgtcccgcctccagctttttagaccctccttgactccctcacactgaggcagggcaagtgccagaggttcccagtgcaggagagtctcaggactggtggcggggcacaggaagacaaaaggatgccccaggccccagatggcgcttttctgagagccctgccaggctcggttgtaaatcacatcacatctggaaactccctttttgggtctgcaccttgtttagactgggatccacatcaccactgttttctgggacccactgagaaccgaattgaacccctgcctagtgttgggagctggcaccttttccctggctcacctgccagggtctgtgagacccccacacctccctgattgcacctaaacccaagaatcactgtttcttatagcggtggtttaaacagaggtgcaaacagcaagcggatcttgtcgcctttggggggctgtggccgtgcccctcaaagtgaatttggaggttccacaactctagtggccagtgactgcagggacccaggccttgggctatctcgcttccccaccaccaccttcccgtgagccccgagccctcaggcagttgctgtgaccaacaggatgtgtcaggtcattgggcaggcactcaggaggtttgctgaatgcccagagcccaggcaacaccgtcaccctggccccgctcctttccacagaccgagacatgggtgcccggcaccgcgcccgagcccactccattcagatcatgaaggtggaggagatcgcggccagcaagtgccgccggccggctgtcaagcagttccacgtgagtgccctgggggactcccctggagggaagtgcctgctctgacgcaggagcccagtggggggcggctacaccttggtggccccacaggatggggtgttaagaggcttccaaccccctcaacatgcctcccttcctcacaggactccaagatcaagttcccgctgccccaccgggtcctgcgccgtcagcacaagccacgcttcaccaccaagaggcccaacaccttcttctaggtgcagggccctcgtccgggtgtgccccaaataaactcaggaacgccccggtgctcgccgcatgttttctttgcacactgcagagctcaaaggggtgctatgagaggccggcccagtcagctcctggggtgcagctgagctgccatttctttgtcctgggaggggtcttcagtgcaaacaaacaaaccctcacatcctcctgtcctggagtgggccctccaggcgcccccacccctgagctccctcttgcttggtcagttctcagccctgctggcagccctgggctatgagctgcaggggtactgtctgtcctgggccctaaatctgtcccaactgccttgtgagacacaggcctcc

SEQ ID NO: 91210 - DNA, 1032 bp, Homo sapiens
cgatcttggctcacttcaacctccacctcccgggttcgagcgattctcctgcctcagcctcctgactggctgggaatacgggtgcacaccaccatgcccagctaatttttgtatttttagtggagatggggttttgccgtgttggccaggctagtctcgaacttctgaccgcaagtgatccgcccgcctcggcctcccaaagtgctgggattacgggtgtgagccaccagacctggcctaaatgagctcatttggtgtcatgatgtgaattttgccttaataaacttttacaaggagagcgctaagtccaaagcccttgttttatacagagaaggccacagaggccccaagagggtcatggctgcccaagtgtgattctgggggtgctgagtgccgatgtcccctccggcccctgctcccccatccccatcctcttcccgcagcctgctgagggatgcccaagaagttccagggtgagaacaccaagtcggcagcggcccgggcacgtagggcagaggccaaggcggccgctgatgccaagaagcagaaggagctggaggatgcctactggaaggacgacgacaaacacgtcatgaggaaggagcagcgcaaggtgcgtgcactccgagtccccgcggcccgcatgccttgtggccaaggccagtggtcattatgtcaatgtgggtgaatagcgagagggccctctgagctttggtctgaaaggccaggagggaccaggcgctgtcgctcacgcctgtcatcccagtactttgggaggccgaggcaggcagatcacctggggtcaggagttcaagatcagcctggccaacatgatgaaaccctgtctctactaaaaatacaaaaattaactgcgtggtggcgcacacttacagtcccagctactctggaggctgaagcagaattgcttcaactgggaggcgcaggttgcagtgagccgaggtctccccgctgcactccagcatgggcaacagagcgagattccatctcaaaaaaaaaaaaaaaaaaaaaaga

SEQ ID NO: 91211 - DNA, 1058 bp, Homo sapiens
gagaagctgccggggctccacgtggtgcagggtgggtgggtaggccgcctcctggtaggcctggccgtgagcagacaacctcagggcttgtgccccgcggggtcctcttgtttgcagggctgccggaaagtaaggcagagaactgggcgccgggagggtgggacctgtcccaagagggcttatcagctgaagtcgcgattccatcccccctcatctctcccgccttcctcccgcccctagcttctcttgccagtctctatctcatctccttggaactgtgcatctttgcttatctctctctgtctctgtcacccacccacccgcccagccgagaaagccaagagccatctggaggtgccgctggaggagaacgtgaaccgccgcgtgctggaggagggcagcgtggaggcgcgcaccatcgaggacgccattgcagtgctcaggtaacggggcggggcctggggctttcccaggggtggagctggtcatcgggggcggggctacctgggggcggggccgggcttttcggggcaaggctgcgcccaaggccccctgacgctcatgtccacccccagcgtggcggaggaggcggccgaccggcacccagaaagacgcatgcgggcagccttcacagcctttgaggaagcccagctgccgcggctcaaacaagagaaccccaacatgcggctgtcgcagctgaaacagctgctcaagaaggagtggctccgctctcctgacaaccccatgaaccagcgggccgtgcccttcaatgcccccaagtgagcccagaacttggggagccagttcacccacgggtggtccaggtcacgactctgcacgcccttaggccaggtcagctgcgagggtcacagagcgttccgggggccaaggcgccgggccccggggccatgctcttatcaccagccacccgtcctcccgccagagggtccctgccccgagtgacaccccatcccctcccatcccccggcgcgtgtgtgtagagcctcagggctgagtgcccaataaaggtggcggcaaggctgcggtgaggcacttga

SEQ ID NO: 91212 - DNA, 1128 bp, Homo sapiens
catctgtaaaatgggcatgatggtgaagccaggttgccagataaaatataggctactcagctaaatgtgaagttcagatcaatattgaatttggttttactgtaagtatatcccatgcaacatttgggatatacttatactaaaaaaaaattattcattgatgctatggtttgaatggtcccccaaagttcatatgtttgaaacttaatcctcaaagcagtcctttcaaccttgtcaacctgtcggcgcggcctctggtgcagtggcggcggctcctgttcctgccgcagctctctccccttcttacctccccaccagatcccggagatcgcccgccatggctttacttactgcggccgcccggctcttgggaaccaagaatgcatcttgtcttgttcttgcagcccagcatgccagtgcttcctccatgaatttgaaagacatattggctgacctcatacctaaggagcaggccagaattaagaccttcaggcagcaacatggcaagaaggtggtgggccaaatcactgtggacatgatgtatggtggcatgagaggcatgaagggattggtctatgaaacatcagttcttgatcctgatgagggcatccgtttctgaggctttagtatccctgaatgccagaaactgctacccaaggctaagggtggggaagaacccctgcctgagggcttattttggctgctggtaactggatgtatcccaacagaggaacaggtatcttggctctcaaaagagtgggcaaagagggcagctctgccttcccatgtggtcaccatgctggacaactttcccaccaatctacaccccatgtctcagctcagtgcagctgttacagccctcaacagtgaaagtaactttgcccaagcatatgcacggggtatcagccgaacccaagtactgggagttgatttatgaagactctgtggatctaatcacaaagctaccttgtgtcgcagcaaagatctaccgaaatctctatggagaaggcagtggtattggggccattgactctaacctggactggtctcacagtttcaccaacatgttaggctatactgatcatcagttccctgagctcatgcacctgtacctcactatccacagtg

SEQ ID NO: 91213 - DNA, 1049 bp, Homo sapiens
gagtttaagaccagcctggacaacatggtgaaaccccatctctactaaaaatacaaaaattagccgagcatggtggcgggcacctgtaatcccagctacttgggaggctgaggcaagagaatcacttgaacccaggaggcagaggttgcagtgagctgagattgtgccactgcactccagcctgggtgacagagcgagactccatctcaaaaaataaaaaaaagaagtgacatgtgagcagagacctgcaagaacctgagaatgagagaaagccatagagacagaaaagagaaaggtggctctgagcatagggcacagctgtggcaaaggctgtcagtgggtaccaagcctgccacgttgcaggggcagaggaggccagtggcttggagtacagtgaagtgaggggaaatggtggatggtactagaaaggggtaccctgccttctccctccctccctcattttacctccctccctcattttagatgagatcatgtggccagagggagatgaggcccttccagcagacgcccaggacctcatcaccaggttgctccggcagagcccgctggaccgtctgggcactggtatgtagtgtgggggagaacccaggtgggtggctccttcaggccctgggacccagggaatggagggatagcgcccggggtagacaagagttctacttgggaagctgcatggaggagggggtttgcagctagggttttgaaggatgcacaggagttctccaggaactatcacaagaccttggaaagaatagaaagtagctgggtctggtgcccatatggagcactgagcctgaataagtgtgtgaggctgtaaagtcaccaggacctgtgtcaaaggcccagcccagaagatcccactgtcccagttttcccagccacctggttaatcattaagggaccgtttgagactcatgcagccacccatcacgtggccactatggctcctgttcatgactgaggctttgctatgggagacggttgggtccaaggtcggggatcatcacctgctctgtggagcagaagtg

SEQ ID NO: 91214 - DNA, 1058 bp, Homo sapiens
aacacaaggaaactgaggcacagagtgggaaagccattttcccagagccacacagtgaagctgaaattcaaacttgagcctcgactgggttttctggcttgaacttcatcccagagaggctctgacatatggagggaacccctaacaggtgtttcagacacatcacggccaagggcttactctgctgggcctcaaacacacggcatcttgtccagggtagactggacaaggccaggccaaggcagagcctgaggggaggggacactgagtgtttctggaagtagctggacgtaatcccgcaggactggcatactggagcgtgccccgagacagccgagcatttctggaggctgccttggcagttccaggtgaggcctgtaccttcctttatcagtgcccacctggggagcggatgacccctctgcccagatccggtgaacacctattcatccatcaaagctccagctcccatatcccttctccaggctgaagccagcaggattggaggcagactctatatatagagcaggcactgcctgggcatggcagctatgatggtgggaagtggccttcagaatccagtccatcgctgggattacattgttttgtgggtgagaggaattgtttacggacactccaggttgtagccgaactgggccggtacaggtgaccaggtgacttcaactccatcccctcaaatgggtaggtgtggggaggggaatgagaccaggtaacacaaaacacttaaaaagtacagaaaaactggaaaacacaaacacagatgacttgtccaaagtgcatccttctcagcccagagggcagggcctgcaaacagagtcccaggtgcctggggcaagacctggcagccgccttcagggggcggctcagtacggctatcgcttataaaaagtaataaattaggctgggcccagtggctcacgcctgtaatcccagcactttgggaggcaaaggcaggcaaatcatgaggtcaggagttcgagaccagcctgaccaacatggtgaaaccccgtctgtactaaaaatacaaaaaattagct

SEQ ID NO: 91215 - DNA, 1027 bp, Homo sapiens
agaaggctggaggtggtgtcatcacctccattttacagacaaagcagctgagaccccagcgaggggcggagacctgtcccacgatcacccagcaggagtcgtggcagaacggagcatcagccagaccctgttgtgggcgttgtcatcaagggagcttgaatggagggtctggtgtcagatacagccgactccagccccagctcatcccccatgatgctgtgtgacccactgggcactctggtgagggagctttccagacatcaacagcccactctgcttccctttctgagtcccctgtccagcactgcctagtgttggagggtagaccaaggctgtgcatgattcaccccctccttccatcctggagctggcagtgaataaaagcccgtatttacaaagatgagctccaacgtctggatttgtgaggggctgagaaaggaggaagggaagagtggggaggggagcggagtgaaatagacccatggctcaaagtcattgcaagtgggttttgaggactgcatagcagttcgctgttgagattcttcctgatgccatcgctggtaccagcctcctgctaccctctccctgcgagtactccatcatagccctgcctttaaaagcttcctccagacatctgggccctgagctatgttttttatttttatgtttttgagacaaggtctcgctctgtaacccaggttggagtacagtggcgcaatcacggcacattgcagcctcgacctcctgggcgccctgggctatgttaataaaataaataagcggcggggcgcggtggctcacgcctgtaatcccagcactttggaaggccaaggcgggcggatctcctgaggtcgggagttccaaaccaccctgaccaacatggagaaaccccgtctctactaaaaatacaaaattagccgggcgtggtggcgcatgcctgtaatcccagctgctcgggaggctgaggcaggagaatcgcttgaactcgggaggtggaggttgcggcgagccgagatagcgccattgc

SEQ ID NO: 91216 - DNA, 1050 bp, Homo sapiens
gctttgaaggatgaataggagtttgctagaaagagaaatcagaggaaacagcatatgcacaggctcagaggctggaagcacatagtctggtgcaaagtaggtccttgagaaaaccctggaggccgggtgcagtggctcattcctgcaaccccaacactgtgggaggctgaggcaggaggattgcttgatcccaggagtttgagaccagcctgggcaacatggcaaaatctacctctacaaaaaatattaaaatgttagccagacatggtggtgcacacctgtggtcccagctactcgggaggctgaggtaggagggtcacctgagcccaggagtttgagggtgcagtgagccgagataaaaccctgaggtctctgcgccaccccacccctcccacaggatcctgctgaactccgagcggctcaagtcccgcattgccgagatccatgagagccgcacgaagctggagcagcagctgcgggcccaggcctcggacaacagagagatcgacaagcgcatgaacagcctcaagccggacctcatgcagctgcgcaagatccgagaccagtacctcgtgtaagtggcggctccatacttccctgcggctccctggcgactgctgcggcacatggagatctctctaggagtctcagtctctctctctccaccaagtggcccttcctgggccccgagaccccttaaactcggttcctcccgggccccttgaaagttttcccataggtcagcctcagcttagtcagaggtgtgtgcaatgggagtgtcactcctatcccattccattttgtggaaagttggaagccttccacaaaaattcctgctgggctgggcgcaatggctcacacctgtaatcccagcactttgggaggctgaggcgggcagatggatcacttgaggccaggagttcaagaccagcctggccaacatggtgaaaccccgtctctactaaaaataaaaaatacaaaacccggccaggcatggtggtgggcgcctgtaatcccagttactcaagaggctgaggcaggagaatcact

SEQ ID NO: 91217 - DNA, 1065 bp, Homo sapiens
gcctccacctccctcttgggcctcagggagggcactgtcgcgtgccaggtgctgtgctaagcaccgtgctcgttatgagttcatttggtccttttcaagccctttgtaaagtttgccctttacagctggggagactgaggcacagaaccgacagctgccctgtgcaaaggccagcagtgctggagtgagcctctggtgatgatgaggggcctgggctggcatcttcttgggggactccataggcgttaacagaaacaaaaaaatgaggggtgtgggtcagggttccccagcagagctgggcgagccaccctgggttcaggctgccctgagccaggtcagctctgccctcttgtggcaaccggagatattgtacccagaaccctctctcctcagccagaccctgcctcccaccggacaggcccactgtgggctcagcacccacacaactgcacaagcccacctttcctgttccttctcaggtggctcacccagaaaggcgcccggcagaagaaaatcaacgagtggctggggattaaaaatgagactgaggagtgagtgaccgtctggagggaggcagggagggcttcccagaggagggggccatttggggtgggtttcgaagaatgagtaggagttcaccagggaggaaaagttgtccaggcagctggggagcctcggaggctggcaggtgagtgaccagggccctccccgccaccgccccccaccccagccagtacgcactcatggaggacgaggacgatctcccgcaccacgaggaacgcacttggtacgtgggcaagatcaaccgcacgcaggcagaggagatgctgagtggcaagcgggatggcaccttcctcatccgcgagagcagccagcggggctgctacgcctgctccgtggtgtgagtggaccgcagcggtggggattcccgcgtccctcccagagctctcattgaatgcctgccgcgtgccaggccttgggaaggagtccctggtggggtcatccgggacaggggagcacgcggccctggaacggggaaagcttggcggggaggccagccttccg

SEQ ID NO: 91218 - DNA, 1323 bp, Homo sapiens
caaggtctccaggtgaagtgacaagaaatgagcatgggccaaggccggaggcggtggctcatgcctgtaatcccaacactttggaagtctgaggcaggcagatcacgaggtcaggagttcgagaccattctggcctacatggagaaaccctgtctctactaaaaatacaaaaattagctgggtgtggtggcatgtgcctataatcccagctactcaggaggctgaggcaggacaattgcttgaaccagggagtcgggtgttgcagtgagccgagatcgtgccgcagcacaccagcctagcgacagtgagactccatctcaaaaaaaaaaaaaaaagtctcaaagtcaagattccacctggcaagttctggaaggcgtgcaagatgaattgcgtatcacagccccctttctacaagactaccaagtggggttgagagaagtggggaactgcccagggctacacctgcctcccacgccttcctaatccacagacaggcaatctatacctgcgggggcccctgaagaagtccaatgcaccgcttgtcaatgtgaccctctactatgaagcactgtgcggtggctgccgagccttcctgatccgggagctcttcccaacatggctgttggtcatggagatcctcaatgtcacgctggtgccctacggaaacgcacaggtgtgtgggcgctggggaaactgaggcacgtgggcaggggagcaggggacccagcctaccagcaggctctcaccctgctgccttgcaggaacaaaatgtcagtggcaggtgggagttcaagtgccagcatggagaagaggagtgcaaattcaacaaggtggaggtgagcggccccagggccccacactggggtgggggaaaactgtcccacgtacaggaggcaaatacgaggatgccagctctgtcttctgcctcgtgtgctcccatttaatcacatctttattccctatctcctgggtgggtactggtgattattacgagagggtgtcagggtaccctaggccctcttcatgccctctcctgccccctctccaaaccccaggcctgcgtgttggatgaacttgacatggagctagccttcctgaccattgtctgcatggaagagtttgaggacatggagagaagtctgccactagtgagtgacgcccctcactccacccaaggagggggacatgggtggtaaccttccctgcatccaggcagacccaaattcaagtcctagccctgaccactgctgtctgtgcagcccaggaaaacaactacccttctttattttatttatttttttattttttcttgagacagagtct

SEQ ID NO: 91219 - DNA, 1201 bp, Homo sapiens
tgctctccagccaccacacgagtatgtgccctgggtcaccgtcaatggggtaagaatctttttagccctcagcttgacactcatagtcccatggagtcagggatggacaagacagagggaccagagataaaggaacccaggcggaggttgcagtgagctgagatcatgccactgcactccagcctgggcaacaagagcaaaacttgatagctttgcatagggaaagagggcattgatgctggggttttgaaaggtgagtaggagtccatcaggcaaaaaaagtatgtattaattcgaagtattaaacatccctagccacccccattgggaaagatgtgccactgatttgcgaggcgggaggcgggggccagacttgggaatatgtgcagccctttctgggctggaaccagggtgcatgggttggggtagctgctgggaatatgcgacccctgtcttgctttgtgcagaaacccttggaagatcagacccagctccttacccttgtctgccagttgtaccaggtaagctgggaggggagcagtgggattcaggtggtgggggtagggtctccttccaggaccccaactcatggccttcacctccagggcaagaagccggatgtctgcccttcctcaaccagctccctcaggagtgtttgcttcaagtgatggccggtgagctgcggagagctcatggaaggcgagtgggaacccggctgcctgcctttttttctgatccagaccctcggcacctgctacttaccaactggaaaattttatgcatcccatgaagcccagatacacaaaattccaccccatgatcaagaatcctgctccactaagaatggtgctaaagtaaaactagtttaataagcccttctggatggtgtaattaatttgataagtcagccattcccccttccccaggcctggcaaaacccgctctctactaaaaatacaaaaattagccaggcgcggtggcgggcgcctgtaatcccagctacttgggaggctgaggcaggagaattgcttgaacccggcaggcagaggttgcagtgagccgaaatcgcgccactgtgctccagcctgggcgacaagagcaaaattccatctcaaaattttaaaaaagtgactggttgtggccgggtgaggtggctcacgtctataattcctgcactttgggaggtcaaggtaggaggatt

SEQ ID NO: 91220 - DNA, 1007 bp, Homo sapiens
gacttgctctgttttgtctctacaccagctaccctaattctctgtccatcccatctgaaagtccctgtccctctgcccggggtgggcggcgtgggctctcaggggcccaaccccgccccctccatcgtcagcccatcttgtcgtctcaacagtacttcctggcctctaacactctcatttcttggtttgcttcccaggccttggctgcctggagggtcagacagtgggtgagagctgccaggagctgcgggagaagttctgggaattctacaaggtgggagcacccgccccttgcacatgtccggccccgccccctgatggccgctccgcccccgcccagctctggccccgcccctcatcccccgcctctccccgcaggcagactggtgcgtgtggcctgctgcgcagttcgtgaacttcctcttcgtgcccccccaatttcgagtcacctacatcaacggcctgacgctgggctgggacacgtacctgtcctacttgaagtaccgggtgagtgtggagggcataccaggcacccaggggactccccagggggctacacgtgtgagctccaagtggcagtgtagccagccaccctggagggtgggagtctcctgtgctcctgacaacccacacccaacagtgggctggcggagagctcctcactagcagttaagacccagccgtggctgagcgccgtggctcatgcctgtaatcccagcactttgggaggccgaagcgggtggatcgcctgaaattggagttagagagcagactgggcaatatggtgaaaccccttctctactaaaaatacaaaaaattactggtacgcacctgtaattccagttacttgagaggctgaggcaggagaattgcttgaacccaggaggcagaggctgcagtgagccaagatcatgccactgcactccagcctaggtgacagagcgagactccgtttcaaaaaaaaaagacccatgccgggcgcggtggctcacgcctgtaatcccagc

SEQ ID NO: 91221 - DNA, 1067 bp, Homo sapiens
gcactttgagaggctgagatgggtggatcgcttgagctcaggagtttgagaccagcctgggcaacaccccgtctctacaaaaatacaaaaattagccaggcatggtggcgcatgcctatagttccagttactcgggaggctgggctgggaggatcatttgagcctgggaggcagaggttgcagtgagccaagatcttgccactgcactccagccagggtcacagcgtgagaccctaactcattaaaaaaaaaaaaatcggagagggcctccatttttgcaattctcatttagcttcatttatgaagtgccgactggatgccaaacttgaagaaatggcaagagtcacatgcctgtgccttaaccatttcttcaggtctcaggcctcagtttccccacctgtaagatgaatgtgtccatggcaccaagcctgtctgtggaggtgccaggtctaggtgtggctgggccccgccagtgccctcccaagcctcgatctctgtaggtcttgcagaacctggtgcactgtgctgatctgagcaaccccaccaagccgctgcccctgtaccgccagtggacggaccgcatcatggccgagttcttccagcagggagaccgcgagcgtgagtcgggcctggacatcagtcccatgtgtgacaagcatacggcctcagtggagaagtcccaggttggcaggggactgggctgaaccggtagacactgggaggaagtaaaaggaggggctgagccaaccccacgagccctggtttggccctggctggctagccagggagtgtgcctgaagggtgctgtctgggccgagttagacctgggatccattctctctgggcttcagggagagggacatgcacttctggggtttggaaacatctgttctaggtgacatgcgggaccctggaggggcttccagtctgggggacacgtacattcagccctgtggggttagggttggggttggaggaggccagaagggttaagggaggcattctagagaatgagttatttgaaaagggttttgaaggatgagcagttgttgggaagcggcattcca

SEQ ID NO: 91222 - DNA, 1020 bp, Homo sapiens
ctggaggctggattggttctagggtttgctgtgactcaacgaatgccttccgccccacccaccccacaggtgggtttcattgactacaatgcccacccactgtgggagactctgtctgacaagtcccaggcgcacagatttgatcacctccccactacaccctgtcacacatgtggaattcatggccaacccagatgacctcccaaaaggggcccctgactgagcccctcttttgagcagagtttgcagtgaatgcagttgcatccttccatttcacagatgagtatgctgaggcccagagggctgagtctgagccagagtggcatctgggagttgggagtgagggttggggtgggcagggtcctcgcgcctgtcaccttcccttgcctgcccccaggtgctggccacagacatgtccaaacacatgaacctcctggccgacctcaagaccatggtggagaccaagaaggtgacaagcctcggtgtcctcctcctggacaactattccgaccgaatccaggtgtgtagctggatgggcactggggcttcctttttaaattttggttttactttatttatttatttatgtatttatttatttattgagacggagtctcactctgtcgcccaggctggagtgcagtggcgccatcttggctcagtgcaagctctgcctcccaggttcacgccattctcctgcctcagcctcccgagtagctgggattacaggtgcccggcaccgcgcccagctaattttttttgtatttttagtagagacggggtttcaccatggtctcaatctccatgagattgagatccgcccacctcggcctcccaaagtgctgggattacaggcgtgagccaccgcgcccggccggttttactttaaaaacaactttagcagccgggcgcagtggctcacgcctataatcccagcactttgggaggccgaggcaggcagatcatgaggtcaggagttcaagaccagtctggccaagatggtgaaaccccatctctact

SEQ ID NO: 91223 - DNA, 1034 bp, Homo sapiens
tcctgtagggtcagggatggaccaccaaataacacagagtggaggagttcaggagagcacagagggcatctcagaggagcaggtgcttgaggcatagataggagttcagaagagaggggtaggaacagcgtgtgctgcagccccaaggccaaggccctgagccagggtctgtgatggaccaggagcgggacctgctgaagacattccagatcccagcagacacactggccacctacctgctgatgctggaaggtcactaccacgccaatgtggcctaccacaacagcctacatgccgccgacgtggcccagtccacgcatgtgctgctggctacgcccgccctcgaggtactgcgccatgactgcaggcaggtgggcgggtgcagggcccagagaacccgcccctcaccgcctgtgccctctgcctgctcaggctgtgttcacagacttggaaatcctggctgccctctttgcaagcgccatccacgacgtggaccatcctggggtctccaaccagtttctgattaacaccagtaagtaggagtgggaagtgggtgcaggagaagaggtggaccctgcctccaccctgtccaccaggtgatctcagggggttcccatctgccctgagcccagtctccctgtctatgaaatgactatgacagttttccctcccttcagggtcttggagcaggtctgggtacacagtaggtgccaacaaatgacagaataatgagctgtggcagagctgatctggttccaccaagacctttatttatttatttttaaagacagtgtcttgctctgtcacccaggctggagtgcagtggcgcgatttcggctcactgcaacctctacctcccaggttcaagcgattgtctagcctcagcctcccgagtagctgggattacaggcacacactaccatgcctggctaatttttgtatttttcgtagagacagggtttcgctctgttacccaggctggtctcaaactcctggcctcaagcgatctgtctgcctcagcctcccaaagtgct

SEQ ID NO: 91224 - DNA, 1030 bp, Homo sapiens
gggcgggggcggggccggcagagacaaggtgggcggaaagcgggctgcaaattgaggctggggctccggcgcctccaggtgggtttgaggggcggggcctggtggacttgggggcggggcgagatgggcggagcagccacgcctgaggctgctgtaccgcaggcagggacccgtcggaaacccttcatccagcaatcagctccctcctgcaggtaaagtacctgttccttccctcccccgctgaggacagctgggagcttcctttccatagtgacctccccagtccatgagccccttatactggggctaattgtagccccgcccctgcaaaaacaataacgccctcggggatggaccccaccacactcatattacagatgaggaggctgaggcccagagatctcatggtcacacaggcactcggggaacagatctggaacttgggtccaggagtcctgggtggcccccgtgggaacagtttcagggtccagatgaagagacgaagtcgcgagaggcgtggggtccctgagcgggggggttgggcaggcccctgactgcctcggctcccagaggacacggggcagaagctggcattggagacgctagacgagctggactggtgcctggatcagttggagacgctgcagacccggcactcggtgggggagatggcctccaacaaggtgaggtggggcagatcgctgagctcacctgcctcggcccacggtgccccatcatcacggtcttcaccttctctccgccccagttcaagcggatcctgaaccgggagttgacccacctgtccgaaaccagccgctccgggaaccaggtgtccgagtacatctcccggaccttcctgggtgagctttgttgagtcactgcctggacgacattttaggagtactaagaaacaaaagaaagattcctatgatagacctcagtctgggggagatacagccagacacagacaccttcagcccccatgagtcagggctggatcagagggaggaacaaggggaacttccaggag

SEQ ID NO: 91225 - DNA, 1432 bp, Homo sapiens
attgcttgaacccaggaagcggaggtttcagtgagccgagattgtgccattgcactccagcctgggcaacaggagcaaaactctgttctcaaaaaataataataatatgtaaataaaataaaataaaataaataaaggcaccagagactactgggcacctctacaggagatgcagtaatgcagggatggagtcagggtaggggtgcttctgtccaaacctctttcagcttttgtcccttacccagcggggcttggagagcctcccagggcctggtaggagccaggctgtgaatgctgagtcctggctctgtggccaccccttgctgtgactctttctccatccgaacagctattaattaacaccttcctgttagaactgttaataaaatatttaaaattaaatatatggatgaaacattaatagtaaacctattgataaaatattaatgtgagactcgcccctgggactacagaggggatgaaatgagttaacgcatccagtgcgggaggacccaggctgggaagaacactacctgtccgggttcaaatgaccccagtcttgcaccttatggctgtgtgtccttaggcaaatgactgtgcctttctgtgcctcagtagccccatcctcgaaatgggaatagtagtccacactttgtaggtttcgtctgaaaatccaatgacttttcccttcactgctgttggctgagtgctgcatgtttttgaagcactcagtttacataattttgtttagtcttagcctcctattttatgtctgtgattttgggggaggggctgaatctctgtgcctcggtttctccttggggacatgtaactattgtcacttctctcacagtggcggggaggtggtgtcaagactgctgagaccttggctccagtgtccccacaaggccaatcctagcagcatgtgtcccctagggatggctataattaggtctggccccagcagacaacgatggtatttttgtcttggggacagcgaggtctggttcccgccaggtgtctggttgcaagactgcgggggttaggggggcttcctggccagatacctgaggctctctgtttttctgggctgtgtgactcctcctctgagcctctgttttctcatctgtagaatggggagactctcatgtatctggccttagcatggttgcctcaggatctcctgtgggatccctgatcaatgggcttctccaggactgccagaaacatgggtaccatgtctggggacaccaagactgaggcagccgccccggggggaaggcccaggctgagagacagaggtcattccacagcaaggggcacggtcaggcctcagttgctgggaggtcccctgggcctctgcctgtgacatggctgtttctaggtccctcctccttgtgtgacacatgctaagccttggtttccttttctg

SEQ ID NO: 91226 - DNA, 1067 bp, Homo sapiens
tgccgcaagcgcaagctggagcgcatctcgcgcctggaagagaaagtgaagaccctcaagagtcagaacacggagctggcgtccacggcgagcctgctgcgcgagcaggtggcgcagctcaagcagaaagtcctcagccacgtcaacagcggctgccagctgctgccccagcaccaggtgcccgcgtactgagtccgcgcgcggggcgcatgcgcggccaccctccccaaggggcgggctcgcgggggggtgtcgtgggcgccccggacttggagagggtgcggccctggggaccccccctccccgagtgtgcccaggaactcagagagggcgcggcccccggggattccccccccccgagggtgcccaggactcgacaagctggaccccctgctcccgggggggcgagcgcatgacccccccgccctcgcgctgcctctttcccccgcgcggccgccccgtgttgcacaaacccgcgcgtctcggctgcccctttgtacaccgcgccgcggaagggggctccgagggggcgcagcctcaaaccctgcctttcctttacttttacttttttttttttttctttggaagagagaagaacagagtgttcgattctgccctatttatgtttctactcgggaacaaacgttggttgtgtgtgtgtgtgttttcttgtgttggttttttaaagaaatgggaagaagaaaaaaaaattctccgcccctttcctcgatctcgctccccccttcggttctttcgaccggtcccccctcccttttttgttctgttttgttttgttttgctacgagtccacattcctgtttgtaatccttggttcgcccggttttctgttttcagtaaagtctcgttacgccagctcggctctccgcctccttcttcccccgccggggcctggcgggctgggcggggcctggttcgcttcccccctacacccccgcctttctctcctccctctgtccctagctcctccccttgttggagggagcagagagcgggtgtctgagagcggcccgcacatctggcgcgcagcgagcgccccctagacgcgc

SEQ ID NO: 91227 - DNA, 1333 bp, Homo sapiens
gccctggggaggaatttgaggtatttgtttgtttgttttttgagaggagtctccctctgtcccccaggctggagtacagtggtgcgatctcagctcactgcaacctccacctaccaggttcacgcgattcttctgcctcagcctcccgagtagctggaattacaggcgtgcgccacgatgcccagctaattttgtatttttagtagacagggtttcaccatattggccaggatggtctccacctcttgatctcgtgattcgtccgcctcagcctcctaaagtgttgggattacaggcgtaagccactgtacccgggctgaatttgaggtgtgttaagggaacatccaggaggaggcgtggcgcagggtgaggagagatggaggattacaggggcctccagatcctaagcagggagggtggggggtggcttgagtccttggccagcccaggtggagcctgtgactgctctccctgcctcacttttcctaccattatgcatgctccagaagcagcaggggaggctttggggatgtggaggttgcccagggtcacagggacccctgttgtgccctccgtcagtgcccctctggcctccccacaccctctgtggctccctgctgtggccagtcttccccatcatcgcccctggctctcttctctcctgcagtccagccactcagcccttgtacatgtccctcatctgttctcacaatgcccaccccaggtgacaacatcctcccaagcccccttcaggagatggtggggctgacactaacaggggagggggtgtagggaaggtgagcaccctggcccctgagtgctgcacacaaactgtgtaaaaatagctgctccccctgccccctgtgaggaggcggctgtgacggtggtggctgcagtgacggggatgtgcccagagaagcatccggcagggccagttgccatggtgatgctgactcagcggcagaggcaggtagcagcatctggtacccggccggcacgcctctgcttggcctacgctcatagcaccctgtccagccccaactttccagcctccaccctgggggtgtcttctgaggctgcagaggggtgggtgagacctcgggaaggactggacaagttcctccaccagacaccactcagtcatctgctggaaggtgggagacgctgcttctcatggagcggacctcagtgtcaggtcttcctccctctatcagccatccgcccatctacctactcacccatccatccactcatccaccatccactcatcccccatccatccaccatccacccatccatctaccatctgcccatctaccatccatccacccac

SEQ ID NO: 91228 - DNA, 1061 bp, Homo sapiens
tgcgatctcagctcactgcaacctccccctatctcaactcactgcaacctccgcctcctgggttcaaacagttctcctgcctcaggctcccgagtagctgggactacaggcatgcaccaccatgcccagctaatttttatgattttagtagagatggggtttcaccatgttggtcaggatggtctcaatcttttgacctcgtgatctgcctgcctcggcctcccaaagtgctgggattacaggcgtgagccaccgcgcccggcccagtatcattttttaattgcacaaaggttggcgtcatgatagactgtctaactgccagcgaagtgtctagcggaggcagagcctgtcgcctgtaaggaaggccatttaggggtctgggaactgtgggctgaggcccggaggtggtggtccatctcagggcagagctacacctcctgaggggcccatggcgcagggctccagggctacagccaacctctagcctgtctctcttctagttggtggagctgaaaaatggggagacgtacaatggacacctggtgagctgcgacaactggatgaacattaacctgcgagaagtcatctgcacgtccagggtgggtgctgcacccaccaacgggggtgggatgcagggggtgcacactcagcctcctccctccctccctgggcctcatgggaggagtcagtgggggaggccgcctaggactgctcgtccttccaggggtcagtcaggagggacagggcagggtgagctaggccaccaagtctcccagtgtgccctggactttgaccctgtgggagactttcctgctgtgtgtctgttggtgccacccctgacctggaaggacctaggactggggactccctgtggctcaggctggggcagccccctccaggggaggcccaagactcccggactctgctgcctttagtccagcctggatgttgcctgcactctgcgggccatggtagtgtggccctgggatgtccgggatgcccaggtcacggtgggcaggagcagcgccagggcccggtgggtcaggagccaccagccagag

SEQ ID NO: 91229 - DNA, 1073 bp, Homo sapiens
tgagattacaggtgtgtgccactgcacccagctaattcttgtatttttagtagagatggggtgacaccatgttggctagactggtctcgaactcctgacctcaggtgatccgcccaccttggcctcccaaagtgctgggattacaggcctgagccatcaggcctagcctgatactctgttattcccattttacagatgaggaaactgagactcagagagattaagtggattgcccaaggtcacacaggcaggattgagtccaaggagcctgggatttaaccccagggaccatagaatcatgtcaccttccatagagatacagagagactttgaggcaagagggtggggaaggaaatgaggggctttgaactaaatcaacacacacccttgccatcctgcagaatgagtctggagaacgcctgtttgtttcaccccccagagagcgcattatccccatagctgtcatctggggccatgacactcccactctcctctcttccaggagctagaaaagctaggccttggcgacagcgtggacctgcatgtgtacgagattccggttgagtaccaaacagtccagagactcatccccgccctgtgggagaagcacagtccacaggtgagtggtgccaaggggcggcacttcctcatcaggacttacaggttggcacccttcatgtggaggacttaggtggctttggtcctgatcagatcacgtgaccaatgccatacagccttgtcctcaaaagggcttttcaggccgggcatggtggctcatgcctgtaatcccagcacgttgggaggccgaggcaggtggataacctatactcaggagttcgcaaccagcctgggcaacatggcaaaaccctgtctctactaaaaatacaaaaaattagccgggtgtgatggtgggcgcctgtagttccagctactcgggaggctgaggcaggagaatcgcttgaacccgggaggcggaggttgcggtgagccaagattgtgccactgtactccagcctgggcagcagagcaagacctgtctcaaaaaaaacaaaaaaacccaaagggctatccag

SEQ ID NO: 91230 - DNA, 1033 bp, Homo sapiens
cagagaatcgctggaacccaggaaggggaggttgcagtgagctgagatcgcgccactgcactccagcctgggcgacagagcaagactccatctcaacaaagaaacaaaaacactgcattggcattttaacacttgcatagcagctcattatttattgaactaactccgctggatggctagttaacttgtttgcagtatttgattttgataacaagaacagctgcagtgaacagcccttcatgtttcaaattcttgcctgtcttacatggcatacctttttccaagagtgactgcagggtctattctagcagcaagaggtcagaaacaacacaaccccaggcagagctcattaaggatgctgccttttccctggcctcagggggacccctctgagtcccacgggcaggccatgttaagtcctgcccctgtctgtgtgcagctggtggtgcatgtgggggtgtcaggcatggcgaccacagtcacactggagaaatgtggacacaacaagggctacaaggggctggacaactgccgcttttgccccggctcccagtgctgcgtggaggacgggcctgaaagcattgactccatcatcgacatggatgctgtgtgcaagcgagtcaccacgttgggcctggatgtgtcggtgaccatctcgcaggatgccggcaggtagggccctgtggggtgggagtgagtggggatttccctcctccacccactgagcctggtgtagaacaagccaagcgtgttgaccttggcctctttggaccaagcactcagtgtatactaggcacagagccaagtatttgtacgtagcaggtgccgttggttctgctcctgggactcatggatctgcccacttctccccaccatcacggtccccaccaaggcccccagcatctcccacctggacactgccccagcctccatctcagtcttcctccctgctgcctccaccccaacccaagcagtcagtttctgtgttaatttcctggagctgctataacaaatacccacaaactgggtggtt

SEQ ID NO: 91231 - DNA, 1031 bp, Homo sapiens
atcctgctggggaccccacgaggggacatccaccctctggggtgtggccaggaaaagacaagctcttcagcttggggatccgatctggaagagagattctgatctgcccacctcctcttcctccttctctacaaaagctccggttgattcgagggaagtggtgaaaatttttttttctcccattttcctccctgcatctggggacacagctgccgtgaccagggaggccagcctgggaggtccagatgcccagggagaatcttggtctggtgaatccatgagctgcgataccacggctggggccatatgttcacctgctttcctgtccgttggtgaaggaatttcagaattcattttatatccaagactggcttttaccaaatttaaaagcctctcaatgcgtcctcgaccttgaactgtgctcaacagcctggccctttctggggccaccctgggatatggctggctggctggctttctttctttctttctttctttctttcttgctttctttctttcttgctttctttcttctctctctctctttttttttttttttaaatagtgctagtttgggcacagagtaatttatattccctttggttaaaatgcaggctttttagccaacaacaaaagtgttttccccccacccccactcgcccaccagggtgatgccacttttgcctcctgccctgaaaattggacttaagatgccatgtcttggccaggcgcagtggctcatgcctgtaatcccagcactttggaaggccagggtgggcggatcacctgagatcaggagttcaagatcagcctggccaacatggtgaaaccctgcctctactaaaaatacaaaaattagccgggcatggtgatgagtgcctgtagtcccagctactcgggaggctgaggctggagaatcgcttgaacttgggaggcagaggttgcagtgagctgagattgcacagctgcactccagcctgggtgacagagcgagactctgtctcaaaacaattggacttaagatggcatgt

SEQ ID NO: 91232 - DNA, 1091 bp, Homo sapiens
gattacaggcgtgagccaccgcgcccgcacggagaaatgctcttggtaggggaaataacttgtgcaaaggcgccgccgccgtggtgagatccagcttggcgtgttaggggaaatgggcaccctcgttcctggaaaacggtaggcctgtgggtgaccagcttccctatctgtcttcccacagtgcggctgggatccggcggccacctgcacctgcgtatctctcgggccgcccttcccgaggggctccccgaggcctcccgccttcaccgggctctgttccggctgtccccgacggcgtcaaggtcgtgggacgtgacacgaccgctgcggcgtcagctcagccttgcaagaccccaggcgcccgcgctgcacctgcgactgtcgccgccgccgtcgcagtcggaccaactgctggcagaatcttcgtccgcacggccccagctggagttgcacttgcggccgcaagccgccagggggcgccgcagagcgcgtgcgcgcaacggggaccactgtccgctcgggcccgggcgttgctgccgtctgcacacggtccgcgcgtcgctggaagacctgggctgggccgattgggtgctgtcgccacgggaggtgcaagtgaccatgtgcatcggcgcgtgcccgagccagttccgggcggcaaacatgcacgcgcagatcaagacgagcctgcaccgcctgaagcccgacacggtgccagcgccctgctgcgtgcccgccagctacaatcccatggtgctcattcaaaagaccgacaccggggtgtcgctccagacctatgatgacttgttagccaaagactgccactgcatatgagcagtcctggtccttccactgtgcacctgcgcggaggacgcgacctcagttgtcctgccctgtggaatgggctcaaggttcctgagacacccgattcctgcccaaacagctgtatttatataagtctgttatttattattaatttattggggtgaccttcttggggactcgggggctggtctgatggaactgtgtatttatttaaaactctggtgataaaaataaagctgtctgaactgttccctgtggtgtccaggata

SEQ ID NO: 91233 - DNA, 1004 bp, Homo sapiens
tggtgggtgcctgccctcgggggctcgcagcagatggcagtgactgtggagtgcaggggcagcagagtgggctgagggaggctggggtctgagtgggccacttgcaagaagaggggcatgtgtatatccttcagcactcaagtgttgccaggcaggttgagaagaggtccatgaatcacagccatggttggtgttgcctggcagctcgtgggtttctcccgggcttgattttgagccggcacatggatgtcggtggcttgttcatcagcctggcaggtaagccagggatgggattcacgattggacgtggtcattttggcccctggctggaaatggctatgaggggcaggtgtggagggtagtaaggagaggccgccactttgccaagaagctgccagaggcctggcctttagggttggcagaggggagggaggacggcgagggttggagggtcaggagtgagacctggtgacggatggcaaggtgacacaaagccatgagtggcaggtgtctcctgccccagcagcatctgtgtctaggaaggcgctgagcagggagcatccattgcagccattctgggtaattatggtaactcgcgtcattacggtggtagctgtggtacatttcaggccaccaggcgctagcaccccatcctggctctgcttccctgcacagcctcatgctcgctccaggtccaggcgccccatgtcctccgagtcttgtgttccttctgcagggagagctgcctgctgctcttccgggtgcctccctgttttcctttctggccacctgcctgtgtgacacagggagccctcataggtgacaggccctgagaggttgtaccggcccagggcaggtggccggtggggggcagagggcatgggtgatttgcatccagagcccttccctataactgagctcagggccccaaccggtggcgcccccagacctggcccccggagcagtcctctgggaggggaggaccttgtaggtcccaaaactcc

SEQ ID NO: 91234 - DNA, 1021 bp, Homo sapiens
ggtccagggactgcaggggatgtggggtggaggaccccttccctccttccttcctgggccggggaggctggggatgagtttggaggtgggccctgagcacactacatggcccagggtgcccagtggtcgtccccaccctgcacacacacaggaatgacactcctctatggaggagacctccccagcgctgaggcctctctggagtctcagtgttggcaggacatggccaggacttggtcctcgagggagcgtggaacacagccgaattcggcccggaattgggggtcacggatgcctgggaggggcctgcaggacatagatggataactatgagctgtccctgctgagcagctggtggggaggccacctttccacccgccctcctgagagatggaggggctttggggtgggcccttgccttggagagtctgagctccctgggccgcctcgcccccacaggttggcgctgtacgtttatgagtacctgctgcacatcggtgcccagaagtcagcccagaccttcctgtctgaggtaagccaccacctccaggctggccctccctcctcacccacactccgggggtccttcatttccactggggatccagggggtgggcccgcgttgcccctctgatggccctgggaactgagggctctgcagggtccaggccctgggctagcatccaggcatctggtccacatgcccagccgggacctgccacacatcctggggccctctgcccaccctgttacccttccctccccactccctccctgcccagatgttctctgggcaccctgctgggtggtggggcagggtcaggtagggccaccccctcaccaccttcctttccctgcagatccgatgggagaagaacatcacgctgggggagccccctgggttcctgcactcctggtggtggtacgggctgggctgctgtgggtgggctgtggaagggggttgagggaggcacgtggagcaaccatcttcccctttggcccacagcgtcttctgggacct

SEQ ID NO: 91235 - DNA, 1032 bp, Homo sapiens
ggatgggagatggggtctggaggggcccaggatccgggcagggccgagtgtgagggtccccccaggctgggacatctcgtcgctgaacctggccgaggcgatgcggcgcgcgaaggtgctggactgggggctgcaggagcaactgtggccgcacatggaggccctgcggccccggccttctgtttacatccccgaattcatcgcggccaaccagagcgcgcgcgcggacaacctcatcccaggctcgcgtgcgcagcaggtgctgtcccatcccgcatcccttgcttcctgccacctgttcttcgccacttggttccctctttttgccccaccccgcgaatccaggcctcacttgacacccggggaactgagtagcccaggcctctgtgagtccgagagtatgtacaaccaacttccctacaccctctccatcctccccacaccctcaccatccaacccacagctggagcagatccgcagggacatccgagacttccggtctagcgcggggctggacaaagtcatagtgctgtggacggcgaacacggagcgcttctgtgaggtgattccaggcctcaacgacacagccgagaacctgctgcgcaccattgaggtgggcgaacgcccgggtggagcgggtcaggcagggccagtcacagacacagctctgtgctgactgcccgccttgcccacagctcggtctggaggtgtcgccctccacgctcttcgccgtggccagcatcctggagggctgtgccttcctcaatgggtctccgcagaacaccctggtgcccggagctcttgagctcgcgtggcagcaccgggtttttgtgggcggagatgacttcaagtcaggccagaccaaagtcaagtccgtgcttgtggacttcctcattggctccggcctcaaggtgcgtgggcctagggagctgccgagtgcaggaagggggcctgggccgcgagcacctggcttgtggggccgcagggcctgcagctgctggggcttcccttgtacccacagaccatgtccat

SEQ ID NO: 91236 - DNA, 1067 bp, Homo sapiens
ccagcgcgggagaggcggggaagggggcggggcgggggaggggccgcagcgcttttctccggaggtcgcgcgcccgagagcccgcgctgtccgccgccgctgcctgagtcgactctgcgccggtgagtgcggttcggggcagggacggcctccgtggggacccaggctggcttggccccggccgcttagagtccccgctgaccccctgctcaccccgggcccccagcccgccgcgatggaggccgccgcccagttcttcgtcgagagcccggacgtggtctacggccccgaggccatcgaggcgcaatacgagtaccggacgacgcgcgtcagccgcgagggtggcgttctcaaggtggaccagggggctgaggaaggaggcgtgctggggagagcggggcggctcggggagaagggcacgggacccgggattcactgcgcggcctgtcttcaggtgcaccccacgtccacgcgcttcaccttccggaccgcccggcaggtgccccggctcggggtcatgcttgtcggctggggcgggaacaacggctccacactcaccgccgcggtgctggccaatcgactgcgtttgtcctggcccacgcgcagcggccgcaaggtgggggcgggaggggcgtggtgggtagggaggcttggtgggagtccttgcgggcgggggcgggagcctgcagggggcggggctctgcgggaccaggggggctgtagggggtggggttccgcggggcgaggggctgcaggggcgagggacctgcccgggtctggaggcctgtagtgggcgagggacctgcagggggcgaagctctgtggggcgggagggcttgcagggggcggggcctggctgcaggcggaccccgtggaagggtttcgcgaggtagcggggactcctcgggagtcttacaggggcggagcttaaggtgccggaggtctcaggggaggggcctgggggcagcggcttccgtcctggctgtgagcctggaactgaaaaatgcccgaaagtggggcggggcttgagagtctaggtggggcccaggccgggtcgcggccctttc

SEQ ID NO: 91237 - DNA, 1101 bp, Homo sapiens
ggtaaaccgaggcccaaacatctcagggcaaggatttcagcctgagggctgtttgtcctctctgagctttggttttctttctttttgaggagggtggggagactgggttcttgccattttgcccagacgctgggctgaacttgtgattctcccacattggcctctcaaatagatggaaactcggcaagtctcagttttcttaaaaaaaaaaaacaaaaaaacaaaaaaaccagaccaaccattgttcactgagctggtctctagcaccagcactgtcaccctgaagtctgtcccatcctgcccagtgtcctgcacgtggggttccccactctggtggcagagtggccattggaagtttggtttgtgccccagtgttgggccagccccctctggacagctagtgggcagagctgagggtaggagtgggggctcaggggagcgggtgcctgtttgagctgccaggtgacaggctgcatgtccctggaccctggcagggaacgggctgttgaggaagaagacgctggtcccagggccgccaggttcgagccgcccggtcaagggccaggtggtcaccgtacatctgcagacgtcgctggagaatggcacacgggtgcaggaggagccggagctggtgttcactctgggtgactgtgacgtcatccaggtgcgggctggggcgggacagggcaggggcgaggggcgtgccttgctgggtctgagtctgcctgacagctggctatccccacacaccccaggccctggatctcagtgtcccactcatggacgtgggggagacggccatggtcactgctgactccaagtactgctacggcccccaaggcaggtgagagtcagccacccttaggtctctgcaggtctcaggagggggatgggtggagtgggtgtacccctcggctcaccccatctacttgcccattttatagacaagaaactgaggctgggtgaggtggctcacacctgaaatcccagcactttgggaggttgaggtaggaggattgcttgagacctggagttccagaccagcctaagcaatatagaccgcatctctatacaaaaaaatttaaaaattagctgggtgtg

SEQ ID NO: 91238 - DNA, 1031 bp, Homo sapiens
aggtgttaggtgctttcccagccccgactcctgcgtcctggacccgcagtcctctgcttaatacctttgctttattagaaaacattctcctctactccgttcagctattcgctgagggcccgccaaccgccagcggttgtcagtggcctagaggcagcggacgcaaacacggggagaggtgcaatcgtctcaagtgactcggcgggcggggcccacaaccggaagcgggtgggcgaccttcacccacgtgcgctgcggcttcgttcgccagcatccaagatggcggcagggcggggcccaaggcgcggcgcgaattgtgacgcaggcgtccggcgtgctccgtgcgcaagcgctttcggcggcgattaggtggtttccggttccgctatcttctttttcttcagcgaggcggccgagctggttggtggcggcggtcgtgcgggttcgcgccgggccgagagcgggttgggggctgcgggaggctgcaggggcctgggcggcagaagaggcggccctgagctggctcatgcgggccagtctcggcagggtggctgggcagggctcgcgaggccacggctcggagcccagaccggggcccaggaggcgagcgccgttttggagaggagcctgcctgctctgcctgccagcgtgaccccacgaggcctcgggcgggaagaggtcctcggggcagatccgagttaatgagagaggggtattgagcgtgtagcgttaactctgccagtcactgcgtcagtcgctttggaaatactaaatttctcgagctgagtcttcatacctggctccattactacgtctgtaaggaggagctggtggtagtgtctgctttttagacttttctttagactatttgtatttttttcagatggagtcttgctctgtcgcctaagctggagttcagtggtgcggtctcggctcactgcaatctccacctcccgggctcgagcgattcttctgcctcagcctcccgagtagctgggattataggcgcctgccaccacgcccagttgatt

SEQ ID NO: 91239 - DNA, 1009 bp, Homo sapiens
cccgcccgctccgggcgtgggcgtgttctcggcgggcgtgcctggaggaggagctgggtccttgtgtggctgcagagtcagatggggcggggatttcggggcaccgggtcctcaccttcacgaaaaaggccccacagcacgtccccactacccgacgactcactcttcgtggcttctctctcctccccaagagcaggggtgggcctgtctcgcgttcccctgcgggagtcaggaagcgtccttcctacctaccagtcctcccctctggtgtctggggacacttcctgggggcctttcaggtggttggcgccggtgcagggcctgagagcctgggggcgcggcctcagggtccccacatgccgcagaggccaccgccagtacctgcgcagcggccctgactacgacttcgcgcgctaccggagcacagtgcacggggtgacccaggccttcgccgccgcctcgcgggaggtgctggcggtggaagcagagctgggcgggcctcgcaggcagccgctgctcgccggccacgtgcgcagcctgcaggagctggagcagacgcggctgggcacggtgaggccaccaccccttccccgccgtgtctctaggaccctggccggctcctctcatgacgcacccctggttggggggtggtcccagtatcccatacacagacctcaccccttcctgtcccaccccaatcctctattaaggcttcacttggggattctcggaccttgccctctgctgttcatccccaatttttttcccaagttttgtccttattcccagagcactcccgctttctcccagctccgcctaaatgctattccaagatgcccagatcccgccccaacaatgctccacccactctggttgttccgcgtctagggtcccaccctcaacctcccgtagatacaggcgaggggggtcccaggccacgcctcctccgtattattcctccatcacagctttagttctttgcctatttctctcttgcgatccgcctgct

SEQ ID NO: 91240 - DNA, 1095 bp, Homo sapiens
ttttttttttttttttttaagacaggctcttgctctcttgctctctcacccaggctagagtgcaatggcgcgatctcggctaacggcaacctccgcctcccagattcaagcgattctcctgcctcagcctcctgagtagctgggattacaggcataatttttgtattttgtattttttttagtagagacggggttgtgccatatgggcaaggctggtctcgaactcctggtctcaagcgatccgccctcttctgcttcccgaagtgctgggatttcaggcgtgagccaccgcgtccaggctttttggcctacttttatcctgggtccccgtccctgggaccatgaggcgcaacctaacccacccctacggccaatgcctggctaagacgtcactgttgttcccaggccacgcccacatcgcgctcagcactgcctctggcctgcctgctgtctcctttctgagagagcctctaaactgaatttcggactcttcctacacaaagcactgcccctcgtggttctacccgggcactgcctttctgggtgcctctgttttttcctgaacatccttggagggcagggggtgggttctgctcgtggagacatccttcgtgttgctcattcccccaccaggtggccctgctgcagttgatggagacgccagagctggcggggcaggaggacgctgtacggatgcagcagctgaaaatgaagtgagcgctgctgcccaagccgcctggctatgctcgatttgcaccagggttggcacggtcaggacgctgccagcagaggaaccctctgccagtgcacaatggtgttctcacctggtggccctcagatgtacacttccccagagggcacagccgtgaaacttcacatcagtttcgctgtgcattgctgggacactgctgtatacctcgacacatgccaatcctgcacacgtggctgtccgtggagcttggacatgccccactgagcacagaccttcagatgcctgtcctcagcccccaagcacacacactcatgtacacacacatttgacaaagtcacacttcataacctcctaatggtacacaccccaccaagatggccttt

SEQ ID NO: 91241 - DNA, 1052 bp, Homo sapiens
ttgtgccctcttgtgtgcctggaacatgaatgacacagaaggaggaagtgtcccagagacgtggctgagagggaggaagggagggatgggggtgtgcaaaagcttattgctctctgaggcttgcagtctggcaggtaggaattcccttctatgggatcaggtcgatcttttgcctttccagtgaggcttgtggggctgctggggggcagtgggggctggccttagtctctagctgcctttctagcctgccaggcaacgcccgcatctgcctttttgtcccacgaaggttttgtcttttggccaggggcgggggcagttcctgtcttccccctggcccttccagcggtaccacaactcaagaaactgtccccaggagggactgcgctcccccacccccgaccgcccccaacgttatataacttgtttgttccaacttctgtcttctgcaaccgagggggaaaaaagaaagagaaaagcttattctccttccttcctatctcgagggatcaacaaaaaacccgttgcctagtagaggtggtcattaatgactgagccgaacctcagggatggacagagtggggctgccctggctggggtgtgcggagaggaggtggggtccttgctgcaagcacaaaggacacttgttcaccagctggcctcctcccagctcgggccgcggggtctagactccttggagggaaaggaggcttgggccacttggggtgtcgcaaggggaggcaaaccctctggggagtcgcacctccccagctaaaattctgtcactgtgaggtacctgaccggcagagttttggaggaaccttctggccttgcagcctctccgacatgggcctttggcatccacgctttttggcccacgctccctggagacgcctgggtagggcccaggctcactgagtcatgctgttcctgggggtgaggtggggggatctgggtgagggatgtgccagcttcaggcatttgcataagaagtggtggctaggctgggtgctttggctcactcctgtaatcccagcactttgggagcccaaggc

SEQ ID NO: 91242 - DNA, 1048 bp, Homo sapiens
tccctgtccagctgtctgaagtggaagtgggggccaagcccgctgggttcccgctgccggcagccccgccctcctcctctggtagccgctctgcagctgtgcggaccagctctcttaacacttgttaaccccagcctccagtcccttcctgccccccaccccgccccttccacatgtctctccggagagggccgcacagaattcacaggactcgtctccaacggctgcgccagcaattccctagcattcctcctctgcagagtggattttggtgcatgtccagcgtgatttcagacccctcactgcgcagcggagtgcctgatcgctctgtgtgcaccaccacggtgcacactgaaaatattgtgatctgggaggaagtaaccagcaccttgggggaatcacagacctttcctgcgagggcaagggcttccggaattgaacaggctgggcctggaggagatcttgaggggtggaccttcaggcttgtaaaggcctggaggggggtcacccgaggatcgaggccgaagatgtttactgacgccacaactgtgaaattccacaggggtcaaagacggacccgggcgggagcggtctgggctggatatccggagagttctgctctccacgggatgttagaatttgaggcagtctgcctaaggaggcagagcagagaggcatgtgatcacccagatcgtctgagagcgggacattttcccggagcggggtggaaggagtgtcaaggtgactgtgagatgacagacacgtaggggagccccacagaggacccccaagacaccctctctgttgccatcagcctgagtcatcctctatctgaaaaacttccaggactgaagttcgagttggaagcacgcgttctccttggtgaagtccgtcctgtcccaggagggctgcgctaggtctctcctctggctccccctcctcgggtcctcgtggctctctgtcgtgtgaagcggggggtcaggagcgcacaaatgtttatactccacgtgagtcacttgcacagatgacgggtgatgttttcctcgcc

SEQ ID NO: 91243 - DNA, 1012 bp, Homo sapiens
cgggggttcgagggccccacgaaagaacagcgtggggagggaaggagcctccacagggtgtgtcagtagtgagcaggtggtcccagggcaacccttggagatctcgggaatcccataacaggtggtccacctgggggagtttaccccacccaggctccctggatgttagccctagcacatccctgcactgggacatctgagaggagcaggggtggtgttgccagggcagacctgggcgtgtccttgggtccagcacaggcctgggcctggctagggtgcccgatgacattgctggggggatacagcggcaagcgggtgtcagaatggcccctagcccgggccaggcctgtagcgggggcgtgtggccactcagaggccagattcgggcagagggtgcagccagggcgggcagcaatggcctcttgagacggccctggccggggctgctgacgcattggctccgatgactcacgtgcgggtgaccgtcactcgagtggccgtctggagactcggaccggctcagggccaccgccttcctgggggcctgtggccccgccgtgccggccgccccctgtctggaccagcctgagtaatgggtccttcccctcctcccagtggccggctggagaggaccttagtcatcagccctggccccggccctccctcctccgcctgcccacctccgcccaggctgcgtctcgcttctccgtccaggctgggggactcctgcccctcctggcctcctccctccttgagttccccaggaggggctgcagtggggtgggtttggcttcacaggggcggcagtgagggtgacgtcaggggcctcagggacagttgtcccatccctaagatgagaggaaggaaacagccatgtggaacgcgtcaggcatcaccagggcatgaggaggaggcctggggaggacaagctgcttcctcccctctttggtccagcgtgggccctgtgccctgtaaccagcagtggatgggcctcaccctgctttctgggcct

SEQ ID NO: 91244 - DNA, 1101 bp, Homo sapiens
tgaccacagcccctgccctctcaggaccagggtggagggccaggtctgcctcaggtggctgggcgcatttggtgtgcaggggcaggccaggttctgccaggctcctgtctggcagagcagataccctgcaaatctcacctgggaagttgctgtgggccaggagcaggggcttggggctggtgtctgagcacggcaaggcacccgagttcctcaggcctcagtttcttgtcaggcattctagcaagaccttcctcttggggcagggtggtgagcacactctgcaaaggtgatgctgaatctccactttgttcttgcagtgtggtgagacctctctcctgcatcctggggccttggggagggtttgggtgggctttgcagatgctcgtatccctggtttccagattcagccactgatgtgactggctcaggtagacttaacctcagtctctgattccttaggtagcactttcagtctgtgttactttgtaactagttgtttgtttctctgagagattgtgaccttatagactaggatttgtgtcttcatttctgtgttggtaatgattgggagctcactgtcacccaggtactgctttaggcatgctcggtgagtgtgccacatctgtcctcccagctccaagcagctacattcttgctcaggatgtagagaaagagatggctggtgaatgaatgaatgaaaaaaaaataagaaaatggccaggtgtggtggctcatgcctgtaatcccagcactttggaaggctgaggcagtggatcacctgaggttaggagttcgagaccagcctggccaacgtggtgaaaccctgtctgtactaaaaatataaaaattagccggacgtggtggtagctacctgtaatcccagctactggggaggttgaggtgggagaatcacttgaacctgggaggtggaggttgcagtgagccgagatcatgttactgtactccagcctgggtgacaagagtgaaactccatttcaaaaaaagaaaataagaagaaagtgtgcaacttgagcatccttccacgtgagtgtcccccacatatcagggcttctgaggcaggagtggccacttctttttgtc

SEQ ID NO: 91245 - DNA, 1161 bp, Homo sapiens
tagagactccagctctggggcctcgtgtatgactaggaagtgggaattctaggatacgtctttaaatactgtgtccagagcagaggtgatgggaggagctgctttttttgggggccgggggggggtttgggtttttcttttttctttttttttttgagatggagttttgctcttgttgcccaaggtggagcgtgcagtggcacggtctcagctcactgcaacctgcgcctcctgggttcaagcaattctcctgtctcagcctcccaagtagctgagattacaggcacgtgccaccacgtccagctaattttttttttttttgcctttttagtaaaaacgaggtttcaccatgttggccaggctggtctcgaactcctgacctcaggtgatccgccctgccgaggagctgcttcttggtgaatgcctgggatgggtacagggaggccttgcccctccagagcctccctggtgaggggataagttgacagcctcaaaggactttattggagtggcagctctgtgccagctgaagatgatgaccctcttgtccttcacccatcatgtcccctggcgtgggctgtggaacttctctgtgccaggcactgtcccctactgctgttttacctcatttcatgatagttcctagggtcaaatatatttttgaaattaatgttttatcttgaaacttttcagagagtgaagggagaagttaacccagaagtcagcttgtgttgtgaccagatcactgcagggcagcattgggcccagtgtgcatctgtgcgtgcaggtagcacgtgcccatgcaccccagccaggcgggctggaggggcctctgtggggtgctgctccccatgagcacctgtccctaggctcgcacaggtgctgcatcacacagcaagggcattaggccgaggggctgtctggggtgctgggactggcagtgggagatttggtgccgtccctaggggagctcccatcactcctccctggcccttaattttgtgccaccttgtgttctgccatgacacagtgctcccgctgcctgaccccgtggtggggttaggtggcctatgggggccatgccagggactgttggccatgtcatttgaggtgctggtacttgggagtggcatgaggagccccagtggctgtgtggtctcc

SEQ ID NO: 91246 - DNA, 1016 bp, Homo sapiens
catttccacatctgcatgggtggcagcttcgtagtgtttgatgagccttacactgtggtgggtctggcatcatgaagctgtcctcagggcacactgctgtcagtctgtaaaagtcaccctgctccttgtggtcctcagtcatgggaaagaagcatcttcctaagcatcctggttgtgggcatggacatggctctgtggctaggcgggggttagaccagctgtgtgggggaccggggggtgtagaaggccaccagtggcccttttttggccaggtaggtttgctagagaagagtgaaatccagtcagaacaagggaaactgtctcaaagcagagatgaggccagggtgtcacaccagagtcatcgaggctggttcttctgcactgagtcctggaagctgcagcctcactcaggtgacactgcgttctgctgcaggttgggcccgaaggcatcctgcagaacggggctgtggacgacagtgtagccaagaccagccagttgttggctgagttgaacttcgaggaagatgaagaagacacctattacacgaaggacctccccatacacgcctgcaggtgagctgagctcagctgggcctgggcatgtgctggacaggtgggtgcctctggcatgggcctgggacactcacctcccaggtacagggtggcgcccttgtgctgtgactctgggtggcggtgtcctcgggagtaaggaaattgctcaggccatgtgcacagccaaggcctgttaccggtcaggaggtgggctcagcaacctccgacaccctgaattcaccagctggtgggaaaagttttccttcctttggcctcctcagaccctgggggcattgcctggtacctgcgcactcactcatagaaagaatttgtcatggcattgggtgagcatctggggtgggagggtgagtggagcagctgagataccctcacaaagcagttgctgcagggttctggggcatccctgcctcccgctgccttggccgtgcctggagaattggatg

SEQ ID NO: 91247 - DNA, 1361 bp, Homo sapiens
gattttcagaaaaccacagccagtggtggggtgaggctctcccgaggctcctcgcttgggcttcggggcctgagcttcagggcgctgctgctgcagggtctgtgcccagctccctgggagcacagtgccctctgctggagcccagagttcaccatgaccactgggtctgaggctggattcctgaatttcaggccaaagaacggggactagaatggccctggaggagtgaggcctccttccagcaggactctccttggaggtggctttgctccttatcccctcggagcttctgccacataccccttccctgcattcttggatttgagaagccctggttaactggtttgatttggttactgggattgttggggttgagtatgtgtttaatgaagaacttaaaaatgttgtcagaggaaagaatttcacatcttgccaaatgaaaaccagagagcaagcttccagctgtaactgtcgctgttttgattttttagttactgtggaatacacgatcctgcctgcgtggtttactgtaataccagcaagaagtggttctgcaacggacgtggaaatacttctggcaggtagataatcagaccatgcatgtgtgtttaatcagtgctgtgctcagatttgtgtgtaaattatggaaatgttgaagcaaagcgtaatataaaatcacgctaacaaacctgggttttttcctcctctgtgactggtttaacttgaaacagatggtggtgtgtgaatgccttaatgtatttacccttgatttattctctgtggctctttttattatgcaagtagggttggcttaattctccttcccagtttttatttcgatttttctgcaagatgagctcttggcacacccgctgatcttcattaacgggaggatgttcccaaggcagtaacgggcatccaggggcgctggttcctgagcaagcttgctctggcctgagctcatcggagctgtccggaggctaattcaggccagatcctgaatcatcggcttcaattaagttcacttgaccgtcggcgctgggcttgccttcctgatgttgatcagctgcagctggactgtgtcgcttgttctgtgtttgggacaggacagtgttctcccagtgcccaaattccaaggggggagttcgatggtcttgcccgagtggtgggactctcgtcctggtgggtcccgtgctagcggctccccttcccctccaggttgctgtgtacaggtcactccactgctggagaggatggagcagagcctgggaggcagagctccgaggtgctagcaaggaagtgtggggtctttttctgaggttcacgttctggagaaagaaaatgaccaaagcccggaggca

SEQ ID NO: 91248 - DNA, 2917 bp, Homo sapiens
ccttgtgggaaatgtctctgaccccacagcagccctgggccaacaatgggttaaattaggcctgataagttggatttaagaaagcaggatttttaaaaaaggcaggaactatgtgaaccgtgttaaggaagttttccttaaagtggttcaagttgggattgatttttgtgctcagtggggagctagtttgggggagggctggcccccagagatgccagatggatgaggtgtgactgcctctgctaatggaccgtgaacggtaccggaacttttaacaggggcccgaaaattggaagtggtgaaaagccaaattttgggtgttaaccgtttatcatttcctggtttcagccacattgtaaatcaccttgtgagggcaaaatgcaaagaggtgaccctgcacaaggacgggcccctgggggagacagtcctggagtgctacaactgcggctgtcgcaacgtcttcctcctcggcttcatcccggccaaagctgactcagtggtggtgctgctgtgcaggtgagtggtccccagatgtctcctgggggtgacctttaagctccagccgtctcctcacaagccttggcccagcccagcccagccgtggctctaactccagggagttgtcctccaaagatggtttttgctgaagggtgaggcatgagagcgtttaggcgctgaggcttgttaaggagtcggcagtgccgtgtaactcttttggggcgttctggctaagtcataaaaacaattctgtaaaaacaaagtctgttctgagttttaagagttcagagctcaagtgcacagggagatgcgatttattactaacagtttgaaggtaatgtgatcacataataaaatgcagggcatgcccctttgggtgaaaggtcagcatgggagggggccctccctgctccggggcttcagggacgggagctggtcctcacggccccctcccgctctgcaggcagccctgtgccagccagagcagcctcaaggacatcaactgggacagctcgcagtggcagccgctgatccaggaccgctgcttcctgtcctggctggtcaagatcccctccgagcaggagcagctgcgggcacgccagatcacggcacagcagatcaacaagctggaggagctgtggaaggtggggctgcccagcgggccgacccgtgccttcgtgtggtttctggttgcggggaggggagtgtcttcagagacggcttgacccagtgagaccgctggagattctctgaaaggaattcaggcagacctctgccacctctacgtggaatgacctcagggcaccttggtcaccttccatccaggcagccttacctgaccgagaagatcctggccttggggaaaggaaagctctggctgctggaatttttcttgtcttgccggggtgaggatgggtggtgggaggggaagaatggggctggctgtgggcagacttgtcctgcagagcctgaacctgcccagacaggtgggctgcgagaatgtcctggggaaataggttggtgtcgaggtcggcacagtcagctgagacagaggggagaggagagggtgccgggtcaagtagtgggtgcctggccctccttccacagacagccctcacttttccccacggaagcctttctgtgcttccagctgtttaggattttgtgataaagtagttctaataactaggctagaagttttcatttgcctcccattcagtcagaaatctcacataggaaatgaagtgcaagttaaaatatttttttaagcattgttcagccgggtacctttccacttggattttccggttgccagatgatttcatgattcccgtttatatctgaacagcccagaaaatgtcctgtccccaccagcatggcactcactgagggagctggcccccaggggaagagctgcgggcccatgttggtctggctcagggttagcagacgtgggagacaggcctcccgggctgtggacacagcgagagaaaccggtggtctttgtggcagcctgcgaggcgggttagctgctctcgttcacaagctgggcatacttggaggaagcagctggctctgaaggtgccctctgctgtggacagtgtgtcaggctggtgcctggggctttgtaggcaggttcacccaagtaccggaaccccgctggggtgcggagcagcagctgaggcccaggcatgggccaggccggtgtgcagctccctgtgtggcatggagttcccgttcccagggttctccttgcaggtggggctgcgccagaacccctccatgccacccaccgtggcccattctgagaagcggcatgtgtgctccatccctctggtgcctctgcgccctcgttcatttgcatgtagggaaaaacaggacgagtgtggcgcggtgttgttgtcttctaggaaaacccttctgccacgctggaggacctggagaagccgggggtggacgaggagccgcagcatgtcctcctgcggtacgaggacgcctaccagtaccagaacatattcgggcccctggtcaagctggaggccgactacgacaagaagctgaaggagtcccaggtgatgtgtgcgagagggcttggcctggggtgggctctggctctcacagctctctcctcaggcttccagagggaggttttctctccaggctgtgggagctgatgtgggctgcagccgcgacacctgagagttggaacttgcggatccgggcctggcagcccggtggtctgagcccccgccctcagatctgacatcagcctcagtgttttctgtttaaatccaacacatctttcccagtggggtccacagctttgcccacagttgcgagagttagactcgggcgtgatccctgtgaagaccacatttaggcaacgggagccctggagcgctgacctcccctccctccc

SEQ ID NO: 91249 - DNA, 1049 bp, Homo sapiens
ctggtgtgcggtgaagcctccagacgggattggcctgtgtgtgttccggggactcctaatggcttctctttcagatgtgcccttggtggcatttggggctgcaggtgccactcacggcgcctgctctcacggcagaggcttgctgtagggcccgcctcatggggcctcgggcatgtggaggccaggcccgggcctgtgctggaggctaaccggggctcttgtttttcatgtgctcagactcaagataacatcactgtcaggtgggacctgggccttaacaagaagagaatcgcctacttcactttgcccaagactgactctggtaatgaggatttagtcataatttggttaagaggtgattttaagttttaaaatatttgtgaccataagtagcataaattcctagttccacccttgtaaagtgccccttaatttgaactctccctggtggaagcgacggcgtgggttaaaatggccacctctctcacttttttacctcaagacatgcggctcatgcagggggatgagatatgcctgcggtacaaaggggaccttgcgcccctgtggaaagggatcggccacgtcatcaaggtccctgatagtatccttcatgtgaagagggtgtggccggctggtgggagaggaaagtgggggcatcaggtggaggccactgtggatttgatgctcactgctgggccagcatctcatgctctgtggtgggtgctggttggcatcgccctccactgctcttaggagaatcacagggccttcaccttcaggggacagctggttgtatggttgcttcccctctgcccgaatggtgatgttggtgatgccacttgtgtggcgcgtccctgggctgactctggaagttaatgtatgccgcttgtgtggcacgtccctggactgactctggaggttaatgtggctgcaggagcgccttacctggacgctgactctgcacacggaggttccagaagccagtggtcacatgcagaccctctgagcacacacttgctcccaggccatgtttgggaatgtgcagtgac

SEQ ID NO: 91250 - DNA, 1318 bp, Homo sapiens
tttgcttgtgtatgtggagccttttgcttggccgtactgggaggggtgttgtttctgtggaactgtgagaagagctgctgtggccaaagctgggttctgcgagctctgcctgcccctgctggccacatgtgcaggagctcccggtgaggtcctggggcccaggatgtggctgctccctgctggtgagcgctgctggcttcgctgccgccctctgcgtctctgaaaggggcctagatgggtggctgggagtggcaaggaggaactccaggctggctgggggtgggacaccggctcatggtgaggtagagtctttcttcaaggatgctgtccttctggtctctggtctggtgttggctgcacgtttttagcgtttggtgcagagccagcggtgtcttaagtaactaaattttaaaaacgctgtttaaagagcgtgtaccaagggtggcccagaaaggtcagcccggcttttgacaaggatgcaaacttaactcagcacacagattatggcgatgagatcgccattgagctgcggagcagcgtgggtgcacctgtggaggtgactcacaacttccaggtggattttgtgtggaagtcgacctcctttgacaggtacgtcttctcccatcactgccccctgttccctggttgccacctgtggcatctttatgagccctccccgtcactgtggagtggggttccccacccagctctgcaaactcaggatgtcggagaggcggccacagctgtgcgtgtcgccaaccccaaaccctcctcacaggatgcagagcgcattgaaaacgtttgccgtggatgagacctcggtgtctggctacatctaccacaagctgttgggccacgaggtggaggacgtaatcatcaagtgccagctgcccaagcgcttcacggcgcagggcctccccgacctcaaccactcccaggtgcgcgccgtcctcagcgcgcggggcctcgcccatgggccgggacgcaagcggaggctgcccctaacggccgcttgtattgaaggtttatgccgtgaagactgtgctgcaaagaccactgagcctgatccagggcccgccaggcacggggaagacggtgacgtcggccaccatcgtctaccacctggcccggcaaggcaacgggtagggctgacacggcccttgcgggcaagacccgggagggctttagggtggccagatggaaggcctggtgctgggagccttgggctctgtcacaccgaagagagcacgtggcgggtagtgtcgccatggtgcctaccgctctctatgtgacattattcgtgtcagctccaacctta

SEQ ID NO: 91251 - DNA, 1600 bp, Homo sapiens
ggcttaccagcatggcggggtgacggggctgtcccagtattaaaaggcaagcccccctggagcaggcctggccccaccccagcctcaaggagaaggatgggagggggctctccccagggagctgcactggaggggtggtatctggaaatgtgtgctgtgcctggtgggggtcataggccctcagggccagcttggcctgtgcccttcactgctagtcagggtggctcctcaccccaccctaccccatcctgtctgctccggggaccaccgcgggacctcagtttcctcatcagagtcggggagggcagctcgggctctccctcactgtcctgtgtgctgggtacctgtggggctcaggtcgcagcctctcaccgcctcctgcccttctccctcctgacaggtggcggcggaagagctaagcaacgtggcttagtccatcagcatcttattctgggtaataaaaaataaaaataaacggatacctgttttccactgctaaaactgaagcaccactgtgtgagcaacaggaagggagagcgcacgagggagaggagccgaggccgagcgccccctgctggcccgcggcggcgaggagcagagggagcggaggaggggccggcccgcgggagccgcggccaccaggaggccccgctccgtcccatcggggctgcggccagggcggagggaggaagaccctcatctcagagtagccctttcctctgttcttttatttctttttctctttgattgaaaggggactacgtcttagcaggaaaaaaaacttcgcatttctgtgcccgagcaggctccttgcaaagacagcagcgtgcggggcagagccccgggagggcgcgtctgtccacgcctaccggacgcgccgaggtcgcgctgcctgtgttctccgagggccttcatttaaagaaaataagggtgttttgggtttttctctttgtttttttcaagattcttttaaaggagtactgaagaatactttcctaagtttgtctgtaaaatcttagcggtggacctgggagatttgagaagcttccagaaacagtttaaacaagccagcgctactggagaagaggagcaacacctgtgccgcggccggaggagttttgttgttggttttagcttccagtggcttctttctgcggggcatcaggctgctggggtagccgcccgccgagcctggaagctgctcgttctccgctggactcagaagccaagctgcttcccgcctagactcggcgcagggccccgcaccggtgaggaaggtgcttttggccccattgcgaggggccttggccaggactggccctgtggccaggaggcgagaaggtggctgttcccggattgacggctttttcccgggggcctttggaagatttggtggaaggacaagagggcctgtccctgtccccgtccccaggaggtaccgacagtccctgtgctggttagacacggagcgctgcacaccgaaagcccaaattgggagctctgcctgccggcaactttgctgatggggtgattgctgcttctggggggtaaggaaacaagttacagaaattaccgcgttctgtgtgaagggactgagggt

SEQ ID NO: 91252 - DNA, 1994 bp, Homo sapiens
ctggccgggtaaaaggagccagggggtgtgaaacggccagagaagaagcgggaaagagggccaggcggccgcgtggggctcccaggctaacctgcgccggttctgacccccaggaagccactgaggaacggcctggtgaaggacaagcgcttctgaacccctcggccccgcccccgtggacccggccccaccccgaataccccggccacgctccccgtccttggccgcccctccaccccctccaactctgctcctctagggccgccgccacctcccctgggaccccgccccctcatcctgcctccagttcccggccacgccccccaggacccctgcccctccggggacaccggccccgccctcagcccactggtcccgggccgccgcggaccctgcgcactctctggtcatcgcctgggaggaagatgccaccgccgcagcaaggtccctgcggccaccacctcctcctcctcctggccctgctgctgccctcgctgcccctgacccgcgcccccgtgcccccaggcccagccgccgccctgctccaggctctaggactgcgcgatgagccccagggtgcccccaggctccggccggttcccccggtcatgtggcgcctgtttcgacgccgggacccccaggagaccaggtctggctcgcggcggacgtccccaggggtcaccctgcaaccgtgccacgtggaggagctgggggtcgccggaaacatcgtgcgccacatcccggaccgcggtgagtggggctttcgctggggacactggtcctggaggccagacctcgcagggcgagcctcgagagtggcccggggatgcccgagcagctccgagggtccccacccgccctgtccaggctactagcaacttcggccaccgcacctcaccctttcctcgtcatctgctgcacgccggggacacatgtcagggggttcccaagaccagtccttctgcttgatgctgaagccctgtccccaccccatgcccacccccacctcttgacactaatgccttcctgcagatgccatccccacaccctagcatggcttccccaggggcccaggttctggctcatgtctcccacttcggccacccctcctcctatgccccccgccgagggcagcccaccccccccgccgcaccccgcagggcgccttccttggaactcatgccctgcccccactccatcagcccaccccgccgcttcacacccttcccacagacggtgcgccccgagccccagcgttcaccttcctccctgtccctaaccgagaccccatgggcaggccggggacgcagcgcgagccgagttcctgttcctacctccccaggtgcgcccacccgggcctcggagcctgcctcggccgcggggcattgccctgagtggacagtcgtcttcgacctgtcggctgtggaacccgctgagcgcccgagccgggcccgcctggagctgcgtttcgcggcggcggcggcggcagccccggagggcggctgggagctgagcgtggcgcaagcgggccagggcgcgggcgcggaccccgggccggtgctgctccgccagttggtgcccgccctggggccgccagtgcgcgcggagctgctgggcgccgcttgggctcgcaacgcctcatggccgcgcagcctccgcctggcgctggcgctacgcccccgggcccctgccgcctgcgcgcgcctggccgaggcctcgctgctgctggtgaccctcgacccgcgcctgtgccaccccctggcccggccgcggcgcgacgccgaacccgtgttgggcggcggccccgggggcgcttgtcgcgcgcggcggctgtacgtgagcttccgcgaggtgggctggcaccgctgggtcatcgcgccgcgcggcttcctggccaactactgccagggtcagtgcgcgctgcccgtcgcgctgtcggggtccggggggccgccggcgctcaaccacgctgtgctgcgcgcgctcatgcacgc

SEQ ID NO: 91253 - DNA, 1048 bp, Homo sapiens
tctccagaatctcccactgagggggcggcttcctcacaagttcttcctctcccctctgtgtcggtcccatggggctctctgtgtttcccaagatgcccccatataaccccctccatgttcccttcaagggtcacccccaccagcccaactcccttgggctgacgcatccatccgtctccctcatcgtaagcccaagtgtcccccttctggcccccagagccctcctgctcccctcggggcctcccccctcactcccctcccagcaccgcggcggccggacagctgggcactaagtttagccttggcaggcgcctgtgggctctgtttatgctccaggtggctgtgggcatgggggacaggccttcccagtgctgcccggcctggggagtccctgggcctcagtttccccaccccaaaggagcagtctctggcccccagcaccaatggctgcccgcctgtcttctcccccatagcccctggcgaagcggtgctgcctccagcccagagatgccgccaagatgcccgagagcgcttggaagtttctcttctacctgggcagctggagctacagtgcctacctgctgtttggcaccgactaccccttcttccatgacccaccatctgtcttctacggtaggggccctgaggggatggccgggagggctctgcttaaaacacaaagacgccaggcttgtggtcccagctactcatgaggcagaagcaggaggatcactggagcccaggagttggaggccaaggggagctatgagcacgccactgcactccagcctggacgacagagtgagaccctgtcttgtatcaaaaaagaaaaagagggccaggcgcagtggctcacgcctgtaatcccagcactttgggaggccaaggtgagtggatcacgaggttaggagatcgagaccatcctggctaacatggtgaaaccccgtctctactaaaaatacaaaaaattagccgggtgtggtgggcgcctgtaatcccagctactcgggaggctgaggcaggagaatcgcttgaacctgggaggcag

SEQ ID NO: 91254 - DNA, 1045 bp, Homo sapiens
aggagcgagggctccaagaacggtgaggtcggagcgggccggggcgatggagcgggagcggcgtggcgtgctggagggccgggagaagcgggggtcgccagtcgaggggactgcctgctagtgtcccccgtgccccccgtcacgggcacggcgcggtggggtgggggagcggggggcgcgcggggcaggcatgggggcgcgacacggcggtgcgcggggtctctcggggtccaggtccaacgggcccccagctccggcccccgcgcctgggtttctctgctgggaaacgggcaggggcgcgggcccgcctccagggcgccccgcgtccccgctggccgccccccagccgcgcccccagcggggcggagcttgcgccggtcccgcccctccgccctccgctctcccgcccgcgcgcccccggcccagctgcggcgcgtgacgcggggcgcgcggctccgtcggctaccgcgggcgggcgcaggcgacgggcacggcgggcgagcgggcggtatggcggcggcggggcccgcggcggggccgacggggcccgagcccatgccgagctacgcgcagctagtgcagcgcggctggggcagcgcgctggcggcggcgcggggctgcacggactgcggctgggggctggcgcgtcgcggcctggctgagcacgcgcacctggcgccgcccgagctgctgctgctggcgctcggcgcgctgggctggaccgccctgcgctccgcggccactgcgcgcctctttcgggtcagtgtggccgggggccgggacgaggggaccccggactgggggaagccgggaccggggacctggggccgccggcgcgttcctttcttccagcgctggctgctgcggatgaaggggtcgccggaacgtgggtgggggcctcgggctggagaggcccaggacgttggagccccaggataaggtctctcgggccgccgcgcgcccccttcagacagtgctgcgtgggggaaccgggtagatgcgggggtgtggccgggctggggtgagtctgggacatggggggccc

SEQ ID NO: 91255 - DNA, 1022 bp, Homo sapiens
ggcagggccctccatctggaagcacagcccatggaggctgcttctccagatgggcggtgagtgggccggggcctgaaaccccatcctgggtacctcccccagagctcctgggcctgaggaagctgagcggtgaaatgtgggagtgagggtgtcctcctctgctgggcggggctggtggtcctaagcacaggacttaggaacatcccagacacacacagtgagccctgggtgtggagcggccatgcaatgtgtctgtggcgacccgctgaccgccccctcgccctgtcctgcagcacagccatgacagtgcagatcctgctgaagctggaccgcctggacctcgcccggtgagccctcctgcccctctccacccgcactgagccacagcccagagcgtcacagcccagagcgtcacagcccagagcgtctgtggtgctgtcattactcttgttgtctttcctttccatgggggtggcttgctgtcgttcagcccttccctgcagtatgttgccagggaggagggccatggctctctgtgcctcagtttctctctatgcagtgggtggcaggcctctcccacagggtgagggtgggcttcatggagggagagtggaggttgtgcctggagcaacatgttacttgaccagcttgtaactgtgccgtggggctggcggggcctgcacgtggcatcaccaggtcggaggccatggctgggggtccaggactcccctgctgccgtttccaaagcccttgcctcagagttgttcacactgtagttccgttgcccttccctgcgttccatcctccatggagtgagtctctcctgagctctaccttgtggtggccaccctggggggccatagctggccccagtcccaccttcccagggcctgcacgtggtcagacgggcagggtggctcgggcacttagtcgtggggtatgagcatgcagtggagcacaaagcaggggccatccccaggctccggtgggccccaagtggggacaaggcagggatggccagg

SEQ ID NO: 91256 - DNA, 1072 bp, Homo sapiens
gaaagaaagaaagaggcaggcagcagaaagggtactgggacctgggcatattggagccagtttgagaaaggccttgaatgccaggcggagggttagaattgattctgggggtgtgtgagcaggaaaggtcatgagccagggagaggccaggacagagttggttgggggcagaaaggaggctgatgcttgagaccctctggctggggcaactggctggtggtgaggccattgctgaaaggcgaactgggggaaggcacaggtttgggataggaagagatgctgaggtcagcttgggtcgggctggtgaaggagggatgttccaggctgagcctggcgagggggcaggggccacaatggcctccaaggctcagcatcagagcctttgtgaacaggactgggcaagtcaggagcctgggggctcagggaggaaccctggggatggagaggggaatggggggcaggtccagaaccactacctgacccagcctggccccttcacacccacagggagctggcctaccagatcgcagagcagttccgggtcctggggaagcctctagggctgaaagactgcatcatcgtcggtggcatgggtacgggagctgggaggcgggggaagccccagcatgggaccctagcagctttggaccacctgcccagccctgcctctcatgctctgtcccccagacatggtggcccaggcgctggagctctctcggaaaccacacgtggtcatcgccacgccggggcgcctggcagatcacctgcgcagctccaacacttttagtataaagaagatccgcttcctggtgagttcgccccgcccctgcagacctcaggagctgggctcggagcctccaggcccaatgtcagagcctggggcaccatctcatccatttaggaaacgtatgtccgttagactgtccagtaaaacgctaggaacagtgacaaggaccgttcaaggaccaacaagagggggcccagtcctagcaatgttattcgggggtagggccttgctgagacttgggtgaggggcaggcctcccttggaaggagggtactccagggcctag

SEQ ID NO: 91257 - DNA, 1052 bp, Homo sapiens
cgtgtggggctcagaccaggccctgggaggggactgggcctgagtgggacccagacggtgtcctgggtggacgccccttgtggccagccctgccagccttctgtcgcttcagcgtctcctccaccttctccttgaagcgccggttcttctgcttgatcttggccagctcagccttgcgcttggcctccaggtcagggtcctggcacagggaggaccaggggatggctgagctggcggcccccgccagggaacctggccacccaccccctacctgcgggctcggccctcaccttcccctccaggatcagctgcttccgtttgttgatctccttcttttcgtcaaagtgggccgcctccagtttctggtggagggaagtggggtaaggagatgctggtcacgggggccccacctggaagggagcacccccggccctggagagcactttagttcctgcccgcctctgacactcacgatctcacactctcttcgcaccacgttgacctgtgtgaggatctgtagcacctcggcctcttccacggagaactcctccagcttcttctctgtggggacagcaaagccgggggtgggggtggggaggagacgtgacatggagagggagttcagccaagtagtgagttccccatgctgtggggtatgcaaggccatctggggccatatcaggtaagggtcagctgagcaagatcagggatttctgaggtaaggaaggtatggaccgctgtctttcagagtctcacggtcacccaagctggagtgcagtggcactatctcggctcactgcaacatccgcctcccgggttcaagtaattctcatgcctcagcctccccccgccattttttttcggtgttagcagcattatgagtttaaccatgaatattaatttcttgcaaacagtgtcctttaaagtccagatatttctttctttttttttgaagacagggtcttactctgtcgcccatgctggagcgtggtggctcaatcaggtcactgtagcctccgctcaagcaatcttccaacctcagcctcttgagt

SEQ ID NO: 91258 - DNA, 1035 bp, Homo sapiens
actaaaaatacaaaaatcagccaggtgtggtggcatgcacctgtagtcccaactactcgggaggctgaggcaggagaattgcttgaatctgggaggcagaggctgcagtaagccgagattgtgccactgcactccagcctgggcaacagagtgagactttgtctcaaaaaaaagaaaagaaaagaaaagaaaaactcaaatgtaagatcagagctttagggcgccacaggccttggttccagggagctgcaggacctctgtccacaaacgaaccaacggcgccgcaccgtgtgattttggagacggtgccagagagggggcggcaccaggattgacaagtgggacacatgggcttggggctggggaggtggatcctagttcaactccggaaggatgctctcctggcaagtgtgggaagggggtgctccctgtgaccagaggtgacaaacgcaggccagtggaggctgaggggatgcaaccatgcgttggagacatttcctcagcctttggattttggaaccctcaaacaacagcaaagataaccttaatccaaccattgtgggcatttttaccatcgtcttgggagggacagaggtggacagacgtccctgcttagggatgggacgggcaggggaacagaggcttctctctctttgtcttgcttcccgttccctcccgaagttgatctcttccgtttcctggcaacacccattgagcacttactgtatgcagaccctgagacccactgccccctccccaacctcactgggccacccatgtcagcccgggagggacctgacctccctcacaggcccaaagttatgacctcaggtagtggggacagaggcagctgtctcctgagaaggtgacaggagggtgaggtcacatcgctgtccgtgcaactctctccatctgcttcctatctctccgcctgtctcccccgtgtctctgtttctgggtctctttctcatcccagatgtccctctccgtctgtctctctgtccccaccctctgctcccaacccgaccccacgca

SEQ ID NO: 91259 - DNA, 1082 bp, Homo sapiens
caagtgctctgaagtggggctgagcagcttgaccaatgggcaatgaggagcttgagcctctctctgaggtgtccaggagagccacggaagatgctggagcaaggaggtgggcagcatcgccagttagaggggtcccttggtgtgtgttggtaggggggatcctagagggcatagccagggcacaggtggccaaaccagagaccccggcctgtgcctggggactaggaatactctccctctggcagacccagggaagaggctgtagcatgtgagtcacctggctgctgtgagaacattcggcgcgcggcagccccacgtgggctgtcaccaagcaggaacacggcccccagaggccctctgagctgccttccccacgggcttctgctctctgttcccacagctgctcccccaaggccacagaaggagcgtgggatggggggacaggcggggaggaggccgtgtaggctgcacagccagcatttgggagctccagggtagagtggggcttccccggcagagggctcactgtgttctggggctgccctagtctcaggactctgctcagggtggggaaactgaggctcagagaatggtagggtctgcgaccattctgcacatggacagacacctcgttctttcctaagagctgaaaccctgcccagggcctgcagtgtcaatgtgaccactccctctctctctggctccaaactccccatggctccccagtgccttcagaatgaaacccacacaactcaccaagacccacaaggctctgctcagttcctgtgaccccctaggtctcagcagtcccataagcttttctcccacttactccactctagacacctgtctaatgtaccagcaacatgtcctgcctggccccacctcagggcctttgcccatgctccgacccccagtgcctaaagcaccctttttaaattacacctgtttcatccctcaggaaaggtgcaaagagttcatgaaaggttatatgcccaggaacacacagcaagctggtgggacttgggatatgaaaccaggcccatctgactacccccactcccaccccctggcagcccctt

SEQ ID NO: 91260 - DNA, 1299 bp, Homo sapiens
gggtggttcagggagggtgctgccagccagttctcacccactgtctggcccccatcctgcctgcaggcctgtgccctggtgccccccactcttccctgggctgcgccctgtggtcatcacagggccacccttctttatccagggttccgctgagggccttcctactgactccttgaccccgggactggccattcccttacccagttttcctcacagtcttggcaccagggttatagtggtagctgagaggcacgactgacctcaggccagtgacctctgacttagaagttccatcccacccagggatgttgcagagaactggggaagtgactggagcttgagcctgagcatctggggagtcaggagggcatttgggggtgaggggctccaggcatagcctaggacagacccttgatccaggcatctccctgtggcccacatgcctggactctcctctctcctcagaaacccaaggacttggacttcgcccagcagaagctgaccgataagaacctgggcttccagatgctgcagaagatgggctggaaggagggccatggcctgggctccctcggaaagggcatcagggagccggtcagcgtgtacgcagcaggcagcctggggtgggagtgggtggggcctcagtccttccacctgcagcctgccgcttggctccttcacagccaagatggcttacagctggcagttgatttttgttttttaaacagaaggcatcttcagatgagaagctgatcatttacatgtgcaggtgtttacagggctcctttctgtcctggtgtagattttttaaccagcttgttggccctggtcattttggccacatttgtgaccatcataaaagctaagtggtatttctgtgtagtttccgtctggaactgctttcccattcccgggaacccatagccgggccagccagggtcccgaacacaggcccaaagtttattaaaccccgatcataacctccagcaggcatttcatttaatactgagcttagttcctgctgggtaaggcattccgaggtaaccagggccctctgggcaccccctcaaaagccagctcttcgagggtgagtactccttgtttctactgtgagtcgcgtcttgattttccctttctttgatgtctcagtgtgtgtcccaaacacctgcatctcatggactgtttgtgcccatgcccagttcctggcatgccaggccctgggctcaggtgcacaactgactctctttttcactccctaggggaaccccctcggaaggggaagggttgggtgctgacggg

SEQ ID NO: 91261 - DNA, 1065 bp, Homo sapiens
cctctgcagttttgggggactttggatcttccaggctgattgagaaagagtgtttggagaaggagagtcgggattatgacgtggaccatcctggggaggctgactctgtgcttaggggcggcagtcaagtccaggccagaggtcgagctctaaacatcgttgaccaggaaggttccctcctaggaaagggggagactcagggcctgctcacagctaaggggggtgttgggaaacttgtcacattgagaaatgtgagcacaaaaaaaatacccaccgtgaatcgtattactcccaaaactcagggcactaaccaaatccagaaaaacactccaagtcctgatgtgaccctggggacaaacccagggacagaagatatccagttccccattcagaagatccctctggggctggatctgaagaatcttcggctccccagaagaaagatgagctttgacatcatagataagtctgatgttttttcaagatttgggatagaaataatcaaatgggcaggattccacaccataaaagatgatattaaattttcccaacttttccagactctctttgaacttgaaacagaaacctgtgctaaaatgcttgcctcattcaaatgttccttaaaaccagagcacagagatttttgcttttttactatcaaatttttaaagcactctgctttgaaaacacccagagttgataatgagtttttaaacatgcttttagacaaaggtgctgtgaagaccaaaaattgcttttttgaaatcataaagccttttgacaagtacataatgagacttcaagaccggcttctgaagagtgtcacacctttgcttatggcctgcaatgcctacgagctaagtgtcaagatgaagaccctcagtaaccccctggacttggctcttgccctagaaaccaccaactctctctgccggaagtctttggcccttttgggacagacattttccttggcctcttctttccggcaggagaaaatcttagaagctgtcggcctgcaagatatagctccctcacctgctgcgtttccaaacttcgaagactcca

SEQ ID NO: 91262 - DNA, 1055 bp, Homo sapiens
gcttgcgcacagtaggtgcccagtttgtacttgttgaacaagtgaactaggatttatatacgactttggcttcctgtggcctcttaacctattgctacctcctggcacctctccttccctgttcatttgattttttttttaactaggtcatcgattctgattgaaaagctagaaagaaaggcattccatgaaaactctccctgaggcccactgttctcatatgcccgtagttcacttctcttcctcgcttcttacagtttctccatgtgtgattaagcaaatgcaagtacatcttcccctccgcccttttttatttttgacagagatagggtctcgctatgttgcccaggctggtctcaaactcctgggctcaagtgatcctcccacctcggcctcccaaagtgcagggattataggtttgagccactgtgcctggcccatttccccttttctacatggagaaggacagaattgggcactgttcagtttccatcatggcctctcttgatgtatcttgttaagcttctgccttccctcctgcctgcctcggtctgtggtttttcagctccagagagagggttgattggcctggccgacctttccgagggatgggttcagccagctttgggtcagctgtggtgggtgtggtgttagctatggttcctctagcctcacggtggcactgtgggctgagacttccttctaagaggcagtgaaggcaggtagcctcaataaaacctgtctgttctgagatagaagtagaaacacagaagtgctccagttgcagtaaaaatatccaggttatttggggaccaaacaccctttcctcagactaaaagagggattgtcaacccagatggctagagagtagggggatctgaatgagcgagggctgttggtgccaacttagagagtctgtgtcttgcccgtcaggctgctactgcccagcctgggttgacgtcatcagggcaaactcaggcttggtgcttataggtcttctgttttagtaagtagtcgatccagatttttaagtgacaccacacgcattttaaatg

SEQ ID NO: 91263 - DNA, 1057 bp, Homo sapiens
tttttttgagacggagtctcactctgttacccatgctggagtgcagtggcatgatctcggcccactgcaacctccgcctcctgggttcaagcaattctcttgccacagcctcccaagtagctgggattaaaggcaggcaccaccatgcccggctaatttttgtatttttagtagagacagggttttgccatgttggccaggctggtctccaactcctgactttaaatgatccgctcacctcagcctcccaaagtcctgggattacaggtgtgagccaccacacccagcctgaattttttgtattttagtttcatcatgttgcctaggctggtctcgaactcctgagctcaggtgatccgcccacctcgacctcccaaagtgccaggattacaggtatgagccaccgcgcccagctccaagttgttgctcttagtgtatttttttctctctcaccatagggcaaaataacatggcagccagacgaattacacaggagacttttgatgctgtattacaagaaaaagccaaacgatatcacatggatgccagtggtgaggctgtaagcgaaactcttcagtttaaagctcaaggtaaaataaagtgttgttgttgtagttgttgttttggtaggggtgtatcttagggccaaggcaggaagattacaataccttgggcaaataataccagtcctctgatccttagtttccttatttaggaggaggtaaaggtttttattttggtttggtttcttttttgtgatagggtcttactctctcccccaggctgaagtgcagtggcgcagttttagctcactgcacccttgaactcctaggctcaagccatccttccatctctgcctcccagagtgctgggattataggcatgagccactgcacttggtcaggggataatgttttgatctgtcagtcatcattatgtagttatctggagcttctcactggatatcctccccgacccacctcaagacagttttgtttattgtttgtttgtttgtttgtttgttttgagacggagtttcactcttgtctcccaggct

SEQ ID NO: 91264 - DNA, 1016 bp, Homo sapiens
cagccgccgtttggggagacgcgtttctccctgtgcgtattgggtggggctaggaggtagctggggctcccctgggtgccctagcctctgagattcagggaggagcctggggaagatcctggggggtcgggggcgaccttcttagtcccttgcccccggccctctccgcacaggctgtccgattctgccttcgactctgggcgcctctggttgctggtggtgctgtgcctgctgcggctggcggtgacccggccccacctgcaggcctacctgtgcctggccaaggcccgggtggagcagctgcgaagggaggctggccgcatcgaagcccgtgaaatccagcagagggtatggacgccccgatgacctaggccagagggaacctggggctcagggtggggttcctggtcctttgggcgtggagtcgtcccaaaccagaaggcctcctgctgcagccacccctgctacctgcccacaggtggtccgagtctactgctatgtgaccgtggtgagcttgcagtacctgacgccgctcatcctcaccctcaactgcacacttctgctcaagacgctgggtgagatgccgcggtgtgggggtggaggaggggcggagttggaagataaaacagagtggaggtggactctggcggggaccgcggtggggggggagaggcggggcctaggcagggggcggagactgtggtaaggcagggtctgagcaggaagcggagcctggagtggggcttgccttggacaggaagtggagcctggggatgggtgcaatctgagcaggaggcggggcctgggtagggggcggggactgtggtgaggcagggtctgagcaggaggtggagtttgggatggcgtttgccttaggaggtggagcctggggaggggttgcgtcttggcaggaggcggggcctggggagggggcagggcatgtattgaggcaggatctgagcaggaggtggggcctggggtagggtttgccttggacagggggcagcgcctgaggg

SEQ ID NO: 91265 - DNA, 1090 bp, Homo sapiens
gccaccatgcctggctaatttttatattttcagtagagatggaggtcttaccatgttggccaggctggtctcaaactcctgacctcaagcgatctgcctgcctcggcctcccaaagtgccgggattgtaggcgtgagccaccgcgcccggcctcttaagcagcttttgatgccaggctatgaggctgcaagtgggggcagaatggaggtcctggagtcatgtcaggagcagcattaggacagcgccaacaggcctgcatggatctcagctcctgctgtgttgatctgggcaggtccttgggcttttcggtcccaggggaggaaactgctagctggtaactcaccggggtttggtcagtggggtttggctagagcaggccatgcctgcattcctccccactcatggagctgggtggggatggtctgtcccctctcccatagaactgggttccctgggtggggtaggggtaagggtctaccctgttgtctcctgtccccatagacgctgaagcggaggggcattggcctcgatgggccagagctggagccggatgaagggcctgaggagccaggagagaagtttcggaggctggcaggcgaagggggtgatccggccttgccccgaccccggctgtatgtaagtgactccctggccctgtgaatgaggcattcctcctacttcctaggcccaagtcgttgaggctggtactgagagaggggcttagagccagggatcctagagtttggaggcaggtctctacctggttggtcaggaaaggcttctttgagaagtgggcactgtagctggggctttgaaggatgaataagagttcaacaggcaaacagttccttccttcatttcatctttgattcatcaaacactctgtgcagccccctcagtgccaactctacactaagtgagaggtcttggctctggacctacctgtcaaggacaggcagagccagacagaagctcccccagcctgtagggttagggcagggggaggagcaggtagggagcctggtgggaggtggagcaaaggcttcctgaaggtagagctgggcccctgaactcatcaggattttctccc

SEQ ID NO: 91266 - DNA, 1050 bp, Homo sapiens
tcctgacctcaatcaatcctcctgcctgggcctcccaaagtgctgggacctcaggctgagccaccgcacctggcctgctcattttcatgatcattattcatttattctccctgatgactggaaccccagccataggggagatggagcttgacacagccacacctaactcagagggccagaacagagggaggcccagaactgggaaagcccagagagagcatgtggactctgcctgggaagccaaggcacacttcccagacatttgggctgggttttgaagctccagtaggagtttgccaggttgtgacatgagaattaccagctcagccagaaagaatcctgaggcatgttcgaggaagggttaggccctgccaattcccctacaccaccccacattcatctcttcttcttctctcccctgcccctgtgggtcctgggtccaggtgacgttcaccaagcggaagttcgggctgatgaagaaggcctatgagctgagcgtgctctgtgactgtgagatagccctcatcatcttcaacagcgccaaccgcctcttccagtatgccagcacggacatggaccgtgtgctgctgaagtacacagagtacagcgagccccacgagagccgcaccaacactgacatcctcgaggtaccccaggtcctcctccccagccccacaaggccccgtgcacgctgctttctcagagcccagggactcttggtttgcacaaaagatgagtgtcttcatctggctttgtggctgacgtgctttatttctgctgtccctagaagggaccctccactcatccaaacatttgggagtgggggagcccttctggggacagcagaaataaagcacatcgggcagggcacggtggctcccacctgcaatcccagcactttgggaggccgaagtgggcagatcacttgaggtcagggattctagaccagcctggccaacatggcaaaacccagtctctactaaaaatacccaaattagccaggtgtggtggctcatgcctctaatcccagctacttgggaggctgaagta

SEQ ID NO: 91267 - DNA, 1029 bp, Homo sapiens
atataattgcaccctcatacacatttaggaaatggttaagaagtgtaaactgaacccttatccttgtcttcaatcttcctccctgtagacatctatcttattatggttattattcagaaaacccagggatacaggtttgtcttcttactttgataactcttcttagtttaaaataataataataacacatctttggtcatctatgtcacacaaaaattttcctttgtttgcggggggctggggatgcagtgttttttggggggtcttggtttatgctccctgcccttgagcccctcagccgtttgccctgcccccacctcggctccatggtgggagggggctctggtcttttctaaagtgggcggtttgtcttttgatctttcccttttggatgtgcgtgtgtgtctgcgtgtgccatgtgcgtggcacgcatatgagtgtgtgtgcgtgtgaacggctttgggtcctgctggttttgctgtgagctgcagtgttctgtgggtctgtggtatctgacactgtggacattaatgtacttcttggacattttaataaattttttaacagttcaacctgcccgtcaccacctgataccttcattcattcattcattcagcaagtatttacccgagcagctattgtgatccatgtactgtactgggtgctggggagatagtggtgaacagagaaggtttggtctttagtgggtagtcacagaaggcttccccgaggaggggaatggaatctaaagaagaagtcgcattaactagatgaggagagaaagaaaggaaaggcattccactcagaggaaagagtgaaagcaaaagtcttcttgcagaagggagcgggcgcagtggctcatgcctgtaatcccagcaccttgggaggccgagccaggcggatcacagggtcaagagatcgagaccatcttggccaacatggtgaaaccctgtctctattaaaactacaaaaatcagctgggcatggtggcatgcgcctgtagccccagctactcaggaagctgaggca

SEQ ID NO: 91268 - DNA, 1037 bp, Homo sapiens
ctgcctctttccagggtaccccactcacccccaacccgcgtccctcaaacacagacacacaaaatacttgagctgaacggactgtgagtccaatgagggacaagttccaaagtcatcagaactgaaggtagaagggaacccagtgggtactcccttggacaatgctgggggaatcaaaggggtcttcacctagggccaatcttccagggggtcctagtctaggagagtcagcactgaacgcaggctccgtgggctcagggctggaccagagggagggacccagtactggcggaatgtcagaggcacacaggactcaatggaagagggtttgggagttggattttgaaggatgaataggagttcaacaggtagaataaggtggaaagagcatgagcaaagtcctccagaggtggaaggggatggacacaaatagtatgttaagggggagggtcaagtgaatcccaagcttaaagtgaagggagacagctatatggggtgtgagctggggaggatcgtggtcaggtctgaggccagagtgaggaggaatggactgaaaggtcccggttgaagagtcacatagcaccccagacgtcaggtgcatgagggtgggctggggtgtacctgctgatcccgtgcgccccccgccaggcgtggtctttccctaccacccccgtggaggccgatacaagctgaccttcgcggaggcgcagcgcgcgtgcgccgagcaggacggcatcctggcatctgcagaacagctgcacgcggcctggcgcgacggcctggactggtgcaacgcgggctggttgcgcgacggctcagtgcaataccccgtgaaccggccccgggagccctgcggcggcctgggggggaccgggagtgcagggggcggcggtgatgccaacgggggcctgcgcaactacgggtatcgccataacgccgaggaacgctacgacgccttctgcttcacgtccaacctgccgggtgcgtaggcctcaccccaagactggcctctgctgcaacactaccccaaccccggg

SEQ ID NO: 91269 - DNA, 1264 bp, Homo sapiens
cggggagcgcagtccgggtgcgtaggggccgctcggcgggggccgcgcgggcaagatggtaagtggggctgcgggcgcgggtggtgtgtgccccgtctccccaatcttggattctatatctctctgcctctgaatctatatccctctgagtttcttctgtctcttccttttctctgtctctcaccctctttgatctctctttttggcactctaggttctctccctctccatttctccctgcctctctccatctctgtcatcctctctgcctttttcctctcctctccgtttctgtctttccctgtccctatctctccctcctcttctctgagtctctctgcctctggcactctcctgtctctccctctccctttctgtctctccctctccctctctgtcgctccctctgcctctctgtctctccctctgcctctctgtctccctctgcctctctgtctctccctctccatctgtgtctctccctctccatctctgtctcttcctctgcctctctctctctccctctgcttctctgtctcttcctctctgtctctccctttccatctctgtctttccctctccatctctgtatcttcctctgcccctctgtctctccctctgcctctctgtctctccctctccatctctgtctctccctctacatctgtctcttcttttccatctgtctctccctctccatctctgcctctctctcttcccttcccctttttctgtgtcgcgcactctcttctctgcctctccctgcctttctctctgtccctgttctctccccgcgtctctccctctttctctccagctctcccccctccctgcccgccccggcccggtttgctgcagtctcctggcgcacggataaccttgctgccgccgctcctccagctcttccccacccccctatccccggcccgggccagggccagaagggggcggggcagcgagcctcgggttttggggtgggggggaatgaggcgggatctggggcaggactgagggcgggggggagtctaggggcgtgggttcttgcagaagctaggatgtgaggtcccaagaggaggagggggagttctccaggaccccggaaagggtggggacatgggcgtgagagaggtcctcgctgtggggaaggcaggcccgggagggagccaggcctccgaaaagccaaggctgggaggctggactgagcgccccgtgcccgccccccaggtgtgcgctcgggcggccctcggtcccggcgcgctctggg

SEQ ID NO: 91270 - DNA, 1125 bp, Homo sapiens
gttgatgttctttgtccgcagtcctctgtcgtgtctagtgcaggaccatcctggtcagcacagggcaccctgagggacttgaggcctcccagttgtagttgggcagtgtcggtgttggctcccctgaggagctgcaggcgcttgcctgtcagtccctggggtcagctcgctgtgacccctcctccaggcccgcagccccgtcacatcacccttgaccctcccaggggtcaggaccctgagtcaccctcattcagtggccaagaggtcctccgtgctccacactgggatttagagaacccagggcagtactcagtacttgctagagtccttgctccagtcctgcccaggggtccagatgagccacgttccggcgggggatgcccagcactggaggcggggagcaggagcggggctccggcaggccacagcaccgtgccctggctcactggcgagtgtgccctgcagatgcagcagatgtacgacatgatcatgcagcacaagcgggccatgcaggacatgcagctgctgtgggagaaggcagtccaacagcaccagcacggctatgacagtgatgaggaggtggacagcgagctgggcacctgggagcaccagctgcggcgcatggagatggataagaccaggggtatgtggggcagcggggtgggccgggctgggctgggcatggcccccctcacctgccctggaaggttacctggatgcgccacacgtggtcttgagctgccatcctggtttagcccccagcctgcttcctgtggctgtgaggcctggagtgagaggctcagtctctctggggcctagttttctccgtggtgaaaaggagcagtcctgacatcgtgagggtggagagctgcacagggttcactaaatgctgggctgcctcaccaggcagaggctcgggctggggtcatggcctagccgcctccttccctgggggccccaggctcccactgagcctcatacctgtgccctgggagccaccaggcctgctcccctccttcctgcttctccctcttctcacctttctgcttctctgagcagaatgggccgagcagctgacaaagatgggccggggcaagcacttcatcggagacttcctgcctccag

SEQ ID NO: 91271 - DNA, 1012 bp, Homo sapiens
gcctccctggccccaagggcctcagagattctaggtcaaggagaaaagctactgaatgaagattcttatgcttaccagggctgtagccagcaactgcagccagggtggagggtacctaggattggtttgtcactcaagtgccgaaccctagtgcttagatccgggtgcttcaatgcgcacacaccccagctctgagacacccagcaggtgaagaagtcgccctgtggcttagttggacagaacaggctccaaagtctgaggcccaggttcaagtcccactgatccatgtcctcagggagcatggcagccctcacccgcccgctcatgtggtggagtgggcctgggggaaagggactgtgggcatgctctaaggcaatcaaccagatgctcagacttcggctcctgcgtctccccaacagggctcccccacatccctcagtgccctgtaaaccaaggaaggactaagagtgcaaatgtgggccattcttagcggcaaagcccgagtgttgatgagctggaaggacccaaatcttttcccttcccagagggcccgctgcacccctttgctcaccttctcccccgggaagcaccgcaccgcccgaggggtggtggtttctgccacccggatggggctgttgcagcatctttctatgtgtcagtgttactggagcctgccaagttccacagctgatgccaaattaaatgtcagctgctctgaggatggttggctgcctcccctgaaggagctaagggagtcgcacagctgagtcttacgccagactctgaatctgtgcgcgcttacacctggtgtctgttagcaacggagctgccttctgagagcccgtttgtgcgtgcgcccatgcatgctgcccacatgccgtctcagctctcttgtctctggctctgcaaattcctgccctgtcactcgttagctgtgtgaccctgagtgagtcccggaacctctgattcttggtgtccacatctgcaatgtggtggtgcgtagagcctggct

SEQ ID NO: 91272 - DNA, 1932 bp, Homo sapiens
tgtgtgaagggctagccggtgaggtcacatcaccctgacagcacagactgaagcgactgtggagttgtgccatgacagccttgagatcccttgcttctggctgtgtgtccgagcggatcagaggccagcttggcccccgggccattagaatggagctggcgtgtgtcctttccttaaaggggtgccccagcagctccaagggtaccctgttgggaactgctgcattacaaggggtattggccatctcggggcccttgaagcccattatgacccactgtctgcatggcctcagaaacgcacctgttcctgtaaacagcaaccaggtcaggattgttgctgggcccatggcaggagggcgacctagggtgaaagacagtcacggaatgctctcgggacctcacaggggccctcgttgggctacacactccccacctctcccccattcccagcagcccaagcaacaaggggaataagattagccacaggtctggcatgttgcccagttgccaggcacttgctggcagcgagaaatttctcttgtgcatctcctacaaggactgcagtctgtgtagtagctgacaaactcacagcctcagaaacaggccaagggaaaaatgcaaaagcaagttccacatggctcagtggggaggctaatccgtatataaaaatatatctttatagctctgttcactgaaaaggccccgaaataatgattaagcctgtggcattgagcatccctagctcccagatgctggtctggagatgcagtttctcatggaaaccgacttcttggagaagtggctggctctgggtctgggcaggaagtgtatgagatgatcttggagcgcctgtcctggcagatggcaaggaggccatcagagactcctggggccatgtccagagccctcaggagccagcttgaagaggttccaccggccgcagagcttctatgatgacactagttgccatggatcgaaacccacccagtgtgtttaaatcagagctcataatggtattttttaaaaaagaacgtgtcatctttgaaggatgaaagggaaccgatgtattatgctgaaaactggtaaagaaagaaaagaattaagcatttcccccaccaaaaccaggggaagctggatatattttctgctagcttccagcctggagctcaccacagcctcacacacttctctcccacctagtgtgtctcaccaagacagtgagaccgactcccccctcgtcatggtgttttgtgcctggactcgggacgcccgacagcctcctgcatctcacactcttctccccccaccccctctgtcgttgtggtccatagagagagtgtgcctattgactgtggggtgtgtgagttgaaccccagtactgacagcctccttaaagtttcacccccagagggagccgagactcggaaagtgatagagaaattggcccgctttgtggcagaaggaggccccgagttagaaaaagtagctatggaggactacaaggataacccagcatttgcgtgagtatctccggggaagggaaggctgtgctgttgaatgcgtttgctgcacagtcgcacgtgtggggctgggtgcttgctagtgtgggccggatgctgttccaagcgttttctgattctcaccagaagtgacaagtggctcccatgtggcacggagacttgctttcgggtccctgctcgccagcctgcctttttttgcacgatagaagctgcagggatatgcctgtcacagatacttattttcccctctcttctgcaaacttcctcctctccagatttttgcacgataagaatagcagggaattcctctactacaggaagaaggtggctgagataagaaaggaagcacagaagtcgcaggcagcctctcagaaaggtaggtggacggagcgggtgggagattctggggaggc

SEQ ID NO: 91273 - DNA, 1065 bp, Homo sapiens
ttagccaggtgtggtggctcacgcctgtaatcccagctactcaggaggctgaggcaggagaatcgcttgaacctgggaggtggaggttgcaatgagccgaggtggtgccactgcattccatcttggctgacagagtaacagttcgcctcaaaaaaaaaaaaaaaaaaaagccactggggcacggtgcctcatgcctgtaaatcccagcactttgggaggccaaggtggaaagaatgtttgagaccagcctgggcactatagcaagacctcatctctatgaaaaaatttaaaaattagccaagtgaggtggtgcatgcctgtaatccaagctatttgggaggctgaggtgggaggattgcttgagccggggaggcggaggctgcagtgagctgagatcacaccactgcactccagcctgagaaacagagccagaccctgtctcaaaaaaagacccaatggatcttgcattcttcatcttagtgcttctccatcactccccaaagcccttataataaagcacagatgctctgacatgcctcacctctgcctgtccctggagcaggcccctctgacactgggcacttgctgctccttggatgtaccaggcttcttcctgccttgagctttcacatctgctccttcttctgcccagatcatctcccatttggcttttcatgacgctggcttcttatttgttttttctggtttaaatgtctcctcttctagtgtttattttctgcctgtcctacctgcatatgtactctcctgttactttttcacccttttttggttttcagcagagctcttaccacattgtgcacttacttttttttttttttttgagacagagtcttgctctgttgccaggctggagtgcagtggcaccatctcggctcactgcaaccttcacctccctggttcaagcaattttcctgcctcggcctccctagtagctgggattacaggcacatgccaccatacccagctaatttttgtatttttagtagagacagggtttcaccacgttggccaggctggtctcgatctcctgacctcaagtgatcc

SEQ ID NO: 91274 - DNA, 1001 bp, Homo sapiens
ctccaggtggctgcgcgcctgctcgctgttcttggtgtggtgatagagaacggagcccagctgcaggtgtgtacgggcctcgatgcgctgcggcggcttgaaggggaacacggcctgcaggcagtgcacgcacaggcggattttgggcgggctggaagtgcggaagtgctcagcgaagcccagaagcgccaggtaccacgagtcggccgcctcggcctgcgcagcctgggccgccgccgcctgggccgctgccgccgcctgagccgccattttggcctccacaacaacaagccgccgccacagggaggcggaagcaggcgcgcgagacggggccgggctctcctcgcggcttccgcgagatctgccgcccaaagcatcctggaacatgtagtttgtatttgggatgactgccgctccgggaaggtgtaaaagggcgacgccgtttggttatcgtgactgggacttaggcatcgctgataggctgaggcttccgtttctggaggttaaaaaaaaaaaaacccagtcgttcacgcagtaatagggcgagtctgaccgaggcggactacatctcccatcaggcgatgcacactataacagggccccttaaggggcgccggagcattgtgggattggatgagtctcaagatggacaaccgggatgttgcaggtaacagcccccgcctcctctcaggcggccgcctgggtccctggggctaggtgtctcccctgactcctcgggtccgtcctgctgcgacccgtggatccctcgcttcagccccggggcagcccacagcgtcggcttctgcacctcttggtttctcgagaccccagacccaggttgctggccgcccccgcttggtttgctgaggacgcacggatctccgtagaggccgccacccggctcggccctgcgtcccgtttccgaaacaaccgccttcagggctgctccaacctccgttccccaatacggcgacaaccttgggctgtccctgcacccctct

SEQ ID NO: 91275 - DNA, 1037 bp, Homo sapiens
gcctgagaggaggcgggggctgttacctgcaacatcccggttgtccatcttgagactcatccaatcccacaatgctccggcgccccttaaggggccctgttatagtgtgcatcgcctgatgggagatgtagtccgcctcggtcagactcgccctattactgcgtgaacgactgggtttttttttttttaacctccagaaacggaagcctcagcctatcagcgatgcctaagtcccagtcacgataaccaaacggcgtcgcccttttacaccttcccggagcggcagtcatcccaaatacaaactacatgttccaggatgctttgggcggcagatctcgcggaagccgcgaggagagcccggccccgtctcgcgcgcctgcttccgcctccctgtggcggcggcttgttgttgtggaggccaaaatggcggctcaggcggcggcagcggcccaggcggcggcggcccaggctgcgcaggccgaggcggccgactcgtggtacctggcgcttctgggcttcgctgagcacttccgcacttccagcccgcccaaaatccgcctgtgcgtgcactgcctgcaggccgtgttccccttcaagccgccgcagcgcatcgaggcccgtacacacctgcagctgggctccgttctctatcaccacaccaagaacagcgagcaggcgcgcagccacctggagaaggcggtgagcgcgggccgggccgcgagggaggagtcgcgggctccttgcaagatctgggctgacgggtcgcgaccgcggcgggtggggggccgctcctcggcgacctgggggcgcgacctccgtcaaagccgcaggacccccacccgcctctgccggaccccaaagccaccagcctctcaagggacacgaaagcctcgccccccacgccttatttcccgtttctggtgacagggctccaggagccccgtcaccgtactctgaaagttgcctgttattgggagcaacaggatccgcaaatcgtctggttttcaggaggatcccacctgttggtggcgatgggg

SEQ ID NO: 91276 - DNA, 1050 bp, Homo sapiens
ttgccttgcagggtcaagccaggcatgtgcctccctttcagcctgttcagactttgacacttgcctctgagggagtccctccttgtcggccctggaacacactagggacaccccactgaagacagaccccacaaagcactcagaacagccttaggtgctcacacagccttgggggtctgtgccgtgagccttggctgctggttctatgctccattaagtttagatagtgtccactgcaggcaccattcagtttagatgacatatatactacaggccaactggagctgtgtacccaaagcaattagcgttgataagataatttggttaatttagctcaaaactgacacaggcagtttcactgacgtggggaggtttggttgagtttgctaacagagcacgaaggcaggtaccgtaaaactgatgggtttggcagcaaaggtcactgctctctttcctttttagcaactgcacacgcttgagaaggacctggtgtcggcctgtgacctcctgggtgtaggggccgagtacgcccgggtggtgggatctgaatacacacggtaggcacccactcccctccttccctcctgctctgttaacaggaggggcttggccatcttggtccaggacaaataacagaaatggcatttcaggtgaagtacagtagctcacagtatattcccagcactttggaaggccaaggtaggaggatcacttgagcccaggagttcaagaccagcctggggaacatagtgaaaccccatctccacaaaaaatacaaaaattgggtccgggcacagtggcttacgcctgtaatcccagcactttgagaggctaacgtgggaggatcacgaggtcaagagattgagcccaccctggccaacatggtgaaacctgtttctactaaaaatacaaaaattagctgggcgtggtggtgggtacctgtaatcccaggtactcgggaggctgaggcaggagactagcttgaacccgggaggcagaggttgcagtgagccaagatcatgccactgtactccagcctggcgacagagc

SEQ ID NO: 91277 - DNA, 1050 bp, Homo sapiens
ctaggacctgacccctgcctcttgttttgcagggcgctgttcctcctcagcaaggggatggtaagttgaggctgggcatggctggatgcagctggtgttgtggaggtgaggcagggcccccacagagtctgctcagaccccacccactctccatggcatggccccttaggcgcccagacccttaggcacagtgagcagcctggaatgtgaggcccgggccctgctgggttcaggagggaaactcaggctgcaccctatgggattcatgctgaggcaagagcctggttaggagctgcctgggctggggtttcaggctggccttgccctctggattggtggcagcagtcccagggcaggtgggcaggtgaccctgtgctcccggtcctgggagggcccctgcaagccctgtaccctacacctgcgcctctccctccccagctgctgctgatggagcgaaagctgcaggaggtgcacccgctgctgaccctctgcgggcagatcgtggagaactggcaggggaaccccatccagaaggagtcgctgcgtgtcttcttcctggtgctccaggtcacccactatctggatgccgggcaggtgtgtggcgcctctcaggcgagctgctggttgtgaccagtgggtatgggtggtacccaggccaatgggtcttgggctgtgaggtcagctgtgtcatcgccttaccttgccacacaacagggctgtcataccagtcccggacacacacactcctgtcctgctctgccacgagtgctggtatctgggaacagggtctgtcctggccaccccacctccctttgggagtactatgtgtgacattgcatacactcgctcagtgtatggatgctcagagattccaatggcagttcagggaatcatgagaataaaccacagaggtgctgggatggcacctgcacacagcagatgcccaggtgctgtctgtctggcccccggctgtggggttgagtagggactgatgtgctcagccatgtccgagactggactcatgaccctgccgtgggtggggagcggctg

SEQ ID NO: 91278 - DNA, 2891 bp, Homo sapiens
agtaacttgtaaccacttcgtgtccacgcacaagtctcaagctaaaaatgtggggagagtttgactgaagtagagttctgaagtataggctgcgctagtgtttggtttagcatttcaacaagttcttccctctgactccattggaactgcagttcactttacagtttgactgagggcagtctctctcctgttcatttccatctgggtcttgcttaatttgagtcctttgtgaagactcctgccgaggctataatttgagttctaaatctgtcggtggaccatgtggacacaagtttcaactcgagctattttcttctggggagaagtgcttggagactttcctgggccctctgctgctgggctaagtcaagtccaggcaggaggctgctgcagacttggttgctcttctcctgcctcttcctggtcagctgtaggcactgccctcaggggaagggaaagttggaggggagtttgggactgagatgagggtagagaagtgcctgaggtgagggtagagaagtgcctgcacgtatttactattttattttatttttttgagacagggtctcactttgtcactcaggcgggagtgcagtggtgcgatctcggctcactgcaacctctgccctactggctcacgtgatcctcccacctcagcctctgaagtagctgggaccacaggcgcatgccaccacgcccggctatatttttgtatttttggtagagacgaggtctcaccatgttgcccaggctagtctcaaactcctgagctcaagtgatctgcccgcctcagcctcccaaggtgttgggattacaggcgtgagccactgtgaccgacctattattttaaataaaacctataggaccagcagatgggatgttaaaaagggaatggacaactttgaagtcagaaggagccagttcagattctggtgctgcccttcttagttatgtggccttggacaagtgatggcacaaaattggcatgttattaaatattcgagggaacacattgctgtgaatgtgtgtgtcaagttgcttactgatgatgggaggtgcttactagatggatgaatgaatgaatccgagatgatgaactggaggtggacagcacagctcctggcacacagttggtgtgcagtaaaggctgcttgttgtattcctggcctggactcacagaccaggaagcgcttgatattctgccaaggctaaaaatgcccaaagagaaagaaacttggtatgtctcttggaaaacccactcccctactgcgtctcttagcaagagttttctgtgttctgataccagatgtgagatgggtttactgtatggcagggcatttgtgtttctcttggccttggtgtctccccctgtaaaatggggtaatttgtgaattaagggcaagtagggagatgtattactctaattagaccacaggcaagatagaagattataatggacttgaagaattgtgggaagaagaaaatagatgaactatgtacgcctaagggatcacatgcgtattatgagactgcttgagtgagtgagtccagcagttacctggtgagtgatctgttcttacactttagaaccttgaaagaagagccattctttcattgtaatagatcagatttggggacaaaagactgggaaagtgatgtacaaagccatttgacgccacacaataatagtactttgagagggccagtgtgtggcttagtgcccacgaggagatcagaatgcacctcaagctcccaaggcccagagggctgtggagatgctaactcagcttagaggctggggcaggggtcggggggcagtggaatagaggggagtggacaggacattttacaaaatttttttcttgagaggatttttttcttaacaattagtaaaagccatagaatcatggctggtgaattaggcccagccttcttcacttactagtatgggaatagatggcattctgcccctgacggctaaaacccaggaggaaataatgggtgaaaatctgaactaggcccctggtgggctgctcctatgtttgaagaaagggttgtgggtttttttgtttgttttcttcctggaaatataccctctctcttcctccttccctcctttctttctctctttcatgcacacatatatagacacacactgactttggtattgaagcaaagaaatatgcaccaatcttaaatttctttcaattcttttaaggacagttattccattacatgggaaaggagcaaaatttattatatttaaaatataagaactaaggtaaacaactttaaagggatcactctcccctttaaaattatgctatgtctcttgtgtaccacagacttcactttggtggatggtggggccaccaccaagtctctatctaacaggaagttttttaaacttgtttttttttacttgaaggatccttacagcaataaaaaaccttggatagttagaaatgatattgatctaggtacatttattagatgtaatgtaatgtggttatctgttggtgggcaggtctaaaaggcatgtgggtccaaacactgcccagcttctaactctggacgataaaaactgttgatttatggaactgaaatagctagggaagtcagggtttccttcctgttggagacagcactgggggcattaaatccctgtgggatcttgatgataagaaataagctgacctcttttggaattgggaaataactactgtgtcaagtggttccatccaaatgaatggatggtgttatttttgatttctagttttaagtttgacttcatcctctcagaaacttgactgcctttgtttatactggtgtgtcttttgaataagagtttttcctttttttttttttttttttttttgagacagagtctt

SEQ ID NO: 91279 - DNA, 1063 bp, Homo sapiens
tgggaggtggaggttgcagtgatccgagatcgcgccactacactccagcctggtgacagagcaagactctgtctcattaaaaaaaaaaagaaaaaaagaaagtacagtattaattaacaacggctatcactaagggttttttttttttgtttttgtttttttgatttttttttttttttgagatggattctggctctgtcggccaggctgtagcgtaatagcgcgatcttggctcactgcaacctccgcctcttgggttcagcgattctcctgcctcagtcttctaagtagctgggattacaggcgtgcaccaccatgtctggctaatttttgtatttttagtagagatgaggtttcactgtgttgaccacgatggtctggaactcctgacctcaggtgatccacatgcctcggcctcccaaagttctgggattacagacgtgagccactgtgccctgccagcactaagtattgactgtctttgttttcagatcagagagaaaacttttagaaaacatggttctagccctagttgtttcttaattagagtttcttcagctttagtatggcatctgaaggtgattgcatcatatttcataatcacccagctgaactatttgctgtttagtccagcactgggcactgaggctaaaagatctttaatccaaacagcctcagcattcacccaacctgagcctatgggaccccaagcagatctggattcactgtcacttaccatctacccatctgaccctgtcttcctatgacagacagaaataaaccctgtagctatttcaccccacctacataccctgcacccctcctactccccgtccgactttcctggctgagaagttggcactgccctctggagcaggccctgtcaccagtgcacccctcactccacaggggtgtgtcattaatgtgttgcagttgatgcctccctcttaaaaaaaaaaaggggtggttgtcaccctggtgactcacacagggcttgctggctcaaactctggaatctgtatatctgtctcaagtgtcaggtctcccacctgaccacactttg

SEQ ID NO: 91280 - DNA, 1654 bp, Homo sapiens
caggggcgggggtccggggcgggttgggcagcaacgctgaaccccgcggcggcggcggcggcggcggcggcggatcccgtgtcagaataagagtccccgcgcgcccacgcctggagggccggccctcccccagctcgcgcccttcctgcctaacccccgggagccgcgggaccctttcccctctctgatctccggcctttctcaaggcccgacactttaaatttgcctccccatctaggcggtggctccattgatttcttttttcccacctagagtgggtcggcatcagtgactagacagcagcagctggccttttaaagggattattgccaagaatcggaattgatcacttcaacaaggaaaggcttatgggcagggcccaggctgagagcctgacggacacttggattgtgcgcacactgggacccagaaatgaatggtgacccctcccttaggaagtgaatgacaacccttaggtgcgtgtttctgccctgagaattttgcacagggcaaaattttgtaggtctgacttaacgtctttaggtgtatagttcatccttatcttaagagctgtggattctttagatcaaagtccgagtgagtcacttgagcctttaattttctttcttcctaccagtttacttctttcagttttcttggagtacatagtgctggttacatctctggttctgtgtgcccattcacacagtgacacctcctggctgtggcagcacagaaactgagagccctctgtgcgggtgtctcagtcttggactgtagtcctgttgactgacttaactcttctggtagtcgttacaagttttcttttaaactagattacatgaaataatgtttgttggcaccagtttgttaacatatgctaagcagtagtttgtcagacctgaccacaagctgtggagggctgatagctcatactagccctcgggtttgagtgcctactgtgtgctaagctcccctgcacagacatattcagtgcctataacaatcccgtggggagtagggaagtattatctgcgctttacaggtcaggaaattggggctgctggaggccaggcggcttgctcaaggcctcttagtagtgaggcagagccaggcagcccgtacttggtgctctagagcccacaaatgctgcagtttgcgaaccctagtgagcatttccctggcgcttctaaaatacaaggccattttcttgtccaggatccagggcacctctgtttgcggatgtaggggataatctggtgacatggggacaccatgctagccctgctttgttctagtggagcagcgttaccagctggattttaaggaactgaactacagagttagttgctactttgcattcgcttcttcagctttggactcagaaaagttggcccttttctagaggaaacagtttataggatgtgggaaatttgcaagggattttctgtatcctctgtcttcacttattccctcccctccttcatctttcagttcttatttgtctcataaaattccgaagctggtttttatgaagattgcttctcatcttggaagggctatagagaatggaaagatttggatgcagtgtgttttgtttgtttgtttgtttttttgagacggagtctcgctctgtcatccagtctggagtggc

SEQ ID NO: 91281 - DNA, 3469 bp, Homo sapiens
cctctcaggttcaagcaattctcctgcctcagcctcccgagtagttgggactaccatgcccggctaagttttgtatttttagtagagacggggtttcaccatgctggccaggctggtctcgaactcctgacctcgtgatctgcccacctcagcctcccaaagtgctgggattacaggcgtgagccaccacgcctggcggatgcattgttatttccactcagatgacatcattttttaaaatgtcaagtcatctctattaatgcagtatcatttggcaaatcctataatcttatattttgatagtgagggaaaaatataatgctactttcggtaggaaaaaatcctggaaggatttgtaccagaatgtcaataaaggtctctacattaggattagcaatagtttttcttttttagaaaactttttagtgtctctgtattttgcgtgtgtgtgtatgtttttaatgaggaaacatgttttaaatactctaattttcaactcttcagtagctcctctgacttgttttgcatcatttattttctgaatttctggcattgcaggtagtgatttctagattgatatattcaacaaatatcagagtgcatactgtgccttcgacactgcgaggaatccctcctcagtagagtttatagtgagattagtgggccaggagtcgtaattaatcttataaacatggggaaacttacagggatcaaggagagaaggacactgtgacctggtgagcccgaaaggacctttctcctactggggtcagagaacaagaagggggaccctcttgaaggggattaaggcaagggctggtgcagtgaggctcacagccgggacctctttgggtcttagcagatgactaaaggatgcctctgaagaatgtggctggtaaagttgtaaagccattcttgaaatgttggctttttttttttttttttttggtgtttgttctcttggaagaaaattaagaatgaccagcagagttttggatatatgaattcccaacagagacaaaaatgtaatggcccttaccactgaatttgtttaaggaccatcattagcatgtactgacacctcaaagcctgggcagctcagatgcttttctggagaactacctgcttggactcggggtgtttctgtgccatcaaatggaacaggcagggctattttctctagacctttcccccccataattgagttaatttatgctggttgtagaaaactaggaagattatgaaataggtgagtgggtgaagtcttctcgagcagctgtcctggggtaatagagcatccctgggatttcctcctaacccttgtctggttgggaagtgtggcagaaccagaagaacaagttggcaatgtcatagtttgaggcatacagaactatgctgcctgctaagtgtggtcgtttgttagaatggatgcttttgagttatctgagctgcttcgggaggtagctttccacagtctggcctcagactgtgggtcttccaggttaacaggacttaagtgctaactgtgcaaaggtatgtctttgaatggaattaggaaggcagtgtattaaaaataagaaggttgagataaaaaaagacggatcttgaagtggttggtggttgcagcgaggtggaaatagtgagacccgtactgtcagaaacaaaggtaccactggggacagatcccgctcgagcatgggttccccagcatccccgcaaacaggatctgggacttttttgtcaagagagtgtcagaccgttggcttcttgcccctcccccaccttgtgctttccagactatatttgtgacctctttttgtctgatggaaatgtaggttagtcttttagaagacaaaggaatttaccctaatagaatacctttaggtagcctcaggaagtgattgggaatccacgaaaccctctaggtgtgggagagaggggccctcagtgagaatgtcacacgtttgcaccagtttgcacagttgccagggccccttgcagctcctctgtacgctgtaccccctttgtctctcctcagcctccagaggcaccttcacaggtgagtttgtcagggaacttgcctttctgtctgattcctgattttagggttccttatatggaagggctgaagacctgcaatttccgaggatgctggaggctagcttctgagataggatttgctggcaggagatgagcagtactctaaaggagggctcccagcaagtcaaagtgggagttcttggggcagggggtgggggatgggggtggtgggtggagtggtcaaggcttcagggctttcctgctgcttggcctcaaagatagtagctatgcctgtggggaggggtgtggccatgtggtacaggattggggagaaattccacttgtttgaaggatttgttgaagaatccctcagctattcctcctgcagttccgtctcaggacctggcgctgcgtggcctgccttgccggttagatattctggtttgaaccttgaaacgtagcctaaataaggtggtgccttcgagcacacactttaaaaatactgctgcattatggtggcacagcagctcctcctgtgccaaggaggccactttgagtctagggggcacctgctttttgccaagtgtggccgtgtgcctattgctgagcagcctgtctctagtggcatccaggacagccctggctttgcctcaagacagcctggtgtgagctctgcccagccacttcctagcgaaagaccttgttgaacatcacccctgtttcccatttctgtcaagggggtacttactatctcccgtggaaggctgtgttgggagtgagataacaagtgcaaatgatcgaccccagtgcctgtgtgttccacatgttgcagttcagtgagtactgttatgactgtaacagatgagccagagttcacaagcattaacaactgccccacctcttctgtgggggatgacaccaccctcatggcaaactgtcactgtctgcatgccccctttggagccacactggggcgcatgcctcagctttgtgccccagcctattcccctctctccatgttcctgtgaagaaggcaaagttccccacaggaggtgatacttgccatagtcaccttgctcattattcggcggctgggacccaacccagcctttctgatttcagacgttgtctattttttccactgccttggggccttcttgacgatactgaatgcctgggttggttgtgccccaagccaggaggcagcctctttcctggcccagggcttgtggaagccagcatccggacttccatctgtgagatgggaagctgtttgccgggcagatctgtcatgggagccttccttagagaactgagaggggtccctgtcactgagtggactctgggtggaggctggaagtaggtggtttgatggtacttgcagtggtgtctgggagcgccagggtgaatctcatcctcctggacttgc

SEQ ID NO: 91282 - DNA, 1028 bp, Homo sapiens
ggtttcgtcatgttggtcaggctggtctcgaactcctgacctcagatgatccacccaccttggcctcccaaagtactgggattacaggtgtaaaccaccgtgcctggctgtgtttgatgtttttattaatacgttcgtttgatgaactgacctcggtagtttgtatgtgggccatctgtctcctgcctcccttccccaaacttttggtcaagtttttagtgttgagtctttttgttgttgtctcttttctgactgtacaagcaacatttcctgatgccgaagtctggggagggggtgggagcctcagatgttggtggtaggagttgcctggtctgcttttgaagttttcttgggcaagtatattaacatatactgagtataggttcaaatgtaattgcagtcttattgttagtttgtatctgtcaggttataggattagaaatataactatttttgggagttgggtagcagacaaactgaggattctacctgggactttcttctgtgtactgtgctctgctgaacccaacactgggcacaaacaggaaactgaggctcaagcggaggaggagtggcctgcccaaggttgacttgcagaaggaatgaggatatatccctgttttctcctggaattagactttcagatctctgttgttcttactgatgtctttgtggcttggtgaattttgttttagcttccttcttactttatttatgtaggtccattggtcagtttccttcctcagggccttgtctttttttttttttttttttttttttgaaacagagtcttgctccattgtccagtctggagggcagtggtgcaatctcggctcactgcaacctctgcatcacggttcaagcgattcttgtgcctcatcctcccaagtagctgggattacaggcgcacgccaccacgcccagctctttttttttttttgtagagatggggttttaccatgttggccaagctggtcttgaactcctggcctcaagtgatttgcccaccttggcctcccaaagtgcta

SEQ ID NO: 91283 - DNA, 1738 bp, Homo sapiens
ttcttgtgacattttcttctggtgtcctttaatactgcaatacatcaggcatctgaaatactaaacacttaaatgtttcagacacttcctaaggcctcagtgtcatctgcacgtagacatttggtttctgggcacttaagatctggggtcgataggcagtttaggactgctgcatgcactgcccaggcagctgctgggagcctgggtggaaacaataagaggagcatccagatagaggtagcaatgttttgaggaacaacattaatcataataataaaagaaagaagtagttgcttctgtttgagaagctgcctggtgccagggcctgtcactgggttctcaggatggtctggaggcctgaggtaggttccacgcaggcaggcaggctccccgggagggcattgggcccactgtttaactgccaggtgagccaggctgggcagaatgtgctaggaggaagctcgtgagcatttgggatggtttggagggaggcctggagtgccagggagcgagaggggtgtggtgctggagtctgagcttaccagagggcagggctctggacccgcatgagaactgtgaatggggttttagggtgggacacagcctctgccataagaaaggatacggggagtgcagagtgtgggcaccactgacactggggcaactctcaattctcagtggtggcctgagggaagcccttcagacacagggtccccacagctccccaaatagcatgccaggggtggggcaggagggggacattggccgcgccccgaagctctggactcaccccaggggctgtgccgtgcccatggctgtagtcttgcctatctccatgtggcttcttcctggcactgattaactattttaattaaagacagcatttgtatgtttttttttttttttttgcctccagccggtggtagaaacctcttggttgggtcctgacaactcgtggaggtccccattttgtagtctcctcctccgtgcccacgtgggtgttagatgaggtgatgcgcaagcgccttgtgtccatggagcatggagcctttgggaagtgggatgctcgatttcaagtagcaagtttcagcaaaaagttccagcatcgtggtccatggtgaggggctgggggggagagcttgcctgagtaacaggtgcttgaacccaaaggatgggtgggagctaggaggggctctcctggccatgggaacggtgcgtgcaaaggtctggcacggggagtaggcaggcgtgctgggtctgaggaattgaaaggaggccaggtggttggagcgggagcatggaacgtgtatgctccttcacatgcacgtagcgcacttgcggctgaagtgggccgggccttgaaggccgtggtgaggtgctctgacgctgggtggacctgggaaattaaggagggccgtctggtttattatggggagtagaagatggtggaagtggaagacagccagtacatgccttaggctgccggcctgcccctgcctgtctcctccttcaaggaggctgtggttcccatggctgagggaggagacaggcaggggcagaccaggggcctacaacatgtactggctgtcaccctaatgggaagctcagtttgagagcagaggtgggaactccggcctccagtgccagctctggttgccaaggatgggcttgtgtggccaacctcacgattgggtcttggtcctcccggggctgattctccgcatctctagtctgccaa

SEQ ID NO: 91284 - DNA, 1004 bp, Homo sapiens
tttctttatccttaagtatttcaccttttttgtgctaatgtagatgacttttttcaggttttgagttctgattggtttgtgcctgtgtgtagaaacacagctgattttttatatatagaccttgatcctgcagcagaacagcacaggacacctgcttctgaggcttcccaccctcggggcagagaggtcttggattggcagatacaaaatagttaggactaatgctgcccattgggtttctcagcttgaatggggctaaaaagagcggcagaaagggttcttcctgaggagctagccctgtgcctcatttaggaggtgcctaaaggtctttccatagagttcactggtgttgtcccctatccttatttttgcaagttctcctgtgggagtgtttctcgccatccatcagctgtgaattgccgtgaacctagtttaaaaataaaggtttcatatcagagcaagctcctggtagtcctgtgggtgcaaagaatgacaacagaggtgatgttgacactatttggcaagctacaactgacagaactgcttgggaatctgggatttggctggttcctaaggttcagcctctggcccatagccctggacgtctgatgatacaaaccggaagtggaagtccgaggcattttctctatgaccttggaagagaagttcctgaatattgtagagcattagttttcctgtctgtaagacaggcagcctctttctctctggacagcatcccatggggatgaccatgacctttggttttggaggtgaagccctctcggtctggagggtgaagtccgctcattcccaggcacatcatgccctcatcttgagggtaaacctagcactgccttcaccaggaatggtggctggtttccctggggtccatgacagacaacatgatggtgaggaggttacattgggagaatgagccctgcgtgctgcctgtgtgctctgtgaccctgggcaagttcctgaagatcagacacatcagatccctt

SEQ ID NO: 91285 - DNA, 1001 bp, Homo sapiens
attggtcattcatttgaaaaccctaggtctaaataagatgagcctgtcctctctgaggggcaggggcagaggataatcctggccagtggcctttgccctctggccattcccatgatttcccagcagtgatagatgccgttagactttttccttattcaccgcaaagcccagggccccacactggttcttggagctggttgcccttaccttgcctcgtgcctcatggcaaagctaagctgcccccgctgcgtggagctcttaggcagagactgtcaagagctgtaccagggcattgctgggtaccttggattttctctgttaccatcaagcctggtcagcgacgttttggcccaaggctacctacctggagaagaacgcagaactgaaagatgtcttagaacttggaggcagcccctgggtcagctgctccgttttatagatggggacacacatgggccagagttggcaggtgacttgcctagggattcatgccccatcgaacaggatcttgccggtcacgcagtgtgagatgtggctgctctgctgaccatggcacagaacaagtgttgcggtcagttttgtgaggtttcagctcttcatatggcaagaaaatatgggcatagtcaggtaattctgttgtcaggaaaacatttccagaatgttctccaaacaaaatgaaactttcgtggtacttatatttttattttttatgttttgagacagggtctcactctgtcacccaggctggagtgtaatggcatgatcatagctcactgcagcctcaaactcctgggctcaagcgatcctccccgcctcaggctcctgaatagctgggaatacaggcgtgtgcaaccacacccagctaatttttgtattttttgtagagacggagtttgctgtgttgcccaagctggtcttgaactcttgggctcaagcgattctcctgctttggcctcccaaagtgttgggcatacaggcaaattacactcaaaaaaattttt

SEQ ID NO: 91286 - DNA, 1114 bp, Homo sapiens
ctgctgtgtctagttgtaggagctgactgcttggaacacctttctgtctctcaagttaagttgtatctctcgtacttggccttaatgaagtttgacattgagaagtccagagctgctgtttccggtgtggcttccttccggaatgagtcctagtcactgttactcagagatgtgcgtcaggaagtggctcgggccacagttctgagcagatggaggtgtctgttctgcatgggaaagaagtatgcttgtcaggcaggctctgccaatgccaaaacttggcccacctattctctccttaccccctcaacaggtccttctgggccacaacaaggtaccctggtttgactcttaggaagtgggagagccactgaagggggtacagatccaggatgtggctttgggagcttcctcgggctatgctgccgggaggagagtagacaggggttctgggtccagaggcccatctgtgctgtgcatcaatctgtgtgaagggcagggccacaggggcgctctggaggtgggcacctgggcgcaggcttgctgcagctgtgtgcctacagggtccttgtgtcttgagtgttgggcgcagctcacagctagcgaggctagcacctggaccccgttgtcatcatctgactcagcactggttgcttcatgggcccttcttccttcctgataggaagaggtgccctgaggtgccctgtgcctcctgaggacagtggctgcccccaggttcagggctctgctcctcagcatctccgtggggctcatcgtgggcctcgcactcagcacatccgaactgtagcccaaccttccttcctcaaatctgctcctccccatctcagaaaagccagccccactggtccagttgctcaggcaaaaacaagtgaaagaaagcaaccccctccggagtgccccaactcccctctgctctgtccccttccccagtgtagctgcaccataggaaccgctcccctgccctgcagtcctccagccaggtgatcctttagagcaagccagattcctcccctccggcctgggccagtgcttcccccagcacatgtctccgctcaggccctgtctccttcagggctggcttccggtgccgcccgtt

SEQ ID NO: 91287 - DNA, 1023 bp, Homo sapiens
cacataaaatctcttgatcactacgttttacattaaggcttctcaagatgggcaggacgggcttatgggatttgtcctgaactatcacatcacttccaaataaacttggtgcccgggacggctgctgtggagtgaatggcagacgctgtccctgggccacgatgccatccctctcagcatgttgggctagatttccactggttttgtttactttagacagtttttataattaaatatttccctgaaataatgcctgcaatcattttgagccacatgctctttttcctgaattaaagatctcttttagaaagtactgagactcttaaagcctctctcctttaaaaagtgagcttaacaaagtttttcattttagaaacttagaggggccagtgaccctgctgtgtgcggtgtatgtagaggtgactggagcctgtggtgcagcaacagtcccctgtgggctggcgccacacaggaagtgcctgcagctccacagccctggggtgagcctggcgcctccattttctgacagtacctgaacctttacctcccttctcaaaatgaaggctgcgtgtcacaaaccggttggaactggccgttgccatggttttcacgttggaaggcacagttaaagggtcatgtgaccaaggagggaaatgcctttgtcacatgactttttggtggcctgattagcatacaggaagttcactccctgctggctgctgggatgctgagtgatcattgatgggtggtgacatcatctcttggatgagttattgattagtcgcaggccaagatggggccagggagcgctgtgggcagagcagccctctcaggcagcttcagctgctaggtggtctggacccctcgcctaccctcttccttcaggcaggtttgaattttattagacatctcacctctggaagaagcacacgccctcaataagatgataagaagggttaagtcccttagagcttggctgtcatttcatttcagctcatgctagcccaggaattgtgtctgtaa

SEQ ID NO: 91288 - DNA, 1352 bp, Homo sapiens
tttctttgtcacttgtcgaaaactcatggagggacaccaagtctgtcactggcccttctctactggaacatgcagctttaaaaagtgcccagagtcaccgttttctcactgagattgagatctccctgtctgggccatgggtcctttgcctcagcagtgctgccaccatcagccattctgtcccctagagggcacagcgggtgccaggatactgcgtgggtgtcagggagcagccaagaagtgatgctgagagtagggggtggggctgctggaaaatctcttctaggcccatgtagaaattgtcacttcccactgcagatggggtcactttcagccttcaagcagaacctctgagcgcctgatgccgtagaggaggaagacagtcagtcctcttcggcagcattaaatcttggcaactccgtgtgaggagagggaccggcccggtggcccctcacctcctggtgtcctgctctcttgcagcccacaggttctgttgggagcaccgtgaccacccctcccccgcttgttcggggcactcagaacattcctgctggcaagccatcactccaggtcagtgtcctttctgcgtctcactgggtgccctgctggcactgctgctgtcaagcacaggctcctcgggctcccaaacagccctggcccaggttctgcaagaggttgcgctttccttctgagtaggctggagtgaggccctccagcccacagcctaggggaagaagcacacgtgcactttccaagccccacggcccaaagtaggccactgttaatgtcacagacagaaatcatggccaacactggaagggggctttccagtgagcgcccctagcaagcctgatctcccttcgtgttgactcttccggccagagagcctccttccagggcctccaggtgaggggcagaggttttctcccagccatatggctgaggtcagaagaggccctcctgcccctccctctcaaacaggcctgagccctcagcttgctctagggggtgaccatgcccatcctgccgtgggccggccagtgtcacgtgagaatgaactgccacgttggtgggactcactcaggagtgagcccaggtttgcacggctctgggtggagtcactattccttgttccagtatctagaatcagtagtcatctttcttaattttgtgttatacgtttgccttgttagtttgtttgagacagggtcttgctctgttacccaggctggagtgcagtggcacgatctcagctgactgtagcctctgccttctaggcttaagccatcctcctgcctcagcctcccaagtagccaggattacaggcacacaccaccatgcctgggtaattt

SEQ ID NO: 91289 - DNA, 1101 bp, Homo sapiens
tgcaggctgccggctgacaagtactgcttgtcttcaaggtcttttctgaaagccacgttgagataccaaaggggcgtttggaaaaatgttcttgctaaatttggagaggaacaagtttgaaatcaagttttttgttctcgtgttgttttattttaatgcttctccttcccaccctcttgtagactcgaagctcccttttggcaatttttgttttcttggaagttctttgcaattcactaaacgcattttctcaagatccccacttggcgcctaaagtccccaggggacgggcctgtcctgtggggctcaccctcggtcaccctgggccggccagcggaccgcactgactttgctttcaacccccgtttgtgtaggtcataaaaccccggcgtaagttggcgttccgctcaggagaggcccgcgactggagtaacggggctgtgctacaggtcagaaccgcactgggcgccgggagcctcgcgcccccaccgcagcccgtgaccacgtcagtcgccgactgtcacgctgcctcttctgtctgtctctccctgtttctgtttcactctctcccctcccccacccctctgtgtaacttacctggtctcctgattttggactttagggaccccatgtgggtgggaagaggtcagccagagcaaggagaggctgcgctgagtgtctcgcctgctgctgtcttttccctgcatgagccgtcacccccctttctccactgcaggcctccagccagctgtcccggggttcggccacgacgccccgaggtgtcctgcacacgttcagtccgtcacccaaactgcagaactcagcctcggccacagccctggtcagcaggaccggcagacattctgagagaaccgtgagcgccggcaagggcagcgccacctccaactggaagaagacgcccctcagcacaggtgggtgacctccacagggctccccaggggacctgcccattgtggggttcacccttccttaaccgaaacagaggcacatgtgcagcgggtgaacccccaggcccgcttcccaagctcagcctcctcggactctggctttccctcttgcccctaaccaggataccctgaa

SEQ ID NO: 91290 - DNA, 2315 bp, Homo sapiens
ggctggggtctaggcagctatggctgggctcctcccaggagccctcctgacgagggccttctcagctggtcgctctgttctgttgcaggcgggacccttgcgtttgtcagcccaagcctggcggtgcacaagagctcctcggccgtggaccgccagcgagagtacctcctggacatgatcccaccccgctccatcccccagtcagccacgtggaaatagtgcgagccaggccccgtggaagacgggctccctcctcccccacctggcccctggtctagaaggacccactgcaccaccctccgctggctcgggaagacaccgtgcccgccccaagagcaagcaccggccatgctgcagaggcaagacctcaattcttggctgcaaagtttcatcagggctagggggctggtgccgcctcataggcagacgaggatcatcgctgggggacctttcccgtgggctttcttcctttctctctttgcctttagtttgcccgacaccagcagaaaagtggaccttgggggctggttctgctcctggcccccttgttcagcccctgccggcacacgggcggctcaccctggacactgtgatgcgcatgggcaaggccagcgcccggggcttctgaaccgagcggggtgtttcatttttttgcttttccctgtcttaggctcccagtctttgactgccttcccatggcgatctataagttgaaagattttttttttttttaatcacctcatgatgatggagttaaaagtaaaccgtgcagaccctggggtccctgttgtacgctgcatcatcccgctggccctgtgccctggagggtgggcggctcatggtgccacagcccctggcagggacggccggcccgcccccgtgactgactgacagatgcagggatggccgaggcagccctcgctccagctgaacgcctccattgctgcttgttctggagacccccgcccccgcaccttccagacttagcagaagaacaaactgaagaacagacccagccagagaagcagggattccagaagctgcccattaagggagaaggagaggatccggtcggcagcagccctgagcagaaagctggaggggggactgtcgcggggtttttctgttgtggtttattttattaaattttttccttttttctattcatttcgatggacgcaatcttaagccaccctggccttgctcctgggaggtgagcgtgcacaggtgtgtgcaggtcaggaggtgccgtccaggtgtgcggcgagccgctgcgcacagatgtcaggatttccgtttgggtctagtttagaacctgtccttaaacctaggggttgctgtcaggatttgctttcagactttttttttttttgtaattccctttagagtctacaaaaatgtttttaaaaggatcaggtctgcttttagtttcatttttgtttctttcccgtcccactctttaaaaactggttccgtgaggaaaggcagaagccgttccgtgtctcttgcaggctgggccggcttcatgccagtgcgagggcgtcccgtgcccacgtacatacgtatgtctccatgagttctgggctccactggttccaattgagctccagccctggttttcctacccatgcagttagggactttaatttaattttttttttgtagggccaccgccttcaaacacaactgctacaacattctaataaaggctcatttaacccccaggctcctgtcgtgtgaatatcctcagtctgtaggaaactttttttgacacagcatagaagacctagttttggaaaacattatctaattttttgttgtgcaaatccccaaatttctcactaatttttgtttttttgtgcataacttggatgggctgaaggaggtgaggacagattggggaagggtggctttcattccaagatccagggatttggggaaaaggaaggaatttgatgttttttggggtgggaggggagggtgtgttttttacaccaaaaaaaaaaaaaaaaatcaagagtatgcaagcatttctattcctcgcatttttctgtgtgcctggcaaataaatacctgtctcctacgaccctgagctgttagccctctctgttccatgacaggggccagatcttccagctcctcccagaaggagcacccaggctggcttcttcccactgaaagccctccccagcgaaccaacctcagttctatgcagtggctggggatcaggcatccagaccgaagtcacctctgcctgctccagcttgggtcagctgggtctgaccagggggccagatccgagccgcacctgccgg

SEQ ID NO: 91291 - DNA, 1205 bp, Homo sapiens
tagacagggctggggagatctcagagttcacacctcgcctgttgtaggggaggttgggggtagggtttggaatggccaagtgcccttggaacctcccacagctatggccgtcctgacctcatcccaggaactctacggtgaccaggaaccacccctctgacgaggtctgtagcggcccttctcagagtggaacagcccacagtgctagttgtgcctggtcttacctgtactccacggacctcggtgaagcaaaagcttcagggcagagggaatgaggcaacccagtggcagccccgctgggccccgtggctcctgctctcctattggacgtagaggcaggggagagacttctctatacaaatattctcatcacagaagggatgatccttgctgctctgccgtagggtttttgatgctgagctatgctgcacatgacgttaacctaaagaacttggactgagcttttaaaaaaggacagcaaacaattttataatccttaaagtgtaatagacggttacactagtgcagggtattggggaggctctttgggtgtggaggctgtcacttgtatttattgtgactctaaatctttgatagtaaaacaaatgtaaaaagaaatgtttgccaccagatgggaatagaagttccaataagcaggctggaatgggtggctatacgttgtatcacgaggaagttttagactctgaaggataataaatggatgatgtgtcaactggacttttcttttgtcccttctgccctggcttctctgtattgtttcgtcctagcttcccaggcaggttggagggagatggaggatgacccttagttaatgagagaagcaaagggcggggtgcatctgctgctggggcctcacttactgtggggatggagtccccacggcccctctcctctggagctttgtggcaaacttaccccatgggctgggagagaggaatgagaatctcagtgggggctgggtttggtggctcacatttgtaatcccagcactttgagaggctgaggtgggtggatcacctgaggtcaggagttcgataccagcctggccaacatggtgaaaccccatctctactaaaaatacaaaaattggccggatgtggtggtgggtgcctgtaccccagctacttgggaggctgaggcaggagaatcgcatgaacccgggaggcagaggttgcagtgagcca

SEQ ID NO: 91292 - DNA, 1477 bp, Homo sapiens
ttgggaagggacgccctccgcgcagaggctgagagttccgcgcaggcgcaatgcttccgtcccctctggtctcgccctctcggggcctggtcgcagggaatcgcggatgcgcatgcgcctccagctcccgggatcgcggggaacgtggattccgaacaagggcaactgcggactcccccgtgggaagaaagggagggaagcggaagggaaaaagcgcatgtgcagcagcacgcggcagcttcgcatattccctcgaagcgcgcctcttgcgcgtgcgccgccctggcccagtgcccttggctgcaggaatggctggaaccacccggcttctagccggagtccccggcgcgcagccagcagttgcgcgctacctggcccgcggagggcctggcggacgggctgaactgcagcagctcggcgatcagggccttgcagcgctcggacagctcgaggccttcgggatagagcacgccgcgtttctggcgccggggcaggccggcgatgtccgagtcgtcgaagggcatgcacccggtgaccatgacgtagagcacgacgcccatgctccacacatcgtacttcttggggtcgtaggggatgcccaggagcacctcgggtgacgcgtaggcggctgagccgcagtaggtggtgctcaggtctgggtagccatgggcctggcggccgaagccgaagtcggtgagcttgacgcggcgctcgtccgggctcagcagcacgttttcgcacttgaggtcgcggtgcaccaggtgatgatcgtgcaggtagcgcacggcgccggcgatctgcgcaaagaggtcgcgcgcctgaactccggggatgcgcccgttgcgctgcacggcttgcagcaggtcggtggcggccgcttccatcacgatgtacagtttcccgttgcacacctcgatgaactcgaagacgtgcacgatgtgcgggtgtcgcacgccccgcaggatggacagctctcgcggcaggaacttgttgacgaagtccgggggcgctcgccgccggtccaccaccttgatggccacggtacccttgtacttcttggatgtggccaccttcaccttggagtagctgccctctccaattgtgcggcccagcttataaccgagttcgctcagaagtttgtctcccgacatggtggcgcctagggcgcacggggggcaggaggcggctgctgtcggggggcggccggactccaatctcgggtctaagccatggcgcttggcacctacacccccgcacccccatgtgcccactgccagacattggccgctgttgtgccttttattgccccgtaacaatttttgccttgtgaagtgactgcgggcgtcactccgccttagggtgggggtccgggaccccgccccggggccaccctagcctccctgctttgtgactcataatcatcctgaatggtcagtttccgatgagaggccactagcaagggatacccatcaccacc

SEQ ID NO: 91293 - DNA, 1888 bp, Homo sapiens
ccccaacatcatgtacccagcccgtgactacgtggagccctgggcttcgcgtagagtccctagacggggcgaaaacgggaaaaggggccttaactggggcacctggctcctttgagagctcggagtttctgactggcctgcgcaacaccccagaggcaaggtgaacgcgagggcctataatgcaagaaccaaggcgagtcacgccctgtctgggcaaaagaggagtaaagacccctcagctgcagcccggcagcgcattcctacccagggtccgccgccagagctttcccgcgcggtcggatagttacactactgtccgggacttcctagccgtgccgcggaccatctcaagtgcttccgccacactcatcatggcggtggcagtaagtcacttccgcccgggaccggaagtgtgggatactgcgagtatggcggcgtcaaaggtgaagcaggacatgcctccgccggggggctatgggcccatcgactacaaacggaacttgccgcgtcgaggactgtcgggtcagtatcactctgcgccggggtctcagagtctgggcactcggggctcgggggcggggttccggggacacaggcgggcctcagttttcccggcggtgtgaccggaggcggagcccggggatccatcatagcttctgtaataacgctaagtgctgcagtttgttgaggtctttcccagctcctcttccttctcgtaacagcccaggaaatcggtccctctagttatttacgttttacagtgggttaaactgagtcatagcctgtgctctggccctcagccacccttggatttctaagatggggaaactgaggcccaaagaaggccgcggctccccaaggcaaagctgaggccgcaacccggaacctggagggaatttacaagatgttctatgcagtggttccctgctggcagcccccgcctgcatggtgtcacaggaatccatattctttaaattttcaattttttttttttgagacggagttttgctcttgttgcccaggctggagtgcaatggcgccatctcggctcaccgcaacctccgcctcctgggttcaagcgattctcttgcctcagcctcctgagtagctgggattacaggcatgtgccacaacgcctggctaactttgtgtttttagtagagacggggtttctccatgttggtcagggtggtctcgaactcccaacctcggatgatccgcccacctcggcctcccaaagtgctgggattacaggcgtgagccaccatgcccggcgtaaagttttcaaatgtttaagtaacacgttaaattttgttatcgggctcagcacagaaaattgaaaaagagaacttaaaaggcgcccatactcagtccccaggttaacagacaaatagaaacttttaaacgtaatctaagagtgaatacatacatttctttttttttttttaagacggtatggttctgttgcctgggctggagtgatttcttggcaacctccgcctcctgggctcaagccatcctcccaccccagcctcctgagaagctgggattacaagcatgcgcccagctttctgtattttctatagagatgggatctcgccatcttgcccaggctggtctcgaagtcctgggctcaagtgatccacccacctcggcttcccaaagtgatgggactatcggcatgagctaccgtgctcggcagaatgcatgtctcttaacaaatcaaactttacatttaaattacatgttatgcacattattcctcaattttaacacacacacaaaaatgagcatggtaattaaaaacgtaataattcagacagtagaaaaatcagtgtgaggtgaaaagtcctccccagccccttcttggtttttttattttttattt

SEQ ID NO: 91294 - DNA, 1126 bp, Homo sapiens
tggcctaggtccttcctggggtgcagggcagggggcttcaccctgcagagccaagaggtagcacggccacccctagagtccggggggtggctgggcagcccccacagggcactgcctgtccctggcagctgtgtgcagcccccgcagggcagcacgcggaactgtggcccaggtggccgggagccaccatggacactgtcagaactgcccttccacttcagggccagcctgccgcccagggtccaaacagccttctagaacacgatggacctggggcccccctagcaaccaccatctagaccctcaggcctcctgaggttgctgcctggcttgtacctttcagaaaacccctggcatgggggcagaggtgtcacagtccaagcagcctcactcctgagaagccgccagtgtcccctgattgcagagtgggcagcgcctggagctgtggaggagggtgtctgggggcgggctggcccgctgagcagcgcctctcttcacaggctacagcatgctggccatagggattggaaccctgatctacgggcactggagcataatgaagtggaaccgtgagcgcaggtagggcccctggtgggcgttgtctgaaagtgcccccccggcgagttgtcggggtcctgtagcattccgctgttgtctgtgctggcgaggggtgaacgggccccttggacttggctgtgcaatcccaggccccagaaagtgcagatccagacccagcacttccacttctaggctctgtcctcgagatgtctccatgtctgcaatcccagcactttgggaggccaaggtgggagcattgcttgagcccaggagttcaagaccagcctgggcaacagagggaaaccctgtcctcgccaccccaaaaaatgtgtctagtgaggagggttgggacccgtggatccagattaggacaggatatgagtggggggcctgcctcgggccctctaagcaggattttgtcagaggtgaccaggctcaaaccagaccacaccaggcagtggacacacagggccagatgaactagggccaggcgcccccctctccctgtgtcacaggctgggcactccttccccacccctcccccaaccccaacgcaggccaggcagga

SEQ ID NO: 91295 - DNA, 1439 bp, Homo sapiens
agcaccctggcccctgaggtctgtgctgcctgtgctcccccgacctagcctggtctgacctgagtgtgggtttcgggctttcacaggcgcctacaaatcgaggacttcgaggctcgcatcgcgctgttgccactgttacaggcagaaaccgaccggaggtagcaccgcaggggccaaggttgggaggtcactggccggaaggccccaggctgcagggcctgacctgcatccccgaaggtggccagaatgcacgtgggggccatcgccctgtgccgtcagctgcatcctcaggcgtggagacttagtggagacccaagggggcgaaccggaaggcttcctggaggaggaggcagcactggggttggggcaagagaaaagctaggagttggctgggggaaaaggagacagggtcggagggaggcttgaaggggtgctactaggggccctaggcaggggcccctcagggcactgaggccccacccccaccatcggccccatccccacaggaccttgcagatgcttcgggagaacctggaggaggaggccatcatcatgaaggacgtgcccgactggaaggtgggtcccggctgggagggcagaggtgccagccacggcagagacagggcctggggttggggagctcccacagctttctatagaaaccccaggaccaagggggtggtgggtgccaggtcccacaagggaaggctgtagcgcctgccacgcacaggggccactgatcctgggggatgggtcctagcaggctgtatatgggtggctgtgcctctacccataccccactgtccccacaggtgggggagtctgtgttccacacaacccgctgggtgccccccttgatcggggagctgtacgggctgcgcaccacagaggaggctctccatgccagccacggcttcatgtggtacacgtaggccctgtgccctccggccacctggatccctgcccctccccactgggacggaataaatgctctgcagacctggcctgcctgttttcctggggactgggggaaagaagggggagagggcccagctaggcaccaccggatcacatgtagcatggggacgcagcagatatgcacagggtgacctcaaaacacacctaggggctgcccctggatccactggcggcctcctctctgcctccgatatacctggactctcctgcctcccttttgaaaccatgcctgtcagcagcccacttacctctccaggctgggggcccctgggtcagctttgggtcagaccttctccacggaggtctggagagtggggggagccttgacctcccggatacaagtgatcctcccgcctcagcctcccgtgtcactgcgattacaggattacaggcgtgagccaccataccttgtgcagccctgccaattgtaggcatggcgagggtatttgtctgcggagggg

SEQ ID NO: 91296 - DNA, 1221 bp, Homo sapiens
gcggtggagtgggacttcccgctggcctagaaaacttcagctagggctgggggcggtggctcctgcctgtaatctcagcactttgggaggctgaggctggaggatcgcttaaggccaggagtttgggaccagcctgggcaacatagcaagatcccgactctacaaattaaaagaaaaagaagaaagaaaactcgagccagaagaatggagggtagattcagggtgggactcccagactgtttggggtggcctaaagcctataggatcgaagtgagacgcgagacaggacttccagccacctaaagcgggtccgagcagcttgaggctggattccaagtgacacttccctcaggcagcttgggatgcagcttggaggactgagtgggctcggggagggagttccagcaggccacggggaacccaggacagcctgaggacggaggcacagccagacgcaccaaggggggcgacccagaggggttgctcgagcgccgtcacccagggccagggggcgtggcctgaatggggcgtggccagggcgggatctgcggtcgcatcccgcccccactctcagtcccagcggccgccagacccgccggagttggacccgagcacgccgcggagcccggaccctccctcggacgctctgccccggccatggcgtcgctgctgccactgctctgtctctgtgtcgtcgctgcgcacctggcgggggcccgaggtgaggcgcctccagcccccgcgcccagcccctgaggctcccgagggcctggcagccggccttgggtgaagccgcactcggggagagaacccagggacccacgcgcttccccggggactgggtccccttcaccagtcggatccccgcgaccacctggggcgcggagcgggcctcatccattctcttccttggctaagccgggagtgtggataagaacctagggttcctcccggggtttggactctgaatcaccggccaggtctcccaccctggaccgaaggggtcggaactggcccctcccacctaactcccacacacgcactcactccaaccgctggagaaagaaatgcccatccctggaacactcaatggggcgggggacgggcccacttctcaagtgaggagactgaggcacccagaaggaaggggcttgtctgacctcatcactctgctgggagtatcttggacagctcctatcttggagaagccagtctagattc

SEQ ID NO: 91297 - DNA, 1003 bp, Homo sapiens
tgggcagcgcgctggaggagagtgtatggcagcccttggggctagagctgggttctggcctctcagagcctcaattttccctcctgttaaaatggggatcatgggccaagcacggtggctcacgcctgtaatcccagcactttgggaggccgaggcgggcggactacctgaggtcaggagtttgagaccaacctggccaacatggtgaaaccccgtctctactaaaaatataaaaattagctaggcctggtggagcgtgcctgtaatcccagctactcaggaggctgaggtgtgagaatcacttgaacccaggaggcagaggctgcagtgagccgagatcgtgccactgcactccagcctgggtgacagagggagattccgtctcaaaaaaaaaaaaaaaaaggggggggatgatcgtggctgcaccttgcctaaaaggaggctcccagcggtccccatcagtagcagcgtgcttccttctccccactcctcacccacagacgccacccccaccgaggagccaatggcgactgcactgggcctggaaagacggtccgtgtacaccggccagccctcaccagccctggaggactgggaaggtgagttagcctgcctcggagtcccgtctctgctgcgggcttgttgggggtggggcttgggctactggggtcgtgtgaggagagggcacacactagacgaagggcccggcgccgtcctggtccccggacatgacagcccctggaggtgatgccccaagttcaagatctaagtgagaggccggtcagacagaggcaagagctcagcgcaccgggatggaccaggtcaggccctgggcggcagaactggggtcgcggggaacccagtctgccctgcacctgtttcaggccgctggctcgggtcgtgggcgcgctcggctagccggtgcccaccgggggagggggctgagacagcaagtaaggcctttgcacgcatgcatgggggcctacaggccgccgccctggtc

SEQ ID NO: 91298 - DNA, 1897 bp, Homo sapiens
ggccagctcagatccaggctctgcattacaaatgtgggactccagcgctctccccgttcatctgtgaggcaggggtgcaagtgtacccacagagagacctgaggacttcctgagcgatgcagatggaatgcgaggtcccagaggtgatgctgtggagtgtgagctccctgagggacacagacggagtgtgagctccctgagggttacagacagagtgtgaactccctgagggatacagacagagtatgagctccctgagggatacagatggagtgtgagctccctgagggatacagacagagtgtgagctccctgagggttacagacagagtatgagctccctgagggatacagacggagtgtgagcttcctgagggatacagatggagtgtgagctccttgagggatacagatggagtgtgagttccctgagggatacagatggagtgtgagctccttgagggatacagatggagtgtgagttccctgagggatacagatggagtgtgagctccttgagggatacagatggagtgtgagttccctgaggtgactgaggtggagtgtgagctccctgagggatacagatggagtgtgagctccctgagggatacagatggagtgtgagctccctgagggatactgatagagtgtgagctccctgagggatacagatggagtgtgagctccctgagggatactgatagagtgtgagctccctgagggatacagatggagtgtgagctccctgagggttacagatggagtgtgagctccctgagggatacagatggagtgtgagctccctgagggatactggtagagtgtgagctccctgagggatacagatggagtgtgagctccctgagggttacagatggagtgtgagctccctgagggatacagatggagtgtgagctccctgagggttacagatagagtgtgagctccctgagggatactgatggaatgtgagctccctgagggataaagatggagtgtgagttccctgaggtgattgaggtggagtgtgagctccctgagggacagagatggagtgtgagctccctgagagatacagatggagtgtgagctgcctgagggatacaggtggggtgtgagctccctgagggatacagatggagtgtgagctccctgaggtgattgagatggagtgtgagttccctgggggatgctgtggagtgtgagccccctgaggtgacgtggtagagagtgtgagctccctgactctatagcctggtaggcagccaccagtgtcctctgtggaactgggggtgaaagagggagacactaagaccaagaggctaagaaatatttccgaaggttttaacatggaaacagtaagtccaggcagcctatggcagcaagccaggtccaggccatacccccgtggcagcatgagtgtgtggaacagggcctgggtgccgccctcccacctgggcaggcacagccccacagcctctatggcagcaggaatggcaggtgctgacccacagcatggcttgctgcatgtcaccacagccctccctactttgcagttggaggggctgagtttctagtccttcaccaccatgctctgctccaacccaggctaagtccagtcaagtctctgtgacagagagcaattggaacccctcggggtcacgcaggcagcaaaacatcctgaggtcatagtcacatatgactttgctcatcgggatctgctgtggtgtcagaaacaaggccagagctggagcaaggggctgcgcctctgggtcttcaaggcccctggagaagcgtgagacatttggcccccaaggaacaattgtctggaggacaaccagggctgcttcaaccaggatggagcctctggggcctcccatgtggatcaagagaa

SEQ ID NO: 91299 - DNA, 1044 bp, Homo sapiens
tgttggccgaggccaactccctggtcaatgctgctgtgtactcttgccgagatgctgagatgcgccgcaccttccgccgccttctctgctgcgcgtgcctccgccagtccacccgcgagtctgtccactatacatcctctgcccagggaggtgccagcactcgcatcatgcttcccgagaacggccacccactgatggactccaccctttagctaccttgaacttcagcggtacgcggcaagcaacaaatccacagcccctgatgacttgtgggtgctcctggctcaacccaaccaacaggactgactgactggcaggacaaggtctggcatggcacagcaccactgccaggcctccccaggcacaccactctgcccagggaatgggggctttgggtcatctcccactgcctgggggagtcagatggggtgcaggaatctggctcttcagccatctcaggtttagggggtttgtaacagacattattctgttttcactgcgtatccttggtaagccctgtggactggttcctgctgtgtgatgctgagggttttaaggtggggagagataagggctctctcgggccatgctacccggtatgactgggtaatgaggacagactgtggacaccccatctacctgagtctgattctttagcagcagagactgaggggtgcagagtgtgagctgggaaaggtttgtggctccttgcagcctccagggactggcctgtccccgatagaattgaagcagtccacggggaggggatgatacaaggagtaaacctttctttacactctgaggtctccaaaacatttgttgttatcaattcagtgtttctgtccctgtgtcccggaattgtctaccttggcccaagtccagaaaggatctttcaacatggtatctccttggccctgtgctcgctcttcttcagtctggctggctgttattccatctctctctttttttttttttttttttttagacagagtctcactttgtagcccaggctggagagcagtagcacaatctcagctcgctgca

SEQ ID NO: 91300 - DNA, 1045 bp, Homo sapiens
tgcccggatgggttcaggaccccagcccttcactccccctcccccttttgatccctcaccccagacgcctgggggagggggcccaggaaggggaagtgactgcttctgcttctgatttttgtgatgggggcagggtgccacgactgctgagggagagggcaacgcggtaggatccccacagggcccctctgtagccctggggagtcggcagtgctggtctaggccccttaggagagggggcaggggggcagcagtagaaatgtggcggggtccgacttggtgtttccggccgtctttgtgtctgtgttgtgtatgtggagtgtcattcggtctttatgtccctcacggcttcagtctctccatgtgtgtttctgccccaggctctgcctggctgtcccttgtgtatttccatctgtctagcccgtggttccattgtcagaccggctttcttctcgggacagcctggttgcatctggggcatctgttttgttggtttgcttctgggtgcaggcagacccagggagtgggtgtctctgttccccgagcagctgtctctggtctctggtggtgtgtgagtccatctgcctgcctcgagttggccccaaccaagccccccccagccctctctttctctctctcactcttccctttctcttccaccccctccaaatgagactggttgaggtgccgtgggtggagggaggcagtggttagcccatgtattacactcccctcccctaggactccccccaggtcctgagggcaggaagaggtacagtgacatcttccggagcctggacaacctcgaaatctcactggggaacgtgtgagtctgagcctggatcacccccaaatcctgccaagatgccccaagcccctaaccatttaggtgccttgcagtcccatttggaacctgtaacatctggacctacatacctaataaccagagaagtctaggatgggaccctccaaaatgcctcggtatcctaaaagtgtccccctaaatagactggaaatccccaaagtggtcctagaacccctacat

SEQ ID NO: 91301 - DNA, 1049 bp, Homo sapiens
gttttattttgagactgtctcgctctgtcgcccaggctggagtgcggtggtgtgatctcatctcactgcaacctccgcctcccgggttcaagcgattctcctgcctcagcctcccgagtagctggaattacaggcacatgccaccacccctggctaatttttgtatttttagtagagacggggtttcgccgtatcagccaggctggtctcaaactcctgacctcaggtgatccgcccacctcagccttccaaagtgctgagataacaggtgtgagccactgcgctcggccaaaatcagtttagttttgacctatctcgtgttgtgtgttttttcattgcatttgttgtgggggtttattgttggtggtttgttttcttaaagtagtttgtagaaagcaacacgggcactctctgaggtctccttagggtgtcaggtgaaatggggaagtctgggaactgtcctcacgggagccagctgggggacttcaggaccagtggctctgaagccagcaatcttcccctccgtggagcctgctcctccgggtctgacaccctcctgccccccaggtgtggcgctcttggccaatgcccctgagcgggttgtcgagcggcgacggcggccccgggacagcccaaccctgagcaacagtggcatcagagccacctccaggacagccaagcagcggtcggggctccctccctccgaggagcagccaacctcccagagggtgagtcccaagaggggaggtgctgcaccccatcctggccagggctgacagcctgctgtctaccctgcaggaccgcctgagccaggtgctgcgagacctcgaggacgagagtacgcccattgtgaaactgggggatgccagcatcgcagcacccttcacctccaagctctcatccatccagtgcagtgagttgcctgcccccgctccccctcccttcattccccccttggcacccctacccacacccacacctgcctccccaccaccctgcagtctgccacgtgatcaagcagggccgctgcacgctggtgaccacgctac

SEQ ID NO: 91302 - DNA, 1007 bp, Homo sapiens
acctcctgtgtcccacagtgccaggttgaatggttgtgattttgtcctccttgccccgcctccagcttctacctttggagactccaaatggcactcagtctgtccactgctgtggggacccacccagtcctggctcacgcagagcacacgcagggcttacctgccccagtcctggtgtgtccctagctctactcttttgccctggtcttgggcagggctaggtggcatcctcagccctctcacccatccatcctccacaaagcccaccctccgcctccaccaccggcacatctgccgcttggcttcttcctgggctctcgttctttctgcttgcaccctacagctgcggatccttccagaatttagcctcaggttgcagtactgtgtgcagagcccaggccacagctcacagcctgcatgctctgccccgttcctgcacctggagcccccttcccagtgacacaggtcctcatcgccttcatagtggccacttctgaggcctttccaccctctctggattccattctcacctcctctctcatggcactcagcactccgatttctgtgactttcttgatcatgcgtctcccctggtgcagtgtgagctccctaaggccaggggtctgtgcccagtctgtggtatgtggtggagccccagtgagtaagagttcctggctaaactccaacattattgggagagtccctacttcattgacttggaagctgagccacaagggactctgtgatgtgcccatgtccgcaagcaggacatagagccacattcgggggacccagaccccccagtcactgccagatcccacccctcaagcgtgcctggtaccctcctggcatttctcccctcccaaccctcgcatgtgcccactacgggaacagggccttccattgtccccttggctcccagcgcatggtcagagctcaggaaatgcagagtgtgggcagagggagggacagatggtgagggtgcccctgtctgtccgcaggcccgg

SEQ ID NO: 91303 - DNA, 1028 bp, Homo sapiens
caaaggtcacccagatggggtttctgggaagtcgagagacaggtggcccatccaccccaagcccttgcagtgagggcccgtcagaggccctgcctcgggttcatttccaggggctccccacaaagtcctgggtgtcagccatggtagcggcacgggggctcagctcaggcctggaacatcccacaccagccatgcaccacatgacccccaggcacaatgcctggcttctgggggcatctgtgaagcaggtgcaggtctcataaagacccagttggcgcccaagccaccccagtgacaagcacggaatgaatggccttgggggtccttctgctggtggggatgcagcttcgccctacccgcctgcactctgtaaccagctgttccccgaccttgcagagacgggaaggaggtgaccccagtgtccagcatccctgtagaaacacaccgggccctggcctcgtgccactcgctcatgcagctggacgacggcaccctcgtgggtgaccctctagagaaggccatgctgacggccgtggactggacgctgaccaaaggtgaggggctggggcctcaggcccagcaagggggagccactggctctcacagccctaggcaggtgggctgcacccctcagagcatcttggggacaggcaggcctacagctctgatgctccccgaggtgggtggccagaggctcactttagacccaggataggccacgtccttgggtgtccctctgggttggaatctgccctgccctggccgaagccacagtgccagggtcctccaagcccaggtcttccagctctggaccaacacctgctctagcccagagccccgatcaggccctgggggaggcaggagggaggtgggggaggccggggtgagaggtaggggcttggctgcctctttggagcaaagcccctcaggactcgtacttatttgtttccagatgagaaagtattcccccgaagtattaaaactcaggggctgaaaattcaccagcgctttcattttgccagtgccct

SEQ ID NO: 91304 - DNA, 1368 bp, Homo sapiens
gaagctcgccagggctcccgacgcccacatatggctcttggtttcttgagagcggcctgccatgctcaggttggaggggtcagggtggagactccataccccagaggccttgccctgggaacaggatggggcctggtctcttgcagggccgagatggtggtgcctgacttctcggagcttttcaaggagagagccacagcccccttctttgtatttcaggtaaagcagcagctctggcccatctccccatttcctcccttggggctttcctaaccggatcaagcctgcccaccacttctaaacctggaagcctctccccaccctcacatatcagatccggtgggtggaaggggctcatgggaacagggcgggtagggcaaggacagacaggctggtatcccacaggtgttctgtgtggggctctggtgcctggatgagtactggtactacagcgtctttacgctatccatgctggtggcgttcgaggcctcgctggtgcagcagcagatgcggaacatgtcggagatccggaagatgggcaacaagccccacatgatccaggtgtggctgccagggagacccaggttgggggtgcagcacaggtgcggcttctgtgctgacacccatgccccgcccaggtctaccgaagccgcaagtggaggcccattgccagtgatgagatcgtaccaggggacatcgtctccatcggtgaggccgggttccgctcagtcccagtgggagccccagcctcagggcctctggccaaccctcctgcctctgccctgcaggccgctccccacaggagaacctggtgccatgtgacgtgcttctgctgcgaggccgctgcatcgtagacgaggccatgctcacgggggagtccgtgccacagatgaaggtacttggtggaggatggggatcctcaagctgttcaggaggaaacaggccaggaggtggaggcccagggggtggcggggatccccctcaggcacaggcggaggaggcagtgtgggcacagatgagctctgtggactggggagccgggtggtgggggcgaggaaggaggtgagagagccaagggcatccagggtacattggtgccctgggatgtcagaccaaggtgggctgggagcagtccagaggggtgagtcccagacgaggccaagtgcaggccccagagagcaggcactgtgagtgcaatggggagaagacaggacggggtgagggtgaggatctgggagctgggtgggatgtattggtcgggtggggatccccctggctcattccagcctcaaggtccagctgtccaggaactcagatggagaaggaagcaaggtaggcctggccatccagattcacgatcttcctccc

SEQ ID NO: 91305 - DNA, 1038 bp, Homo sapiens
taaaatgtttatttgtgtagagatggggtctcgccgtgttgcccaggcttgtctcaaactcctggcctcaagcagtcctcctaaatcaacatcccaaagtgctgggattacaggcatgagtcactgcacccaacctaaacatttcagtcctcactgtttcgagtctacgcatctcagcgcttcagaatggtgatggaagaccgtgaccatgtctgcccttttgtactgagtacaatggccaatgtgcggtgcacaccctctcccttcatcttcaccaaaactgcaaatgctgacacgtggctgggagccggagaactgggctccaaaccccatcatggccttgttacgatggtcctcaacccagaaacccacagaacacctagggagctctttcctgacttaatcactgttcagagattacaaatatgttgactacaactatcaatctaatacaaggatttataagaaacatttagcaacttcccctaccccaaggttggccagtcacattaatggcctgtggcaactacgttccctttcatgctgttcttactcaacgcaaaggtacccagcaagatacaagggaagggcttattgtttgatagcagtggggttgctctttggtttcctcttctcacatcccatacataagacgtccatgcagttaaagggcagagcgagaatgaccctcgttgacatgactggtgccctgatcagattggactatggcacagagtactgcagaacacacccttaggcccaagtccttgcattctcgagccttttttttttttttttttttttttggagacagggtcttactctgttacccaggctggagtgcagtggtgtgatcatggctcactgtagccttgaactcctgggctcaagcattcatcctgcctcagcctcccaaatagctgggaccacaggcacacaccaccacccccagctaatttttaaattttttgtaaatagaaggtcttgctgtgttgcccaggctagtctctgactcctgggctcaagcactcctcctgc

SEQ ID NO: 91306 - DNA, 1452 bp, Homo sapiens
gccacccaggctggagtgcagtgttgcaatctcagttcactgcaacctccgcctcccagttcaagggattctcctgcctcagcctcctaagtagctggtattacaggtgtgcaccaccgtgtccggctcatttgtgtatttttagttgagacagggtttcgccacattggcgaggctgatctcaaactcctgatctcaagtgatccgcccaccttggcctcccaaagtgctgggattatgggtgtgagtcaccgtgcccagccttgtgctcccagctttaagtgtggcaccagaggcacagcaagatggtctcgtttgtcctgatgacagacgagggagtgacagaggcagcaccagagcccagtggcatttcagaatatacccatagagctgctgcacccaaaacctcccgggggggtcttggaactgtaggttgagaagagctaagccacaatgctttctttgtctctgtcaggagtacgaccccagcaaagcgacctttgtgaaggtggtgccaacccccaacaatggctccacggagctcgtggccctgcaccgcaatgaggtagggactgcctgctgggctcctggaggaggggcttgagtaggattcccaggcgctgacaccccaaggtcaggggcctctgtggcaaacacaccttctaccgcagggcgaagacgggcttgaggtgctgtccttcgaattccagaagatcaagtattcctacgatgccctggagaagaagcagtttctccccgtggcctttcctgtgggaaacgccttctcatactatcagagcaacagaggcttccaggaagactcagagatccgagcagctgagaagaaatttgggagcaacaagtgagtccttgatttgcctgtagcacctttgcctttctgtcctgctcccctcctgattcagggtgcctaggaagcgggacagaggcatctgcccttttatttatttatttactattattttatttttattttattttttatttttgagactgagtctcgctctgtcacccaggctggagtgcagtgacgcgatctcagctcaccccaacctccgcctccccggttcaagtgattctcctgcctcaacctgccaagcagctgggaatacaggctccccccaccacgcctggctaatttttgtatttttagtagagatgggggtttcaccatgttggccaggctggtcttgaactcctgacctcaggtgatcctcccatgttggcctcccaaagtgctgggattacaggcgtgagccactgcacccggccaaatctgcccttttagccaaatgtcccaggtgactgtgatgccgcttgagcaacatgctctaagtccagtctcccctgaacttgcctgctggcaggaaccccagagggtctgcagctggaagcccgtgccctggggtgtgagaccttgagtgtaaggttctt

SEQ ID NO: 91307 - DNA, 1486 bp, Homo sapiens
catagcgaacggtgacgagctggtggctgccgtgtggccgtaccggcggttggcgctgttgcggcgcctcacggtgctgccattcgccgggctgctttacccggcctggttgggtgccgcagccgctggctgctggggctggggcagcagttgggtgcagatccccgaagctgcgctgctcgtgcttgccaccatctgcctcgcgcacgcgctcactgtcctctcggggcattggtctgtgcacgcgcattgcgcgctcacctgcaccccggtaagtgtgtacacgcgagcccgacccccagcacggtcgagcctcgccgtgggtcccagctgcggccttcctgtcggtcaccatcgcgacctgggccactcatctgcctggcctggattcccaggggcaccctctacactttggcgcaggcttaatcatgaccccactgctgacttgctgtgcatgcctggtgcgggttatttcctttttctgaagtcctccctgttatggtcatttagattcagtgatgtaatacttgtaaaaggcttagcgcagggcccagcatacgtcgcccaggtcaggtaggagttgtttatactagttcccatattagcgactactcttgttctggaaacggccctaccttccatctcatctgtctcctaccttggttttcaaagtgtaaggcgagatcactgggataggtttcccccatctatgaagcttagttggttcttagactgaaccaagtcttgctgtccagtgcttagtggtcttccatactgtgatggaaaggagcatgaaatgcagttaattacagtgttgaagagaggcagaggtgtttatgagcgagtcatttacatgatgtctttccgcaaaatgagggtggtgatactgagttctgtcggggatacaacagcaagcaaggtcgcgctcctgacccacagtttagagttctgagtgaccaagtgtcgtcggaggagttggtgactgtgagcttccctgggcctgaagcagtgactgtgtcgtctctctctgggcctgcctcaggtgacaccagcaggtttggagccatggacactgaggtatatcaggaagcttcccctctgattccaggagtgtgtttgcctcaagaagaggaaaagggaacagcatcaagggctacagaaagacagaagccccccaccctggctggctctgaatgtgggtagaatcctcattctcctctcctgagagacaacctgttctgtccttcaaaaagacttatctatcccaggggaggagctcaacgtggtagctttgaggtagtacaatgaaagacaccaatgagggacaaaataaaggaggggttaaggggactgtggcaccgctcaaacttcagctgccttttgacctgcagctaagcagcttagctcttaacttcctctccagggatggagaagtgggaggagctgaacagccatcagccaggagaggtggatctgggtttgattc

SEQ ID NO: 91308 - DNA, 3350 bp, Homo sapiens
cccaggaggctgaggcaggaaaattgctggaacccaggaggcagaagctgcagtgagcctagatcgtgccactgtactccagcctgggcaacagagcaagactccatcttggaaaaaaaaaaaaaattagccaggcatggtggcactctctagtcccacctgctcaggaggctgagatgggaggattggttgagcccaggaattcaaggcttcagtgagctgtgatcatgccactgtactccagcctgggtgagagaatgagactccatctcttatttaaacaacaacaacaaaaaaattgactgttttgatcataactatggttgagtcttcttccagagcattgaatatattaactttaaaacaattcagacagggcagatatcctatactttttctgaaaatggttaaaatgtaattctcatacctactaataaatacaaaataattaaaaagccactaataatgtgctattcattttttacagatgtcatatggttgagagactctgtgaaagtagaagaggtagcaaatgtggagaaaccactagccagatgccaaatgttaatatcaacaaggaaacttttactggagcaaaaccacatgaatgcagcttttgtggaagagacttcattcatcattcgtcccttaataggcacatgagatctcacactggacagaaaccaaatgagtatcaggaatatgaaaagcaaccatgtaaatgtaaagcagttgggaaaaccttcagttatcaccactgctttcgcaaacatgaaagaactcacactggagtgaagccctatgaatgtaaacagtgtgggaaagcctttatatattaccagccatttcaaagacatgaaaggactcatgctggacagaaaccctatgaatgtaagcaatgtggaaaaacctttatatattaccagtcttttcaaaaacatgctcatactggaaagaaaccctatgaatgtaaacagtgtgggaaagcctttatatgttaccaatcttttcaaagacacaaaaggactcacactggagagaaaccctatgaatgtaagcaatgtggtaaggctttcagttgtcccacatactttcgaactcatgaaagaactcacactggagaaaaaccctacaaatgtaaagaatgtggtaaagccttcagttttctcagttcttttcgaaggcataaaaggactcatagtggagagaaaccctatgaatgtaaagaatgtggaaaagccttcttttattctgcaagctttcgagcacatgtaataatacacactggggctcgaccttataaatgtaaagaatgtgggaaagccttcaactcttctaattcctgtcgagtgcatgaaagaactcatattggagaaaaaccatatgaatgtaaacgatgtggcaaatcattcagttggtccatttctcttcgattgcatgaaagaactcatactggagagaaaccttatgagtgtaaacagtgtcataaaaccttcagtttttcaagttcccttcgagaacacgaaacaactcacactggagagaaaccctatgaatgtaaacaatgtggtaaaaccttcagtttttcaagttcccttcaaagacatgaaaggactcacaatgcagagaaaccctatgaatgtaaacagtgtgggaaagccttcaggtgttcaagttattttcgaattcatgaaaggtcacacactggagagaaaccctatgaatgtaaacagtgtggaaaagttttcattcgttccagttcctttcgactgcatgaaagaacacacactggagagaaaccctatgaatgtaaactatgcggtaaaaccttcagtttttcaagttcccttcgagaacatgaaaaaattcacactggaaataagccttttgagtgtaagcaatgtggtaaggccttccttcgttccagtcaaattcgattgcatgaaaggactcacactggagagaaaccgtatcaatgtaaacaatgtggaaaagccttcatttcttccagtaaatttcgaatgcatgagagaactcacacgggagagaaaccctatcgatgtaaacaatgtgggaaagccttcagattttcaagttctgttcgaattcatgaaaggtctcacactggagagaaaccttatgaatgcaaacaatgtggaaaagccttcatttcttccagtcactttcgactgcatgaaaggactcatatgggagagaaagtctaagaatataagcaacattctgaagccttcggttgttccagctccttctgaatacacaaaagagttcatactggacagaagctgtgtgaatacaaacattgttctaaagcccttaattgttccagtttcttttgagcacgaaagaattcccactggtgagaaacagtatgaatgtaaacattgtgattaagccttcagttgacctaattcatttcaaagacaggactcgtgctgcagtgaaatctgttttgttttttgttttttgtttttttaaaaaaggccaagcttgttggctcatgcctatagtcccagcactttgggaggccaaggtgcaaggcaggcagatcatttgaggtcagaaattcgagaccagcgtggtcaacatggtgtaaccccatctctactaaaaattaccaaaaaatgaaccaggcatggtagtgcatgcctctaatcccagctactcaggaggctaaggcaggagaatcacttgaacctggagacagaggttgcagtgagctgagatcacgccactgcattccagcctgtgcgacagaatgagacactgtctcaagaaaaaataaaagtgggaaaatcttccaactgtcctctagagtgtgaatatatgaaaggagtcagagtggggtgaaagtctataaatgtaagacatttgggaaagccttcacacagccttttgagcacacatgagaatgtatactggagagaaaccctataaatattaagaatgtgggaaattcttcatcctagttcttttgttgttgttgatgatacaaaaatattttcatttaataaagattgtcaggttatatttaataagaaagaaagtatcatgtaaacagcccagtaataaaattttacaatcttataaattataacatttttctttaaaactggaacatattctcattatgctttccaaaggacatattgatttagatgtgactcattcttcagtggattctacagaagaaaccatatgagagctaatttccaattcagcaacagcattttttacttctgtagttatttttttctatccaatctggctgagtcttggttgagtagttcatgctgctatttgaggtctctgggtatgaggtagggatcctt

SEQ ID NO: 91309 - DNA, 1070 bp, Homo sapiens
ttctttcatgcactcgacaggaattagaagagttgaaggctttcccacattctttacatttataaggtcgagccccagtgtgtattattacatgtgctcgaaagcttgcagaataaaagaaggcttttccacattctttacattcatagggtttctctccactatgagtccttttatgccttcgaaaagaactgagaaaactgaaggctttaccacattctttacatttgtagggtttttctccagtgtgagttctttcatgagttcgaaagtatgtgggacaactgaaagccttaccacattgcttacattcatagggtttctctccagtgtgagtccttttgtgtctttgaaaagattggtaacatataaaggctttcccacactgtttacattcatagggtttctttccagtatgagcatgtttttgaaaagactggtaatatataaaggtttttccacattgcttacattcatagggtttctgtccagcatgagtcctttcatgtctttgaaatggctggtaatatataaaggctttcccacactgtttacattcatagggcttcactccagtgtgagttctttcatgtttgcgaaagcagtggtgataactgaaggttttcccaactgctttacatttacatggttgcttttcatattcctgatactcatttggtttctgtccagtgtgagatctcatgtgcctattaagggacgaatgatgaatgaagtctcttccacaaaagctgcattcatgtggttttgctccagtaaaagtttccttgttgatattaacatttggcatctggctagtggtttctccacatttgctacctcttctactttcacagagtctctcaaccatatgacatctgtaaaaaatgaatagcacattattagtggctttttaattattttgtatttattagtaggtatgagaattacattttaaccattttcagaaaaagtataggatatctgccctgtctgaattgttttaaagttaatatattcaatgctctggaagaagactcaaccatagttatgatcaaaacagtcaatttttt

SEQ ID NO: 91310 - DNA, 1067 bp, Homo sapiens
tgggacttgatgaccattgtttgtgtccacgttcaacggagttcaaatttaatatttaactattccaccgcattcacaactccttctgtatattgtaaatatagcactcaaaaatgtgcatgttcgtattcatgactttaaatttctactttattatctagaaaaatatcataaataaactgatgtagtggatctcatgctgctctttcttctcggagttagagaatacattagagaatatttctatgttgaaaattattttattggataattttagtcagtcctataagccagaaccaattgtctttactctctaatttcaccttaagtcaaattaaaagtctcgcccatggccacttggtaaaaacgtgtgtgtgtgtgtgttttccagggaccattgcaatttagagacgtggccatagaattctctctggaggagtggcattgcctggacactgcacagtggaatttatatagggatgtgatgttagagaactacagacacctggtcttccttggtgaggataacttgaatgtataattcataatgtaccctaaaggttttatttctcctttttgtgaaatgttttttagtaatttattttttgcgtaaaagagtttcagatgccctttttccagaaaatttttagaatttgttcatttagaaaagaatttcaagatgtttaatcttttttttttttgagacagagtctcgctttgtcacccaggctggagtgtagtggcacgatctcagctcactgcaacctccgcctcccgggttcacgctattctcctgcctcagcctcccgagtagctgggactgttggcgtacgccgccacgcctggctaatttttttttttttttgtatttttagtagagatgaggtttcaccgtgttgtccaggatggtctcgatctcctgacctcgtgatctgcccgcctcagcctctcaaagtgctgggattacatgcgtgagccactgcgctcagccaagatgtttaatcttaatccaaaatctccacatgcctgagttgagctgtgttcttcactctaaattagcggtaagc

SEQ ID NO: 91311 - DNA, 1300 bp, Homo sapiens
cgagtcgcaccgaaacaaatgctcttcacgatcattgttaaagtagcaatagcgccacgtgctttcctgggaactgctggcctgttttccactcatacaaagtggagaaggctttgaaatagcaaaggagggtgacataaattgaatacttatatgaaatttttaattaaaaatagcatttgatgttatacaactataagtgagactattagtgtgatgtcatattcttaattatattgacaaaataaccattcacagtattcctatttaaaataacatgttttgtcggctgtatatttgctagcttttggttaaatagtaccagagctcaatagcaatcaacaaaatgaatctttattttaccgcaagcattagtgatgcatatgcctgtttttcttaaagttcattagctttttgccttttccggttgcagcgccgcgcggtgaggttctctagtccacgctcgcagccatgccgtccaagggcccgctgcaatcggtgcaagtcttcggacgcaagaagacagccacagctgtggcgcactgcagacgcggcaatggtctcatcaaggtgaacgggcagcccctggagatgactgagccgcgcatgctacaatacgagctgctggagccagttctgcttcttggcaaggagcgatttgctggtgtggacatccgtgtccgtgtgaagggtggtgctcatgtggcccagatttatgctatccgtcagtccacctccaaagccctggtggcctattaccagaaatatgtggatgaggcttccaagaaggagatcaaagacatcctcatccagtatgaccggaccctgctggtagctgatccccgtcgctgcaagtccaaaaagtttggaggtcctggtgcccgtgcttgctaccagaaatcctaccgataagcccatcatgactatcaaaattcacctgtataataaacagtttttgagggattttaaagtttccaggaaaaaaaaagttcattagctttttatgaaggatttatccttttttttcagtgtgctgtttattgctgagaagtggctgccctgccagaaaactgctattctcagctgtaaccacattgactaatagtgagtggaagtgcagtggataaaaagcaaatgtgtcttctctgtatcttttttcatttattggctgaagaacaggaggatgcggaagatggaagaaaatataatctctgaaagataatgaagaagctctcctaaatagaagaaaacctcataggggatttttttttcatcattttactctctgcttctatgcgtt

SEQ ID NO: 91312 - DNA, 1321 bp, Homo sapiens
cttgtttctcccttagctaagagaaccagacaaactccatcttggctctttcactggcagccccttcctcaaggacttaacttgtgcaaggtgactcccagcacatccaagaatgcaattaactgataagatactgtggcaagctgtatccgcactccccaagaattcatctgattgataacgcccaaagccccgcgtttatcaccttgtaatagtcttaaagcccctgcacctggaactgtttactttcctgtaaccatttaccttttaactttttgactacttaacttctgtaaaattgttctaactagacacccctccccttcctaaaccaaggtataaaagttaatcaagccccttcctctgggccgagagaactttgcacgttagccgtctctcggtcgccggctaataaaggactcttaattcatctcaaagtgtggcgttttcctaactcgctagggtacaacaatcagatcaaccaccaaagtgggaaacattgaaatcaaggatcttatggttggtgatgaggcaagtgaattacgatcaatgttagaagttaactaccctatggaaaatggcatagtacgaaattgggatgacacgaaacacctgtgggactacacatttggaccagagaaacctaatatagataccagaaattgtaaaatattactcacagaacctcttatgaacccaaccaaaaacagagagaagatggtagaggtaatgtttgaaacttaccagttttccggtgtatatgtagccatccaggcagttctgactttgtacgctcgaggtttattgactgctgtagtggtagactctggagatggcgtgactcacatttacccagtattagaaggcttttctctccctcatcttaccaggagactggatattgctgggagggatataactagatatcttatcaagctacttctgttgcaaggatacaccttcaaccactctgctgattttgaaacggttcgcatgattaaagaaaaactgtgttacgtgggatataatattgtgcaagagcagaaactggccttagaaaccacagtattagttgaatcttatacactcccagatggaggaatcatcaaagttgggggagagagatttgaaacaccagaagctttatttcagcctcacttgatcaatgttgaaggagttggtgttgctgaattgctttttaacacaattcaggcggctgacattgataccagatctgaattctacaaacacattgtgctttctggagggtctactatgtatcctggcctgtcatcacggttgaaacgagaacttaaacagc

SEQ ID NO: 91313 - DNA, 1104 bp, Homo sapiens
ttattagaaattcaccacattggccaggtgtggtttctccacctgtaatcccaacactttaggaggccaaagtgggcagatcacctgaggtagggagttcaagaccagcctgaccaacataaacaccatctctactaaaactacgaaaaaaattaccgggtgcggtgatgcatgtctgtaatcccagctactcaggaggcagaggcaggagaattgcttgaacccgggaggcggaggtggcggtgagctgagatggcaccatttcactccagcttgggcaacaagagcgaaactccatctctaaataaataaataaataaataaatcagactttattccagatcttctgggggaaaaaaaacctgcataacgatgtcttcagcttattgtacatattaaaactttagagatgccttctaactaaacatgtcttttccatctgaaaaatattcacaactcattctgtataatgtaactatagcactgaaaaatttacatgttcctgttcttgcccttaattttatactttattatctagaaacatacatgaattgatgttgtggatcttatgctgctctttcttctcagagttagagaatacattagagaatatttctgttttgaaatcattttattggataattttagtcagtcctataagtcagaaccagttctctttactctcttatttcaccttaagtcaaattaaaaattccgcccatggccacttggtaaaaatgtgtgtgtgtgtgtttttcagggaccattgcaatttagagatgtggccatagaattctctctggaggagtggcattgcctggacactgcacagcggaatttatataggaatgtgatgttagagaactacagtaacctggtcttccttggtgaggataacttgagtacataatataccctatagattttatttatttattttttgtagaatgttttttagtaatttattctttgcataaaagagtttcagatccccattttccagaaaatcttcagaatttgttcgtttagaaaagaatttcttcaacatgttttatcttaatccaaactttccactttcctgagttgagctgtatttttcactct

SEQ ID NO: 91314 - DNA, 1475 bp, Homo sapiens
ctctttgcattatgctcacctggggcactgcacacacttaactcatttataaattttccacaaatgtattttggtcagtatgtttttgttacatttaaatgtctatgaaggatttagggcctatggtattttgctgtgccatcttacttaatgtagtttgtttaattttatatattacatttgtaaactatcttcatctaagtctagcaagtggagtaatttgtcatttttgtttctttcagttatgtgttctcattttgcccaagacctttggccggagcagaatataaaagattctttccaaaaagtgacactgaaaagatatggaaaatgtagacatgaaaatttaccattaagaaaaggctgtgaaagtatggatgagtgtaagatgcacaaaggaggttgtaatggacttaaccaatgtctcacagctacccagagcaaaatatttcaatgtgataaatatgtaaaagtcgctcataaattttcaaattcaaacagacatgagataagacatactaaaaagaaacctttcaaatgtacaaaatgtggcaaatcatttggcatgatttcatgcctaactgaacatagcagaattcatactagagtaaatttctacaaatgtgaagaatgtggaaaagcctttaactggtcctcaacccttactaaacataagagaattcatacgggagagaaaccttacaaatgtgaagaatgtggtaaagcctttaaccagtcctcaaaccttattaaacataagaaaattcatactggagagaaaccctacaaatgtgaagaatgtggcaaaacttttaaccgattctcaactcttactacccataagataattcatactggagagaaaccctacaaatgtaaagaatgtggtaaagcttttaaccgatcttcaacccttactacccatagaaaaattcatactggagagaaaccttacaaatgtgaagaatgtggcaaagcctttaagcagtcctcaaaccttactacacataagataattcatactggagagaaaccctacaaatgtaaaaaatgtggaaaagcctttaaccagtctgcacaccttaccacacatgaggtaattcatactggagagaaaccctacaaatgtgaaaaatgtggaaaagcctttaatcatttctcacaccttactacacataagataattcatactggagagaaaccttacaaatgtaaagaatgtggtaaagcttttaaacactcttcaacccttactaaacataagataattcatactggagagaagccttacaaatgtaaagaatgtgaaaaagcttttaaccaatcctcaaaacttactgaacataagaaaattcatactggagagaaaccctatgaatgtgaaaaatgtggcaaagcttttaaccagtcctcaaatcttactagacataagaaaagtcatacagaagagaaaccttacaaatgtgaagaatgtg

SEQ ID NO: 91315 - DNA, 1068 bp, Homo sapiens
tgaagaatgtggaaaaggttttaaccactccacaactcttactagacataaggtaattcatgctggagagaaacactacaaatgtgaaaaatgtggcaaagattttaaacagtcctcacaccttactaaacataagacaattcatgctggagagaaaccctacaaatgtgaaggatgtggcaaagctttctgccaattctcataccttactaaacataagataattcatactggagagaaaccctacaaatgtgaggaatgtggcaaagcttttaattggtactcacaccttaccagacataagataattcatactggagagaaaccctacaaatgtgaataatgtggcaaagcctttaatgtattcgcaacccttactagacataagataattcatactgaagagaaaccctacaaatgtgaggaatgtggcaaagcttttaaacagtcctcaaaccttactactcatgaaaattcattctggagagaaaccctacaaatgtggagaatgtggcaaagctttcttcagattctcataccttactacacataagataattcatactggagagaaaccctacaaatgtgaagaatgtggcaaagcttttaactgttactcctaccttactgcacataagttgattcatactggagagaaaccctacaaatgtgaagaatgtggcaaagctttctaccgattcatttaccttactacacataagagaattcacactggagagaaaccctacaaatgtgaagaatgtggcaaagctttctaccgattatcttatcttactacacataagatgattcatactgtagagaaacgctacaaatgtgaggaatgtggcaaagcttttaactggtactcacgccttactacacataagagaattcatactggtgagaaaccctacaaatgtgaagaatgtggcaaagcctttagtgtattctcaacccttactaaacataagataattcatactggagagagaccctacaagtgtgaagaatgtggcaaagcctttaatgtattctcaacccttactaaacataagagaattcata

SEQ ID NO: 91316 - DNA, 1050 bp, Homo sapiens
attcatactggagagaaaccctacaaatgtgaagaatgtggcaaagcctttaaccagtcctcaacccttactacacataagataactcatgctggagagaaaccttacaaatgtgaagaatgtggcaaagctttttaccgattctcataccttactaaacataagacaagtcatactggagagaaattctacaaatgtgaagaatgcggcaaaggctttaactggtcctcagccctcactaaacataagagaattcatactggagagaaaccctacaaatgtgaagaatgtggcaaagcttttaatgagtcctcaaaccttactacccataagatgattcatactggagagaaaccctacaaatgtgacgaatgtggcaaagcctttaaccggtcctcacaactaactgcacataagatgattcatactggagagaaaccctacaaatgtgaggaatgtggcaaagcttttaaccgatcctcaacccttactaaacataagataactcatactggagagaaatcttacaaatgggaagaatgtggtaaagactttaaccagtccctaagccttattaaacaaaataactcatactggagagaaaccctacaaatgtgaaaaatgtggcaaagccttttaccagtcctcaactcttactaaacataaaaaaattcatactggagggaactcctgtgactgtgaagaatatggcaaagcctttaataaattctcaattcctaacagacataagataattcatactagagagaaattctacaaaccagaaagatgtgacagtgctttgaaaacacctcaaacttttcaaaacataaatcatagtgttgagaaatcctagaaatgtgaagaatgtgataaagttttaaatggttgtcacacttgattgtaggtaaggtaagttatactggagaaaacttctacatgtgtgaacagtgtgacaaaacttttaactaatgctcacaccttcacaggaaagcatttatacttgagaaatattgtacaaatataaagactgtgaaaaagccattaata

SEQ ID NO: 91317 - DNA, 1143 bp, Homo sapiens
gcatggtttctctccagtatgagttgtcttatatgtagtaagccttaaggactggttaagggcattgcaacattccacacaattgtaggaattccctccagtatgaattacatgaatgtttagtaaggattgaggaatagctaaaaggcttgccacattcttcagatttgtagggtttccctcctgtacaaattcccttatgttcagtaagcgttgagaattaattaatagttttgccacatttttcatatttgtagggtttttcctccagtatgaattcttttatgagtagtaaggtgtgaggaccagttgaagtctttatcacattcttcacatttgtagggcttctcaccagtatgaattctcttatgttccataaggtttgaggactggttgaagcctttgccacattcttctcatttgtagagtttctctccagcatgaattttcttatgtgtaggagggttgggaactgtttaaaagctttgccaaattcttcacatttttagaatttctctccagcatgaattttcttatgtttactaaagactgagaaccagctgaaggctttgccactttcttcacatttgtagggtttctctccagtatgaattttctatgataactgagggttgaggaccacttataggctttgccacattctttgcatttgtatggtttctctccagtatgaattaccttatgtttagtaaggattgagaacatactaaagcctttaccacattcttcacatttgtagggtgtctctccagtatgaattctcttatgttccataaggtttgaggaccagttgaaagcctcaccacattcttcacatttgtagggtttctctccagtatgaattttcttatgataactaagggttgagggccacttataggctttgccacattcttcacatttctagagtttctctccagtatgaattttcttatgtttactgaagactgataaccagctgaaggctttgccacattcttcacatttgtagggtttctctccagtatgaattaccttatgtttagtgaggattgagaacgtactaaaggctttgccacattcttcacatttgtagggtttctctccagtatgaattttcttgtgatatctaagggttgaggg

SEQ ID NO: 91318 - DNA, 4530 bp, Homo sapiens
aactgtatttatctgagtctaataagtaggctaatttgtgatttttatttcttttcagttatatgttctcattttgctcaagatctttggccagagcagggcatagaagattctttccaaaaagtgatattgagaaggtatgaaaaatgtggacatgagaatttacacttaaaaattggttataccaatgtggatgagtgtaaggtgcacaaagaaggttataataaacttaaccagagtttgacaactacacagagcaaagtatttcaacgtggcaaatatgcaaatgtctttcataaatgttcaaattcaaacagacataagataaggcatactggaaagaaacatttgcaatgtaaagaatacgtcagatcattttgcatgctttcacacctatctcaacataaaagaatttatactagagagaattcctacaaatgtgaagaaggtggcaaagcttttaactggtcctcaacccttacttattataagagtgctcatactggagagaaaccctacagatgtaaagaatgtggcaaagcctttagtaagttctcaatccttactaaacataaggtaattcatactggagagaaatcctacaaatgtgaagaatgtggcaaggcttttaaccaatctgcaatccttactaaacataagataattcatactggagagaaacccaacaaatgtgaagaatgtggcaaagcctttagtaaggtctcgactcttactacacataaggcaattcatgctggagagaagccctacaaatgtaaagaatgtggcaaagccttcagtaaggtctcaacccttattacacataaggcaattcatgctggagagaagccctacaaatgtaaagaatgtggcaaagcctttagtaagttctcaatccttactaaacataaggtaattcatactggagagaaaccctacaaatgtgaagaatgcggcaaagcctataagtggccctcaacccttagttatcataagaaaattcatactggagagaaaccctacaaatgtgaagaatgtggcaaaggttttagtatgttctcaatccttactaaacatgaggtcattcatactggagagaaaccctacaaatgtgaagaatgtggcaaagctttcaactggtcctcaaaccttatggaacataagaaaattcacactggagagacaccctacaaatgtgaagaatgtggcaaaggctttagtatgttctcaatccttactaaacataaggtaattcataatggagagaaaccctacaaatgtgaagaatgtgataaggcaactcatgctggagagaaaccctacaaatgtgaagaatgtggcaaagctttcaactggtcctcaaaccttatggaacataagagaattcatactggagagaaaccctacaaatgtgaagaatgtggcaaaagcttcagtacattctcaatccttactaaacataaggtaattcatactggagagaaaccctacaaatgtgaagaatgtggcaaagcctataagtggtcctcaacccttagttatcataagaaaattcatactgtagagaaaccctacaaatgtgaagaatgtggcaaagcttttaaccaatctgcaattcttattaaacataagagaattcatactggtgagaaaccctacaaatgtgaagaatgtggcaaaacctttagtaaggtctcaacccttactacacataaggcaattcatgctggagagaagccctacaaatgtaaagaatgtggcaaaacctttattaaggtctcaacccttactacacataaggcaattcatgctggagagaagccctacaaatgtaaagaatgtggcaaagcctttagtaagttctcaatccttactaaacataaggtaattcatactggagagaaaccctacaaatgtgaagaatgtggcaaagctttcaactggtcctcaaaccttatggaacataagagaattcatactggagagaaaccctacaaatgtgaagaatgtggcaaaagctttagtacattctcagtccttactaaacataaggtaattcatactggagagaaaccctacaaatgtgaagaatgtggcaaagcctataagtggtcctcaacccttagttatcataagaaaattcatactgtagagaaaccctacaaatgtgaagaatgtggcaaagcttttaaccgatctgcaatccttattaaacataagagaattcatactgatgagaaaccctacaaatgtgaagaatgtggcaaaacctttagtaaggtctcaacccttactacacataaggcaattcatgctggagaaaagccctacaaatgtaaagaatgtggcaaagcctttagtaagttctcaatccttactaaacataaggtaattcatactggagagaaaccctacaaatgtgaagaatgtggcaaagcctataaatggccctcaacccttagttatcataagaaaattcatactggagagaaaccctacaaatgtgaagaatgtggcaaaggttttagtatgttctccatccttactaaacatgaggtaattcatactggagagaaaccctacaaatgtgaagaatgtggcaaagccttcagctggttgtcagtctttagtaaacataagaaaactcatgctggagagaaattctacaaatgtgaagcatgtggcaaagcctataagtcatcctcaacccttagttatcataagaaaattcatactgaagagaaaccttacaaatatgaagaatgtggcaaaggctttagtacattctcaatccttactaaacataaggtaattcatactggagagaaaccctacaaatgtgaagaatgtggcaaagctttcaactggtcatcaaaccttatggaacataagaaaattcacactggagagacaccctacaaatgtgaagaatgtgacaaagccttcagctggccctcaagccttactgaacataaggcaactcatgctggagaaaaaccctacaaatgtgaagaatgtggcaaagccttcagctggccctcaagacttactgaacataaggcaactcatgctggagaggaaccctacaaatgtgaagaatgtggcaaagctttcaactggtcctcaaaccttatggaacataagagaattcatactggagagaaaccctacaaatgtgaagaatgtggcaaaagctttagtacgttctcaatccttactaaacataaggtaattcatactggagagaaaccctacaaatgtgaagaatgtggcaaagcctataagtggtcctcaacccttagttatcataagaaaattcatactgtagagaaaccctacaaatgtgaagaatgtggcaaaggctttgttatgttctcaatccttgcaaaacataaggtaattcatactggagagaaactctacaaatgtgaagaatgtggcaaagcctataagtggccctcaacccttagatatcacaagaaaattcatactggagagaaaccctacaaatgtgaagaatgtggcaaagcctttagtacgttctcaatcctcactaaacataaggtaattcatactggagagaaaccctacaaatgtgaagaatgtggcaaagccttcagctggttatcagtcttcagtaaacataagaaaattcatactggagagaaactctagaaatgtgaagaatgtggcaaagcctataagtggccctcaacccttagttatcataagaaaattcatactggagagaaaccctacaaatgtgaagaatgtggtgaggctttcaactggtcctcaaaccttatggaacataagagaattcatactggagagacaccctacaaatgtgaagaatgtggtaaaggctttagtatgttctcaatccttactaaacataaggtaattcatactggagagaaaccatacaaatgcaaagaatgtggcaaagcctataagtggtcctcaaccctcagttatcatagaaaattcatactggagagaaaccctacaaatgtgaagaaagtggcaaagccttcagctggttctcagtctttagtaaacataagaaaattcatgctggagagaaattctaaaaatgtgaagaatttggcaaagcttttaaacagttcccaaccctcctacacataagaaaattcatgctggagagaaactctacaaatgagaagaatgtggcaaaggcttcaaccagtcctcaaaccttatggaacataagagaattcatactggtgagaagccctacaaatgtgaagaatgtgataaagacttcaactggtcctcacaccttactactcataaaagaattcatactggaggaaaaaccctacaaatatgaaaaatgtggcaaaactattaattaattctcaacgcttactgaacataagggaatttgtacaggagggaaaccctacaaatctgaagaatgtggcaagccttttagctattcctcaatccttactaaacattcatgtaattcatactggagggaattcctacaattgtgtggaatgt

SEQ ID NO: 91319 - DNA, 3851 bp, Homo sapiens
caaatgtatttggtcagtatgtttttgttacatttatatgtctatgaagaaattagggcctgtcttattttgctgtgccatcttatgtggtttgcataattttataggttagatttgtaaagtatattcatctgagtctagcaagtggaataatttgttatttttatttcttctagttatgcgttctcattttacacaagacctttggccagatcagagcacaaaagattctttccaagaagtaatactgagaacatatgcaagatgtggacataagaatttacgattaagaaaagattgtaaaagtgccaatgagggtaagatgcacaaagaaggttataataaacttaaccaatgcaggacagctacccagagaaaaatatttcagtgtaacaaacatatgaaagtctttcataaatattcaaatagaaataaggttagacacactaaaaagaaaactttcaaatgtataaaatgtagcaaatcatttttcatgctttcatgcttaattcgacataagagaattcatattagacagaatatctacaaatgtgaagaacgtggcaaagcctttaaatcgttctcaacccttactaaacataagataattcatactgaagacaaaccttacaaatataagaaatgtggcaatgcctttaaattttcttcaacgttcactaaacataagagaattcatactggagagacacctttcagatgtgaagaatgtggcaaagcttttaaccagtcctcaaatcttactgaccataagagaattcatactggagagaaaacctacaaatgtgaagaatgtggcaaagcttttaaggggtcctcaaattttaatgcacataaggtaattcatactgcagagaaaccctacaaatgtgaagattgtggcaaaacttttaaccatttctcagcccttagaaaacataagataattcatactggaaagaaaccctacaagcgtgaagaatgtggcaaagcttttagccagtcctcaacccttagaaaacatgagataattcatactggagagaaaccctacaaatgtgaagaatgtggtaaagcttttaagtggtcttcaaaacttactgtacataaggtagttcatactggagagaaaccctacaaatgtgaagaatgtggcaaagcttttagccagttctcaacccttaaaaaacataagataattcatactggaaagaaaccctacaaatgtgaagaatgtggcaaagcttttaacagttcctcaacccttatgaaacataagataattcatactggggagaaaccatacaaatgtgaagaatgtggcaaagcttttaggcaatcctcacaccttactagacataaagcaattcatactggagagaaaccctacaaatgtgaagaatgtggcaaagcttttaaccatttctcagaccttagaagacataagataattcatactggaaagaaaccctacaaatgtgaagaatgtgggaaagcttttagccagtcctcaacccttagaaaccatcagataattcatactggagagaaaccctacaaatgtgaagaatgtggtaaagcttttaagtggtcatcaaaacttactgtacataaggtaattcatactggagagaaaccctgcaaatgtgaagaatgtggcaaagcttttaagcatttctcagccctcagaaaacataaggtaattcatactagggagaaattgtacaaatgtgaagaatgtggcaaagcttttaacaattcctcaatccttgctaaacataagataattcatactgggaagaaaccgtacaaatgtgaagaatgtggcaaagcttttaggcaatcctcacaccttactagacataaagcaattcatactggagagaaaccttacaaatgtgaagaatgtggcaaagcttttagccatttctcagcccttagaagacataagataattcatactggaaagaaaccgtacaaatgtgaagaatgtggcaaagcttttagccatttctcagcccttagaagacataagataattcatactggagagaaaccctacaaatgtgaagaatgtggtaaagcttttaagtggtcatcaaaacttactgtacataaggtaattcatactgcagagaaaccctgcaaatgtgaagaatgtggcaaatcttttaagcatttctcagcccttagaaaacataaggtaattcatactagggagaaattgtacaaatgtgaagaatgtgtcaaagcttttaacagtttctcagcccttatgaaacataaggtaattcatactggagagaaaccctacaagtgtgaagaatgtggtaaagcttttaagtggtcctcaaagcttactgtacataaggtaattcatactggagagaaaccctgcaaatgtgaagaatgtggcaaagcttttaagcatttctcagcccttagaaaacataaggtaattcatactggaaagaaaccctacaaatgtgaagaatgtggcaaagcttttagccaatcctcatcccttagaaaacatgagataattcatagtggagagaaaccatacaaatgtgaagaatgtggtaaagcttttaagtggttgtcaaaacttactgtacataaggtaattcatactgcagagaaaccctgtaaatgtgaagaatgtggcaaagcttttaagcatttctcagcccttagaaaacataagataattcatactggaaagaaaccctacaaatgtgaagaatgtggcaaagcttttaatgattcctcaacccttatgaagcataagataattcatactgggaagaaaccatacaaatgtgcagaatgtggcaaagcttttaagcaatcctcacatcttactagacataaagcaattcatactggggagaaaccctacaaatgcgaagaatgtggcaaagattttaacaattcctcaacccttaagaaacataagctaattcatactagggagaaattgtacaaatgtgaagaatgtgtcaaagcttttaacaatttctcagcccttatgaaacataagataattcatactggggagaaaccctacaaatgtgaagaatgtggtaaagcttttaagtggtcctcaaaacttactgaacataaggtaattcatactggagagaaaccctgcaaatgtgaagaatgtgacaaagcttttaagcatttctcagcccttagaaaacataaggtaattcatactggaaagaaaccctaccaatgtgacgaatgtggcaaagcttttaacaattcctcaacccttacgaaacataagataattcatactggggagaaaccctacaaatgtgaagaatgtggcaaagcctttagtcagtcctcaatccttactaaacataagataattcattctgtagagaaaccctacaaatgtgaagaatgtggcaaagcctttaaccagtcctcacaccttactagacacaaaacaattcatactggagagaaaccctacaaatgtgaagaatgtggcaaagcttttattcagtgctcataccttattagacataaaacaattcataccagagagaaacctacaaatgtgaagaaagtaccaaagcttttaagcaatcctcacaccttactagacaaaacaattcatactggagagaaaccctacaaatgtgaagaatgtgccaaagctttttaaccatccttcaacccttactaaacatatgataattcacactggggagaaaccttagaaatgtgaataatgtggcagagctttcaaccattttataaaccttaatacacataggataatttatactagagacagaccctgcatatgtgaagaatgtggcaaagcttttaac

SEQ ID NO: 91320 - DNA, 1129 bp, Homo sapiens
tggctaaaagctttgccacattcttcacatttgtagggtttctttccagtatgaattaccttatgttttctaagggctgagaaatgcttaaaagctttgccacattcttcacatttgcagggtttctctccagtatgaattaccttatgtacagtaagctttgaggaccacttaaaagctttaccacattcttcacacttgtagggtttctctccagtatgaattaccttatgtttcataagggctgagaaactgttaaaagctttgacacattcttcacatttgtacaatttctccctagtatgaattaccttatgttttctaagggctgagaaatgcttaaaagatttgccacattcttcacatttgcagggtttctctgcagtatgaattaccttatgtacagtaagttttgatgaccacttaaaagctttaccacattcttcacatttgtagggtttctctccagtatgaattatcttatgtcttctaagggctgagaaatggctaaaagctttgccacattcttcacatttgtacggtttctttccagtatgaattatcttatgtcttctaagggctgagaaatggctaaaagctttgccacattcttcacatttgtaaggtttctctccagtatgaattgctttatgtctagtaaggtgtgaggattgcctaaaagctttgccacattcttcacatttgtacggtttcttcccagtatgaattatcttatgtttagcaaggattgaggaattgttaaaagctttgccacattcttcacatttgtacaatttctccctagtatgaattaccttatgttttctgagggctgagaaatgcttaaaagctttgccacattcttcacatttgcagggtttctctccagtatgaattaccttatgtacagtaagttttgatgaccacttaaaagctttaccacattcttcacatttgtagggtttctctccagtatgaattatctgatggtttctaagggttgaggactggctaaaagctttcccacattcttcacatttgtagggtttctttccagtatgaattatcttatgtcttctaaggtctgagaaatggttaaaagctttgccacattcttcacatttgtagg

SEQ ID NO: 91321 - DNA, 1038 bp, Homo sapiens
atagattgagaccaacattaccaagtgatttataagctcaataaaacttgagaggcaatgcttagttcagtggttgtaagcccaggctgctaattacaatcacatggccagtttgcagaactccctttactggtgcccttcccacaggttctgtttaatgttctgggtggaagcattcatgttattttaattaactgcctcatgtgactctaagttgtggccagaatcaagtatagggggttcaagatacatttatgagagttaagtttcacctgtgcactaaagggtagtcctagagcctcttttctttgggtttcatagggacagggcagtgtggctcatacttttgttactgtagcagaaattgctggcaggggagggcacctgaagacaggaaaggagaaacttgtatttttatatctgtagagcagctcattgttgctgaatctcttctgttataaagtacagaaatgggtggagttttttctgttttgggtcttctgcctgtgggtgtggtggtagcaggtaaacatgtggtgctgacacttttcaaggcatagtctcaagatgcggtgtaatttgtccagagaatcttatctgagaaggaatcctagaaaagaaggagaaagagaaaaaatggcattcttaatgatgaaatattgaatacttattttatttttattttactttaagttccaggatacatgtgcagaatgtgcaggtttattacataggtatatgtgtgccacagtggtttgctgcacgtattgacccatcttctaggtgccctccccttgccccccactccacaacaggccctggtgtgtgttattcccctccctgtgtccttgtgttctcattgttcaactaccacttatgagtgagaacatgcggtttttggttttctatccctgtgttagtttgctgaggatgatgacttccagcttaatccatgttcctacaaaggacatgatctcatttctttgtatggctgcatagtattccatggtgtgtatgtaccacattttatctatccat

SEQ ID NO: 91322 - DNA, 5858 bp, Homo sapiens
atgaagaaattagggcctgtcttattttgctgtgccatcttgcttaagcggtttgtataattttataggttagatttgtaaagtatattcatctgagtctagcaagtgacataatttattattttcatttcttccagttattagttctcattttacacaagacttttggccagatcagagcataaaagattctttccaagaaataatattgagaacatatgcaagatgtggacataagaatttacgattaagaaaagattgtgaaagtgtcaatgagggtaagatgcacgaagaagcttataataaacttaaccaatgttggacaactacccagggaaaaatatttcagtgtaacaaatatgtgaaagtctttcataaatattcaaattcaaatagatataagattagacacactaaaaagaaaactttcaaatgtatgaaatgtagcaaatcatttttcatgctttcacacttaattcaacataagagaattcatactagagagaatatctacaaatgtgaagaacgtggcaaagcctttaaatggttctcaacccttattaaacataagataattcatactgaagacaaaccctacaaatataagaaatgtggcaaagcttttaacatctcttcaatgttcactaaatgtaagataattcatactggaaagaaaccctgcaaatgtgaagaatgtggcaaagtttttaacaattcctcaacccttatgaaacataagataattcatactgggaagaaaccatataaatgtgaagaatgtggcaaagcttttaagcaatcctcacaccttactagacataaagcaattcatactggagagaaaccctacaaatgcgaagaatgtggcaaagcttttaaccatttctcagcccttagaaaacatcagataattcatactggaaagaaaccctacaaatgtgaagaatgtggcaaagcttttagccagtcctcaacccttagaaaacatgagataattcatactgaagagaaaccctacaaatatgaagaatgcggcaaagcttttagcaatttgtcagcccttagaaaacatgagataattcatactggacagaaaccctacaaatgtgaagaatgtggtaaagcttttaagtggtcctcaaaacttactgtacataaggtaattcatactgcagagaaaccctgcaaatgtgaagaatgtggcaaagcttttaagcgtttctcagcccttagaaaacataagataattcatactggaaagcaaccctacaaatgtgaagaatgcagcaaagcttttagcaatttttcagcccttagaaaacatgagataattcatactggagagaaaccctacaaatgtgaagaatgtggtaaagcttttaagtggtcctcaaaacttactgtacataaggtaattcatatggaagagaaaccttgcaaatgtgaagaatgtggcaaagcttttaagcatttctcagcccttagaaaacataagataattcatactggaaagaaaccctacaaatgtgaagaatgtggcaaagcttttaacaattcctcaacccttatgaaacataagataattcatactgggaagaaaccatacaaatgtgaagaatgtggcaaagcttttaagcaatcttcacatcttactagacataaagcaattcatactggggagaaaccctacaaatgtgaagaatgtggcaaagcttttaaccacttctcagcccttagaaaacatcagataattcatactggaaagaaaccctacaaatgtgaagaatgtggcaaagcttttagccagtcctcaacccttagaaaacatgagataattcatactggagagaaaccctacaaatgtgaagaatgtggtaaagcttttaagtggtcctcacaccttactagacataaagtaattcatactgaagagaaaccctacaaatgtgaagaatgtggcaaggcttttaaccatttctcagcccttaggaaacataagataattcatactggaaagaaaccctacaaatgtgaagaatgtggcaaagcttttagccagtcctcaactcttagaaaacatgagataattcatactggagagaaaccctacaaatgtgaagaatgtggtaaagcttttaagtggtcctcaaaacttactgtacataaggtaattcatactgcagagaaaccctgcaaatgtgaagaatgtggcaaagcttttaagcatttctcagcccttagaaaacataagataattcatactggaaagaaaccctataaatgtgaagaatgtggcaaagcttttaacaattcctcaacccttagaaaacatgagataattcatactggagagaaatcctacaaatgtgaagaatgtggtaaagcttttcagtggtcctcaaaacttactttacataaggtaattcatatggagagaaaccctgcaaatgtgaagaatgtggcaaagcttttaaacatttctcagcccttagaaaacatgagataattcatactggaaagaaaccctacaaatgtgaagaatgtggcaaagcttttaacaattcctcaacccttaggaaacataagataatttatactgggaagaaaccatacaaatgtgaagaatgtggcaaagcttttaagcagtcctcacaccttactagacataaagcagttcatactggggagaagccctacaaatgtggagaatgtggaaaagcttttaacaattcctcaacccttaagaaacataagctaattcatactagggagaaatcgtacaaatgtgaagaatgtggcaaagcttttagcaatttctcagcccttaggaaacataagataattcatactggggagaaaccatacaaatgtgaagaatgtggtaaagcttttaagtggtctcaaaacttatggaacataaggtaattcatactgtagagaaaccctacaaatgtgaagaatgtggcaaagcttttaagcatttctcagcccttagaaaacatgagataattatactggaaagaaaccctacaaatgtgaagaatgtggcaaagcttttaacaattcctcaacccttatgaaacataagataattcatactggggagaaaccgtacaaatgtgaagaatgtggcaaaggttttaacaatttctcgacccttatgaaacataagataattcatactggggagaaaccgtacaaatgtgaagaatgtggcaaagcttttaagcaatcctcacaccttactaaacataaatcaattcatactggagagaaaccctacaaatgtgaagaacgtggcaaagcttttagccatttctcacgccttactaaacataggataattcatactggaaagaaaccctacaaatgtgaagagtgtggtaaagcatttagtcctcaaaccttactaaacataagataattcattctggagagaaaccctacaaatgtgaagaatgtggcaaagcctttaaccagtcctcacaccttactcaacataaaacaattcatactggagggaaaacctacaaatgtgaagaatgtggcaaagcttttaaccatctttcagcccttactaaacataagataattcatactggggagaagccctaaaaatgtgaagaatgtgtcaaagctttcaaccattttacaaaccttaatacacataagataatttatactagagacagaccctccatatgtgaagaatgtggcaaagcttttaaccagtcctcaagccttaataggcagaaaacaattcatgctggagagaaaccccacaaatgtaaagaatgtggcaaagcctttaaccagtcctcacaccttaaatacacataaaataattgatactggaggaaaaccctacaaatataataaaggtgacaaagcttttaaccattgctcagctgttactcaaaatgagagaattcctaaagaagataaactccacaaatgtgaataatatggcaaagcttttaactggtcctcaaatcttactgaatgtaagataattcatactgaagataaacccttcaaatgtgaggaatgtggcaaagcttttaatcagtcctcaaatcttactgaacataagataattcatagtagagacaaacactgcaaatatgaagaatgggcaaagcttttaaccagtcctcaaactttactcaacataaaataatttatcttggagaggaacactacaaatttaaagaatttggcaaaacttttaactgcttctcaaaacttactgaacataagataattcatactggagagatactttacaaatgtgaagaatgtggcaaagcttctaacgggttctcagatcttactgaatataagataaattagagagaaacccgcctcatgtgaagagtgtggcaaaacttttaactggtcctcaaaccttactgaacataagataattcatactgaagagaaaccctacaaatatgaaaactgtggcaaagcttttaactggttttcagaccttactcaacagaaaatagttgatactgaagacaaactctagaaatgtgaagaatgtggcaatgcttttaatcagttaaactttattagacataagaaaattcgtactggagaaaaaccctacaaatgtgaagaaagtggcaatgcttttagccagtcctcaactcttgctaaacaacataattcaatgggagagaaaccctacaaatgtgaataatgccataagcattcttcaatttttttttttttttttttgaaacagagtttcgccctagttgcccaggctctggagtgcagtggcacaatctcggctcactgcaacctccgcctcctgggttttcaagcgattctcctgcctcagcctcccgagtagcagggactataggcatgtgccaccacgcccacctaattttgtatttttagtagagacggggtttctccatgttggtcaagctggtctcgaactcccgacctctggtgatctgcccgcctcggcctcccaaagtgctgggattaaaggcgtgagccaccgtgcccagcctaattcttcaattcttaataaacaatttatactgaagagaaaccctacaaacgtgaagaatgttgcaaagcttttaacgtcctcaaaccttactgaacataagataattcataatggaaactagccctacaaatatgaagaatgtggcaaacactgtaaccatttctcacatcttaccacacattaagataattcatactgaagagaaacccgacaaatgtgaagaatgtaacaaagtctttaactggtcttcaactcatactaaatataagagaattcatacagaagataaattttataaatatgaagaatgtgacaaaagctttaaaaacatttcaacccttattacacataagataatttatgttgtagagaaattctacaaatgtgaagaatgtggcaaagttttttttttttttttgaaatggagtctcactctgtcgcccaaattggagtgcaatggtgcaatctcagttcattgcaacctccgcctcctgggttcaagcgattctctggcctcaacctcccaagcagctgggattgcaggcgcctgccaccacgcccagctaatttttgtatttttagtagagacggggtttcaccattttgaccaggctggttttgaactcctgacctcaagtgatccacccgccttggcctcccaaagtgccccaaagtgctgggattacaagcatgagccattgagcccggtcgaatgtggcaaagtttttaataagttatcaaatcatactggagagaagctctacaaacctaaaagacatgacagtgctcttgagaacaccttaaacttttctaaacataaaag

SEQ ID NO: 91323 - DNA, 1250 bp, Homo sapiens
taatcccactactttgggaggccgaggcgggcggatcacgaggtcaggagatggagaccatcctggctaacacagtgaaaccccttctctactaaaaaatacaaaaaattagccgggcgtggtggcgggcgcctgtagtcccagctatgcgagaggctgaggcaggagaatggcgtgaacccgggaggcggagcttgcagtgagccgagatcacgccactgcactcaagcctgggcgacagagcgagactccgtctcaaaaaaaaaaaaaagaaaattcatactagagagaaaccctacaaatataaagaatgtggcaaatcttttaaccggtcttcaacctttactaaacataaggtaattcatactggagtaaaactctacaaatgtgaagaatgtggcaaatcctttttctggtcctcagccctaaccagacataagaaaattcatactggacagcaaccctacaaacaggaaaaatttggcaaagcctttaaccagttttcacaccttactacagataagataactcatattggagagaaatcttacaagtgtgaataatgtggtaaagtctataaaaagtcctgaattcttaacagacataatattattcatactggagagaaactctacaaacctgaaagatgtgccaacgcttttgacaagtcaaacttttctaaacatcaagaaaatcatgctgctgagaaatcctagaaatgtgaagaatgtgacaaagcctctaaatgattgtcacacttgatcgtaggtaagataattcatactggagaaaactaccagtgtgaacaatgtggccaagctttgaactaatgctcacaccttaatgcataggaaagcatttatgcttgagaaaaagtgaacaaatatagacaaaaagccattaatacctgctcacatcgtactcaaattcagagcgttcatactaaataagaagtgtaattactgtcaaacgactgatcagaaaatatgtctttaaagtacagaagagtattttgaaaaagcattacaaatatgaagaggcattatttatgaccttttctatggaaaggtaaggacattaaaaatgtaagatgcatgatgaaaatttaagtagagaggatctttatggttaacttataatatcgagtgatgcatgaggtagatgttcagattaatattctgcattattatgaaagaaaaacattcttaattttagttaaagtttagtatgatttattgtatttttatgaa

SEQ ID NO: 91324 - DNA, 2967 bp, Homo sapiens
attcaaacagacatacgataagacatactggaaagaaatgcttcaaatgtaaaaaatgtgtcaagtcattttgcatccgtttacacaaaacccaacataaatgcgtttatattacagagaagtcctgtaaatgtaaagaatgtgaaaaaacctttcattggtcctcaacccttactaatcataaggaaattcatactgaagataaaccctacaaatgtgaagaatgtggcaaagcttttaagcagctctcaacccttactacacataaaataatctgtgctaaagagaaaatctacaagtgtgaagaatgtggcaaagcatttctatggtcctcaaccctaactagacataagaggatacacactggagagaaaccctacaaatgtgaagaatgtggcaaagcttttagccattcttcaacccttgctaaacataagagaattcatactggagagaaaccctacaaatgtgaagaatgtggcaaagcttttagccgttcttcaacccttgctaaacataagagaattcatactggagagaaaccctacaaatgtaaagaatgtggcaaagcttttagcaattcctcaacccttgctaatcataagataactcatactgaagagaaaccctacaaatgtaaagaatgtgacaaagcttttaagcgactctcaacccttactaaacataaaataatacatgctggagagaaactctacaaatgtgaagaatgtggcaaagcttttaatcgatcttcaaatcttactatacataagtttattcatactggagagaaaccttacaagtgtgaagaatgtggcaaagcatttaactggtcctcaagccttactaaacataaaagatttcatactagagagaaacccttcaaatgtaaagaatgtggcaaagcatttatatggtcttcaaccctaactagacataagaggatacacactggagagaagccctacaaatgtgaagaatgtggcaaagcttttaggcaatcctcaacccttactaaacataagataattcatactggagagaaaccctacaaatttgaagaatgtggcaaagcttttagacaatccttaacccttaataaacataagataattcatagtagagagaaaccctacaaatgtaaagaatgtggcaaagcttttaagcaattctcaacccttactacacataaaataattcatgctggaaagaaactctacaaatgtgaagaatgtggcaaagcttttaatcattcctcaagtctttctacacataagataattcatactggagagaagtcttacaagtgtgaagaatgtggcaaagcatttctatggtcctcaaccctaagaagacataagaggatacacactggagagaaaccctacaaatgtgaagaatgtggcaaagcttttagccattcttcagcccttgctaaacataagagaattcatactggagagaaaccctacaaatgtaaagaatgtggcaaagcttttagcaattcctcaacccttgctaatcataagataactcatactgaagagaaaccctacaaatgtaaagaatgtgacaaaacttttaagcgactctcaacccttactaaacataaaataatacatgctggagagaaactctacaaatgtgaagaatgtggcaaagcttttaatcgatcttcaaatcttactatacataagtttattcatactggagagaaaccttacaagtgtgaagaatgtggcaaagcatttaactggtcctcaagccttactaaacataaaagaattcatactagagagaaacccttcaaatgtaaagaatgtggcaaagcatttatatggtcttcaaccctaactagacataagaggatacacactggagagaagccctacaaatgtgaagaatgtggcaaagcttttagccgttcctcaacccttactaagcataagacaattcatactggagagaaaccctacaaatgtaaagaatgtggcaaagcttttaagcactcctcagcccttgctaaacataaaataatacatgctggagagaaactctacaaatgtgaggaatgtggcaaagcttttaatcaatcttcaaatcttacgacacataagataattcatactaaagagaaaccttccaagagtgaagaatgtgacaaagcatttatctggtcctcaacccttactgaacataagagaattcataccagagagaaaacctacaaatgtgaagaatgtggcaaagcatttagccagccttcacaccttactacacataagaggatgcacactggagagaaaccctacaaatgtgaagaatgtggcaaagcttttagccaatcctcaacccttactacacataagataattcatactggagagaaaccctacaaatgtgaagaatgtggcaaagcttttaggaaatcttcaactcttactgaacataagataattcatactggagagaaaccctacaaatgtgaagaatgtggcaaagcatttagccaatcctcaaccctaactagacatacgaggatgcacactggagagaaaccatacaaatgtgaagaatgtggcaaagcttttaatcgatcctcaaagcttactacacataagataattcatactggagagaaaccttacaagtgtgaagaatgtggcaaagcatttatatcatcctcaaccctaaatggacataagagaattcatactagagagaaaccctacaaatgtgaagaatgtggcaaagcatttagccaatcttcaaccctaactagacataagaggttgcacaccggagagaaaccctacaaatgtggagaatgtggcaaagcctttaaagagtcctcagctcttactaaacataagataattcacactggagagaaaccctacaaatgtgaaaaatgtggcaaagcctttaaccagtcttcaatccttactaaccataagaaaattcata

SEQ ID NO: 91325 - DNA, 1095 bp, Homo sapiens
ccatttaaagactttgtcatattcctcacatttttagactttctcaccagtatgatttcttttatgtttagaaaggtttgaggtgttgtcaaaagcattgtcacatctttcaggtttgtgaagtttttctcaagtatgatctggggacttattaaaggctttgccacattcttcacatttgtaatttctcttcagtatgacttacgtgtagtaagatgtgaggaatggttacaggctttgccacattctttacatttgtaagttttctctccagcataaattattttatgtttagcatggattgagagatgagtaaaagctttgctacattcttcacatttgtaggttttctcaagtatgaattatcttacgttcagtaagttttttttaatccaaaatgtgtttattgagatggtttcccactcatcttgattcagagtgcttttagtgctgcttcctcctgaaggaacatccttctgtaagccttgcttttcctcctgtaggctggcagaggacagtggagcagccaacacacaaaactaccatttgtgcatgactaaagaccgtggtgactttatagcatcctgggcatttcacatccatgaagtaggaattggggctctgcaccaggcgtttcttcttgtgtttcctcttctcttctggagagggatgaaggagatcctttgtgagaggcatgtcctcttgtgggaaggttgtcatcacccgaaagctgttcagtaagttttgaggaccacttaaaagcattgccacattcttcaaattctagagtttctctccagtataaattatcttatgcttagtaaggtttgaggaccatttaaaggctttgccacattcttcacatttgtagggtttctcttcagtatgaattatcttatgtacagcaaggtgtaaggaccagttaaaggctttgctacattcttcacatttgtagggtttctctccagttctgagttatcttatgttcagtaaggtttgaggaccacttataagctctgccacattctttacatttgtaggttttctttccagtatgaattcccttatgggtagtaaggtgtgagtactggctaa

SEQ ID NO: 91326 - DNA, 1050 bp, Homo sapiens
tgccaggaggcttcttgccccattcaaattgttatgaagttcagctagggaaatccttctccccttggagttttaccccttgcttctctgtcctcctccctctcccatggattcctgtggtgccaggcaggaatgggctccttggggattcagcgagctcccagggcctccctgttgcctcctgaacccctgtatttcactcagcttggctctctaacttgactcacctccaggtagtaaggagcttctcccacaaacagactttcagtttctccagtggggtcgttgtgttcaggagaagagagtctccctttcccacttctgcagtggtggcactcactgtatttggggtgtctgtcaggtcctgcaggagcagtctgcttccttcagagggttgtcctgatgcctttaaggacatattctgaagataaaggtggtgattttttcagatactctctcctgagaaggaatcagagaagagagaaaaaatggttgattctcaaatgaatgtgtcccaggtcaaaactgtgtccacattttcttctagaaggtcatgtatttacagttgcaatcattttcatttctacttctgatgcttttgcctaacaagattatttgaagtaccttttttcttctcatgacagtgaaatgacctcattaaaataattctcccctatgtttcagagccttatctttattctctccatccaggcttcttacatatcacaaatagtaccttgaatttataccgtgaaatattgaaagtattccctttgttgacagatcagcctgagcaggtgaagatataaaacattcttattggggatggtgctgggtcctcagatatcagtgagggagaaaactgcaccatttaggttctatctgaatgctccatcagctctatgaataacacaatttttaaatgcacacttaaaaaagatggaattaatggcctggaataatttagaaagatatgtaaaggaatgaattcaaagaaatgtgccttctagaatgcttaaagagagagtatttagatacactattagaaat

SEQ ID NO: 91327 - DNA, 1761 bp, Homo sapiens
gtgtggactagatgagttttagggtgtccttctaatccagagagtatgggaggtatttagcatgatttatatagtaagtcttggcagttgaattttcggaaactttgagttattactgtttattttgctgtttaacgtttttagcatgatgcactgaggtgttgtgaatcctgaatcagcaatgttcaaccaactagggggagctcaatttacaaatagtatcttgtgatttcataccagtatgataggtggtggttcacttcatttcatttttaagattttatatgctagcaccgccaatttgactatttctgagacccagtgagtgccatatttcacatttttagaatttgattttttacctgtgaatccataaagggctatttcctgatatatactcccttcgggatactcatctaattgtgttttttaaccttctgtttgtcttgcagtccctgcttctgtttgttattcccacacagacatcaaggtgcctgacttctctgaataccgccgccttgaagttttagatagtacgaagtcttcaagagaaagcagcgaggctaggaaaggtttctcctatttggtaactggagtaactactgtgggtgtcgcatatgctgccaagaatgccgtcacccagttcgtttccagcatgagtgcttctgctgatgtgttggccctggcgaaaatcgaaatcaagttatccgatattccagaaggcaagaacatggctttcaaatggagaggcaaacccctgtttgtgcgtcatagaacccagaaggaaattgagcaggaagctgcagttgaattatcacagttgagggacccacagcatgatctagatcgagtaaagaaacctgaatgggttatcctgataggtgtttgcactcatcttggctgtgtacccattgcaaatgcaggagattttggtggttattactgcccttgccatgggtcacactatgatgcatctggcaggatcagattgggtcctgctcctctcaaccttgaagtccccacgtatgagttcaccagtgacgatatggtgattgttggttaagagacttggactcaagtcataggcttctttcagtctttatgtcacctcaggagacttatttgagaggaagccttctgtacttgaagttgatttgaaatatgtaagaattgatgatgtatttgcaaacattaatgtgaaataaattgaatttaatgttgaatactttcaggcattcacttaataaagacactgttaagcactgttatgctcagtcatacacgcgaaaggtacaatgtcttttagctaattctaattaaaaattacagactggtgtacaagatacttgtgaaatctgtaactgactttattttcttgcccaaatatttgcttcctgctttgcgtcagggacgcagattctgcacggtcattgttgggatgaagtaaaattaacgggtcatctaagtgtctatggcattgacagaaacagtagtatctaggtattccttatttaccggacttggtaagagtcctggctatgcatttcctccctactgtgtaagccgtgtgataatctcaacactaatctgtgggaaagagtcctgaatgaggcattagtagctctgagggtttatcttcacgtctggtctgctggtttttctccttaagtgacaggccaggaaattttattagtcccttatgagtgtaaattagtacttaatcctttagtcttaataggcagtgatgggatattacctgag

SEQ ID NO: 91328 - DNA, 1060 bp, Homo sapiens
gaaggggaacatcacactctggggactgttgtggggtggggggagggggagggatagcattgggagatatacctaatgctaaatgatgagtcaatgggtgcagcacaccagcatggcacatgtatacatatgtaactaacctgcacattgtgcacatgtaccctaaaacttaaagtataataaaaaaaaaattggaggtttacctgacttagagaaactatttttagaaacaggcaaataatgtagaaccataaggcaaaaaccttttctgtaatcatttcagcctgtaatttaagttcacattatagtctgtctagatggttcatggcaggatggcttatgggagtggaggggttggatctggagaagattcttgaattggagaggaaggttgtactattttcatgcagatttccaaggcgcattggagctcaaccttaaaataaaacttgttttgttaaaattccttaaattttctcctttaagtatttgattttgctttaggttagaattaaatctagcatcttactgaaagtcagacctaatgcagctcatgtaaatatttggagaatgatttttgcaacagggcagtttaatttccgaaaggattcttggtggtgtagcctactaaagtgtaaccagctagatagagtgggaggagacttttgccaccaaatctctgaatgagaagggcaaagccattttattgagttttcttgtacatttccttgtatactgttaagggttgtggatactgtttttaatgtagaagtatgaactttttattcctttatcttttagggaggaagctcatcttttctgtaatcccaggtagtgctaggagcaagtaatttatgcttaattccaaatgccagtatatactggcaggttagcatttatttgttagagtagtagtataggatgtaatgtcactttgactccacagattctgggatgtgagtctcaagttgccattatctgtgtcctggtcttctccaggaaatgatttagtcagaaaagcacatagagtgattttggtaggtttcattattgtttgaat

SEQ ID NO: 91329 - DNA, 1054 bp, Homo sapiens
gccttccatctttacttggccctgtatcggagatagagaaatggcagcctgtgggcagtgtgtctgcaggctgtgtagttttcaaaaaaactgggaagactaatggcatctcttaaaatgctggaagccggtaatactgggatctagtttctacttgggaaaattccatagtgtgctgtgtagtggccgcccccgcagttggagcaagtggtcttctccagtttgtcacagtctttaccaggtctgcgtgtttcattctgttaccagcctggctccactgatagctgtttgtgactcttcccctacacgctaaccaaattgcccgccacttttctttttactctgtcttcattcaccctgggctctgcactttcttcatggtccttccactaagttgctacatgtccatatgttttccttacccatcttttcaatctcagttaaggatcaggtgaataaagtttttatttgctgatttgtctgtctctgtagcacatacactttacactctgtattgtgtttattggtaactcctccacccttgggcttaagggcatagagaaggtaatatcttctttatttttctatctttcacaacgtcggattttgtatacagttagtgcaaagtatttgtgaatgaatatttgttaaggagcatcagtgggttttgaagaaactgtccatggcaggtgtagagtaccctagcccatccttgggacctggaggtgagaaggaaggaaggagaacatttcaatagcaaaagaaaagcatctttggaattcgtcgtgttgctaaagtttcttcaaaaaattggaggcttacatttctctgatggccagtgatgctgagcattttttcatgtgttttttggctgcataaatgtcttcttttgagaagtgtctgttcatgtccttcgcccactttttgatggggttgtttgtttttttcttgtaaatttgtttgagttcattgtagattctggatattagccctttgtcagatgagtaggttgcaaaaattttctcccaatttttaggttgcctgtaaaccacaa

SEQ ID NO: 91330 - DNA, 1034 bp, Homo sapiens
acattagagctgtcactccccacttcaggccaggcgcttgtgtctgatctcactaggatcctaaagtgtatggtctgtaaattacaaactgcagcaacaaaatgcttaatcattaaaccaaggcagccactatgcaccagcctccagctgggtgctaagcgtgagtggccccagcctggggaagcctcactgttcctggtctgctgtgagctcctaggttcttgagactcaggtgttaaccttgcctgttttctcatcccctgcaggcaccggccgtagctacaccacagacccactcttgtccctgctcctgttagctctgcataagttcctgcgcctgctcttgggacattgacagacaagaccaacccgagcatctcagaggccgcacatgacctgcccggggccctcggtgaggaccatgtcgctggatggacacagagagactgagagacgcatgaaaaagtccacatggaaaataaataaatcatatttttgggaaagttacacaaatgtagaacacctaaaataatgcatctagtttccaaataatttggagtttggcccatgcagtctgcatgggaatcaatgatttctctacttcaatgtagttttcttttctacactttccctccaagtcttcattttgcacgaactgttgagcagttatctttaggataatatgtacaaatgttggggtcaaagccttttgacaaagcaaaatatttttagtagattattgtgtttaggatttttttttaatttactttttttctttgggggcttttcttttttattaaattatttcttttgaggcattttgattaaaaaagacacatcttatcataattaaaattcactgtcaataatatttatttttaaataaagattggaaacaaggtcagacacttgtttataaactgtattgtatattgctgaagaacagttgaataaaaaacaactttgaaataacctttctacagccatggatgaatgtcaagcgttggtgcccactgcagcctggctgcctgccg

SEQ ID NO: 91331 - DNA, 1013 bp, Homo sapiens
agtgaggcttacagatgggaagtgccctaagcgaggttaaacagctagttagcagcagacacggaactagaacctaagcctgctgtcccagcttcggtgcccgtgctcacagcggaagctgcctcggctcatccgtaagggcgctgattagggacgacaaagacctcaccccaccgtccccgtcccatttccgccctcccagatccccaacctccttcgagtcctctccaagtcgcctcgcctcgctccactccaggccttagcaagcattccacatgcctttaccccaaccctactgcctgtcccccaaaagatgcaggcggaaaagaccccaggaagcgagcccactcctccccactgctcagcaacaccgcctacgacgttctcagtagccgaatccctttccaggcgcatgcgcccccgaggtgggcgagcgccggtgatgtcacgcatagcgccatctccgagctccgagagtctgcgacagcagctgccagtgcgtcatcagagagcgccggaagcggtccgagaatgaagagtaagcggggccgcgaagttggagagggttggggacgttaagggtcggggtcttggtactggtgggtgaaatgggtccgggctacctgttgctgcggagtcctaacagaaccgctacaggaatgggcccaccctacctaagaaaaactgagggctggagcacgggttagcctggctcgacctctgagctagggagggatgtcagggctggaggcaggttctcccggaggctgctcagtggtgtgcgatgctagaggagggttccaggccttggctcaacttggccactatctcccggggtgaccgcggtcaagatcctgctcctttctgcgagctggtttcacactcttaacctgatgcaaagcgccgagagctgctggggaatgatatcactaacccaaagctttggtccttaggggtagaagacatgtgccaaggaggggcgtgtagacaccgttaagactgggccttcaatc

SEQ ID NO: 91332 - DNA, 1304 bp, Homo sapiens
caacctcatcttctcctatctctgaataagcagttgttctgctataagtgtagaagtgtagttattttcttttcttttcttttcttttttttttttttttttttttgagacagagtctcactctgtcacccaggctggagtgcaatggcacgatcttggcgcattgcagcctctgcctcccaggttccagcgattctcctgcctcaatctcccatgtagctgggaatacaagtgcaagccaccatccccggctaatttttgtatttttagtagagacggggtttcaccatgttggccaggccggtcttgaactcctgaccttgggtcaggatccgcccgccttggcctcccaaagtgctaggactacaggtatgagccactgcgcctagtggcgtagttattttcatagttagaaaagtcttgggtcttacagccatacccaacaagaattgatcatttcttttttttaatcccccaggtgtgatctaccatgcattgtctcagaaagaggcgaatgactccgatgtccaggtcagttcttggcagggagtccaggagcaacagaggtgatggcaaagatggctcagtagcttctgagcccccagcactgattgagatgtcctttcccacatcatactcctcatttttctggcagacatctaaggctggatcaaagtctgtagttctcattacctgttcccacgtgccagcctccttttctgttgtgccaaagtcaagtttggtaaaatgaggctttccttaaccttttatcatttcccactgtgttggggacaccaggctgtgcccacgtggtgggcagcatcattcaaccttgtcactgtgccctctgcacttctgcagaaggtgtgcaatcacatatcataagtgaaatttacagattatatctgaatgcctcggcctgctttgtcagttttgcaaaagttcctcttgtggctcataatgagagcattaccttgaaagcaagattttgaaagaccagtatacctttattttgcttctccatgaaagatgagccactcaggtatttaagagaatcagatcattgtcctattatagtcacaatgacgagagtgaattaatttttagttagcatctacaggtgcaaagctgaagcagagttcccaccatcatactgtgagctccctcgaaggctatatgtaccctatcttcccatccccattgctctcccacagaaggaaggctgcgttactattgacagatcagcatcagtctgtcagcctcagtcttagcatttagcacctggctagtgcaaaaagagctca

SEQ ID NO: 91333 - DNA, 1014 bp, Homo sapiens
ggcgggagcggaccttttggagagtggccacaccatgcccacagagctggaaacccggttaaggagtattgtcctaagggcacagtgtcagggtccctgcgccctgaggcttggccgaccctggagccctagttttgctgttttctgtagtgttaggatcacttcctccatagcttagtgctactctgagctcactttcatctggtcatgcctggttgaatatatttgttatacatttctcaagctttctcttctgccaaggatgagagaattcttcttcaagatagaaaggttttggtcctttcagaataacctcagaaaagcagggccagagcaggaagtgagcgtttgacacgctgttgtgtgtgacaaacggtcatgaattggtgtgtgagtgtgacttacatctcggcagctgtgggtagcagatgcatggcggatgagcaggttgagagcctcagtaggtaaagggatgggccccatttgctcttgcagtagctgccgggaatggcgggcgggatgcctgggatcctgggctgcccagaccggagcagtgagcgccgcacccccttgtccgcctgcagccttcaggagcacagcgggccgaggccttcgtgagggccttcctgaagcgcagcacgccccgcatgagcccgcaggcccgcgaggaccagctgcagcgcaaggcggtggtcctggagtacttcacccgccacaagcgcaaggagaagaagaagaaagccaaaggcctctctgccaggcaaaggagggagctgcggctctttgacattaaaccagagcagcagaggtaacccgagctccccacgtctttctgcccgcggtgcttacccttcttggtgtgtgaacttggctgagtggctggggaggcagcctggctccacctaagctaagggggcctctctgtcgtctgccacaagagggcagccttcctttaccaatctgggctgtgttcagcgaggcgggtgagacaggactcattgtctggcctctctc

SEQ ID NO: 91334 - DNA, 1051 bp, Homo sapiens
cggggctattatttcaggtaatttacctaagagcgtgtagcacatggccatccagaggttcactctgtcactctgtggagacccagggcgtgtgttctgttggacacactctttaccgtgtggattccctgagatggcccccagtcaccatcatccccacgctaagggtgggagatgcttctcgctggctgtcttagccagtccggccatttgctggacacaccctaagtggtctctgtgtaccttctccacacagggacccctgttggtaccctaaagggcacagtggctgcgagcactcacccacggcctgggatcttgaacacagaatccctttcatccaatgctgtggtttcaaatgtcagctacacctgacagcccccaaggtgacatctccagcgtaggcctgtcccctgaactccaggctcaggcatccagctgcccacttgacatagccacctggatgttcagggggcatctcagactttacatagccaaagctgccaccgattctcctcacagcaacccctcctggtcttttccatctcagttaattactcagttatttacactggttgttcagaccaaaaacctaaacagtgtctatgtttcttctttcctaatctcctcgaatccttcggaacatcctactacttaaattcagccactgtcattccccagattacctcagacacagctcctcaccgcaccaggcagccagagtgccggttacgtagaaatcagagcacgttccttccctgcttcaagtcttctggcagcgtcccatcgtatgggagtaaacctgcctccttgctgtggtctaaggcctccccgctccctggggcagcaggcctcccacactgccttcctcctgccctgcctcagggcttcgcctctgctccttacctctacccgggagttctcctgtgtgtgcacagtccagcttctcattgttcagccctgctccaatgccactcccctcagggtctaccattgcaaaccatgaccctccacacattgccctgtccctactcttcatagcactcgttgc

SEQ ID NO: 91335 - DNA, 1030 bp, Homo sapiens
aatgtgggaaaaccagtttctggcaggtgttctgggactttctggttctgggaatttggtgtatagcctttgaccctgaagattaggtgccaagctacatttagcatgtgactagattgacctgtggcagaataaccacaggcaaccctaatgcccctccccttgtgggtttcccgtttcctattagcttatttttttcattcaatgtgttctgaataatattctacctaaaagtaaaatattaataaatatttttcctcatctttttttctcctgcctttttttttttttttttcagttatccccaagctaaactgcgtgttcactgtggaaaccgatggctttatttcctacatttacgggagcaaattccagcttcggtcaagtgaacggtctgcgaagaagttcaaagcgaagggaacgattgacctgtgaattctttgccgtctaaggcagttgtttatgacagctgaaaactggacactccctaaatgtccacctttcagtgaagagatagttaagccaattccatttatagaccacctccagccagtgacgctccgagttgaggatgttgaacaacatgggaaggtcgcagcgtactaagtgaagaagtcagaggacagaggaatttctctttctaggagattttcattttgtgtgactcccatggggaggaacagactggcaggaagcacaccggggttaacactggttgacttgaataggattattcgatttttaaaaatacttttccatgttttctgagtgctctatgataaatcagttgcatctgtgataatacagtacatatgtggacataaacagggatcaaataaaggaggtattgctgcagtccagccaggttgaaagggaaggggggtccccaaaggtccattggatggcaggtgtctacagaggctcgcctttgggtggaactctgacccacctaaggtttactttgctatttcaggaaggttgaagaggattgaagggtgagttgctaagtgacttagggtttattcacttc

SEQ ID NO: 91336 - DNA, 1009 bp, Homo sapiens
ctttgtgattagagagggatttttacagtaagcccagaaacctccgtcagctcatgaagaagaaagtgggcccagcactgaggtgggagatggggcaggcaggcttcattttgcatccttaaatgtggagcccagggaatgcatgttgggtgtcaattatctgagccaaatggacagaagactgcataaacctttgccctccacactggctggcggagcaggcgtggcaccggctgagcccgctgcagcccgctcatgaatgtgcctgctcatggtgatggtggtgtgcactcagtgggaacttaagtaaggccatcgcttatgaataagacccactaattgaacgattccatgttttctagggggggctgtcggggggctgttaggtgcctggatgacaagtggacagtttaagccggttcctcagatcctaatggagctgccccctgccgagcaacagaggctctttaacgaagccgcagccatcatcaggcacctggagtggacggacgccgtgcagctgaccgcgctggtcatgggcagcgaggccctgcagcagcagctgctggccatgctggtgaactacgtcaccaaggagctgcgggccgagatccagtatgatgactaggccgcacctccggggaggtggggggcccctttaaatgactctgtgattctgaagaggtggcttgggagttgggagaagcccagcggatgccccctggggaatctccacatcatcagtgtattactagtaatgtcccgctggagaggccaccgctgtgcagtgtcatgttccagaaattactgatgaagcagcatgtgttggtggcatgtgcactggcctgccatgacagccctctgactggccccccagtgaagagtaaaggcctgcctgccgcaggcttcggaggcgtctgctgagtcctctcacccgcatgggtctggggaagtgatcacgctcagccgacggtctgaccacacttcatcctccccccggggccttctc

SEQ ID NO: 91337 - DNA, 1031 bp, Homo sapiens
tccacccgcgccagccacgcggctttttgccgctccagcgccgctcggccccgcccccggcgcccgcggcccgcccctcgccgccgcgcgccagacttctcccgcgtcccgcccgccgccccgccccgcgtcccgcgccccgcgccccgcgcccggccctcggcgcgcaggccctgtcacttggccccgccctgtccgccggccccgcccctgattccccgtccctgcgcctcgcgggccggcgccgtggaggggcgggtccgggggcggggcgagggacggggcgggacgggctctgggtcccgcgcggccgctgaggggctgggagccgcggcggggcggtgcgagggcgggccggggccggttccgcgcgcagggattttaaatgtcccgctctgagccgggcgcaggagcagccggcgcggccgccagcgcggtgtagggggcaggcgcggatcccgccaccgccgcgcgctcggcccgccgactcccggcgccgccgccgccactgccgtcgccgccgccgcctgccgggactggagcgcgccgtccgccgcggacaagaccctggtgagtctactgccgcgggctgcggacagggactcctggggcccagaccgcgccggggagctgggtgggggcggggtgcggccgggtcgcgggtccccgggcggcgtcgcggggcgcccgggagggtgctgagagcgcggcggggtggggtggaggggacactgaggcagcccgggccccgggaggcgacgggccggtgagggcggcgggggcggcgggaccccgggtcgggggtcggcgggtgcccgggtcgcgggtgacaggccaccccgccatcggccatcttcctggctcgcccggccgcccgcgcgcaaagggggaaggggtactgggcccgcggcctgaccccgccgccgcctcaccccgcgccgccccgcaggcctcaggccggagcagccccatcatgccgagggagcgcagggagcggtgagtgcccgcgccgcggggccggacgggacggg

SEQ ID NO: 91338 - DNA, 1056 bp, Homo sapiens
ctggtgagagtgaacttctctaatgcagccacagcccatatggcccagcactgtacctgtcagtgggcactggcctctgccagtcctgggattccaggaagcttggtgttcctgactggcaccgtctgagattacagatatgtgcctagcctggaagaaccagaatggacatcacagtattcagtcctccccttctgcccaggaggaaactgagactcagttagaggaagaaagtaacccagagtcctgtgccatccaggggcaaagttgggctctcggccttgtctgtaaaagctggtgaactgggggagggttcctgggtgtttataagcaacaactttccccctatctacacctatttttcttgtcatggtgtttaaggacctcctccgtcttctgtaggtcagatttcaaattcttctcctctttctggccctggaagttcttatagcccctccagcaattacctgcattgatccccagctcagcctgacctcagcaagagtatcagtggaacattcagtgtaatgataggtggtgtctcaatacatttttttttgactgcttttcttttctctccttaaggagttcctgccaaatttcctgcatgcagtgtgataatcattataatatcagaagtttcttgcagaaaaagcttgtactatctctttactttcagaaatggctggagactgtagttatggctccagtgggggaagcagcctatctctaaactagctggtcaggccttctgactctatcacagataaacgctgaacagaaacagtgttcgacctgagtgcagggatcccagctaggttagcagagaagcccctcactttgcagagcagcagccagggtagttcatctggaagcgtgaagggtttcaacgcagtgcgccgtgttctaaatagcagttgtcactgcatgtaaggtcccccgaaataagcatttctgaggagggtccactgactattgaagaaagggttgctgatttcctttttcattcaaagaaatcatttcagagacggaaatgagacggcatatccccagttt

SEQ ID NO: 91339 - DNA, 1483 bp, Homo sapiens
tctcctaatgctatccctcccccctcccccccatttttgatcttttatactaatgaatgtgaagtgcttatgtaaatatttttattgacagttctgttttacttttaagaaattttagtagatgcattgtactcattaaaaaaatctttgagttgtgacaaaaaatatcataatgtatctttttggaagcactttcagaagtcatgcctagtatcttactgagttgcaggtgaatttgtaatgtttttgggtaatgtaagagctgtttgcatcttatctcacctctcctgtgtatttttcatttacagccttgggacaataatgcagtctgtgcagacccctgctccctgatccccacacctgacaaagaagatgatgaccgggtttacccaaactcaacgtgcaagcctcggattattgcaccatccagaggctccccgctgcctgtactgaggtcagtgccgactctgccacatggcttccaggtctcttactccatgctcccctttatccctcatagcatggacgcattcttacccctttgtgggcctcatttttgttgtgtgttttgttgtagctgggcaaatagagaggaagtctggaaaatcatgttaaacaaggaaaagacatacttaagggatcagcactttcttgagcaacaccctcttctgcagccaaaaatgcgagcaattcttctggattggttaatggaggtgagcttgagtcttcctgttcgcttcatgaaagcactgagcatttccagcatttttgtgtattaggacctctgtgtggtttattccctcgacatgttctccatctctgaagctatatggtatatttttactgtggtggtctttctgttttgcttgtattcttagcaagaatttctgaaatctttttatccttcagatgttttaaaattggcatctaattttttccatccaagtttaaataattgttaagattgtattttccagtaaattgtaactgttaacatttgagctttgttcattatgttcattaaattgctttttttttttttttttttttgagatggagtcttgctttgtcacccaggctggagtgcagtggcacaatctcagctcactgcaacctctgcctcacgggttcaagtgactttcctggcctcagcctcctgagtagctgggattacaggcgcacgccatcacgcccagtattttttttttttttttttgagacggagtcttgctctgtcacccaggctagagtgcagtggtgcgatctcagcttactgcaagctcctcctcccgggttcatgccattctcctgcctcagcctcccgagtagctgggactacaggcgcccgccaccacgtctggctaattttttgtatttttagtagaaatggggtttcaccgtgttagccaggatggtctcgatctcctgacctcgtggtttgcccgccttggcctcccaaagtgctgagattacaggcgtgagc

SEQ ID NO: 91340 - DNA, 1477 bp, Homo sapiens
gaattgctggagcccaggtggccgaggttgcagtgagtcgagatcctaccactgcactccagcctgggcaacagagggaaattctgtctaaaagaaaaaagaaaagattaaaaatttgtgtatgattatcaaagggtatatgggcccaactttcaaatgtgttaaaggtactgaaaaggggatatttcaagagtacccacaatgagtcaaagttccatccatttatttaatggtgggtgggagttgtgttcttttttttttttttttttttttttacaaccattggtgtggcttctgtgttaattccatcagtgcgccctctctctttccatgccagggtactgagaagtcattttggatgcattataaattgagactgttagagattggctttggtgctagtgccatcttttatttcctttcaggaaatctatcctccaaagttgcaccagtttgcgtatgtgacagatggagcttgttcaggagatgaaattctcaccatggaattaatgattatgaaggtgggttccagtgaattttccggccattttttaaatgcgtacggcagatcttttccacctgaagtgtgagtgcctctgggaggtgttctccagctggacacattgtggcatggaacatggctgcattttgaacttcttttctcaatcatcggtctcttttctctctgttttcctttaggcccttaagtggcgtttaagtcccctgactattgtgtcctggctgaatgtatacatgcaggttgcatatctaaatgacttacatgaagtgctactgccgcagtatccccagcaaatctttatacagattgcagaggtaagtggctccatcacgtccgtggggccaccttccctgcagctggagtgaggaactctagaataggcgtgtggtggcatccatctcagcgttcttttcttctccgtagctgttggatctctgtgtcctggatgttgactgccttgaatttccttatggtatacttgctgcttcggccttgtatcatttctcgtcatctgaattgatgcaaaaggtttcaggtaagttggctttccagtgcatgcacaaacaaggtgtactaagcttacatccagttgtcagcctcagattaagcccacgatgtcttcactgcagggtatcagtggtgcgacatagagaactgtgtcaagtggatggttccatttgccatggttataagggagacggggagctcaaaactgaagcacttcaggggcgtcgctgatgaagatgcacacaacatacagacccacagagacagcttggatttgctggtcagtgctgctccttctttcagtccttcttggccaaattcttaaaactgcctaaataggccagccgcggtggttcaggcctgtaaacccagcactttgggaggccgaggtgggccgatcacttgaggccaggagttcaagaccagcctggccaacatggtgaaaccttg

SEQ ID NO: 91341 - DNA, 1126 bp, Homo sapiens
cagaaggactgcttaagctcagaagtttgagactagcctggacaacatagggagaccctgtccctaaaaaatttaaaaactagccaggcatggtggcacatgtctgtagtcccagcactttgggaggcggaggcgggcagatcgcctgatatcaggagttcaagactagccaggccaaaatggcgaaaccctgtctctatgaaaaatacaaaaattagctggacatggtggcgggtgcctataatctcagctactctacttgggaggctgaggcgggagaatcggttgaaccctggaagtggaagttgcagtaagccgagatcccaccactgtactacagtctggatgagaaagcaagtctccatcttgagaaaaaaaaaaaatttaaaaattaaaaaagaaaaagcctatggtaattgaagcccaaggatatgttctactctaatgtgttgtcccttttattcttaccaacaggacaaagcccgagcaaagaaagccatgttgtctgaacaaaatagggcttctcctctccccagtgggctcctcaccccgccacagagcggtaagaagcagagcagcgggccggaaatggcgtgaccaccccatccttctccaccaaagacagttgcgcgcctgctccacgttctcttctgtctgttgcagcggaggcgtgcgtttgcttttacagatatctgaatggaagagtgtttcttccacaacagaagtatttctgtggatggcatcaaacagggcaaagtgttttttattgaatgcttataggttttttttaaataagtgggtcaagtacaccagccacctccagacaccagtgcgtgctcccgatgctgctatggaaggtgctacttgacctaagggactcccacaacaacaaaagcttgaagctgtggagggccacggtggcgtggctctcctcgcaggtgttctgggctccgttgtaccaagtggagcaggtggttgcgggcaagcgttgtgcagagcccatagccagctgggcagggggctgccctctccacattatcagttgacagtgtacaatgcctttgatgaactgttttgtaagtgctgctatatctatccattttttaataaagataatactgttttt

SEQ ID NO: 91342 - DNA, 1063 bp, Homo sapiens
ggcacttcccccttgttctgcacacaacagagcagtctcctggaggcagagcctttccccaagcagagtgccagcccctttctgggtctcatgcaagggagcagtgaacactggagggacacaggcagggtgtccctgaagcctcctactgtgggtccattgctaatgtggccagccctagtcattctcctaaattctttcttagctttacgaggaccttacgtcctctgatgttaatcaagtgcattaatcaacagatggttaaatggggtagtaccccagctccagacacagttgtagctgctgtaactagagctgtgaacttgcactctacagacaggagactgacccagatgtggcaggtgtgggaagcattttgtgcggcggggggcgggtgggaggggaggggtggcggggattcctttagcctgggtggtcagggagggtttctcagaggaggtgaccttgagcaagacttaaagggtgagaatcaacctgctatgtaaagatctgtgaggaggatgtgccaggaatagagaagagcaagggcccaggcttcaaggtgaagatcaaggaaatgtatctgtagctggagagcagggattgaggtcagcagaatgggggtgacattgggaaggagaggagggaccaggtgactgataaggggccctcaaccctgcctgccccagagtcactgtggaactctccatacagggagagaaagcagaactacccagaaagccccctgacttgccaccgggacagcatgcgtggtttatggtccacagctccgtacaggaactctcgcatgtgttcatgttcattgatatcctccagtctgcaccaaaggatgtctgagaattaacgatcaactccagtttcctggaaatgaatgtggaggggcagactgaggttgcagggtgttcctggaggcctacggtgagacctgtgctactgtggtcagctctattcacaatgcatgcttgaaaatgaggcatcagggtaaataacagtgctctctgggtttttttttttttcttcccccgctctgctcccttttttt

SEQ ID NO: 91343 - DNA, 1004 bp, Homo sapiens
gctgggcacatttacacggagggcagaccgggaggcccttagggctgggagggccaccaggtcaataatatatgcaaccggcaaaagaaaacatcgacctcatttcctccagagagcagacaactgtaaccctggagtcctggtttgcatgtaaataatgagcaagatactgcgtggccacttgtatcattgaggggagagtgagacaagaacaagaaagataaattagaaaaatatgagggcaccacttatggatctgtacaaggaagtgtcattcttcaggttaattttgcttcctctagaaagcagctcagtgttggtaggcttctatgtctgagattttaaaatggctttggtatgattattatcaatgaaataatcactgtcagtaacaaaaaatcagtttctcgagaggatgactgacgtgcggttgcagcatttggccccggggcccattaaatcctgaccaaagtgctgaagagttgccccacaaatgatttggctacactgggaatcacccggaaggaggccaagggtgtgtaattctggggaagtttggcggcagcctagggcctcctcaatctgaaagctcttgtttcgctttgtaaagcgtttgcttgtttctttttctttctctctttttttctttctttctttttctttcgcctgcctccctccctccttccctccctcccttccctcctctctccgtccctccttctctccctctcctgcctctctccctctctcccccctttctctttccttcctccctccctcccttacttcctccctccctcctctccctctcctgcctctctccctctctcccccctttctctttccttcctccctccctcccttacttcctccctccctcctctccctctcctgcctctctccctctctcccccctttctctttccttccttccttccttccttccttccttccttcctccctccctcccttcctccctccctcccttcctccctccctccctt

SEQ ID NO: 91344 - DNA, 5319 bp, Homo sapiens
tcgcctgcccaggaaagggggcttctgagctgaaggcgtgcggcagcgcgtgggaatttgggggcgggggcagcacgctgtcaacggaagcgttcgccttaatatttgtagcttgtaatgacctaaacattgcttaaaatgtgtactgtttgttgctctttgattgcacggaaaagttttaccgcgtttgtcatgataatgcttcctgtgcaatatttggttatttaatatttgtcacaatataatgccatttaaacattaaaaaaaaaagagagtctcactatgttgcccaggctaatctcgaacttctggcctcaagcgatcctccccctcctacccttccccacctcgcctcccaaagtgttgggattataggcctgagtcaccgcacccggctcatttttacaaattttaatttcatcgtataataaatgagttttaaactactggtgaaaagggtacaaagttttgtgtttcctagtgggactttatataaagaagtattcccaatttaagaaatagttttattgttaaatctgatttttctgtggattctgtggtctttcagattgattctgtcccctcaagtgtcttgaaattgttactttgaaaagcagtatttaatttgcttaaaatattttatgtcatgtttggaagagcatggattataaagggttaggaagttgcttcaacactataagcagtttaaaagttcttaactttttaattgaacattcctgtataagaacgactgtttacatagatacaaaaatatactcagttctactagatgggggttttgatagaacttaaaaaaccctcgtttgcttggaaaccacctgttgggatgaactgcgggaatctttctttgttctggttggtttaaattattttgtgggttggattttcatttctcagccatttttctctaataacgcaactgttaggtttggaagccatgttttcaagatgaaggtttaaaaatccagtggctagggtggtgactcaaacctgtaatcccagctgcttgggatgtcaaggtcgtggaattgcttgaagccaaggagttcgagatcagcctgggcaacacagggagacctccgtctatacaaaaaaatacaaaaaattagccgggccatggtggtgcacgcttgtagtcccacgtacttgggaggctgaggtgagaggatcacttgagctcaggcgtttgaggctgcagtgggccatggtcatgcaactgcacttcaccctgggcgacagagtgagaccctgtcattcatatatatatatatatatatatatatatatatatatatatatatatatatataaaacttaactagtttggcgtctttaaattagaagacattaatgtatttttttaaaagagaaagatagaaaaagaagaaagaaaaaacagcccctcatgaaatcttactccttttgccaaaacttggcattttttattctttcagagaatgtgacacagaccctcagaggatggtgtttctattgcctttcctctgctgcagtgggttaatttcacctccttcagtgtataatacgtgcataatgctgacttgatatgttttctgccatttggcatattaaaaagatatccttagttttattctgatgttagtgtgactgaaatgcaaaggatactttttggggtgctctgaacagctttctggtatcgtgttgagttacattggaagagagagtaactgctttttcagttacagtcttgtggcaaactgaatgactgttttctgtagacattgactgtgctaccaaattatttttctgtgttgtgttaatgttaattcggcacacaaaataaccacgtatatctgtcatgggtgtgtaaaattatccccagttcaggaaaaagcgcgtcagtatttaatctatctttatttaatagaagcatttgcttcagtggacaggagacccacaaggccacaaaataaactgattagatagctgcactgtaattatagtgtagtacaggaaaactacccagtaaatcggcagtgaaaattttttgtgaagcaatttatttaggctttaaagctggcccagttgtgggagtacagtgagttctagtaaagtagaagcgtagtgacatcctgagtgtagaaggggaaaatgtcatagtagcttcatatgtggcacttagtattcctttatgaaagatgaatcaaacatgcttttaagctcttggcctttccctacatgggttttgtgagacagagttaaactctgcagaaaatgatttgaatgactgttctcagttttccctgagagggtacctacctagttggctgtagatgcagagagagaaatgagttccttacacacagtgggtgccttaggcttagggcataatcttctctgggagccttgattgagaggggctggtaggtaatgtggcttaaatgttgctcattagttttgctctttctttttttccaaattcagctaaggagtataacaagttttacgctctctctctctttttttcttgtatgttctctggaacatggaataaaaaggacaaaaaattggcaacctgaggaagaggacagacaaggggcatgaacaagccacaacctctaagtgacaatatctgtagtcagcggttaggatcaaatattttaacattgctttcacttacagtcaatggtgaaacatttccaaaacaatttattttagttagaacttcggtttgtttctattttgatctagcaataaaacatgtaagaaacattccctgcagctttgtttataaagagaaaaactaaaagtctgacattgggggattggttaaataaatcaggagctgttacgtaggcattgaaaactaggacagtatgtatagggtggttccagttacgtttatataaatatttacacattttacataggaaaacaccattgttttaaaagtacacaattttattattttacctaaaagtttgtaaaattggatgggatttttttttttccaaaaaaagctattgataaaacttattttaattttaacgaaaattggaatgttactttaattgcaaaacactttctgagcctgaaaaatggctcttggctggtttgaatgccggttaggcaggtttatttcttggttacttcagagctgatatatataatttattcaaacaaccatcttccagttgatttccttcccccccccaaaggttttatttaatcttcatttgttataagatacagggagaggagagaaattcagatcatcctttttttgtctttaactaaatctgtttttactaacagcagtaaaatatttgttggaaaaatggaagcttaacctgtctagactgtgacctataccataaaatgtgtggtctaggactgttgtggagtgtcttgggctgttcagggaggtttccttgtactaagatcttgttaaatctgattctaagaattgcattatgttgaaatttttgtttcttggctaaggtgatgtttctgagatacctgtattttatctctagatactattagcttttattagcagaactactgagattttattgtaatattttaaaaagtggtggatccagtatcgtttttataggcttatttgcaggataatagtaagattagaaaattcattaggataatatatttataattgagtgcctcatgtagttctcacttggaattttggaatagcttatacttcctgatatagatccttggggaattaaatgcattaagagtaaatattttaaattttttataaagcagaacagctaatttaacttaatggagggttttcatatttcttgtgataaactaaactgcacatagtttaaagaactgtcagccacgtaggccatataacagctattctttccaagcctagaatccatgccatagaatttatgtaacaaatatttaatgagtatctactacatgccaggcatgttctgctgagtgtgcagtaatgaacaaaatacagcaagttctttctttcatggttacactctaggggtgaaggcatgcagttacatagccttaccttgggtgtttggtaggtaaggctaagtagaaaaacaggaaggtaagaggcgtgtagagaatgagggatgtgagtggagggatggtgtcttctgtaagccatcagagagggcttctctgttaggttccatttgagcagaaacttgaaataagtggggagtgagctgtgtggatatatggaggatattttagagaagagctttctagccagtatgagagcagtaccagatcattgtaagagttttggttttcatatttgtgagatgggaaacgattggaatgtgttttgaggctgatcttaaattatatccatttgtcatgcatatgtgaagaaatggacggatggaattacattatagggagcaactctgtgtgccacgcattgtgatagatgtttacagatccgatcttagaattttcattaatactgtttatttttcagatgaacagtttgtttctagtttttgcctggaactttctcatggcgtgtttgtgtcttcagttccacttagaatgctttttctaaggtggttataccagtttaccgcttgctagcagtggacagaagttctccctgcttcagtctttaccaccatgtgtcttttcatatttgctagccaatctagtgatgagtaatgaggttgatgaccttttcagatgtttattggctacttggatttttgtgttttgtttttgtgaaatacctgctcatctgttaactactttctattgggatgttagttatattctaattgattcatagtaatgactgcctttccaattatatattgtaagtttcttccctggtctgtggcttgacttggagcacttacagtggtgtctgtcctttgatcaacagacatttttaattttaacaattgtttccttcatggttagtgttttttgtcttatttttaagaggtctttcttactacttttctgaagatatcctcttatattgtctaatagaagctttactgctttgcttttcacattgagaatctacattctacctggaattggctttgtatatgggggagattgaggtcaggtttcatttttactgtatggatacctagttgtcccatcagcatttattggaaagagtgtcatgtctccaccgcattgtcatctttgtcataaatcaggtgactgtgtaagtagatcagtttcttgactgttctgttggcttgtctgttcttgcagcaaacctacactgtctaaatcattatgactttgtgttatcttggtacc

SEQ ID NO: 91345 - DNA, 1053 bp, Homo sapiens
aatacgaaaaccactcaggcgtggcggcgcgcgcctgcaatcccaggcactctgcaggctgaggcaggagaatcaggcagggaggttgcagtgagccgagatggcggcagtacagtccagcttcggcttggcatcagagggagaccatggagacagagggagagggagactgtggggagacgggagggggagggggagggagaggttacttattttttaagaaaggcacagttgtaagaatatgtttgcttgtatagccgaaggcacattccgttttgtaggtaggtgagttttcagaactcattacttgtaagttttattttagataaacttcttgttgttggcacttagtattgtgccagtaatgtgccataagaagagacaactttggttttagttctttggaagttgtcaataaacataaaacagtatttcaaggaggaaaaaacccatttcattgttttaggcttctctagattggaagaaaagatggtaatggtcccaaaacactggggggaaagggggaagaaggtgcgtggaatctgtgatttggccataactgctttattttgttttacctgttgttatcatttttagtttaagaaccttttagcttgtatcacttgcccttatctccagagtgatgtctcaatctttttagtctgtcatatgcaattttccccccttaaactacaactgtttatttgaaaaattataaaagtacaggaaaggtgaaagaacaatatgatgaccactgtttagagtaatcagttagcattttgtcctatttgcttttctctttatatattccttttttttcccttttccccctgcagaaccattcaaaagtgaattgcagacatcatcacatcaataatactgaagcacttatcattttacatcaaggtcattcttctacataaccatatctttttttacactcaagaaattaacattgacatgtaccatattcacattttctcagtttttctaaaaatgtcctttataactctctttcaatgcaagagccaatcagagattactatggcattt

SEQ ID NO: 91346 - DNA, 1410 bp, Homo sapiens
ctgggttcaatggaccctgactgtataccctgatactttgaattcaaatccattaccacaaggttcttcttaaattttccccagtctatatttgaaactccccttctttcatagtgaaaaccttggttctcaacatctgcatttattcatttgctctatcctacaatatatacaaaatagcttcagaattactgcattaataccactgccaatggcaaacctgaagtaaagttcaaaatgtctttgcagtttcattggcttttgtgtaattaatgcttttggggtgtacagttagggtactgatcccaaaagtcacttgaattactttttttctgtgcagttataccttggatttttatttatattgaatcttagtatttgttttttatctttttcacttaattgcattttatgaatacatgaaaacatttgcatggttcaaaatcacaactaaatcaaaagttatccctactgaggtaattctgattcattcccattcctgctcttacttacccctacagataaacttttttttttttttttttttgagacagagtttcactcttgttgcccaggctggagtgcagtggcgcaatctcggctcactgcaacctccacatcccaggttcaagcaattctcctgcctcagcctcccaagtaactggaattacaggcgcccaccaccatgcccggctaatttaaaaaatatttttagtagaaatggagtttgaccatgttcgccagggtggtttcaaactcctgacctcaggtgatctgcccgcctcagcctcccaaagtgctaggattacaggtgtgaaccaccacagccggcctagataaccatttacattcacttttgacctgtccttcctctgtttcttcttcaaaaatacatgtgttcactttatctcccctccatactgctttcttatacaaaaggcagcttattttgccttttgttcatctcattaaatgataaacctgggaattactctggttcatagagatattcctcatcattttttttttatttttttggagatggagtctcgctctgttgctcaggctggagtgcagcggtgcattctcggctccgcctcccgggttcatgctattctcctgcctcagccaagctaattttttttttttttttaattttttagtagagacggggtttcactgtgttagccaggatggtctcgatctcctgacctcgtgatccgcctgcctcggcctcccaaagtgctgagattacaggcgtgagccaccgtgcccggcctccttatcatattttgtggttgcatagtgctttatgtctgtgtcatcagatattcagctgatatcttattgatgggcatttggtgttttttagtctcttgatagtatagataatgcctcagtaaatcactt

SEQ ID NO: 91347 - DNA, 1059 bp, Homo sapiens
tttgcctttgatttttttcctcttttctaagtctgctttctactttactgatttcttctctcttttttcctgtttaagattttcctttgcctgtaatttttctagcccttagagatgatggttgaggttactaatattaacctttccttattataagatatgcattttgagctttaaatttttctcttaatcattgccttaggtactgcacacattttgtatgtcattttccttatcagtcatttaaaaatagtttctaatttctattgtgatttgctcattgacccataaattggaaatacattccttttcaaacattattttctacttatttttctgtttctctagtgtggtcagagtacacattctgcataattgaaatttaagtcttgccttttgacctaatgttttctttttcttggtaaatttttcataatttacttggaaaaaaatgttaatcctgcagtttttgggttcagtatgtgtctgttagttcaggctgcttgaatatgttgttccagtattttatgtccttgttaatttttttgtctgctaattctatcatttattgagatatgtattaaaatagtcactaggattatagatttatttttctctctttttttaacctttgctttatatattttacagctatgttattcattgtatacaaatttaaaattgtaaaaacttcctggtcagttgaccttttcaccattctgagatatttttatctctagtaatgctacttgccttcaagtctcctttgttggatattagtattagtatggtcacaccagctaaatttgtttgttttgtctatctttaaaaaaaatcttcttaacttcagtcttttgggttcgaagtgtgtcttataaacagcatattgttgtggttttaatattcagtctagatatcttttccttttatttagagtattttaagccattatatgtagtaggattcctgatatatttaattttatcacctttctattagacgtacattgtatttattttttattcaaaaaattgtagtaaatataacaaaatttaccat

SEQ ID NO: 91348 - DNA, 3141 bp, Homo sapiens
ctatgttgcccagggtggtctcgaactcctggcctcaagcggtcgtcctgccttggcctctcaaagtgctgggaaataggcatgagctaccatgaccagcccattttaatcatttttaagtatacagttcagtggcattgggtatattcacgttgttgatcaaccgtaattaccatccatctccaggcctttttttttttttttttttaaatcttgcaaaactgaaactctgttcattaaacaataactctctattcttccccttcctgatctggctgccagcattctattatactttttgtctctatgaatttgattactctaagtacctttaagtggaatcatagagtatttgtccttttgtgattgggttatttcacttaccataatgtctcaaggttcgtccacgttgtggcacatatcagaatttcttcctttttaaggctgaataatattccattgtattatagaatgtattatgcagtgtattatacgtttttgtttattttagcatccatggatacttgggttgcctctaccttatggtgattttgagtaatgctgctgtgaacatgggtgtttggtttaagtatctgcttttgattcttttttttttgtttttttttttttttgttgtttgttttgagatggagtttcactcttgttgcccaggctggagtgcaatggcacaatctcggctcactgcaacctctatctcctgggttcaagtgattctcctgcctcagcctcccaagtagctgagattacaggcatgcaccaccacccctggctaattttttgtgtttagtagagttggggtttcaccatgttggtcaggctggtctcgaactcctgacctcgggtgatccacccacctcggcctcccaaagtgctgggattacaggcgtgtgccactgcgcccggctgctttcgattcttctgggtatgctcagaggtggaatttctggatcatatggtaattctgtgtttaatttttaaggaactgccacactgctttctccggtgactgtaccattttacattcccggacaaattcacaagggttccagtccacatactgggcaacttttggcatttgcattggctgtttttgttttctgtaaggaccatcctcattactggagtgtcaaatggttccccattatagttctaattgatgtacttttatgttcttttttctctgctttttttttttccttcctttggatcaaacattttgtattgttatttcctcctattaacttgtttgtgatacattattttttactacttttatactgtacttatggtttagtactaaatataatatgtatttatagtatctttttttttttttttttttacaattccttttcactaagtaagtctctggtgtctctagagatcatagcattcattcatttatccagcccacctcttgcatgattgctcccatgcattttaattctacgtattttaaacaccacaacactgtatttaattgttctgtgtggtcaatattgatttatctttacccatctttttttttttttatcctgtacctttactcttcaattctttctgcatttatattactctgaagagtcctttttgttgttgttgctgtcttttttttaaccgatcacacttatttaataacaatatctagtttaataatttttttgataagacattttattaacaacatgtctagtttaataaaccgtatttcttttaatgaaagtctgctggtgcagaattctgtttctgttgaaaatgttattttttccttcatgttggaggatctatttgctgtgtatgtcactatagattttcagttattttttccagcatttcaagatactctgttatctttcactttctgtcattgatgttgaagttagctctagctctaagtcttgtcactcctttgaaggctgtgaatctcccctgtgcctcctccgcctacccccagctgcacataaagttttccctttttctttggttttcatcactgttaactatgttgtgccttgaaattttctttgtgcttctcttgcttgggattcttggagtttcttcagtctatcggctgatactttgatatcagttttagaaaatccagaattcaagatcttttcaatattgcttctgctgcattctctcttccctttctggatcttgcacttacactgtgtttcacatgtctcttattggtcttttctgtattttccatgttttatttttgaatctctgggctttaatttggtgttttcttttgacctgtcaagttcaaaaatcctgatttctgctgtttaatcttcttttaatgccatttattttaatttttggttcttcagttgtacaattttcattggtttcttcctgtagatttcagttctctagtgaaaattgctatttttaaaatatattccttttatcttttcctctatttccttgaacatattaatcattatgtttgttaacaccagtatctagattgcatgtgtgtttggttctgttttatatattttttcttttgacttttggtcatatgatcctgtttcttggcatcctagttatttttgactaaatcctgggattgtgtctttaaagattgtagatattcctgaaggtgataacttcctctggaaaaggcgcgtcctttcttctactgaagcagatgcagtgggagctggtcaccttactccgggcaggtgctgggtggagtgaaggccaggttgttgttttagtaagccatctgctgcttctggtttcttcaggctttcatctggaagcttgattttgctcactacaccatatttccttggaggcttctgaactaatttttgtttgatcctgagctctgcttttcagagttttagtttatctttttggccttcgcagctcagaatttgacagataccatgggagggaaagcagttgtatgcttaagacctctcttgtgctctcattttactaccatatagccttgtcagactgcgcaagttctgcttgtttctttctgctagccatggctgtctcctcagggcccaacataattctcagcctcttgcctgtgcctcctgttgtctgagaaaaaagtggcttcagatgatcagctcacttctccacagttct

SEQ ID NO: 91349 - DNA, 1086 bp, Homo sapiens
caaggtggaattcaggcagtatttcagattcagaaatgtaggtcacaatttcttatctgcagttcggaagcctgaaaagcactgaaaacacagttattcttaagtttatggcatattcattgttgacaaaactggaacttatatgggtgaggcatttattacattttgaatattcatatgtttcattgcaaatgttatgtttactacatggccctacctcatggagctttcagccagaacagttagagttcctggatctctagttcaagtcacccccaaaaccctccaaacatgtaaacgtcttcattcttagaagtattactgaatgtatgtgtcaccactcttaaaatatttccaataggagaaaactgtaatagaatacttaagatagtgagtaatgattactgaaagaaaaaaagagcccagtttgtaggtaaagccaacaagggagggagatgtatagtgccagagcacgttagacatagtccgatatttgtgtaaaacgagactagattggcatacaggaaaaaatgcttagaagcctgtgtaggaggaatctggctaaaacataaaggtaaagattaaggagacttttgattccatcttagctaacattttaaataagaacatgtaagtgttttcagaagtggctccatataattggacttagctttcattagcagttttgctttgcagcatatttggaacataatttgtttaaaattgaaatggttttctttacttttatggtggttgatttatttatttatttatttatttttggggacagggtctctgtctgtctcccaggctggagtgcagtggtgtgatctcggctcactgcaacctccacctccttggttcaagcaattcaagctacctgagtagctggaattacaggcatgcaccaccacacctggctaatttttgtatttttggtagagacggggtttcaccatgttggctaggctggtctgaactcctggcatcatgtgatctactggcctgggcctcaaagtgctaagattacaggcgtgagccactctgctcaggctatggtggtttttatacagcaacactcagttt

SEQ ID NO: 91350 - DNA, 7453 bp, Homo sapiens
attttctttttgactcagcagctttaaaaccaaaatagtaagatctgtcttgaagccacagtctagcaggagaagcaaactatataaatttagacagctctgattagcacagttcccaaactgttatattatgcattaacccatacaggaagaatttaaaattgcagtatggtgagacaagttttagaagtgaagcatttttgagaaaagtatcaaagatgaagaagtactcttgaccttttaggctttctgttccagtctagttttagtgtggcattgtatttaacttgccttagaaactcataggtttatgccctcttgtggtctgtcaccaatataaatagcacaaatgaaaattttaagtactggagatcttactgcatgttactgctctcctttataaaataatttttaaaaagcagcttctgaggaacaacagctaagaaattattattcctgtcttccatataatgtgtggagcttaaaagttaccaaatgttattttaacccttggtaacaaaatgtatgtgtatgttaggtggacactaatgaacagaaaaatatttttggatgggctgtccatcattgtccttctaggtgtctaaccctattaatttataagtgtcttaaaaatatgatgaggtgtgatagtaattgtagggctagcacattacccttctaccttcacctaaacatacacagatatactagtaaatgatgcttgggaaatgtgtttatacttgtttcatctgaaagggtcaggagctgtaggaggcattggaagaaataaggattataatgttagtgaattggtgaacttaagcttacagaatttgcttttactgacatgattggcaaggtcttatttgtgagtgtgggactgaggaactaactagtggaggagaaacagcaatagcagtcagtgttttaagactgcagctgtaaccagtgtttttctgctgttatccagtaagccgcatgatggttggaagcaggccagtatagggactgtgcactttaggattagatagaatccctgatagaaagacttggttttaaaactggtctcatctcttaccagttcctggacagttgtgtaatattaagtaagttacttcatctctgaatacaggtttcctctccaaataaagatttaaaccgcctccattgaactctttgcagttcgttttgtcacatgcagtgttggcatatactcctgttgttattgctcataggttaaagacagttttgtgttgcaaagaatggataccatatgactttgtagccactgggttgttggtaaagactcctaaatagtggtaaatcagctcatagttctttttctttactgtggacttactgctgtacttctatgtaggtacatactttattataaattcttgagtgtaaacgaggtcattatgttaaagaatttactagttcaggtattttaaagttgaagcctagtaactatttttaagaaaaatgaaaataatacaataagttttttttctttaggggcactatttgcatgttttggcaggtttaaaaaataaacaaaaactagttttgttcttccattgtggtcttacttttgtggaggacaacaaagtaatgaaatgtttttgtttcttttgctgtgtttttcaagtgttgcttgtagaacaaggctcgctgccttatggttacttttaaaatttaatacttaaagtaattaatctgagtcccctttcaggagaaataagattatttagaataatttaacttaagggaaaaatatttgtttttataacaccttctaaaatttctaagttgtagaaatttactaattttttcttttttttttttttttttttttttgagatggagtctccttctgttgtccaggctggagtgcagtggcgcgatctcggctcactgcaagctctgcctcccaggttcatgccattctcctacctcagcctcccgagtagccaggactacaggcacctgccaccatgcccggccatttttttgtatttttagtagagatggggtttcactgtgttagccaggatggtctcgatctcctgacctcgtgatccacccacctcagcctcccaaagtgctgggattacaggcgtgagccaccgcgtctgaccaaaatttactaattttttcttttgaataacttgctgtgaaatagaagacaactaaaaaaaaaaccctctaaatataatagaactgcttgggcttaaatcttttctgcaagtaggtggaccataaatcatataaacaaagataacctagacatgccatcagaaggctagtctatatatttttatatctacctctttcatctttccccttatttctgatttcccaaatgtcacttctttagtttacatttggatagtgcttatttgaagtctctgatattctacacactatatgtaactaataaagactttaaaatgtaaggcagcattttggtagtgaaaatttctcttgtacattgtgaaatggattttgttgttcgtctatcttcctagggagactgtttaagggaagtaaaaggaacagggcaagaatggccggaacgaagtggagggtagactatggggagtgatggcaagaacacatgccattctaccagtgacttgtttcttaaacataaaaagcatatgtgccaaatttgcatatttactaattaaaaaggcttcctggaaacattaggtagactatcttctataacctttaacaccgtcactaatggatatagcttagaagatttcctcgaaggtcctttaaataatgtaaatgattatgaatgtgtaactagttaatatgcagctacgaaaggattatcatgtagaggttaatgaacattctgctcttatggtttgcagggctttgctttctgtgcttttggctctcttcatgcttggaaacacatgcattgggattggaaaacatcctgactgttcttgggtctcatcttttaatggggttgttaaataggaactttatgaaaaggatttcatgagcatttttttcctttttcaatttacatttaattctatttgtctattttgtaattactgccaaatcagaaacagtgaaatggattgatgtagttttagcttggctcttccagatgtaaagtcagtactctattatatattgccactgttattaagtgttgctatgtgattgatacttactgagagatcttcattctaaaatggactttttatgctgagttaatgtgtagtatggttgggtttctgattatagcatgtattttggtacagaatttctgtcttagtatttaaaatgtcccaaaagaggacatttatttcaggaattaaatgttacaatagaggaatttagtgacaggtctaaaaaaaatcgtgtgtattttttttttttttttttttttttttttgctgggacgggatggtgaaacattgagcatatacaagagacaatattggtatttagagcagtgaactagagcagcgttttgcaaaccagataatgctgctctctttttctcatggcctagtcttaagcattttggctttcatcccctagtttctctgtctctaaaatggtatatggtattctagactgctgtttaaaatttttattaataggtaatttaaaagtagataattagcaatccttgaaaacagtgttaattcttaaattgtcattcaaaaatagtgttatttttttaaattgcatttttctttattgtctagtcttcttattttctgagcattttgagaatctactgacatatctccaaggaaaacaaataacttttgtacttaaattcattgttttagtattataaacatagtttaaactggctgtgaagtgcttacagtcttgatcataattcactggggaacaaatgagctgttcagagcatctccttatcccaagtatttcttcttgaaaatgtagtagaaaaatatcactgaattcattttttaatgcgtcagaataaaaattacaggtgaaaatgtttggagatatactgacaaaataaaatattgtcactacagtcattttttttaactgacgaaacgtggatgttacattggtttcttgttatttataacatttatgtattctacaaaatatgtaatattgaaaacaggtctgtagattgtacaaaatactagttatcttatatcatatgtcacctaatagttatgaagcgggttttgtaccaaagtatgaatcagaaagctgtaatttgttctgcagttatcagcctgcattagagggttatgataaagtgtgctgcttaaaaactaacgttcacatctctgtgcatttgacaaataaaaatgtatactgagatgctattaaatctgtaaagccaatgttctagttttcagatacactgatttttgtagctctgtgcatagctctgttttttcatgagtagttatctgttttcatgacaggtggtcactaactgccaagagagaatccagcattggtgagtgaaagatggttttattacacttctgaaatactgatggggtaacctacttgtgttcaaataatgtgtttactgtttgcgtgtgtgtgtatgtatgactagtaattgaattcttctagtagtctccattttgaatgcctttaatactaatttatattgtctttgacccttttctgaattacacatttctgatttcctgacgttgtgttaccacttgtatttattctaagtgccttttcttttctaagaataatattaatatcattatgaattggagactgagacatttttgaatgtgacttagctctattttggggatatttcttacattttagtagaaaaataatgggaatcagttactttaaaataatgatggaaatagggcacagaaatgttttcccaaagtttgaaaaaaaaatctaattttctacttttcagagcttgttttattgactgtactttttttttttttaagagagagcatatctattttaatgtgctaatctatagttaataggaccatgtttggtaaataacacactttcctttggcttctgaggaaaatgctcgatttaatggtgaataaaatcttatattatgagttgtcatgaagtatagctgttgatcttacagatatcaaattacaatatatccatgctgtgcttacgaaggttttactgagagaacaacaggagctgtcttgattattgtctgcagggttattgcaaaaatcatggtaactgcccctttagtggtgagattaaaccttcggttatacaccatcaagcatataatattttaaatttattttaagaggctttttcttcatgcctgagagatctccaaggaaataatttatagttagtgtatatcaaatgttttttggtttaaatgcacataggctgcaggcagtggataagagtgaaaattggtgcaatctgtacacatcatcttattaaattttgactattggcttgcagaaaataatctaaaactaataatatccactttataagtaaaaattcaggacttcattaattttcaataaatgcatcgttgtagttgcttccactggtggtgtaagtgtgttagcatttccataatggaccattcgcctttcattatacattcagttcaggttaaaacttgaaatacaagtcgttggccaaagaattttttcccctgcacatttagtcagagtggcccattttacaaataatttccagaggaagtttattaacgtggacttctgtctattggttttggtaagaagttcaggaaattagaaaggtattcactggaaatagatgctagtttacataaatgggtgaatggtaacttgcttctggtttgttttataagattcttattagagttctttaaggataagggcacgttttcatccttttattcacagcccctactgctatgtttggcacaaaataggcacttgataaatgtttgagtaaatgaccaaatatgtggttattttctatataacattttagtttacaaatactctagtagtgcacaagtctagtgagcagtgacagaaatgtgacatttacttcatggcaggttcatgtgaccctcaatttcacttttcagttttgtaaaaccctctaaactgtagaagcttagcatatttgcctacacatatcttgaagtaatatagtactttatacatttaaaaaattatttttttccagttaaaatttgcattttcctctgaatcatttctggtttggttcaggaaacagacttttctctttgcttttaatgaagatctatacatggtatattgctcaaatctgaatggccagtaaattaatcaattcattatatcaaaaaattgaaaccaaagtgtcaccatttccctgaaagcaaggaaattgctgtttgggagagtcgtggaattcttgtgatatttttgcattctcttaattcctcaaacaatagttgagtttctaccatatgccagtattgtgctgctgtttggaattgaaagaccctgccatagaagaattcatagccagacatataacagggaaatcacgataattttgtgctatttgcggagatatgaagcaactacaggagttcagaggctggagccgttcttagggtgtctcacacactacttttaaaagcatgttgctttaattcctacttaacccttggtattagcctagtctaaaatataatttctgttaagcccctattctttatgagtacgcaccagtatagtaaagaagaacaaaatatatggtttgaaaaatgcattcttatgctggtgatgtttatgcttgtttgtataatttttaagggattctttaaggaacaagtatatgtattctaggctcagaaataatctaaattggtttttgtttaaaaaaaaatgtaggacagggagtaaaaatatttatagaaaaataggagtgaaaatggtctgggaccacaggatctacccaaaaaaatctttgagaaaattaatttaaatcctagaactttggtgaacgaagaaatttataatatttgtttagttaataacagataaaaaggaaagattcaagcctattggatgagaatttgtacattattttagagctaataataatggttttcagtttagtgaggatttaaaaaatgtttttgaatcaaactttttttctttataatcctttttaactaactcaggaaataaggtattatgaaatccacacactgttacctccttaaagtatgaggatacttcccactgtttggtccactagtggctgattattttgtttgtggattatttgtaattttctttttaattcttccttaaagagcatggcatttggagtcacagacctatatttgaatcctgtcatttactagcgttttgaccttgaacaattatgctcagagtctcagttttttcttgtaaagtgatgatgatactactta

SEQ ID NO: 91351 - DNA, 1618 bp, Homo sapiens
aacatccaataaaactcttaagcacagagtcctgtttgaggatgaagatgtgaatattgcaacaaccacagtgcttgtctgagaagtgcatcacttggtgataatcctgagtgcttgttcttattttgagaaatataagtccagattccactataccaaagacagattggggtgggtatcagtgtaagacctgagagaaatgtaggctgtgaaaaatggaggcatgcctataatttactttttactaattcatattgaactcatgatcaaattggtgagggttttcacatttttcttttatttttaagtcagttgataattttgaggtttttaaatatttggtaggttcaaaaccaggattgccatttttcactgttgtaaaacctcttgagaaactttaacccggaggtatctatgattgggcctctgctgaaactatatgtaaaatatgagttcttttctcagggaagagcctagagtttttctagtttctcatagggatcagtgacctaaaagggttttttaattgctactgtaattaagaaaacccacaaaattacttttttctaaaatatgctttagaaagaaaatatagaaagtgtaaagtagcaaaacctatgaattacggtaagatttaagtagaaatttgcacaaactttcaaagcttaagtcagctataaactcatcacaccttttctaaaaggtcctttcctttgatttgtaataggaatttatattagttatagaaaatttggaaaataaaaagaacaaaaattacatataaactcatcagtaaaaattaactaggcactttaggatatttctttcaaacgtagatgaatgtgtttttacataattttaaaggttttttgctttgaattcacatctcattttcttagagcaaaagattagtaatgagtgaagaaacaggcacctgtgataactgacaagtcttcaaacacatgtgtatggttgttgtagagagaacagtagaacagatttttctgtccaggcttactatatatatatatccattgcactgttttctcattgttgaaaagttaaattgaagaaatctagtagaatgttagctgcatctctctttagataattttgtttcattgacttgaaaaattatgtttttatatgcgggttaatcttggtatctatgtctaatagtaaagttttctgatggactcataaaatataaagaacatagattatttcatcagcatcttctgatgacataaattccttggtataatagagttataaaaaaggaatataccaccattctgcctgaattttgtggtacatttcagttacttatatcaattgaaattactgaatattttgccatgaccatttagaaaaaaagtgtaatgctattgatttaattcaagtacatttaaattttccatgaggagtgttccttttcccaccaaattgcataaagcataacagtatagatccctttttcaagaatttttaaataaaatgtaacttttatcaatttgtttagattgtttaaaaggatactttgaaaaaaatcattatttcttgctttagtaactggaggacatctctttatctatatagaatccatgcccaaacttaa

SEQ ID NO: 91352 - DNA, 7291 bp, Homo sapiens
aaaaaaaaactgggccaggcatggtggctcacacctgtaatcccagcactctgggaggccgaagcgggtagatcacaaggtcagggttcgagaccagcctgaccaacatggtgaaaccccgtctctactaaaaatacaaaaattagccgggtgcggtggcgcgtgcctataatctcagctactcaggaggctgaggcaggagaatcgcttgaacctgggaggtggaggttgcagtgagccgagatcacgccacggcactccaggctgggtgaaagagtgagactccatctccaaaaaaaaaaaaaaaaaaaaaagttcaatgttagtatttgctgtctattttaacttcttactttaaagtaaaattagcaaagtcttattgtttcaacctgatttaaattttatctcccttttttattatttaaaggttggagtctttatcactggcctcaaaggatgtagactttttttttttaatagagatttttatttttgtcagtcacttttaagaggattaaaaatgttgatccctttcatatttcctcgtccctttaaaaatattctattatgacaaatttcaaacatatggaagagtgaatcttgatcacctatctgtctgtaccctaatccgttaatccatttttttctgatgaatttcaaattaagttgtggacatctgtgtatttcacccctaaatacttgagcatatccctcatttaacttgatttctctcttactttctacaattttatgcaaatgagctgtttcccataggttctgtcttgatcttaatcctttaagggtaagggctaacttgtggttgtgttaatggtcttcatcgctgctgcctattttttttttttaatttccttaaaacaaaaggtactctcaaaaggcatattgcacatgattagcaagattcagaaggaagtggttaaagtttcttacatgccttatacctatgcttttagttcttgttttgtataaggaatgttgcatgaggatattggaaaaaaatttaaaattaagagttgaaggcggaacctgatctataaggatccattatgttgaagccaaagaagcaggtctagctattctaagtaagtaggctggagaggtgtttcttaactctatctgggttttgttttccatttgaagaaaaattattttaagcaattaccatttttgattactgtaatgactcctgtgtccaaaaattaattacgtttctaattattaaaatagaaaaaaaaatctgttcaaattttgttataaataaagaccccagacttaacctcagtaatgcattagttcttagcataacttttgcattttctgttgcataggctttgtgatctttaacaggattatttaagcctgaaataatagagatactatttggagatcactgtttgactaagccctgaacatttccacgaatgtagcctttagagagagagggttcctcaagctgtagtttcttccagagacattgcttgactcctcctggcctcccttcataaaggatttctacatgggctgcattttaagtgatcttctacttttgtatttttagaaaataattcaaaatttataaatagcaactctaatcttaaactgctctccagtatgtccgcatttttattccagagagaattattaataagttgaaaactgattatatttgacttgaaatattgacattgatctctggtattgcctgtttttgaacgtactgttcttttaatgtacaaaatagatgttttttgtgaggaagttgtttttttttctcctaagcattgttaccaaaataagacttattgaatggtgactttaatactagcttcttaatattcatagaaatatttagatatctaggctggtgtatttagtccttgagcatttgcagaattacttatctgaaacataaataagctgttagtgttatgttattaatagtgagtgttgactgtctaggcactgtaccagtcagtcctatggagacattctcccattgattgctcacaccagtcctgtttccaaagcccctgaatggttacattcagctgtactgtctttcagcaagttatactatttgtatcaaattggttagtgaaatcttgtaggtaatagtctttcttgaaagttttggaattgatgttttttgatgcttcatgaaaaaaatgagttttgagttttggaaccaaaatagtagttgctccatgctgggcagtgtgttagaccttttatatttaattctgttgaacctgtgagataagtattagtccaattttgccattgaagttactaagactaaggtgaatttgtgtaaattgcatgtagagcttgggattcactctctggtctgacttcaaagccatgttctttctggtacatagccttgtgcatgaagtttttttgccattttatccatataaaaattttccaggaggaggatttttgccttaaacaaaagaataaaacatgtttcgtatttatttatagaaaaggattttttttggggaaagttataaagcagttgcacactagaaaatgagaaagctttcatgaaggaatgcaggtcagaagacctagctaggttaaactcattgcttacctcatcttgatagaggagatctggcttcttgctatgtggtttttccatcttccttctactttgtcttctgtaagagaaaaatactgataagtgacatttattataggttatgtaaaataatatatatgtgaaattccttaagatcttaagactgagctaatttttttttattaattatgctactgttgcttcagggaactaagcagtaagctgaaaccaattctgtgatgtttgtcatttatattatctggagagttgttacctacattgcagtttatcctgatttcaatttgacaatgtctacatgttcttttaaattacttgctgagttggtgaatttttgtttctgttatttttaaaaactgacaacatccttctgcttaaaaaaaattcagtgctgtagttttgcttgcagcctgtatcttagcagggaaccctttggaaacccagtctccagagaaagtttgacgggcatcttggcataggctgctgcctggtattactcaaaaagaagggctgttcatttccagcaggtgttaagagctgagtaaggcccatagcatggaaatacgatcatctctgcccctacagagttacatataccttttggttgtttgaaattacttatttggtagctctgtttgatgtaacaagaaacagactcctaggccaaattgaaacgccttttgtattatctctacttaatttcttctacccccagttgattctctcttaccttaatcacattattatgaataattgaagagctgatgatgcatttttcagcctaaggttttctgatgaggactaaagcatctgatcaaatttcatgttcatgatttcaacttcacagccagtatctattcactcaaaagctttattaaatctcttctttcggccgggtgtggtggctcatgcctgtaatcccagcactttgggaggctgcggtggggggatcgcttgaagccaggagttcgagaccagcctggccaacgtggcgaagaaacctaatctctatggaagatacaaaaattagctgggcgtggtgtcatgcgtctgtagtctcagctactcaggaggctaaggcaggggaatcacttgaacccaggaggtggaggttgcagtgagctgagattgtgccactgcactccagcctgggcaacagagagagactctgtcttaaaataaataaatctcttcttttttcatcttgagtcccttcttctctccaaatatcaggccctcttttactgtctcccttaattttcacattttatttggtccagatagtcttgtatcttaaaaaacagtaattctcaaaatttgagtattctgcttctaaatgccagagtccctgaagagtcttaattcttcaataaatgtatggtagaataatgccattgctaaactgtataaaaacaggattttaaaactaaaaataaaaccacattaatcttgaatttgctaaaattatgtttttgattagcttgttttatgatacctggcctactgggcctcccaaattgctgggattacaggcgtgagccaccacacacgactgaaagaagagatttaataaagcttttgagtgaggccaggtgcagtggctcacgcctgtaactctagcacttcaggaggctgaagtgggaggatcatgaggtcaggagttcaagaccagcctgaccaacatggtgaaacctcctctctactgaaaatacaaaaactagccttgcatggtggcgcacacttgtaatcccagctactcaggaggctgaggcaggagaattgcttgaacccgggaggtggagggtgcagtgagccgagatcacgccactgcactttagcctgggcgacggagcgacactctgtctcaaaaaaaaaaaaaaaaaaaaaaaaaaaaaaaaaaaaaaaaaaaaaaaaaaaaaaaaaagaaaaatcgttaataatgtgtgtatttggtgttttctgtcaacaggaagaaggtagataatgactataatgcccttcgagaaagactcagcaccttgcctgataaattgtcttataatataatggtatgtttggtgtgtttcttttaaagtaatagttgtttcttgtaaacatattaactatgtgtcggttcacagaatgtcaggctgatggactgtgtccaaggtaactatgtagcaaggaagatttgttttgttttactttataagaacacagtaattgtagtaattgttggtatttacctttttttttcagaatatatatggtgacacaaatgacataaatattagcacaaaattggacatatttcaaatggaaacttactatataaaaaatgtaattatgacagaaatatggtactaagtcgtttcttgttagccagagcaggaataggccataatgttttgtaattcacagaattaaaccttaggacattgatttttatataaaaacgtgctgctaatttttgttttaatgatcttcacatcgacatagtgatctgttcatgagccctggattagagcctttcattgcatgaatgttctttcttatgaagactttgttcttttatactagtccaagtattttgtatatatagctagatagatccattaaagctatttgtttactaattcctgctttgcaaaagtgtctactttattgaaaataatttttagttttctttatcaaaagtattttgcattgacaatgtttcactactagttgctttcacttagatttgcaagtgaatgaaaagtataaacatgccgagacagtactactttctttaagagctatatgtaaatatggtgtggatttattttcctgttttaacattgatttatgaacataaagcaattttctttagattttcctagtaaaattttaatatagtgttgaatttctgtgaagctggcattttatttttcccaatgtataaataaaaaaattcagttatgtaaggcttttaatgcgaagtgttttataaaatgtacttttcagtgttttatgttttttcccttttttctttttttttaaacaataggtaccatttggcccttttgccttcatgccaggaaaacttgtccatactaatgaagtcactgttttactgggggacaactggtttgcaaagtgctcagcaaagcaggctgtaggtttagttgagcaccggaaagaacgtaggtacccattttaaatgatgtttctttgttgtatatgtatccattcacagattgccaagctgaagggctgtttcttaccaaaagtaccttccgtgatctatgaatccaggctgtttgtgattctgttgaattgtaggtagtttgagtagaaccaacatttgagaatgagctggagaatggagcatccgggttggaaatgtcacctacattggcatgttttcagaagttacaaagtttcaaagtcattatgtgattttgtagttagaagttgggaagacataaaaattggagtcattttataccttataatttttttttagttgctattatagacttatttttgcacttaatactttagtacacagaaataatgtgttttctccttagtgaactaagagaaatacctgtttacataagtagacaattcttaaaaatgctttttggtttggaaaaaaaaccatattttcatttgatagaggagaccaggtgtgaaaaggtgctacctaaaacagcacccttatcctttttcagttgtttgagttctctgcatccctttattagggcagctcttgagttttgtttatccgtgctattatctgtaggtgtatagaagcctacatacacacacacaacacacactacacattttgcagttggatgagctagcttgggttctagcttagttatattttaaaattaggttcagtttataatctgttgttatttctgtaatacgtatttagattgagagtataatatccgccctacctgctttttaaccttttagttaaatgtgtatttgaaaataaatgatgggaagatccttttttataaataaggtcatactaaacagaaaacagctgagttttctaaagctgaacttgatttcacttatacatgaatgagtactagagaactcatttactcagtgaaattctgggaactatatttggagactctaattgcaaatcaactcctataagtttataattgatatatattttgatcttttgtgacactaatcagaatcttattgttaggcctgtatgtaatttctggcaatgataaatcttttggctttgctgcattatttttgtcatgtatattagcgaaagagaatgggcatacttttttcttaaagaccttactgaagacgaagcctctctttatatactgaagtagctctgatgttatgaaatgaatccatagcctgttgaagtttgttcacattgattttcatatttcagtgaaaaaaatctttataattagttataacttaaaatattaatgggaatacttatactacaatagaatagagctctagagtagagaaacatgtttttgtaaatcactttctagtagttaaatatggttttggaaagtgaccaaacatagatgacttttgggatcaatatttatctaaaataattttcaaagtacatatttcctgttacaataaattctgggccgggcgcaggggctcatgcctgtaatcccagca

SEQ ID NO: 91353 - DNA, 1540 bp, Homo sapiens
agattagggtttggggacctgttcttttcaaacttttatctagatctttggttaaagttcactcttcttttggaaatactctcaagtgaattgccttttccaggtccgatatcccagatcgacttgtagtagcttttcccagccacagttaggttccatttttttctgttgtgcaaagtccattatcagttgtgcagtttccaaaatttggttgacatttcttgtctattttctcttcaaatgtatttgtctttatgggtttatgcctttaaaaatttcttagttgttactttacctaaggtataggggaaaggcaaatactaagtacatgtattcaatgtgctattttaaagcagaagtccaaacctttgtactggtttaagaaggagtacatcctgtccagaggtttgtgagtatttccaccagggggcacgtcctgttgaagctgtcgaaagaatatttaaaaattccagcacacaaaagaaacgaggttgagaatagagtggtcacaaaggattcagtagagaattgcatatttacaggcttcatactattcagtacatatgaatatatggctaagtaaaaaagactcctttcacgaatgatgttcataacttttattagtgttttgcaaataatttttattacatctgcatttctgttcctttcaaatatatacaattctacaaactgttaactaaatgtttctaaatatttggtcttacttagtgagtaggcatatcgtttatctttaggtgaaaatgactgcttaagttcttatgaggttttaaattttcttttttggtttaaacatgtctttggaatttgcactgttaatttgctttaagtctcctttttcatagctaactcaaaggatttcagccagttctggacaaagattctgaattagtgaagactttaaaatattagcttatgcttgctgcacatttaacctgcagcctggttttgtcagctaaataaataaaaactatacctcattctatacttctgaaatcctagaaaatttaacttctgatttttagttaaaataacctgtgtttgaaaacaatcttctgtccttcaaattactaatttttttcttcaattttagtttttattttttggggtggggggaagtatctgtggagaactgtcttttgtacattttcacagctatttctttgatcccattgaatttgttttcttttttctataataattggtaactaaaatgtttgagattaaaatgaatacagatattgtctatatcacaaagtatatttctttttctctcagtagtgttatttgctataatttcagtgtggtttgaaattttgcttaattagatttcaacttagccatgtttggagcgttaaaattgattgagtctgtttaaatgatccatttttagtgacatgtatatttcacctcttaaaataaatttttggagaatagagtacaaaagctttagtgaaaaatgtaatagcatggtttctaatgttaaatctcagagttatagaaagaaatggaattaaattct

SEQ ID NO: 91354 - DNA, 1898 bp, Homo sapiens
tagatacgaatttagacttgttatttactttgtacaaaatcgaaataggtgcttaccattctgctgtattttatgttattgtgagcaccaggttcgtttgccttgcggttgcccagctttcttttgtcttgtcttaaattttctgtatagctatctaattttttgttgctctaggacataggacttatgataatttaatagagatatatatctgcatatataatgtgtatgtgacggtgttggtgcttatcagtttgtggtatttctgagattctgatataaagtatatgcttttgagatctgatttcttaaccttgtgatagtggtttatattaatgtatgattcagaaagctttcttgaatttaaaaatggaactgtgcaatcgtatttcagtttttcataattaccctatttccaaaacactttgtttcttaaatggaatattcacacaactttttcttacatgcgtgagttatgatgaattttttttaaagtcaacaatagttgattgaaagtaactcctataacatcagtgaacaatcaattctttacacattgacaacccaaggctttcactgatacctttagcttagttgcacagtatttatatgtggatagacttttaaaaatgtacttagcttacctacctgccatttttaatattttccagtcttcttgaaaaaagttattgatttgacctcctacctaaaataatgttctttagatctaaagctggttagacacattatctgactgagtttactgaagcaaaaacattccataaccttaaccttttccctgaccccctgcttttaacaactgccgacatagttttatgctgttatgtgaccatgctcggatgaaatctgtcaaacagctccttgagttattaggctgtctgagtctgacctttctgcaatcaaagatatatgacttaagggctcagatttgccatggcaaccggtccaatttgctgccgtgagaaaaggtctaattgttgcagaaatttaatgatctagagcgacatcagggctgtgagattttatgaactgtttacaccgtaattttcattttgttaatgcagtcttttttttgtaacccattcatggctagagcataagtgattgtgttttatttaaaatagcattgcatagcatgagagccgtatcggagaacatgtgccactctcgagaagcccttcatatgtggtgatatttcacttttaactcccttccttattttcattcttttaaaagatattttaactgcttagacctttgccagacctgcattcatcattggtagagaaagaactatgtacttttctcctccatcctcttctgatctgcttactgattgagtgcctgttgtaaaacagtaggaaatcacagagcatctgggggaggaggtatcatatcactgtctattattctttatcagcgcttggccataaaaattctgtatttggagaaaagtaggatattgttcagcatataattatagttagaaaccccatgtattttttagatggtgccatttactgcttagcagagatttctactctgattacagaaacatgaattacttgttgcatttgtccagtattgggtagagaaatgtttgtgtctattctcaaattaaaatttttcctcaaataggttaatagagggtggtatttaggagatgttgaaaggctgtgtgttgtgttgttatgcagtttaacttggaaatggttgattatataccgtaaaaaatgtgttgtattttcagtcatctaatttaggaatattttctgttcaggaacagaataacttgtcttaatctatgttatctatgcattatccagctggacaaaaattacctgtgcaacaaaactgttatgaaatactgcatttta

SEQ ID NO: 91355 - DNA, 1677 bp, Homo sapiens
tgatattttcagatgtatgcaacaatgcagcaaatttgaatatatgatggactcgaggtcatctggtagtgccatatctcataacaggacgcatcttagacttcttcccattactttcccattactttgctttaataaagcaaataaagccttaatttgctttattaaaaaataatctattttttaaaatgaaaagcagatacctctgagttcagatttgacccatcttttttcctcacatgaagattacaaatgaagcagtttaaaaagtagagatgttcatatgtaaaatgataatagaactttacagagatgagccgccgttgtttccttgtagggtactcattccttggcagtgccctggagtttaaagtatcctgtcacaaggcttttgcacgttactgtagtaactagatttccttgagtaaggatggtaaatggaaatttatcatttatgtgttgcatttcgccttataaccagggtgcattgtggccatttcttatgcatttttgaagctcttctcacaaccttgaatgtgtatgcaggttctctggggctcttgttgaaatacagattctgattcagtgggtctagggtgtccttagagcttacacttctgaagtgttccccaaggacgccagtgctgttgatccatggaccacactttgagtagcaaggctgtaagagacattcatccttggagttctgtttggcttaaaaattgtgacccctctgtttcaatatttcccttgccccaaaagaaagtctcattaagtctgggtttgtgccttttttatgttggctattaacagccacgtcttttcctttttctaaatagcaaaacaccgaattgctcataaaccgcattccaaaccaaaaacttcagatatttttgaagcagatattgcaaatgatgtgaaatccaaggatttgctagctgataaagaactgtgggctcgacttgaagaactagagagacaggaagaattgctgggtgaacttgataggtacttgatgacaaattatctttccaagataatttgtttctatacacatttcctcattaatctttttcttcattaataaaataatatgtgttcattgaagaaaatgcagggaagcataatatattatcaataatcctttcacctcaagatgaacattaattctctggaatattttcttataggattgtgtgtttgtgcatattcccatgcatgtacatgtacttaaatacttaagatcaacatcttcattttttattatggcctattttatataattaattataccagatagttgacttttaataatcatggatttaatatatataatgttaaattttaaatgaagtatttttatgccacacccaggatagtgctctatctttgaatgtgttgtgaaaaacaaaaatacactttgaatttaaatttgatacagtaaaatgtttattcttgctttccttttataaactttggagcaggtaatttgtaatctggtcagatagctatatgtatgagaaactttacgaaattgctgtttgaaatacacattagcacacacttagaattgttaaaatgctaaatgaaatctgctactcgagaagttctatattattttgcttaaatgatgtaccatatgcaataattagtttctgtgaaaaatagggcaggaag

SEQ ID NO: 91356 - DNA, 1260 bp, Homo sapiens
gcatatgtataaatcctttatttttaaaaattacaataatacatgctcattgtaaaatattctgagtataggagtagaaaataagtgtgtattatgtggtttcaatttctggtctttagagataaatgttctctgaatttcttacaactttattattattgatactatatttatattgcatatggccaatatctttcttgcaaagataaaaaaattatcttctatattctacttatgtctgaataacctcaatatatagaagcagcataggaactgttttttgttaatttatttcaaaacatttttttgtttttgaacttagaattctagttttaaaaatactttattcaagatcttagtatttacccatggaaactaactggaaatttaaataatgtaaaattctagtatgtttgtttgatcttgttaattttcttccttgctagtaagcctgatactgtgattgcaaatggagaagatacgacatcttctgaagaggaaaaggaagatcgtaacacaaatgtgaatgcgatgcatcaagtaacagactctcatactccttgtcataaggatgttgcaagttcagaaccattcagtggtcaagtgaatagtcagttgaactgttcagtgaatggttccagttcttaccacagtgatgatgatgatgatgatgatgatgacgacgacgacgacaacattgacgacgatgatggtgataacgaccatgaggctttaggggttggagataattctataccaacaatatatttttcacatactgttgagcctaagagggtttgtatacttttaactttactaattttgcatataatttgaacattaagcattatgatattttttagaagagcaatattaacaatcattatcattgtggatagtgccagacaggaaaatcatcttttgcctcttgttctgaccaatttaagaagaaaaagggaaaaaaaatttagttagctggtattggtccattgttctctgaaacaatgcattgtttggggtctggaaggggatcagatttgagtggcaactactgtaacttcacctgtccttcattcagagagttttcttaagaatcctggagttaattatattgtggacattttggtgtgcttaggatgttgaaagtgactgcattagttaaatttttaattatgccaggttgttttctatggacataaaatgaatacttcataggcacaaagggaaaatgtaggaggaagtaaaaattagtttcttttc

SEQ ID NO: 91357 - DNA, 1519 bp, Homo sapiens
tctctgctccatgtactgctctaaggggacactgggaattcgtctaattcgtctttctcagggaaatttaaggcctagaagacatagatctggttggtaacaaaacaggaactctttcgcctctgagtgccctttctacacaatatcccgattgcctgtatcagttaagggtctgtggtatcattcttaagtgtgtgtgattattatttagtgaaatatgtttaaaacatatttgatatttcttagcttcctaaagttattcctgctcctatatgaagtgaaataattgtttgtgtttttatattctaatatgtcagactgaaggggtcttcccctgattcttcgggaaaagttgactgagatgattagccagaaaaaaaggtcgctttttaatcttttgccaggcttttacttttttcctgttttcatttagataaaacagaaagaacaaatattatttgcaggaacgttacaggtaatagtggtcattattgtggaaagtatgctctaagtgctgactagggatagaaaaataacatgttaaccccatgtgaaccctgaacaggcttggtttttatttttttactccttcaatttctaaaaattagagatgttttaaaaattctaaataggcattatttaatagtacttttatgacttaaaggttgtattcttactgaatttttgtttatactctttcttttgaaatacataattcaagccaaacacttatatcaaaggaatggggtgatgggaagtttataagaaatctagcatttagttcaaatgtattttgctttctctacaataataaagacactgaagactaggatttgttaataaagaagattttctttagatgtcatagatctatgagataaggactttttaaaaaattccatctgataatgcacatcatttcagcatcagaaaatttcagctgcctctcttactattatttttttagttatagagtttatttgttttggtttcactttgatttaatttgtcaaaagattcttaatttcttgctctgaaattttaggtccgaataaatactggaaagaataccactttaaaattcagtgaaaagaaagaagaagccaaacgtaaacgaaagaacagcactggcagtggccactctgcccaggagctgccgaccatcaggacgcctgcagacatttacaggtgggaggcgctcacagctgcagggcagtctgctgggcttgcctctctttctgccactgaacctttactggagaaagttgactgtaacacagaagaccctcactgaaaagtgaagtgttctgaggagttaacttaggatctgataggctgaccggctgtagcttcccagtccagagcagtgggaatggaggattttttttttttttcactttctcctcttcaccagtgcttttgaaacatttccaaatggtctagtcagaaaatcttgtatcttcagaaagcatttttgtttccagtgggctaggtccctacgtttctaccacagccgtaa

SEQ ID NO: 91358 - DNA, 1066 bp, Homo sapiens
aataacatgctgtgtttttgttctcactcataggtgggaattgaacaatgagaacacttggacacagggtggggaacaccacacaccggggtctgtcatggggtggggggaggggggaaggatagcattaggagatacacctaatgtaaatgatgagttaatgggtgcagcacaccaacatggcacatgtatacatatgtaacaaacctgcacgttgtgcacatgtaccctagaacttaaagtataataaaataaataaataacatgctgtgttttattattaggccagagaaatagctttcaaaatagtatgaagataccatttgaggctataaaattattgtgattgtgactattttagatataagattgtaataaaaattttcagattaatttctagaatagattcaaggaaattttcaaaaagttgttctcagttttatgagttacgtatagtgaatgcatatgtgttttgaatatcacagagcctttgttgatgttgtgaatggagaatatgtccctcgcaaatccatcctgaagtctcgaagtagagagaatagtgtgtgtagcgacactagtgaaagcagtgctgctgaatttgatgataggcggggagttttgaggagtatcagctgcgaagaagccacttgcagtgacaccagtgagagcattttggaagaggaaccacaagaaaatcaaaagaaacttttgcccttatcagtaacacctgaggtgtgtgtgtgtatcttttaattctttatttcatatagtatctttgaccagttttagctatttaatctgaaaagtcataagattaaattaattctaggttttatactttcttggtactaattaataaaaaattaatagtcacaaacagtacaaatattgtgataatcaaatagtttattttttgataaacacattacttgtcttaacgttctatttcagcaaaatgggaaatttaaaatgtcttacttggcattatgtattacatttgtagctaggaaattatttcgcagtttattttaaataaattaccagtaggtcattttctgatagtgta

SEQ ID NO: 91359 - DNA, 1029 bp, Homo sapiens
tagagtgtggaacctattttttatttcacccttagtagctttgcattttgtatggaaatgtttaatagtagttgctatacattttttaacatcaaagaaatagttcatgattatggtaagtactttggaagatatccttttcagtatctttttaaatgctaaaatacctctttttcaaaggcattttaaatagaagaaggagaagaaggctctatgctcatcgtgataaagtggagtttttaggaaagtaagctttaagctgcttttaccagttgaactccaaaaataatgtaggagagagatggctttctttgtttttgtttcagtggtggggcaaggtagaagaaggtggctttttaaattatttaggtgttacgttgttttaactaattttgagcacttggtagacagaggagaacaaaatgtacattaaagttcacctgtcaaattttcatttgtagagggaaggatggaggttctaaataccagcaatcttaaaaaaaaaaaaaaaattaactccttgtgtcttacctatttttgtataaaacgacatgtacagatatttccagcaatttatgcacattctttaattctgttccagttgaacatatagttgaccagattaaatgcagcaaacatccaggtgaaattgagtcatttctttttttgtggaacttctgatttctgtcattgagttaattatattaaaattttgaaacctgtacttattcctactagtatcagcacttttatttttcaacttccactgatcttttaaaattgaggcaatatgcagtaaaatatttaaataattgcataaacaccaccaaagagatatcagttagaaatgtcagtactggtgaaactaagctattggctagcaggcagcaaggccatcataggatagctcattcatcaactgatgtacaaaagtcagagtttgacaccctaatagcatttttattttaatacattatttttcacagcatgggctggacatgaatggaatgtatgaaagtttgaagacct

SEQ ID NO: 91360 - DNA, 2444 bp, Homo sapiens
cttgcatgtatactgtaaaaattacttctgtttggtggtgaaattaaaacttaatggtgttggtttctctgaacaattagtattttggtgtagtagtgttgtctagccaaaaatctcgtgaatttacttttaatgaaaagaattgccaaatgagtgaatgggaagattttgtgggtgtcttatttgcattttattaccataacctgacttttgttttctaggctttttctggaactgttatagaaaaagaatttgtatcaccttccttaacaccacccccagccattgctcatcccgcactacccactattccagaacgaaaggaagttctgttggaagcatctgaagaaactggaaagagggtttcaaagtttaaagctgccagattgcaacagaaagactaggccctgtctaggaaatgggaatttacatcctaaaacctagttgttcatttgtttagagtatctatagcaaaataggttacatgtagtttgaaataaggtatcctgagttactttggcaacaagttcttttacccttacccgtggtatttgaaaaaaatcaaggtaactgtctgaatactttaatatcagcttgttttgtgaattctctgaatactgtcaacactcttatctaagtttgcctttatgatgcagtggcagcattttgaattacttttcaaagaatactgttcatatgcattgtttttgtgtttcaaactaaatacaggcagttttgtgccagctgtgatattgtgcataccatatggaccattttaaagaaaattttaaaatttcaaatagattcaacaattacattacttgctttcacattttaaaggcactttaaaaaaatctacttctcttgtaggttttgcggctagttggctattcaagaaacctcgcccctctgaatgtcatactgtaatctttaaggaagaaagctacatgaattaattgtactctatgggaaaatttctttggaaagatattttgtaaaacttttttttccaagtaaaaactttatgaaacttggtctcaaaaatgttgtgaactttatgattcaaaattgagtacagatatgtccttgattcatatgtatgctacatgtatcacacaacagatctggaattctttcagttcctcagatacttctcccttagtttttgcagtttcactgggattatgttttgggaaacaaggaaaggtctagatgcttaaacattttaaataaaaattccttacagtttcatcttcccaacattttcattctttaaggctactttcctactaactgaaataacacatttacttttaccacaattcctcaaaataaatttattctaacattgaaaataacattacaagttaatcattagcttgatgcatgctaaaatgtagcttttaaaaagcattctgcattagtactaaaataagccatcaatgccagtccaccctctctattcatggctaaatatttaaaggttatttatagcttctttaatgaattcttcttaaacaaagtgaaattatgtcctagaaaagtagaagctattcgtaactagagcagtgcaactttaaagttttatgaatatgtattttaatgacaagggggcgagcttgcatccccactagttaatggataattcaaaccgaggactgattttgaaagatcacctaaaaatgtagatttgttctttagtaaatttagatcaactatgcatatattttgtaggtaaatctttcagtccatgccccaaccctcaccaaaaccaaagcagaaattacacacacaaagatgctcccgttaggaattgctattcacatgaggctttctgtgctagatttttttctcagaaacaaactttactgtaggactattgtggtgttcttaacagatttgtaatttcaagatgcgtgtcattaaataatttttcatgttcacagacttgattttgagcctgtctatgttacatctttcagataggttttccctcatagaacaagatggtagtagaagcagataaagtgtttgataacacatttttgcgtgttctgctctggagaccatgaaatagtgttgccccatttcatagcttcagtcttataacagagtattaaattgtaatttaaaattatagcttttttatattaaagtttgggacaaaatgaagctgtcttacctgttctgttttaaaccattataaaacagaacagcagaccaagagattctcttttaaactttctattttgaaatataataactttagtctttcagaaaattgcactaaatagtaccaagagttcccatataccctcatttcattcagcctccctcaatattgtaatatagaaccgtaatataattatccaaatcaggaaatttatgttggtgcaatagcgttagacctaaattacagatcttacttgaatttcaccaacttt

SEQ ID NO: 91361 - DNA, 1011 bp, Homo sapiens
ataagtttcaggaggttttcttttttggttgattctttccagttttctacaaagatgactgtcatctatgtacaaagacagtttggcttcctccttccaaatgtgtataccttttatctctttttctgtattatcaaggacttgcaatatgaagttgaaaaggagtggtgagaggggatatccttgccttgttcctgattagtgggaaggcttcaagtttctcaccattaagtatgatgttagcgtgggtttttgtagatttttaaaaattaaattgaggaacttcaccctattcctagtttactgtgagtttttattattagcaggtgttggattttgccaaatgctttttcttcatctattgatgtgatcatgtgatttttttcttctttaccttgttgatgtgatagattacattgattttcaaatgttgaaccacccttgcatacctagaataaatctcacttggtcatggtgtataatataatcctttgcatacatttttggattcagtttaataatattttcttgagttttgcatctgtgtttattagcaatatttgtctgtagtttcttgtaatgtctttgcctgattttcatatggtaatgctgaactcatagaagtagggagtactccctgtgcttctatcatctgaaagagataggagagaattggtgtattttttttttttccttaaatgtttcatagaattcataagtgtatctgtctgggcctgcgctttgtgttttggaaagttattaattatttaatagagatagtcttattccgattgtctgtttcttctcgtgtgagttttggtagattgtgctcttcaaggaattggtccattttttctaggagtaccatatttgtgtgcatagacgtgttcatagtatttcttggttatccttttaatctccctgggatctgtaatgacattctctttttttatttctgaaatcagcaatttgtgtcctctctcttttttcttagttagcttgtcttactga

SEQ ID NO: 91362 - DNA, 1049 bp, Homo sapiens
tgtactgtaaacctttgccctgtgagggacacgggagtccctactttagttgaaacagacatggtctgtggggttggtgtgcctagtgtgggagtacttggtctgctagcaactgaaccaacacttaactgcgggactgttactcttcccgtggaagttgatgcctttttctgtaaagatttcagcctataatttggagctgttaagcaatatctatcaggtggcaatctaggacctgaatatggcttgattaatggaaaaggggtttgatttctttgccttgcgatatctaataaaaaaatctcttgggggaagagaggtaaaagactggtcagcgtggaactggattgccaactgcacatcatctgcatcaacggtagctttcttagcatggctggagtaaatttttgcatcatctagaattgtggtcacataacggaaggcaaactctaacatctgatttataagtcttggctcatattctgtaattcccagatccttcaggatttgtgccatcatctgtgcatctttcggcatgctcttgggagaagccatcttgccagactccatgatatacgatgatcagacttcttgagctaaatcacccacattaatgtatttcagtcctgattttgacacaagtcctttgcctagtgtggtttttccaacccctggtgtactggtgagcaggatgcttggaagcaacatggtcctccccacgacggctctgagcgccttgctcacccgcccttcacattacgggaaggaccatttaaaacgtgattaaagcaagttctacaggctggaggaaaagaaaaccaggtggcaacttcaatgtacagaaaataatgaagagcactcaacatggtaaattcacaggtagacaatttaacatttaaagaaaaagtttcaaaggtaattgagaggaatgacaaagtgaggacctttgtaaatactttccctaaaaagcaaagataaagttggactattagtttctggcctggcatacaagcttggacgttgtcactacatcctaataagtaaacagc

SEQ ID NO: 91363 - DNA, 1070 bp, Homo sapiens
gtccccacagacccggggtccctccggagttcagcaggctgtggagtcgctggccagccagccatgaatccctgcacagtgcctgtgcaagtcacccacttgcctgccctgtcacgatgctccatgaggccgggtccgctttttctgggagttatcactgtccagcttggtggtttactcgtcctaggtctgtctcctccaaccagaccttaagctgctgggagcagcaggagcagggatgtcctcctggaaggacatgggcacaacggacaatctcatcaggagagaggggacttgcagtggcacctgcatggaaatcaaaagagcaccagctgtgtgctgcagaggagggggtccctccaacctgctccacttcccaccccccatcctgtctgtccagcttggcactgtcttgcagcacctagagacgcaccggcccaggatcagccaccaagcacagagtagcactcactgaagatccaggcactttttggggcacacatcaagccaccccaggtgggggtcttcctacttcacccgcaagggtaaggcctgccctgctgagggtagtcacccttccccagtcccccgggagctggctaggaaagcagggtttccctttaagggtgatgcctgcagcagccactgtggcctgcctggcccagcccccaccccgtggcacctgcccacgcggcacctgcccagggcggcccactgtgctcccggcagccctcctgacgtcaacggcagccgcggggacgctgcctcctctgccacacgttgctcacaaagtgtaggcaaaaggcaggcgtccaattgctgcggatgaggaagagaaataatttcgtttctaaatcaggactcagtaccggtggccaggccccggaaggggcatctgtcggctgcacggcagccactcctgcaatggaggagatggtccagttctccatggggacttggggggctccccagctctggccctgggtgccgaaagccctgagaacaagccatctgaaaattaggattctgcgtcgcctgtcaatccccagaagcccacagcctttcattaa

SEQ ID NO: 91364 - DNA, 1040 bp, Homo sapiens
gagccacaccgtgttcccagagccttgtaggcgcagcaccagctcccaggatctgggaggcagagctcagctgttggactcatgttgtcagggttatctttgcactttgacctaagtagctttccctgtgggcctgtgctctgatcccggctcgctggggaggtcccttctctccctcactccaggggcctgggcaaggtgttgggtaggtggtccagggctcttattggtctgataggaggaatgtgcctgtggcaatgagcaagaggcaggctaaggtgggtgatcgcacccaacccctcccctttctctgggtggagctatttgtttgcttgtctacacaggtggttcctgagctcctgcagggtacccagccccgatcccccacccactggccccactctccctgctggctctctacctgcaggccttggcctaaatggcatgtctcagcgaggcctttgtggcccaccgggtcctcctccccaccacgcctactagtttctcttccatgcttctctccccttggcacttctgcttattcttcttatttcactgttttcttctgtcccagattatcagctccttgagggcaggaatctcatgccttttgttctctgctgtattttcagcacctagaagcttgctcagcacataataggtgctcaacaaatatgcattgatggggagaatgaagaggcatggtccttctcttgtgaagtgtactgtccaatgtgagtcacacttaaggagtaagggatgggtcataacagtttatagggcatagtgaaaggagttattgagagtagggaggcgaaggcttcctggaggaggcagtcagggaagacttcctggaggaggtggcctggaaaattgagtcagagttttatatgcagaggtaagaaaaggaaggaaggatgatggtggggcatgagccacccccctctgggccctctgtagcagggtctggtttgagaaggtcaacaggggcccgataggaaggtcctgagtccagtgaaggatccttgtcttggtactgg

SEQ ID NO: 91365 - DNA, 1038 bp, Homo sapiens
ccctctgacccactcatcctcccacccttcctccttccctctctcccacccttcctccttccctctctccaactcttcctctctcccacccttcctccctcccaccctctctctggccctctcactctcctgccctgtctcccttctttccattcttcctcccatgagtacccacccactgagcatctgcttcttgtcaggtatgttctgggctcctcggattcaggctgctgccctcatggggtttgcatgcctactctccccattttacagcaaggaagcctgagacctaaagaagctgtgacctggggcgccatttccgatgaggatgttatatgatccgcaaaataagaacacacagtttccagagaaagaaaaacaaatggcccatatgcagatgaaaatattttaacctgactagtaatcaaagaaaaaattcaaaagttgttttggtttactgatagattgatttgctcctccaacccaacaacttatgagattgataacaatgagtattgtatataaggttgggagaaaccagacactcttagtccgcccagtagctgtttatatttatacaaagttgaagagtaatttgggaaacatgtcaaaagccccccaaataagtgtctgcccattgtttcagcaattccctttttatgaaattattctctctatatattatattattatgagatatgttaatatttaatatatttattaatatataatacattacatattatatactaataaatattctataaatatatgttataaattttaatgaatattattataatatatattttatgataataaatatatattataatgatatatgaatgtatactatatatatggtataagatatattaagatatgaaatatcttatatagttatattatctcataccttatataataagatgtatcatcaataatctatattattaatctatatataatatatctaatgtatattagatagccaaagatgtttgaccaaggatattcactgagactcagtttataaag

SEQ ID NO: 91366 - DNA, 1058 bp, Homo sapiens
atcctacataggcccagagatttatccacagagagacaagggcagaagggaaaattgggtggacatgtttgctgtggtctaattgctctaagatgaatgaggaccatagagagaactaggtacctcaccacaagatgcaaacatcagccaggaaggacccaggtgcctcctttgccgtcctccgtcctcctgggcagcttctccctgcacggaccagccggcctggtgtgtgtctccacggcactgaacctgtgcagggcaggctctccatgaatatttgctggctgaatgaatgaactcaggggcaacaggaaaaggacaacgttcaagccaacactagggacataaacttaagtgagacaatgaggccagaaagtctaaagtgttttctgtcacttggtcagatctttctttctccttgaagaagccctatgaagaaagccctggaggagatgataatggcgcctttcaccacggaaaggtcaacccacatgtgttcattgagtgactctgtgggccagcccttcgctcggctctgttgatgattacgagacaggcaaacccacggggtactcttggtaagtaggctggaatcaaaacacatgagaaaaattagtgagcattccaaagcagcatgtcattgtatagaaatgttcagaaaaggtttagagacggagtgtgccgggaggccaggcgaggcttcgtggcggcagtggaagtgcgaggcttcgtggcgaggcttcgtgaagtggtgatgagaaacgcttgaaaggcagggaggagaaggtcgggccttctaaacttggagaagataggggaaggccaggtgtggtgacagatcccaaggccagtgcagcagtgaagaaatgtgtcactgtccccttggctcaggcccagccaccgagtcctgggacgtgatctttacatcgcctggttctctggttgatccatctttccctctgatcactgcccttcctcctggggcctttttgaaatctgactcaggttctgagcacacgtttcagcatttctggatgcaatttggtatcatagcgaag

SEQ ID NO: 91367 - DNA, 1026 bp, Homo sapiens
tgtgtatatgtgtgtatgcatgtgtgtctgtgtgtatgtatgtgtgcctgtgtgtttgtgtgtgtgtgcgaatatgtgtgtggctaaactatccctttccttcaagaccttagaagctgaggcctttccctgcagctgctggactcctgctgctgtctgtctggtgggaattagtcacacgtggagcttaaaaagtgagccagactcaaatacccatttggagggctgcctcaagacagagtatccaggggaaattcgctttatggctgggagttagataccagggttgtcactctgaagagctgcacaaagaagaggtgtcttttgtagtttcttggcagaggggcagatagaccgcagagcgttgttgtttttgccagttgtgtctaagaacagcacccttcatgcatcttacagtgcaaactgatgtctaacacgtgcacaccacctagagggaggcctccagagtccacagcctgtgctcctacttgttggctgtgtgactttggcaaattacttaacctatctgtgcctcagcaactttacttgcaatacataaagaacaacagtacctgtctcggggttaatataaagatgaaaccaactgatatttaaacacaaggcctggcccattgtaagccctcactaaatgtgagctatcgtagtattatttattcctccagggggaagtgtgtttttgctatcttcaagagcaacattctggggtgtggtggctcacacctgtaattctggcactttggaaggctgagacagaaggattgcttgaggtcaggagtttgagaccagcctgggcaacatagtgagaccccatctctatgaaaaataaaagattagctgggcatggtggcatgcagctatagtctcagttacttggggggctgaggtaagaggttcacttgaacccaggagattgaagctgcagtgagccatgattgtattgttgcactccagcctgggtgacagaatgagaacctatctgaaaaaaaaagaaaaaaaataaaagtc

SEQ ID NO: 91368 - DNA, 1091 bp, Homo sapiens
aaagaaaatgcaagaagaaatttcttttaacaacaaaaaaatatttactttgttttaaagcactacaattaatagacaacagggcccctgtggggaaacatcttttcaaaatcaggtgttttgtaggttacttttaatttcctattcataaactgatgcttgcagtctagctggacttggaagggtatgagagaaatatggaacccaaagaattacagctaatgagaacagatggaccacaggacccaagagcatgtagatgtgggatgctctctttagctgcaggaagaatggtttggtgaaggtaagagtcacatttgttatgggctgaatgtaggtccccccaaacccccaaatcatatgttgaggccctacacctcaacatgatggaatttggagaatgggacctttgtgaggcgattaggtttagataaggtaatgagggtagggccctgatgatgagattagtgcccttataaggagaggaagagactaccagagctctgtttcccccatcaatccctatgtgaggactcaccagggaggtgcttgtctgcaagtcaggaagagagccctcacccgaacctgatcatgctgtcaccctgatctccaacttgcagcctcctgaactgtgagaaaatacatccctgttgtttaagcccccaacactcatcacatttgtccccaatcagcaacagtgaccttcttgctagttttgctactcctgaacccaaagtgaggctccatggctttcaaaacattcatgctacatttcaccttgcttgttagccattcagctagaccctattagcagtgcagatgaaaaacagctgactgctgtctgtggccaagatgccagaacccataagatgggtttgtcagcagacttctccctgcagaaatcccctgccaccatggtgtgtgaggtctccaccctggcatgaaaacctgggacaattctagggcagcatatatcctcataaccaaatcccagatattccttctgtctttggaactttgcacatcgctcaaaggacacatggccaagggctcacccttactggcattctggaagatcacagcattgctcg

SEQ ID NO: 91369 - DNA, 1042 bp, Homo sapiens
cctagaattatacaaatgagagatgtattacatccatgtaatacataaaacacctcaacttaaaaaaaaaaacacatattttattaaaaatttaagccctttcagagatgttcggcaacacgcctacggtttttccgctcatccccacccctttttctcaagaggagtccaaatttttctgtctactctgttttctctcggcattccatctttctccgggtttttagggagaaactcactacaatttaaaatgagttgtttggcaaatagagagtgctgtgttagctaagctcttgccttgggatgtgggcacacaggtgggttttacggccaggcagggaagaaagcaggttcccctcctggtgcagggcctgtgccaggccccatcttctctgtggctggccctggttcttttctggcctgttctttgtcctactgacctttacctgggaggagctaaaggacacatatgtttccctccaggaccagctccccacagaatgcgtctcaggggacagagacatcctccctcccgtgccttccgcatcttcacatcctggagcccagatttccacgcttgaatttttcacaggttaaatatagcatcggtttattagaatccaaagtcctgcatctaacagattaaactgacaacacttccatcaccaccagggcccatgtggcttgaagggagatgggatttgtacgagtgacggtggaaccccgctcttgacagtttgggaggactcgacacactttgcccatctcctcaccccactcccaggatcatcttctgggctttccaatttgggggttggtgtgaggatttacaagccaaggtaggccgcaggttctctcgcttgtttgacaccttgggcgtttagccaggaaaggactgctcatatacgtgggggtccatgaattaattttacctctagagaaacatcagaattgggcagtagggctccaggcacgaatgcaaacctcacgtggcacaataacaaccccatgaaccaggcagcatggcggatatggtttgtta

SEQ ID NO: 91370 - DNA, 1052 bp, Homo sapiens
gggccggccttggggaggacggcaggctggtggcctgtcatggcgagtgggccccaccaaaaagttaggcggcgtggaatctggtctcagctctgttatgaacgcctcgtggtgcctctggtcagtcctttcctctgtttggggcctcattttctctcatttcaaatgaagcccatctgtaggagtcacttccttatctctaggatgatctgaatctgagcagacacagccaggatttcagcaggggtcttagacggtgtgtccctgtttttctctctttccagacaagagcatcaattgggtggaggttctcagcacgtggtgggtggagaacgtgctgccctagtctcttcacactacccctgtgtacctgtggagcctaaaacacctgggaaggaagcaaaccccagagctccgaaacctccatttccaaaaaggatcgagagccagtctcctagaaatggagcccttagtggtggtccacgctggagacgatgacaaacaattggacccttgtgtccccaagctgtgggctccctggcgatgacaccggagctgtctctattttgcctgtcgggggaatgttccagcgcattttcccttattatgacttgattaaggacacaataaacccttgccatgatttttatctatttgcagtaatatctctcagttctaatttcagagattagcttgttttccaaacattaaatgaaggacaaacttgatcccattgttcatgcctggcgagcacagccatagccaccacctaccattgacaaacacaagctgctggccacacctgcacgtcactgccatgggaagcagccccgagactgttggagtgggaggcagaacattagggatttcaattctgctttattttcaacttgaaatggaggaaaacagacaaaaaacaaataagaaagctaaacagttgcgtgagagctagcaatttgctgggctcccgatgacagacactgcattatcataattgtctcttctacatgataggacagaaaaataataatgtcattttatttatagctggg

SEQ ID NO: 91371 - DNA, 1114 bp, Homo sapiens
agtgtgcacagccttgagggcttggctgtgcaagttgatgtaggggcggagagccagcatcaaattgggtgctgcggagacgttttttcctcctgcttttggttgtgaagatgcccctcgtggcttctgatccctgagccctcggtgatgccttgaatgagggtagccccacatgcaaagggatgccctaggctgcctatcctgcaatgcactgtgtgtgtgtgtgtgtgtgtgtgtgtgtgtgtgtgtgtgtgtgtgtgtgtgtgttggaggccaggttcaagtacaagagcagcagctgctgtctttaccacctgggagaaaacatctttctgaggtgtgtggcagtgtgggaaggtgattgtggatggggtgactgtgtgggagactgtggtgggtctaccctgatgtatctgcacctgaagccaacttcttcctggtctagatgtggacatttcttaaagtttatcctgggtctacaaatgtgaaatcatctgggtattcgtaaaccagccgcatcactgagagcagaggtaaatccagtgctcccacttggtagagttctttgacaatgaagctgtgtagaggtgaacaacaaaacccacaacaaagataaagaaaagaaaaggaaaaatatgcattgatagaattatgctttgtctttctacttaaatggcaaaactcatgtgtcttcacatctggaataaatgtgatgttttacaattaaacctatttacgggagctcaccattggatcatagcatttgctttctgatttttaaaggcccccaaaccattgaatagtaaagagtgctgaatgccatgcagtgaagttcatgatcataggctactctgtggaactcagggatctacggtggcagcatgctcctgggtgagttgggcagctcctggctggaagagggaggcctggcctttggtgtctggctgtatggacttccactcctttgaggttatctcagcatttgatagcagaaggctggtttaaaacattttcatgtgagagaaatgctcttgacccaatgttgcgtgaaaaaagcaggttgccaaatacaataccaacccaacacattcacacacatgcacacattataaag

SEQ ID NO: 91372 - DNA, 1027 bp, Homo sapiens
cacacacacgcgccaggcttctaagcatgcagggctgctctacagaagctacctagagccctgaaagatttgacagtagctttctctcatgaaagtggatgcattgtcattctttaaattaaacaaaatgatgtccataatgcaatattcaagagaatcaaagggtatgcagttaaaagagagtcttcttctaaccccagctcctcagttcttctccctaggggcaagcaccgataccagtttgtagtatagtcttctagatatttatgttggtgcaaaagtaattgcagttttgccattaaattaaaagtatattttaaatattttaaatgagaaatccacactttacactccatgttgtacctgtttttgtctaagaatatactttggatatctgcagtttactttgacatgcatccaaaagttaagatacatggaatgatgggtatatatgtgataaagcaaataaagcggaatgttaaagttttaaactaggtgatgggtgtacaggcaaaattctttaaactttgctgtgtatattacattgtacataataaaatggtggcaaatctatgtatctcagtcatcatcttatatcatgttaggtttcagctgctatatcctaccatattttgttgcacagagctgccttatactttttaagggccacgtttgactctagtgaatgagttaccctctgcatggacattctggttgcttctagtcttttctttgacaaacagtaccatagtgaacatccttctgcacacgcctttgtatagtaatgtccttccacttacatccttgtgggatgcagtcctacaggcggaattgctagctgaaaaggtatgttcaggttaacaaaatgataaatatccaaactgttctccaaaaagatcacacacatttcgcttcccacagctgcgtgggagtgcgcgcgtgatgtctctggccgtcagcgcttaggtaggacagcatcacagtcagcaaccccttctctcgctcagcaggcacccagaagcctcca

SEQ ID NO: 91373 - DNA, 1050 bp, Homo sapiens
gtgttttatttcaatatgtggtaagatacaaattgccttcatactatcatattattgcctttaagtatactgcctggctcagttacatatacactgtatatttatatgcgtgtatacgtgtattgtgtgtacatatatgtattcttacatatgtatgtatatgtatggtacatatgtgtatcacctagtggaaatcagtgttctcacagtcttattcttatcagagggatttttaaaactagccttatatgcatgttttcaagaataaagcagaatgctaacaaagtgcattttccttccctctcattagatatcagatccctttcatatgtagaaaagtaaggatttcaggtatttattctgacatgttgacataactccacatattcagttacctcaatttttaaaatctattttactatctctcacatgtagaatatgattcccagggtttaaaacacacaaggaaattgatcgctgttcaaaaatgtgcagcggtagcccagaggctcaaagtctagaacctcgagctacaggtctcagggaagaagggaattggtcgaacacatccagtaatgccgtggaatattcttttttcctttgaaggtttggcttacagtactgttctcatgatcatgtttaattctatgttttttctaagggctttttactcctctgctggttttttttttaatgaaacagaaagctgctgcctttcagtagcctggctgagtgctgtaaggaaggagagtctacattctggactgctcacttctctccaggatgccttctctggcgttcctcacatggagctggacttctcccctgtatttgcatgcttctctggcctgtgcacactggcacactggggcacacatagggtttccatcagagccgaaggctgcgtgagacttggggaggatatttatttgaagttgcacaaatgtttacagtaagggagactgagacatgggcactcgcagtgcagagctaccctgagcagaggaactgcctttccctcctgtcttccatgtgctccgttctccctaa

SEQ ID NO: 91374 - DNA, 1030 bp, Homo sapiens
cagcagcctcttcccctttgtgtctgagctctgtcccctctgcagggccccagcagacccccaccaggcctgatgtggacagctgttcccaagccctgccagttaatcgcttctgggtttgcacccttgagctgtgtgcaccaggacacccccacctactggaagtactcagggacgcagcctggttcactgacacagcccccagctgcctgaggagtcggtgaagctctggcctttccacctcttctgctgcaagaggccttgcagcctgcttccctggtggaaaaaggaaagcagaaactctaggccttcctgctggatctacactactgggagagccccgatagtgcaaatttaattggcagggattctattaaatatgtgactttatttggggttgctaatgaaatcaaaggcttgttgtatgacttacagtgtggacattaatttttaagaatgatgggatagaaagttagaacggaagagtttttctacctaaagaaatgagaatctagaatttgtgaaagggctgaatgttcctatcttgctgcttctgggacaaacttttccctgacatgtaaaacgcctgcaactgccatgaacaggaaagaaatggaaatggtactgattcactcatcaactccaggcaactttgtgtgtgtgtgtgtgtgtgtgtgtgtgtgtgtttattttgaaataactttattcgcagcctaacactttgcactgcattcagcatgacttagaatttacttttggtgttgtccagctgctgccaaaaattgggtagaatcagattggtattctttgttggtgcctggaattgtagccagtggtacaaaggtgatgttgttccttgctgagacttcgtggaagaaggcaaaactttgatcatctgcccttgcacttgggcagtgttgaaggtgattggagtacaagtgccaatttgcaggaacaattgtaaacacctttgatacaaatgccatcatcccatttttactgattagaaaaactttgctattaataggtg

SEQ ID NO: 91375 - DNA, 1078 bp, Homo sapiens
aagaggctagaatgtggtggggtaggaaacttgccatttaattttaccttcctggagatcctagagtcaaactagtgtgtggatctgctggacacccgtaatgagctgcaccttgtcccaagtgttacagaggtctggaggcctcgggactcagggtcagcttggcagtttccacgtgccttcccccatctatattgtatttttcagtaagggattgcacacagaaatcaaataacagaaggtgcctgtgtgagaaggggatgctgcagtctctttggaggaagaaaaaggtgtgttacagtggttgagagatggaaggtgaacgcagtggttccctggcctgtgtccagagcctgtgaaggcaggtcttgctgccagctttagctggctgggtgcagactggctggggaaagcggggcctgcctcctgggtcttggccctgcagcctcctgcctgccaggtaagcaggggctggaggagagggtcctggggtctgggccctgggcctgggctgcaaacctgcagcccccagtcctcccggtagtgactcctagactggttttgatggtgatgatgataaaaggtctgagaactccataggccccagtaatcagggcccgcactgacatccttctcaagtttgacagcttcttccttttctctcctcaccgccaaggctttctcaactgaatttccccgccctccctctcccctcctccctgcccgccgcccaccccttccctccctttccccttttctgtgtgcgtctctcttgtttcatgttcttgatcagtttcagatgctgggaattattttttttcaggcgggagggggagtgttgctttaggtttgtgggttgggcaggtgtgagaggaagtctgtggttttttttttttttttttttttttttgtactgtaggcctgttgctaattaatgttcctccataagattctgtcggagttgagtaatgtttttgatctttatgcctgataactgcatacttaatgagatttcaaagctgtgagtgcagctccctacaattattgacagatgccttttctttgccattgggttcag

SEQ ID NO: 91376 - DNA, 1068 bp, Homo sapiens
gccccccggacgccccgccgcgctctgccctcttccctctcgcacccatttggggagccgctcgcggagcgcgctgagccgcgccaggtccctacctcctcagctctccggctgcagagggaatgggaagcaaccccggcctggctctttctgtgggtggcgggcggggtcacctgagttccccgggacatcttccgcgtcctccgagcggccgaccgccgggggactgcctggtgtccgccgagccagggagcgcgaacgagtgagcgagccggtcccctcggccaccttagtactaacacgattgattcctcatttcttgggcccaaactgggcacagcggtggaacccggagcgcacagggtctgggtattgtcagatgactgtcaagtccatgttagatgctggcgtttccttctcccctgtttgtgtttcctcgcccccaccccctccttgtactgctgctcccaccctcatctccgcatagcacttagttctgggacgtgtctgagtacttttttgttcctcctttttttttttttttcttcttctttaaccgggagtgtcaactcctgttaagactgagccgatttttttcttttcttttctggaaaacgcatcattgaaaacaaaacaaaaaccacacacataacattattttgcaataatgtcggttgggggcatgttgcctggaagaagggtttctggcccgttgccatccttgatttgatgactgattgatcgcccgtcatgctgctgcctttgatctattcattcccaataaacatcaataaatcacttgcaatagtgaggccaagctctgtgacgtcaggagggccctgtcagtgcaactttgggatttggggcggattgccgagaggaccacatatggacgtgatgtattttgatatgagtaacactcagatgtgcagaggttcagatgctccctgaaggggagggttaagtggggcttcctttcttttcttttctcttcctttcttttacttctcttttgatgttaagagggaagggcagagagtagggtcagggcattggctggtgcccatc

SEQ ID NO: 91377 - DNA, 1094 bp, Homo sapiens
ctagatccattataaccatgaacagctcttcctaatataaagatgatcagcaccccacaaaaacacacacatacatgccctgacgtgcatccaatgacatgagtctccatatcaaagcccacttgcagtgtgttcctggcagtcgctgcggtttgtggttttaatatctcgcttcttctacgctcctggcacctgctagagtgggcctggcttcccctctttaggcacagctcacaccgggagggtaagcccccagcctgctctctgcctaggctgggcacggcacagtccacagcctgggagggagccgttcatcagggtgacataacggttcagttccagaagaaagttcctgcctagggctgagcttcaggcagggtaggttcccaggagcaagtgctgtgagcctgaggccccaggcgtctgaagacaccacaggtctccccctcgtctcctccatcccagcaagcacctgcggtccaatcgcgctaagccaggggccctgctttcagccgggttggaaagggatagaagctcccccatctcctgcccttttctaaagacaggcagctccagcaaaaccctcagccctcaggcgtccctttcgtggggtccccgcccctgttctggaaatgagaccccaggtcccaggatgcagctggcatcgcaggggaagggacttgcccccaccctccacccgctaccatgacccgggagaggccttcccgagggtctgaaggtccgcagagccctgccccaccctagtccaacaaggggaccgcgttttagggacatccctggattgtcaagaaacgctggctcatccggacccccggggagcgcagcatgaacccaggagcaccctgacaccccgaaaacagggaacctggggcccttctcaaactcaaggggaaggaaagggagcctgccaagttctgcttctgcgaggcagctgccaccaaaacccgctccgagggccccgccgggccgccctggcagctggaaaagcgcattcctgctcgcccgaggatgcagaaggcaaccgagtccccgggcggcggcggggcaactgcggaaatcacgcagccagatga

SEQ ID NO: 91378 - DNA, 1409 bp, Homo sapiens
cgttagattgtatttttagtttagattaaaatagcaatgtgcaatttattgttccattctcattagaaaatgttgtcagtaaaaccaatagtgttgagtccagtacctaaattctgaggtaaaacaaaatacacaattattgggagaagtttccagagctattttttcctaacttctgcaaaatcctcaagtcggcttgttagataaattatttaaatttgcattacgtaatagggttgcatgaacattcctctgaatttctttttacatggaatattgagaaatttttcactgccaaaaaaaaaatcattactttgtttcaccaagaaagagaaatgttttgatactatatactttcgttcttggccacagctggattttgaagattgatccaagggactgtattaatttcaggaattgatttgaaagacactggctctgccacttaacagccatgtaaccttgggtaagtcacttaaaccacactgagtgtttccttatttataagactgtataacacccacctagcctgtcctaaagagttatgaggatcagataccactaacatgtttgatagagcctagctgtaaggagctgttactcttttcagtattgatattttgtacatttttattctcattgagaattaagatgaaaattggtgtattagagaaagcatggttttagagtgagattggcctggattcctgttcttaaaccagttaccactttgtgtctgtgagtctcaggtttctcatctgcaaaaaaaaaaaaaatacacaaaatttgaatattacacaaaatctacagaggcattactccctagacttgcacctcatgggcaaggatttcctcagtcatttttgtagtccccagcattctggttggcacattataggtgctcaataaatgacagtaaatctgaatattggttaatgttagttagaccttatgtcttcattgcagctgccaaattagaatattctctcaggctatgtgccaactaagaaactctagactatgaaactccatatacttgtgatatttatactcatttttttcttagtggtaattaataattaccttgggctcagaagattttaaatcaaataaattgtagccaatatagtgaggtaaatctataaataatgtgtaagcagtttccaggtaactttatagacagtttataattcagggacctgaaagttcatctagcttcaccctcttgttttacatctgagcaatctaaaactcacagagacagtgacttgcctaaggtcacacagctaattgagggcactttaggggagggacccttgagcttatgtcccctgccttcttttggctggagcaaaataaatttgtcatattttagaattacaataatctggaagaatggggaatttatt

SEQ ID NO: 91379 - DNA, 1279 bp, Homo sapiens
agaactttgtgagattccggctaaagtaatccagtcacctgctgctgatactagaagggctgagatgtcacaaacaaattttacccctgacactcttgcccagaatgaagggaaggctatgtcttatcagtgtagcctttgtaagtttctatcatcatccttttccgtgttaaaagatcatattaagcaacatggtcagcaaaatgaagtgatactgatgtgctcagagtgccatattacatctagaagccaggaggaacttgaagcccacgtggtgaatgaccatgacaatgatgccaatatccacacccaatccaaagcccaacagtgcgtaagcccctccagctctttgtgtcggaaaaccacagaaagaaatgaaaccattccagatatcccagtaagtgtggacaatctacagactcatactgtccaaactgcatctgtggcagaaatgggtaggaggaaatggtatgcatacgaacagtacggcatgtatcgatgcttgttttgtagttatacttgtggccagcagagaatgttgaaaacacacgcttggaaacatgctggggaggttgattgctcctatccaatctttgaaaatgaaaatgaacccctaggcctgctggattcttcagcagctgctgcgcctggtggggtcgatgcagtcgtcattgctattggagagagtgaactgagtatccacaatgggccatcagtgcaagtgcagatttgcagctcagaacagttatcatcttcatctcctttagaacagagtgcagaaagaggagtacacctaagtcagtcagttaccctggaccccaatgaggaagaaatgctagaagtgatttctgatgcagaggagaatctgattcctgatagcctgcttacatcagcacagaaaatcatcagcagcagccccaataaaaaagggcatgttaacgtgatagtggagcgattgccaagtgctgaagaaaccctttcacagaagcgcttcctcatgaacactgaaatggaagaagggaaggacctgagcctgacagaagctcagattgggcgcgaaggaatggatgatgtttatcgtgctgataaatgtactgttgatattgggggattgatcataggctggagcagttcagagaaaaaagacgagttaatgaataaaggcctggctactgatgagaatgccccaccaggccggagaaggacaaattctgagtctcttcgattacactcattagctgcagaagcccttgtcacaatgcctataagagctgcagag

SEQ ID NO: 91380 - DNA, 1798 bp, Homo sapiens
gggttacatgcatggatttttaaattgcctgccatgcctcttttcctccacctggctccatttgcttttttctctcagtactgtagcagttcaaatggctgcatacttatacctggatgggtactttattaactcaatattagatattttgaaatctggttgtcaggccaaagaaaaaatttttagctcacaaataaggtaataataattcatgctttgttaaaacttctttacctatttagtaaacttgttaaacaagaagagagatttgtgcctctgtgatcctcagtctctgccattcagatagcacagataccttagggcatgtttcagcttaacatttgcttggccaaaaggcatggcctgcctgtcttgagctagatactgtgttaggtgctgggagtacagtgaaaggcatcactgcccttcaggaatccaactcagtgaagaagacagaacgaggctgatgggtatgtcagcagataccgcaggagctcaaatagagccgcaagcaaagccctttcgtatggtgttactccatgaaacctaattaaattgttttttattggaaacctataatttgccaagcgctggggattcagtctaaacaaaacaagcagatccttatcctcagggaatagacagcttagtggcagggcagagattttacccagacatgcaggtaaagtacagactttgctaaaggaaaaatataggacttactaaactatgctgtgaggttctagcatttccaatttgtagatgagaaaactgagacttcaagaggcaaaataatttacccatgatcatactggtagaaagtggcagagcgaggactaagcccaagtttttgaactttaaatccaatattctttccattggaaacagttgcttgaagtagcacaggctctcattctgtgctatattaagtttttccatctgtcagttttattagttgtcattgatctgtaatatttctcacacaaaaccattatccaatatttcacacttcattttttagggtttttttaaaactgtatttggaacagtgccatttataatcaagtccaagtttttaacctaccaattaagagcaatacttagattataattatgattagtgtgtatattaacgttatagatttataccaggaaattaggacattttgttctgcttggcagtagttattagcaaaagaaaatttcaattttagaaaccgtaaatttaacttaaggattttctttgttgaaatttcagtgtgggttttcctttgtataataccacggattttacttttatgcggtgtatacaggtgttctacctaagctttcttcctgccaagagacacacagttcttcctgctctgcctttttcatgagcttccatgcttgctttgtttctgaatataaagcagagtgtgaatagcctgtggactgtatgctgacagacaagtacatgaagcgttgaatatcttcaagaaatcgttttatatgatcaagtcactcaactcgtgttgacataagcttaccccaacttgaattactcagccctgttgttgcagagtgagtttagtaacatggctacttttcgttggatccatgtctcctgcgtttcggagagctgcatattcatgtcagtcataacctttgtccctgtaacctgtcagttaactagaaagaattatacattgcatagcacttaaaaatttgcggccgcttttcctttcttgttgcgttggtagctgacgtttagtggtaaacaaagaaaatgcactgggtgaaaaggccttaggctttt

SEQ ID NO: 91381 - DNA, 1313 bp, Homo sapiens
ttactgatttgcaggagctcttcatgtattctgagtacaaggcctttgtggggcgtattgcagatgtcatctaactgtggcttgcctttctactttcttaatgatgtcttttgatgaacagacatttccagtttaatatagtcaaatgtattaatctttttctttgtgtttaggacttttgtgttcttatattctgaaactagttttgattttttgaaatagtctgttgagtaaggtagacgatgatacagaaataaaaatgtgtgctgattttcagggatggcacatcaactatgcgtgcttaggtattactgagcctcatttactaatatggcactaaagctaaaaaaatctaaacagaaaacattccagaaaggctttcagcagggggaatgacagtttggaatggaaatgataaggttgtctctcagtgtagtcagttattgtatgggatttgtataaatagaagtatattagaaatgatgataatagctgatatttttgagaagattgtttgtgggccagacccggtgtgctaagcattcaatacgtgtcagttcagtcctcacagcagcccagtacttaggaatattactaccccaattttgtagacatggaaacagaggctgggctagcttaaataactttccccatgtctcagagccggggcctgaactcttgctcctaataactgtgtcatcctgcctgtctgtgctacaccagggagatctctttatgaagtgtactgctgctgcatgccagcagcccacaccaaatcagggtgtgaaacagaagcaatttcattatgctcagggattctgtgggtcggtcaggaatttggaaaggacgcagtagagatggcttgtcccatacagtctggggtctcatcagggaaggcttgaaggctggaagtgacccagacagctagggtgacagtcctctgaatgctgcctcagcataggctggtggctgtgctggctgttggttgggcatcagctggaacacatacatgatttctccttgtggactttgcaggtctgctagtccccaaaatgagcttcttagataagaagtaggcaaaagctctgttgccttttatgacctaaccttggcagtcacagcccatcacttccaccagagttacaggcttcagtcttttttcatctgtaggcatcgtgattctttagtcaatgtgttggcttagggaaaaacttaagtctttagaaagcttcaatttgtttaaggaaaatagtgaaggagatagttttatcaggaggaaaaaatatatattttgttttgaagagatgaactga

SEQ ID NO: 91382 - DNA, 1030 bp, Homo sapiens
catgcaagtgaccaaaattacaactacgaacaagtaaacaaggctattaacgacgcgatttcacaaagtggcaggtatttcatcctaccccctccctttattgctatatgtaaattaaagccaggattaaatctactagtcctacattgtagcctcctcacggtgtgctgtgtttgttttgtttttaagagttctggggaaatcccctggaaagactcaattaaagagcagtgaagagagtgcagatcccgtcactggaagttcagaaaatgcagtgtcatcttcagaactgatgtcccagactcccagtgaagttctgggtaccaacgagaatgagaaactgagccctacaagtaatacctcatatagtttagaaaaaatctccagtctggcccctcctagcatggagtactgcgttttactcttctgctgttgtatttgtggttttgaatcaaccagcaaagaaaacctcttggatcatatgaaagagcacgagggtgaaattgtaaacatcatcctgaataaggaccacaatacagctctaaacacaaattaggtggaataatgactcgagcaggaaagcagtagaagaggattccttcaccacagtttcacctttacgctgtcagacaacttcctgccacagaagaagtcgttgatgtgatttttgaggaaatgacagatgtgactttggaaccaaacttgtaataaaaggaattccaaatggacaagcagtaatgatatttaaatattttgagtgagggggagtgggtcaaagaggaagtagaggtgtaatcctgtattaaccctctgtcaccccttcttagtgtcgagtgtatttattaataaaagcttattagagtgtagaaatgccagcaagagttaagaaagggcttttcaggaactattctaaaagtcataaaagggtcacagtcttaagcagagcttagttttcttctcacttgtcaaatgcagactgtgaggcctccagtgagaaatgggaggcagttctgggagggggttttttcag

SEQ ID NO: 91383 - DNA, 1051 bp, Homo sapiens
tcaacaaggaaacataattagagggctttgaaatgatctactgaaatacctaaattgatagaaattaatcatactcaatctaggacatgttcctttactccttaaaaaagaaaggaaagatctctaaattcaaagctagattgtaaataggcattcaagaagtattgtcttaaatttacgatgaatttcttgtgagcagaggacgaaacaggtgaattctcaccagactcaaaccagatctcaattcgtagtaatgctaaatcgtcttccgtgttctcagaggttcttttcagtgtctgtcagaacttggcatactttctccatagtacgtagaccttctaatactctgctaaatgaaaccacacttgttatctgaaagtgtgtgaaagaaacaatgtatgaaaatttacatttgatcatccggcattggaaatagtttgaactatttccaaaaatcccttaggggatgaggggtgaaatttaaaagctcctgaaaatgagtactgctgtgttgagcttttctttcctggggtatattaatttagttatatttagcagaagaggaatataaccaaatgtgactaaaatatagcagaaattcaggttgtttgtaaaaattttaataacaaatagcatttggcaagtctataggattcttcctatctggaaattctattttgttagagtgcgataggacatatggaaaaccaacacaaagtgctttagcattaaaactcaccatcaaatagatgtaatcttattaattacacattttgtattttaattatttcaaggagtgaagaaaacagggtgtttttgtttttgtagttctgattactcatttatgcattgttttgtttaagtaaattctgcctacaagtgaaaaggtcggtgcgctcttctgtgcaccatcctcacggtgctatttccgaatatctgaatattgatttctaacacctggatgaggctgtgaccgatcaacttggaacactgtaaaggttttcgaatgggatacgctgtaggcacgttttaagaagtattctgttcctaa

SEQ ID NO: 91384 - DNA, 1023 bp, Homo sapiens
cgaggttttgccatgttggtcaggctgttctcaaactcctgacctcaggtgttccgcccatctctgcctcccaaagtgctgggattacaagcatgagccaccgcggcctgccatgtgtttaataaattgtatagtagacatctgtatagtcttcatttttagtttttgagtgtgtattgttttttaattattgaaactatgttgtaacaatgatgaaaaattttaaatgaaaaacattacttaatattcattacccttaacaaaaagcagttttcatttttcccttccattcttcatcctaagtgcctaaatattttacttatttatgaccccattatagttagtttttataatctaccttatctgctgttacatactatgctttttccatatatacattttcacaaaacttttataattatgtaagtagttatggttttataatttcatatttttgaagtttttattctcttgattattccactatttccatgctcccaactttggatagttagattgtttataatagtacagttaaatcctaacagtgcttacttattctcactttaaagtggcaatgtagtggtatcagttccttctttcttggaattccctcagagcaattaaggaatgtgaaaaatagataatcaagttccagctttgatgaagggggctgccaaatccagtggcactcagaaagatgctgagagaagagtctgcggccaggcaaggtggctcacgcctgtaatcccagcactttgggaggccgaggtgggcacatcacttgagtccaggagttcaagaccagcctggccaacatggcaaaaccctgtctctactaaaaatacaaaaattagccaggtgtggtggtctactcctgtaatcccagctgaagcaggagaatcgcttgaacctgggaggaggaggttgcagtgagtcgagattgcaccactgcactccagcctgggtgacaaagcgagacttcatctcaaaaaaaaaaaaaaaaaaagagagaggagtctg

SEQ ID NO: 91385 - DNA, 1050 bp, Homo sapiens
tcatccatgtcatgggttattgtgaggataaaacaaggccgtattctaaagcatttttgcagcagtaaaatggctctgtcttctacaggatacattctacttttaggggtaaattgcatggtattagttaattacatattcctaacggattgtgaactttctcatggttggcattcttgtcatgtcaaaataatgttttgccaggtattatcatcacatacaatagcatttctattggagcaaaataaaaagctcattttttaaagttggcgatacctcacatcctaattagtttcagctgaagataatttcagaaacttcccaggcgctagttcccttgtattaggagggttgctgcagaggtgaaatagttgtatattccagtagctatgtttatttagttcacacattatatgcagtttatctttttttcatttaatcttagtgatagttgtgggtgtaggggtggattttgtttttgttttgttttgtttttaatttcagttctggccaggaatgatggatgaactctccgagttgagagaattctatgatccagatacagtggagctgatgaactggattaagtaagaggattttttttaacttttaaaattttaagtgccttttaagagtcactatagaccacatttcgttttgggggttttttgtttgtttctgaatctaattacgaagaaacattcgtccttactagatttttctttaaaactccatatttgaaaataatgtctttctatttaagaaatattctctccagctatatctcatgaagaaaggaaaatacccatttggagaggaaaaccgattcaataaataaatttcaaaccactgacagaaatggcaataaaagtttataatatctgttgaaacttaaaatttgatgtctctgccaattttatgtttattattttcattttaataccattctgattttccactaatggtgacacttgaaagtattctttctggccgggctcaatggctcacgcctgtaatcccagcactttgggaggctgaggtgggctgatc

SEQ ID NO: 91386 - DNA, 1032 bp, Homo sapiens
agaatccccagaagagagctcttagggcctcctgagaaattaactccttgaccgcttacaagtgactctcaggtttccaaaaaaaaaaaaaaaaaaaagaggaaaggaattaaatcagctactaagattccttttttccagggaggaaaaaggaaaaatgcttttcctatattctgggagtcttttcttggtccctagtccctgcccctcacacccctggaagacagaaaatcgtagcgtggtgggaactggaaagtgagtttgtgccttagtattagggtgccccgtgttccttaaactgcatatagtttctcataatcaggaccaaaggtatatgtaaaataattgcgttttcacatcagaagtatttgtgtatcccccatattaagtaataagatattggctatttcagaatcttgtttccatgttttgttgttgttgttgttgttaattctgtttttatttatggtggtatctgtgatttttttccttattgcttttttaagcaaaaacccttggaactgactcatgatcacctgcagtttctggcttgatgatttgttacatgttgctctaggtagctcttttgttaagttcaatacgcaaagcagtggcagtcttttaggttatttttgttagactctgcccctctggaacaatagcaggagaggattgtgggtcttggcctagaagcctggactcaagagctacactgcctgccttctaagacaattccttataaaagtaaacctagcaaaacagtaagaagtttccccaccgttattctggtgaacagtcaaaatcatacaaaacattgttgtaaaaaacatggggctggtgcaaaagtaactgaggtttttgccattgaaagtaatggcaaaaaccgcaattacttttgcactcaatagtttgagtacaaatcaaaaccgaagcaaactcccgttttttttccctgactcgtaacacttggtaacatagctggattcttctgaaaaagtttgatattgtcttctttgttgtctttaaggatct

SEQ ID NO: 91387 - DNA, 1427 bp, Homo sapiens
ggccccctctccactccccaagaggttagtgcttcccggtcctaacaggaatgaggagttgttgaacccactgctaggaagcaaggatgcaacaagatgatgctgagcgtgaacacatctgagaactaaatgtgcttccatgagactggcttgagaagtcttcagcaccaagttcctgaaagcttttctgtggcaggaaagaatgcaacaaaaaagttaaccaccaccatctctctcctcttcaaagctaatgaatacaattgaaacagacaaaaattccagtagcatccagatccttaagccagaggtgcatgcttctttttaagtatgagggtttgttggtcacagtgggagaggtttcaccaccgcattctgacctcctcctcccaaaaggtgctaaacctctctgacctgtgtacattcacaaaccacagctagaattcctccacctaggattaagctggagagaagtaagtaatttaggtttcatggtactgtagaggccaggctgaaatgtcatatctgaaggaagaaagcagcagctggacaatgtttctttgcaaagcaacactcgaaccaaaagatgcctcaatcccattttgatattcattttagtgaaaggatgcatcagacctgttccacatcatgcacatgggaaagggtggttatcattttccttctaacaagtaggtacagatattcggttactacacgtgcacctgtagcagtatttctagaaacatccctttttgttgagaacctcccttgaatgtctgtcacactcacacctgacgggatggttactggattagagagtagatttggcacatcttttcttagtcttttgattcaaattcaaaacttaacagcacaaaccaggtcagagttactttcggttagaatttattgccatttattcctttttataaatttctatagattatactgttatttttatgttattggcctagagctacacgtatatgggtttgtcctgagtccgttttcaaatgaccttgtgatagggaaatggttttgtccatgttcttggaaatacttgtgtatgtacagaaggaagggagggattatttttctacaaagtaatttatgatttctaattttctaatgtgccttggatatgtgccaaatgatggaaaagaaacagtaaactttatgattcttgactgtgtcatggtatttttttttagttgtttggctgcagatgatatgtttctcagcctgtctgctgtaaacatgtgctttgtgtgtgagaaaaagggtccccattgaatggatatacatttttcagttatagatgtgagattgaaacatgggaacttgatcacttagctcattattcatctactgaccaaggcctacttaacccagtaggcacagtgtcccgggcccacaaaaatgtttttctt

SEQ ID NO: 91388 - DNA, 1029 bp, Homo sapiens
aagtgagtatgaaactcaagttgatttctgtgcttttgcccctagtttactccaagctgcacgtaagctgcttcaattgtaattggttatggacaaatctgcacctactaatgtcaaaaatgctgccaccttgtggccaaccagagtgtttcatgccactgtcccaaatatttattttcgtttattttgggttttaggggaaagacttcaagggagattatggcaagagatagaagtgtccctaatttaaccgaaggttctttgcatgaggtaagttattaaacactggcttttaatcatattttctaaagcccggctttgtcaaaagtaatccatggtaaacacgtctccttgatcgtcatcttcattattccgtgcgccgtatgagttagcagcagttaaaactggaattatttcatgggacagtgtagagtacagacttcactgattgttataactaaaagtacatttctgagcagaggagtggaaagtgttacatgtgtgggaaaccacaggtcttggtgcttataggagatgaaacatcccacatttcactatggttttaatcaccaaagaaagaaaacgacagtttgtatatagatgggtaaatgatgtctccaagtatggtgtacagttgctcagacaattctttatgtggccatcttcccactacatttttttatttatttatttgagacagagtcttgctctgtggcccaggctggagtgcagtggcacgatctcggctcactgcagtctccacctcccgggttcaagcattctcccgcctcagcctcctgagtagctgggattacaggcatgtgccactattcctggctaatttttttgtatttttagtagagacgcagtttcaccacgttggccaggctggtcttgaactcctgacctcaagtgatctgcccgctttggcctcccagtgtgctgggattacaagtgtgagccaccgtgcccggaccctactgcatttttaaatcactcagaagcttgattgaaaacctgtgatcggag

SEQ ID NO: 91389 - DNA, 1035 bp, Homo sapiens
tttgccatgttggccaggctggtctcgactgcctgggctcaagcaatccacccgcctcggcctctcaaaagtgctgagattacaggcgtgagccatcgcgcctggccttttattatttttaaatagagacagggccttgctatgttgcccaggctagtcttgaacacctgggctcaagcaatcctcccacctcagtctcccaaagtggtgggattgcacgcgtgagccaccgtgcccagttaattaatgtgtttcaatgagtacttactatatgggggccctcaacagcctcatgataagcatatgatagtagatcttattatggttgagctggttgcatggagtggttgaatccccagcgtggagtccacagagagggcagagcttttacccagtggtaaaagcagagccgggctccccatgcaggcctgcttttaccactgggctttatggcctccaagctccatttgtaattatttctgagctttttctgcccagtcacactaatactgacatttagatcaaaaacaaataataacctattaaaaaagaataaaaacattactgttccttttccctttcaaattgcagaattcaaaaataatggaattgcttcaggtggtaccaagctgtgttgcttcattagatgatgtggctgaaactgaccgcaaggagtatgtcactgttaagatcaggaaaaaatgtaagagtttacgttctttctgtcacgctcaagttgggtatatttagacattcatgagtagttgctggtgttcatttaattgtatatgtaaagtgtaattataatcatgcctggaggagatacaggcaccaaagaaatgtatgttacctcccaatttatcagactatgggtaagctttttttgttactagttttctggttgatggtaatgatgtttcctgaggaaataggatagaaactgtcaacactaccttgaaggttcaggtgtctgcctatggagatggggaacagtctctgggatagtttctttcatgcctcatgttccaaagtcag

SEQ ID NO: 91390 - DNA, 1069 bp, Homo sapiens
gtttcatctctcctcacctactttccctaccaccaagatgattacaaaggaaatgccagagtgcaaatcatttcatccataaacacatagatgagcatttctaaaaggactctcggccaggtttggtggctcacgcctgtaatcccaacacttcgggaggccgagatgggtggatcacttgtggtcaggagtttgagaccagcctggccaacatggcaaaaccccgtgtctactaaaaatataaaaattagccaggtgtggtggcagatgcctctaatcccagctacttgggaggctgaggcaggagaatggcttgaacccgggaggcagaggttgcagtgagctgagatcacaccattgcactccagcctgggcgacaggacgagactccatctcaaaaaaaccaaaaaggactctcaaaaaatttactcctaataattgagtaattccagcatgtggatagcatcttggatgtcacttttcagcacattgcatcaggtaaccagaaagaagtggagagacttctgagccaagaggaccatgataaagataccgtccaaaagatgtgtcaccctctctgcttctgcgatgactgtgagaaactcgtctctgggtaagagggtgctggtggaggctcagagtgccaggaagcaggagacaggcctcctggaccttctccactgtgcgctgtgtgactgcagataaggactgtcctccctgccccccagctgcctctgctgtacagtggagatgataacagctgcccctttggagaatcagataggttagaggttgtcaaagcacttgctcactggcgggctggctgccagggtaggctggttatagggcctgccccagcctcagaaagggggttttaggatgggaggaatgtcagtttttcccagtaacatttttggtttcccattatccttgtcaggctattttgctgggtgtggaggcctaaagggttggtgggggagagactccagggccaggtgcctctgttcctcatgctgggtgagcactgggacagtgccggagacacacatctcttgggtggcatcctgtg

SEQ ID NO: 91391 - DNA, 1052 bp, Homo sapiens
taatttttgtatttttagtagagaggggtttcaccatgttggccaggctggtctcaaactcctgacctcaagtgatccacgcgcctcggcccctcaaagtgctggggttacaggcatgagccaccgcgcctggcctatttatttatttttgagatggagtctcgctctctcacccaggctagagtgcagtggtgtgatctcagctcactgtaacctctgcctcccaggtttaagtgattcttctgcctcagcctcccaagtaactgggactacaggcatgtaccaccatgccctgctaattttttgtgtttttaatagagattggtttcaccatgttggccaggctcgtattgaactcctgacctcaggtgatccgttcacctcagcctcccaaagtgctgggattataggtgtgagccactgcgcctggccatgtggccatattatttaataggcacgtccaaaaagcaagacccctctctctcctgctggttgacagtgggaaattgagaccagcttgtgaaatggctttcctgcccaaaggcctcagataagacagcagggaattgggctctgcaggcatttggtcagaggcttgaggaggaagggaggccacggcaatgtgagtttccatctggaggacaatggtgtgtgtgcgccgcattccacgctggagatggcacattccacatatacacgcagtcagggtgccgccaccatccccatcccccacagggagcaaccgtcaaagcctccacttccaggaagccttctccccacctgacgtcagcccgtcctccgtctcagtgagcaggtcccatatgagacgggagagaggcgcagccgatactgctctgaagagacagccggggttgttgctgaggtgctgggttttgaaggatctgcactgacatctcgtggtgtgtttggttttttccctgcaggagtctgagggatttggagacaggctgttccttaagcagagaatgagcttactctctcagatgacttcgtctcccaccgactgcctgtttaaggtgagataccaagac

SEQ ID NO: 91392 - DNA, 1049 bp, Homo sapiens
tatcctctgtgttaaccccaaggggaagtttctcctgcttttaatgcatatacacctaaaaaaaaagttgagaaaaatcacgtaattgacttcataaagcttgtgttagcacttgaagctctgtgcgccttacccgctccggctcccccgtcatggccttgctggtaagggtggcctgtccctctgctctatgtggtttaggactcagcgaatgctctctacaccaaatgcctccagcagcttctgagggactctcacctggtaagcagcaggacttctgagagggagaattgtggtgcacccccatgcaaatccaagccctttcactgtgcttttcttgccctctagaaaatgctcgccaagcaggaggcccagatgaacctgatgaagcaggcagtggaggtgagggtggggcggagtggctgggaggcacaccctgttgcccgctcacaccctgaatggggtctgttgattccacagatatacgtccatcatgaaatttacaacctgatctttaaatacgtggggaccatggaggcaagtgaggtaggttctcagttattatcacccaagatggaagccttcttctgtgctttttgagaaatttgaaggttcgttaaaatctgttgttaggatgcggcctttaacaaaatcacaagaagccttcaagatcttcagcagaaagatattggtgtgaaaccggagttcaggtaagggtttgcgccacagcggcttggtgtcctcagaggcaggggtgctgtcttctcccggaagcaggccctctcggtggcagaggtgacacgctggtttgatgtggttagttctgaggagcagcgcagttacttgcaaccaaagataaagggctgccctttataggtgactgtgtgtggccgtccccctcccacactgcaccagcacgccagctggatgggagccgctgggcacggggttttgtgcagctggtccccaagtgggcatgtaatttgcccatgtgggttctgcgtgcaggggacatcccacctgcccacccaagggaaccttgccataga

SEQ ID NO: 91393 - DNA, 1013 bp, Homo sapiens
ctttgtctctgggtgtcagcttcagggctgtctcttatagcgcccagccccagcattgtgcctctttgagatttcgttatttttaataaataataagtcttcatttgccccagaaaattgagataataatgtgctggatgcacactgatgctcttattgtcaggaattggggtcttgcccatggtcccagatagtttggttttgtcccaggaagaggccttgagaggaccaggctctctggactccagggtgtcctgtaactgggctgttcttgtgtagtgtcttgaaataaggacatttgccctcctccccagagggcctaggccctgtaggataggacagagtcaggaaccagcagaggcttcagccggcctgacctgtttgtttctttttcagaagagcctttggcaccctcagatcccttttccctgaaaaccattgaagatgtgagagagttcttgggaagacactccgagcgatttgacaggaacatcgcctctttccatcgaacattccgagaatgcgagagaaagagcctccgtcaccacatagtcagtagccgtgctgtcctctgcctggcgtgccctgtctcggttcagtgcagggtgctgggagccctcagtttcctctggaactgcctggtgctgcctcactgtttgaagtcttttaaaaatgtttctctctaactataaaagtagtttaaccgggcatggtggtacaagcctgtcttcccagcactttgggaggccgagatgggaggatctcttgaggctgggagttcaagaccagcctgggtaacataaaaagaccccatcattacagaaaatacaaaaattagccaggcatggtggcatgcacgtgtattcccagctacttgggaggccgaggtgggaggatggctttagcccaggagtttgagactgcagcgtgctatagtcataccactgcactctactctgggcaacaaagtgagaccctgtctcttaaaaagaaaaaacaaaccaagtggtaaa

SEQ ID NO: 91394 - DNA, 1073 bp, Homo sapiens
acatggcgaaacctgtctctactaacaatacaaaaattaaccaggcgtggtggcagacacctgtgatcccagttactcgggaggctgaggcatgagaattgcttgagcccaagaggtggaggttgcaatgagccgagatcgcgccactgcactctagcctgggcaacagagtgagactccatctcaaaaaacagataaaaaaacacaataaagaaattgaggtaagctcatagaattagattagttaacaactatctcagttccaaacatattaaatagatcaaaataaatactgatttaacaactatctcagttccaaacatatgaaatagataaaaatactgatttgtatttcattagtatattggagtgatttataaaataatactcgatggaattaaaattttatactttctgccatggtgaaaaataattttgtatttaaaaataaaatcagattttttcctttttcaggtgatgagctatatttagaagattcagactttttggaaaatcttatgtctactgaaaaaaagactgaggaaatcatgaaggaaggcaagcagtttcaccggatagtgacataccatcgccacctttatgatatccacgtgactgttcagccaaagtataaacacgtttatcctaagaactctgtagtaagaaaaagccatttgtagggtgcttaagcttgtttgtaaaatggcctacttgaagtcctcatgaataatgagggttgactttcatttgcttgaaacttaaggaagtttgtgcctataaaagttactgcaattcagtatttctttatttttttcgagacagagtctcaatctgtcgcccaggctggagtgcagtggcatgatataggctcactggaagctctgcctcaggggttcatgccattctcctgcctcagcctcccgagtagctgggactacaggcgcccgccaccatgcccagctaatttttttttgtatttttagtagagacgggttttcaccgtgttagccaggatggtctcaatctcttgacctcgtgatacgcccgccttggcctcccaaagtgctgggatt

SEQ ID NO: 91395 - DNA, 1773 bp, Homo sapiens
ggaaaattgctcgagccccggagtttgagactagcctgggcaaaatagcgagacaccatctctattttttttttaattaaaaaaattttttttaacaaacaaaagtactaaaaacattgctctgaaccttgtgtttgtatattactatggatttttcagaatatgggagattgaggacatccgttcgttatttgagtcacaacacataattgagaattacatactgttggttatgtgttttagaattttatcttcggtctaaccatttaagcaaaggcatttgtcaagaatttgttaggtcacttaaattagaaacagtaatcgtggctctaaagtttattttgtggtactacttttaaatcatacgctgttctgtttgtcttttaaaaaatttacagattgaagatccaggttgcttctgggttattataaaagggtgtagtccctttttagatcatgatgtcgattatcaaaaattaaatagtgccatgaatgacttctacaacagcacgtgtcaagatatagaaataaaacccttaacattggaagaaggacaggtatgtatctaaatgttctttaatcactgtgtattgaaacaccactcaaaatataaactattttggcaacgatgatgattcaagcttttagagtattttagtttcttacactcagtgccttgtgttaggtttttttttgagatggagtctcgctctgtcacataggctggagtacagtggcaccatctgggctcaccgcaacctccgtgtctcgggttcaagcacttcttctgtctcagcctcctgagtagctggaattacaggcatgggccaccacactcagctaatttttgtatttttagtagagacgggggtttcaccgtgttggccaggctggtctcgaactccagacctcaggtgatccacccgcctcagattcccaaagtgctgggattacaggtgtgagccactgtgcccagccagtgtaaggttctttaggttgcacaagattcaggctagtcatggaagggggtggccgccatgtaaggtccatgtggggcaaaagtagacagaatgtcatctacacccaggcattagggccatccctctggggctgggaaccagggggttatttgagatcccacagaggtgtagggatctcagcaaagagggaatagggtcttcagtgtagggccaacgcctcccttttggttgcatgactttggccaactcagatgtctttgttctccttactccacgccgtggcccctccttgccttcttgcagactcagctctcactgccccttgtcatggttgccacagctcagctacttttcagaagagagtgaatttttgtaatggtataataggaaaaggtttataaactctttatgagaaaaagcagaaataatttgaatccacttcccccaaatcatcattaataacataatttattttagtatatgtgctgccgaagcaagcacaataacataatttgtttccacgccattgactaattgaagaagttaaaccaggtcaattgtttttaaaaatattccacattttgggttgggcatgctggctcttgcctgtaatcccagcactttgggaggccaaggaaagaagattgcttgagcctaggagttttgtgaacagcctgggcaacatagtaagaccctgtctctacaaaagataaaaagattagtgggcatggtagcacgtgcctgtggccccagctactctggaggctaaggcagaagatcacttgagcctggg

SEQ ID NO: 91396 - DNA, 1050 bp, Homo sapiens
tgtgtttaactgtttggggagcttttgtttttgcgtttgatgttttacatttagtttgttttgggtgagaaaatcgtatgattaaatagagcttcaggagacttcagggggccatgggtgcagccacctttccctaacctgtctgagacagaagatggccaggctgcccagacaaggcataataggaaccctggaaagaaagccagttcatgtggaaatagtacgtggaagtggtttttcggccaggggtggtggctcacgcctgtaatcccagcactttggaaggccaaggcaggaggatcgcttgaggccaggagttcaagaccagcctgggtagcatagtgagacctggaccctacaaagaaaaaaatgtaaaaataaagtgctctgtcgtttgccaaagaagaatggaaattaaattgccaaacttattatttaaaaatctcagtcctgcagctcttttgtgcaaagttggcaaatactaattattaaaccatctgttcatttacagaaacttttaaggtaattttggtcatatattgagattgatatttagaaaatcttgaatagaatttgctttacaggtatgttcattagtatccagtatttgtccacctaaggagccttattagacttttttttttttttgagacagagttttgctcttgttgcccaagctggagtgcagtggcacaatttcagctcactgcaacctctgcctcccaggttcaagcaattctcctgcctcagcctcctgagtagctgggattataggagtgcaccaccacgcccacctaattttttgtagttttagtataagagacagggtttcaccatgttggccaggctgatcttgaattcctgacctcaggtgatctgcctaactcggccttccaaagtgctgggattacaggtgtgaaccaccacacctggccaggaggcttcttagacattgttttcctaaactcctacccctaggtcatgaaatgtcaatttcactgatacactatctatgtgccatatccgtgctttatgtatcaaaagagtacg

SEQ ID NO: 91397 - DNA, 1037 bp, Homo sapiens
tttccaaaccatttgcacagtacagtcccgtaagtatatggatgaatctgaccgggcctggtggctcatgcctgtaagcccagcactttgggaggctgaggcaggcggatcacttgaggtcaggagttcgagaccagcctggccaacatggtgaaacccatctctactaaaaacacaaaaattagccaggcgcagtggtacgcgcctgtaatcccagctactcgggagactgaggcaagagaatcgcttgaacccaggaggtggaggttgcagtgagccaagattgcgccactgcactccaacctgggtgacagagtgagactccgtctcaaaaaaaaaaaaaaaaaaaaaaaaacaaaagaatatagataaatctgtataaaatacacagacgtagaggcatatatatatacgtgtgccccgcaccccatctttgctccctttttctagtgtttgactgcatcgctagtgtttgtacaggacagatccctgccctgggcagttccctctcgggtgcgggcgccatgtctgctgtcttgaatgagcactaccgagtggcctgacttctgcctcctgtggtctgtagagacatcagccccatcctcccacccggtgctcctcctcttctcccttcccgggacgatggcattatggaaggaaaagccacagggagcagtccagttctgactccactggcatgccatgttgcactgtgtactctgaactcagaagctgccttcatgggctgtttggtgaccttcccattctccactcaccccagcccccacagtttccttgtggtggtgagtgcatcactcttgcggctggcgtggcatctacactgatgtgaggataagtccctgctgaggccaatgcgccctaccaggccgccctccagccagccccccccactactcaccgaaggctctgggagtgggatttgctgcacacagcagcccctgccccctgtactgccctctttcagagcggcccactgcccacccttcaggcatgattggggcccctgtgtgtgcaac

SEQ ID NO: 91398 - DNA, 1021 bp, Homo sapiens
atccacgtttgttgttgttgccaagtcctcttccattgtgtggatatactacagtgtatttacccattaactcgttgatggatatttgggttgtggccataggccccttacagatatttatgtacaagtcttcctgtggatctgtgctttcatttctctcgagcattacctaggagtcaaacttttggatcatattgtaggtattaagaagctgccatattgttttccaaagtggtggactattttaccttcccatcagcaatgagagttctagttcctccatgtcacttgtgtaaacattcggctaagtgtgcagtagcacctcattgtggtttaaatttgcgtttccctaatgatggttttatatgcttatttgcaatcttcagactttgatgaagcagacattcagattgtttgcccatattttaattgtgttgatttcgttttattgagttttgagagttccttatatattctggatacatgtcatccggatacttgattttaaaagaattttgcctcatctgtttattctcttgaagaacagaaatttaaaattttgagcaaatccaatgtaacagtctttcctttgatggttcgtgttttgtctctgtcctcccaccaggcttttgcctggccaggtagttttagtgctacagtgcgtatgtccaagaagacatctcatgtgtttcacacagatgcttgctgtttttcctcatcaggattggtgggaagtatttggtttaccagagcaggagtcaaatctgtttctctcagattatgttctgtaaaataatttctctgaaggtagaactttggggttaagtttggaatatttcctttaaaatcgcttgactatatttgtcttattagtcatgaaatgtttaaaattttacaggtttgtgttaatgatgatcttgttgcaaagaactatgcttgttatatgtcacctacaaagaataaaaaccttgattatttagaaaaaccaagattgaatataaaatcagcaccctccttcaat

SEQ ID NO: 91399 - DNA, 2364 bp, Homo sapiens
tctgtgtttccctcataaatgattgccgggtaaaacaacagccattttataatgctcatgggttctgtggtcaggaattcggaatgggcatggcaggagggtttgcctttattccacactgtccagggcctcagacagggagacgtgagggctggcattaactaagtgggggcagtgatctgaggactcaggcacgttctggcagttgatgctggcttttggctgggacctcagctgggactcttgtccgaaatgtcctggtatcctttccatgtggctgcttccccacagcgtcatggctgggcttcaaatgtgagcgtccaagaccacagatcctgagtatgtggccttttcgtaatgtcactttagaagtctcacagcaccacttctgggtgggttatgagcccacccaggttcacaggaaaggatcatagagcccacctcttggcaggaggcagagtcgcattgtaagaagagcctgtgtgttgggagatgttgccatggtcttctgagggaaatgtcatctgacaagttgggaaaatactattgtgttccgttattagctggtatgggaatttttagaacattttaattgtttttacaataaaggttgagacaagattttaaaatttaatcccctcgagtaaggtttactacaaattcatattccataaaaatttaacatattaagattttataatggtatttgcttttattatattcctttttatcctattttctattaatatcactttttggtgtagcttttttattaccatttttattttgcagacaaagctgtaaaatgtaatatggattcattgagagattcacctaaagacaaatctgaaaagaaacaccattgcatctctttaaaagatacaaataaggttgtattttaaaaatgttctttaaatacaaagttcatatagtgttaattttcaaattttctcttttgaaatctatctgaaaccaaaaatatgttttctattaaaaaatcattggccatgatagtttccttcatgagaaaatatagtttgcttgtttgcttattttgaaaggagaaagtagctccagcttcttcatgtcgagctcttgttctcggcctagttttctttctacaaaattggatattgatcctccttttaatgaaggtgtgaaaatctgggattccagggcattgtcctagtgaagtgcaagtctaatctgctctccgtccctttgacaagacaggttgaaagtaattgcaggacattttaagtactgacgatctggaatgccagctgcctgccatttggacatttaatgtagtggttatagcgctggcataatcacccaactttccagttttttatctctctatctctgtgtgtgcatgaaagatgtctgggatggttgttcatgagaataactcccatggaattttggttccaaaagaatgtatattatgttgctagcatacacattctttctgaagaaaagttttcttttacagcgtgttgaatcctcagtgtactggccagcaaaaagaggcataaccatatatgctgatccagatgtaccagaagcaaggtatgatttgaaaattcaaactgggtgtggtggcgcctgcctgtagtcccagctactggggaggctgagctggggggatcgcttaagcccaggaggtcgaggcttcagtgagctatgatcgtaccactgtactccagcctgggtgacagagtgagactcttatctctaaaataataataataataattcggtgtaattgacaagagacttaagagtgatgttgtcttatacagtgttctataagattgatgattggaaaatagtccattttcaaagagtggcccaggaaattttggttaaacatattaacttaaaggaaaaatgtgacacctggttggcagcaaagttgactgaaaactggtagtggccctagagtctgtctcctctttgcctttttggacagagttgtccctgtaaggcaggtctgaagattggcacagagtggtcctgatgagagggatggcctcacgtggccagatggcagcacagggtgggtggttacccagggcggaaagagaagaatggtttcgtgagtatcagaggctgggtctgtactttgtcctcttcaagatacatgtcagtgacgttaacaaaattgcagaaaggatgtaatgttgtaccacttcttgaatggtctaagaacacacttcccctcgtgtcgtggactttatgctgtggttgtcatatgttgtacttttacatatatcataaatgctagactctatctcacttttatttaaatagtcaattatattctagagagagttaactaacaaaaatatcttctctctt

SEQ ID NO: 91400 - DNA, 1182 bp, Homo sapiens
tgtcagaaatgacttttatacttaaaggactaagctccagttctcacagaaatgtgcttatgtagataaaccaattcctcagtggtgcttcttaaatttttaatccagaaaataaagatattttcaggattggggtaaaggggttcacaatttttcatttttttaagagacagggtcttgctcttgttgcccaggctggagtgcggtggcacaatcacagctcactgcagtgtccaactcttgagcttaggcgatcctcccaccttggcctcccgagttgctgggactataggtgcacaccaccatgcccggcattttttatttttttatttttgtcgagatggggactcactgtgttgcccaggctgctgttcacaaattttaatgaatttttttttttcatttctagtgctttaagtcagaagtcaaatgagaaacctcttagattgactgagaagaaagaatatgatgagaagaatagctgtgtgaagtaagaattttttccttggcctgaattgtgtattgaaataattataataaaattataaacaagagaaatctacacattttattattaatttcaaacctgcattcccatcaaaaaataaatgtacagtatatctcctgtagggtttgaggttaatttttgcttttccatccacttgggcacatttttctgtttaaagctttgttccagtgtaagtagtcattttctaccttgccttctggattctcttggtgaagtgaacagtgtcacaaatcaaattagatacagttgatcttttggggctgttgatgttctttgggttggtctttgctttctttccagttctctgaggcaacactgctagagaaactgagcagtttgccttgatttcatacttgtgtaatctgtaaaatatttacatagcaattttcgttttgagacaaggtcttcctctgtcatttaggctggagtgcagtggtgcagtcacagctcactgcagcttcgacctcctaggctcaagcgatcctcccacctcagcctcccaagtagctgggaccataggcatgcaccaccataactgatttacatatatatatatatatatatatatatatatatatatatatatatattttttttttttttttttttttttttttttttttgtaggacgagggtctcgctatgttacccag

SEQ ID NO: 91401 - DNA, 1004 bp, Homo sapiens
ccagtaagcggttgtatttctttctcctcgggcctgttccttcatataactcatttggaaacccccaagttacagtacattctggaagaggtcaccccagatgcagtctttcccattccaggatcacataccaccaggatccccttgggaatcctggatacttgggtagcagaggaagtggcggggcccacacccaggtttaagggctctcctagtgaaattctctctcttaatttttgggtgttcaagagaaactgctctgttttgctaagggcttctggaggtggcaaggcagcctggattgggctgagatcgtgtttctaagctggtgccagcttccgcccagcccgtggaaatatgctaggtggtgggtgagtctcaactctgtgtgttgaccctcgcagcattattttcaggaggcttttggactttgacaatgcagccatatgtgctgcggggagtactttcataactggttaagatgtcctgagcataggagggtggagtggtacctgcttgccactcacgtcatctctgatatttaatgtaccctggagctctctctgcagttctttgtctttccttcttctgtgtccctcttgcctactgtgatattcattctttattcttctgttgtcttcctttaaacattttaacatcagcctactttgtactgcccactgattgaagatggaaaattctccgaatatgcccattctttttttcttttctttttttttttttttttgagacagagtctcgctctgtagcccaggcttgagtgcagcggtacaatctcgccttgctgcaacctccgcctctcgggttcaagcgattctcctgcctcagcctcccgagtagctgggattacaggcgcatgccaccatgcccagctaacttttttgtatttttaatagagacggggtttcgccatgatggccaggctggtctcgaactcctgacctcaggtgatctgcctgccattagcttcccaaagtgctggg

SEQ ID NO: 91402 - DNA, 1050 bp, Homo sapiens
gctcacgcctataatcccagcagtttgggaagccgaggcaggcggttcacctgaggtcaggagttcgagaccagcctggacaacaatggtgaaaccctgtctctactaaaaatacagaaattagctgggtgtggtggtggatgcctgtagtcccagctactcaggaggctgaggcaggagaatctcttgaacctgggaggcggatgttgcagtcagctgagatcacaccactgtactccagcctgagtaacaagagcgaaactccatctcaaaaaaaaaagaaaaaagaaaaaacgcgtttacaggaatgaggctttaggaaggagcgcagtttgccatgtgtgtaacccaccatctttatcctggagtccccgccatgtctgtgccttgtgacttctctgtgactgccactggccttacccatgttggggttgggctggatctagaggaaagcagtttcaaatttcttctcctctcagcagaggtgactgtggacaagtcctatctggtcttgttttctcatccataaaataaagatagtaaagtacactagtgattcctgagcttggctggggcccctcagatactctcagggggacctgggtggcagggttgtggcagcacaggtacaggccctcatgtctcataaaccaagcagaacagaacaggcagcagttgtacagctgagccttgggctgtgcagcccctgctatctctgtcaaggaagaactaaaagaatagctcaactgaggaaacaaacacctttttcttcacattcttcttttaactatcttacagattactgcagtttttaaatcctgatcctttgagagctgacggaatctctgatctccagcaggtattacaggccctaaaaaaagtaaaataaaaagagagaaaaaactgtttattctttaaatccttctccttcctccctccagacttgagattagaagagaaactccttagatgggggacttaacctgaagacatccttttagaaacgatcgaatggattgttgcttctgagaaattgttccttgttttttg

SEQ ID NO: 91403 - DNA, 1838 bp, Homo sapiens
gataacctgaggtcaagagtttgagaccagcctggccaacatggtgaaaccccgtctctactaaaaatacaaaaattcgccaggcatggtggtacatgcctgtagtcccagctacttgggaggctgaggcaggagaatcacttgaacctaggaggcagaggttgcagtgagctgagattgtgccactgaactccagcctgggcaatagagcaagactccgtctcaaaaaaaaaaagaccgaaacaaactctcaaggaaacaaacaatgcagtgaggaggagaaaatgttaaagaataaatatccccagagagaataaatatccccggagagaagacattgcatctctaacagcttactgttaaagggatgtaatgttttttctctctggggatattgaaaataggatattttaaaaaggaacaggcagaataaaagattcttggaaattcaaaatatagaaaaatgtaaaaatcactagtatgtttgagacataaaagagaagctaactcagaaagtagaggaaaaaggcaaagagacggaaataggaggaaaaatttttgagggtcagtttgaggtccggtttctgaaaaatgggatttctaggaagaatgaaggaagatgataggacattttctgaagattaacataggaacattttctggacctaatggacaagaatttccagattaagagggcctacccatcacaggcccagcacaactgctgaagaaagagattctgaagcatctaagttgagggaatctaaagattatgaaggcttcaagagagatgaaactggtcctacacactggaccaggaatcagaatggcttcagatgtctccacagtgcaccaaatgagcattgatgtcaaaattctgatgaggtcaggtgcggtggctcacgcctttaatcctagcactttgggaggctgaggcgcagattgcctgagctcaggagttcaagaccagcgtgggcaacatggtgaaatcctgtctctactaaaatacaaaaaattagctgggtgtggtggcatgtgcctatagtcccagtcgcttggtaggctgagacatgaaaatctcttgaacctgggaggcggaggttgcagtgagccaagatcgtgccactgcactccagcctgggcacagaacgagactctgtctacaataataataataataataataataattctgatgaaaagctctttccaaccagaggtccttactcaaactgtggatggagcgtgagggtagagtgaagacatttgcagacatacagagtcttaaaaaaacgtacttcccttccaacctttgtcaagaagatattaaaatatgttctctaccaaaacaaagaagtaacccgagaaagatgaccacatgggtttgcagacaaaaggtgatggtgaaggatgataccaggatagttgctcaataccaagtgcagagcatggcgggtcctgactgcagctagggctcaggactcgagaggacctcacagagctcatggtgccgatgagctcggccatttggaagatcctatccatgtgggtggagaactctattggaacatttgggttttagtgacagttacatagaaaaataagcaaataaaagtctatcttttaaaaagctttacaagtgaagctgatggactggcagtttattaggagaatgaggaggaaaagccacatctttgatccagtgaactttaagttcctgtcaatgggccatctattggatccttttaatttagaaaattaaagcaagaatcttttttttttttttttttgagtcggagttttgctcttgttgcccaggctggagtgcaatggcatga

SEQ ID NO: 91404 - DNA, 1074 bp, Homo sapiens
gtgcctggctttttttttttttttttttttttttttttttgagatggagtctcgctctgtcacccaggctggagtgcagtggcacagtcttggcttaccgcatcctctgcctcctgtgttcaagtgattctcctgccgcagcctccagagtagctgggattataggcatgcaccaccacacctggctaattttgtatttttggtagagatggggtttcaccatgttggccaggctggtctcggactcctgacctcaggtgatccacccacctcggcctcccaaagtgctgggattacaggcatgagccaccgtgccctgcctagcaagaatcttttaatgggagtcttaataggagaaaaagcaacagtcttttaataggaggttggtactgagaaaagatttggggaaacttaacaagttagggcttggaaaatactgggtttggcaatgtgtagtgctttttggggtgaaatgagccatgcaatggagtttttgttagttttctctaccttattttggtttctggttgtttctgttttgtaggctcttcaaagaaataagtttccgggccccagccacactgaatcttactcttggcctcccatagcgcgtggctgtgatgtggttgtcatttctcactgtgaaagcaaccctttgctctacctcctaccagtgttgacagttttgcaaacaggagcctgctacaagtcattaccaagtagaaatggagtaagtcaaagacagttttgcctcacaaccaaatgggttaaatatttattttaaaattatacacctcacctttgaggaaggtcgtctattactcagtttggttttcaaacttccaggccagaaactgtcctgtgggaaagtgtcctttcccattccaattactgatgctctcatactgattctcacctggagcctatagttgtgggccattggctgaggcttttagaaatggatatggaggccaggcacggtggctcacgcctgtaatcccagcactttgggaggccgaggcgagtggatcatctgaggtcaggagttcgagaccagcctggccaacatggtga

SEQ ID NO: 91405 - DNA, 1048 bp, Homo sapiens
ctcccgggttcaagcaattctcctgtctcagcctcctgagtagctgggactacaggcacacactaccacgcctggctaatttttgtatttttagtagagatggggtttcaccatattggtcaggctggtctcacactcctgacctcgggtgatccacctgactcagcctcccaaagtgctaggattacaggcgtgagccactacacccagccagggttcgtcttttttaaggcccctttcaggaggcatttagttcattcttgtgcttaggatctgtgcaggggatgtggagccagactgcctgggttcaagtcctgttgctaccatgtattagctgtgcagccttgggtaactgacttcacctctctgtacctcaagttcctcacctctgaagtgaagcagtgacagcctctgccccataagagcatcttaagagctaaatgaatgcatacgtgtgaagtgcttcattgagactcagcaaatatgactcaatgtgtctaaatctgttttaatgaaattatatcgtcacttttctgacctgtatgatgattatagcagaaacttacggggtgctgcttctgtgcaaggagatgttcttgatgtttcatatggatgctgaattcctaactactgtctggagtcatttgaatttgtctgtcttcgcagcctctcgcagtcatcgtgtgccctgggtggaagaaggcccaatttatttttgaattattgggagaatatagcatgtcctccaggcctcttcatcctgtgctattaacaattgggctccataaagaggaagccaaaaatacaaagcttccaaggggctgtaagtatccttttcaagcggctataaaagttaaagtatccttttcactgtcttccctacagaagacagtggagcctggctgggcctgggtccacagtgacatggcttgtgtgatgacacactcacagtcactagtccagacctacttgtcagctcccgacggttttgattacgaaggcttgatcttgacttacgtctgcttcactgagaaaactatgtcacttc

SEQ ID NO: 91406 - DNA, 1472 bp, Homo sapiens
ttgatcttggctcactgtaacctccacctcccgggttcaggcaattcttgtgcctcagcctcccgagtagctgggattacaggtgcacaccaccacacccagctaatttgttgtatctttagtagagatggggtttcaccatgttggccaggctggtcttgaattcctgacctcatgatccgcctgcctcagcctcccaaagtgctgggattacagacgtgagccaccacacctggccttttccttttatttttgaaagactttctccactctgagaacagaaaatatacaaacccttacattttatgttctgccacactagttcttactcttttgaaataaaaatgaaattaattatgctaatttttcagatgtttgctatattagataactttaaaaaaaatattgaagttgaagaaagggaatctgcaccacatcagattgttgcagttggagttcattggaacaaacatatagaacatctcatcaaagagttcatgaatgatccctacattgtgatcacagccatggaagaggctgctctctatggcaatgtccaacaggtaactttgtgtgtatgtgtatgtgtatgtgtgtgtgtgtgtgtatgtgttggtggggggctgatgaacacaagcaagtaacttttatttcatggcttagtattaaacaattacagctttgatttcatatataaattatgaatgaaatacaattatagttgaatatttaaatttatattgatttcctatacattcttttctattaaaatcccaacacctgtggaaagtggatctggagcacctaaaatattaaaaagtcacattgtttctgtgcttcattaccaggtagtacatctttgcctagaatgtgaaaaaacttcttctttactccaagctcttgattttattccaagtcaggcacaaaagaccttgatcttcacctgctctgtagctgaaacagaaatagtgtgtaaggtgagtccatctccatataaaaaatgttctgtttgtttcaactggtcgaatctcaagtcatcacaaaattactggggtggttgactctgtggcagggaagtaaagttttacaagtttaacatcaatcagaagaggaggtggggtcttctcacagagcatgcaggctgaggcctggatctggggaggagccaggtgcgggggcagggcttttcctctgcagcagcgttccccagggcagggcagtttcgtcttggtggagtattaaaagtatcaatttatagacatgacaacatcttctgtaccctctgtttaagaagattgaggtggctcatgcctgaatcctagccctttgggaggccaaggtaggaagattgctggaagccaggagttcaagaccagcctgggcaacatagtgaaaccctgtctctacgaaaaaaaaaaaaaagaagaagaaaaagaagattgagaagataacagtaaaagatatcatatagc

SEQ ID NO: 91407 - DNA, 2185 bp, Homo sapiens
agtacatctagctttctgcagcagtcagctagaagtatagttatatggtactgtagtcaaccaggactttctagctgatgtgtctgtgtgtgtgtgtatgtgtgtttatacacacacacaagtatggctgtgttattttaaaaggaagcaaaatagtttcagcaaaatactgcttatttcacttgagcaagattttagacataaacaaccgaattttggaaatatatttcagtttataatcatctcattcttaagaattatgggatcagtgaggtagtgccctcacagataaattaaagtgctttacattgacaattattgatggaacggttggcttccagcctatatccctgactgtgacctggcctctttgatttcatctttaggtagtagaaagcagttcaatattttgcttgaagatgcataaagaaatgatttttaacttacaaaatgttttagaacagtggaagaagaagttaagttctggctctcaaattatattaggtaagtgttttaatttctacttctatttagtgaaggttgagctactaggaattctatctttaattcatttatatatctcatctccagatttctcattattccccaggtttactgagactttattagcaatgttaatttcaaaatgaaaaattaacctccactaagattttgatgttgaggtaaatctctcaggtcagtgggcagccaccattagtctagacattctccctagagttatagcttgaggatcactatcatatatatgatatatattatcatatatatatatgataatatatatcatatatatgatagtgatatatatgatagtgatcatatatatgatagtgatcatatatatgatagtgatatatatgatagtgatcatatatatgatcatatatatcatgatagtgatcctcaagctatatatatattcatgtatatgactatatacatatgactatatatagtcatgcatgattgctaaatttaatattaaaaatataaaagtcaaaatatatagaataagtgaaaaacatatgggccgcttggatttgtaataagagacatttttcaggctaagaaggagaccacttttctctggaatttaagcactgggctgtggcattttggggaaaaaaatggggaagaagtttctttgcatccaaaaaagtaaaatgtgatatggaaatgcactgcagtgtggccgtgggaactgccggttaaagtaagtgcggtaactccagcgcgtgtgacattgtcggactccctctctgcagccctcacagacgactgcgtcccactcttggccatcaccgatgccacgtgtgtgattcacttcagtttccctgcctcaccaaaagtttttggtggacgcctgtattgcatgtctgatcattttcacgctgaacaggtttggtgaatttttattctcttccatattccactggcatcttctgtgtcatgataagctcagagtccacaaggtttcctcagtcagactgggatagatgatccacttcctttattcacccccaattttcagggttctcctgcagaacagggagataagaaagccaaatctgtcttgctgctgacggagaaagatgcgagccatgcggtgggcgtcctgcgctacttggagcgagcggacgccaaggtccccgcagagctgtacgagttcaccgcaggagttctggaagccaaagaagataagaaagccggaaggcctctttgtccatatctgaaggcttttggtttttgcaagtgagccagtaatttgtttcttattaaactgatgtataacctgcagtaaggtgcacagctgttgcaatgtggtgaattgtcatgtatctagaagccaccacccactctgagggagcagtctgggggttccctcgcactcttccccacgtgccctcccctctgcagggctgtcagtgttgattaactttgcatgattttgaactccatagaaatggcatcgtggtatgttctctttcgtgtctggcttctttctctcagcctcatgtctgtgacattcgtctgtgttgttgtgtgtatctatggtttgttttatagctcagtgttctgttgtatggctgtatcacagtgtgtgtatccattctcctattgatgggcctgtgggtggtttccactatcaggctatgatgtttga

SEQ ID NO: 91408 - DNA, 2121 bp, Homo sapiens
gctccctcccttcacacagagcgtctctgccctctgcacactgactttttcctcacacacaggtccccctgcctactctaacctgtgaagggctgtcttctccagcacacacaagctgtggcctctctgtccacttctggattgcctaggtccctgtaggacagtttcatccctgtaaccctggaggctgatatacagtagctcttaataaaatgcatcttgttacctgaaaaaagatcagaaagtttcaagagacagcagtgctattttaagaagaatttctataaaagtgcagttagaaggtaaacaaggaacacttatacctaataatgaagttttaaaataatgaaatttgcaaaataaaaaaatcttccattagatttaaagtgaaactaattctttatgactgtgtgaggtattggttttgctttgcttttttggctagcttcctagttttttctaaatccacgttgctaagctttggtttcttaggttgggtactgatttctgcagatacagggaatgtgtacatatccggtttagactaagtttgtttcttggtcatgtttactatatatgtttcagataatacctttttatattttgaatgcaacaaattactttggccgtatagttgataaacacatggatctttatgcaactctcaatgctgaaatgaatgagtattttaaggattctaataaaacaactgtggaaaaggtggagaagtttggattgtatggattagcagaaaaaacgctttttcacaggtaacacatctgtttacttcatctgtaaagttttgaagcatgaggtaactaagtggtgttgagttccgattttgacctctgtccatttgactgagtgtgtatgtgagcctggtgacagcggggtgtccccccagatgcctgctccagttctttgtgggaaactcttccccaggctcctgagcccagtgacaccgtgacccattgagccatcactgcgtgcgacatacacatacatctttaactcacttaattcttgccaagttcctatcaagtgggcatcattcccattctacagataagaaaacagccttggcgatgttacgaatgtggtgtcaggtcagctcgatacctggcatagtttgttccaacctggtcagtctgaatcacatgctcgtttgtacccacttcccttgaatccacacctggcaccacttggtgatagccttgaattcagaaactttgaaacttgacaggtgacgttgctcatgcctgtaatcccaacactttgggaggctgaggtgaatggattgcttgagcccaggaggtcgaggctgcattgagctatgatcatgccactgcactccagccggggccacagagcaagaccttgtctctacaaaaaacaaacaaacaaaaaagacaaaaggaaaaaaataaaaaaactttgagactttaatttgctatgttaatttttattatgttgttagataaaaggatttactcttattcaaaagtacatgtttttatacttatgtatactttaaataatccaccacttgaatttttgaaggccttagttttttatttctagtatagagtaaaatcatggcgttttggagtctttttatatgttttccatttcatggtaatttgaggcaaagatgatcctttctggaatctctgcgttgaaccgatgccccattgctctccagggttcaggtgttggaagtgaaccaaaaagaagacgcctgggccctggatgacatccttgtagagttcatcgatgaaggcaggacggggctcgtcacaagggaccagctgctgcatctcccagaacatttccacacacttcccccgcaggctgtggagtttattgtctgtagggtgaaacctgctgacaacgaaatagaatggaatccgaaggtgggtgattttggctttttatctattgttgacttttagaatatatttaaccgagaatatacacagaattgaggcctgtctggatttacagtgtcacgtttgggcagggaaagtgcagtctgcttagatccccacggtgtgtgaacgtcccagctgaaccctcggagaggtaccaggcagctgcaacactgtcttcaccactgtcctt

SEQ ID NO: 91409 - DNA, 2026 bp, Homo sapiens
aggactccatgctacattctctgatgctgacagtttctaactttctcattcaccacgcacttaactgagcacctgccacgtgccaggagcagtgctgggcactggggttccttctgtgagcaaagcagacgaagcccccatcctgcagagcagccgtgggagggggcgggggaaagggggaggggaggacacatgacaaggacatgtgactcacgggcctccgtgtctctccacggctgctggcaccaccctccctgcttgttccccaagagctccactcctccactcaaagttctgctgtattagacttaaatcttactatgaatacttaccagatttaacagagtcaatttataaaaacttttgctgaatgttatttttatgaggttggaaaagttttaacatgttaaaagggagtttggatgtaaggtttaagactaagcagaaaatggttttcagaagagaaaatatggattacaaatgcaggtaaatgaggagatttgggcatcttagttgatgttgtgatagtattgtgtttgtttcttgttggggggagaaaagcagatattttattaagcagagatttaaaagagattgaagtaaaaaagaaagcccacctggcagatgtgtccacactgcagcacgtgtggcagtgaccacggcggccagagggaaacagacccaccctcaccatctccacccgttcctgcccccacccattttgagcagagagaggctcctccacacattccccggtggacacacattcctggggttcacctaggaaggggccccagccagggcaggcctggagcaccccccaccctcaccatgggagggacagcccctcctatacccacactgccaccaacagtgccaggctgttgcagatttttatgttttacttaattttgtataaatggaaatggatgaggatgtttggttgcagaaaagacgaacagaagaaatggcccagaacaggattcaggtccttggcttaggtccttcccatcaggcagacgctgagcctcaggaggtaaaagtagttgagaaggaatgagaaagatgtacgaattatgcatctgactaggggtttatcccagatttgcaatttggtcttgactaggggtttatcccagatttgctcttgccacccccccaccacctgcccatatttctgtggcatggggtgaggcctggatgatttggatggaacctcaggtaggaagcaatccagatgctgccatggaaagccctgcacgttgtggcaagcgccgaagtgcagccaacgtggcaggctgaatgaaccagagaggccctgtgggaatgtctatgcttcagttaaaattcagagtgattactgctaatgttcaattttttcattgattcaaggtgcacattacaaacctttccagtttaaaaacctctgtcattgattataatgttcgagctgaaattttgtccatgggcatgggcattgataatccagaacacatagaacaactgaaaaaattacgcgaagatgctaagataccagcttgtgaagaaagcctaagccagaccccgtaagtggatttctgtctcctttttggaagagttgttttttggaaatacaactcacaagtgttaaggacatgttttatgaaagtagaagagttggctgggtgcggtggctcacacctgtaatcccagcactttgggaggccaaggtgggcggctcacgaggtcaggagatcaagaccatcctggccaacatggtgaaaccccgtttttactaaaaatacaaaaattagctgggtgtggcagcacgtgcctgtaatccctgttactcgggaggctgaagcaggagaatcgcttgaacctgggaggcagaggttgcagcgagccaagatcatgccactgcactccagcctggcgacagagtgagactacgtctcaaaaaagaaaaaaaaaaaagtagaagggtttttaatgagtctccatgtacccatcactcagttgtaataatgaccaagattttggaaat

SEQ ID NO: 91410 - DNA, 1029 bp, Homo sapiens
gaggccgaggcaggaggattgctcaagctcaggagttcgagaccagcctgggcaacatagcaagaccctgtctctactaaaaatacaaaaattagctgggtttggtggtacaagcctgtagttctagctacttgggacactgaggtgggaagattggttgagcccaggaggtttaggctgcagtgagctgtgattgtgccactgcactccagcctgggtgacagcaagaccttgtctcaaaaaaaaaaaaaatgacaaagataaacatagtatgatctaaagttttttagttttttaccttaataaaaatggatacctataggattagaatacagggtagtttccctctactttcaagaaaaaaaaaatttcccatacttttaagatacttttttagaaatgaagatgtcattaaactttagtagatttaaccaaaatgaggtttggtggcttatgggaagcactgactttgagccccagccctgtgtaaaggctcccacagccccctttcccactgtagctttgtggttaagggagcttaacatacccgtggtcacgaacacagagcatacagcactgcgaggtttcacagagagcctgctagaagagaccccatatcagacagctcctggagaacaggggatcctgacaggtagagagggaatggcgagaatatttcatgctgtgacccgcagatctggaagccacaggacttggcggttggcagatgttagggaacgtgggtctgcaggtctgagccctggtgcctggggaatgctggtgcggtggacagtgacaggtggtttccaggcacagcccacagcagaggaggagaggctgaggtgggctgtggaggtgccagtttttaaggttactgaaagtctacgcctagggctcaggaaagcagctggggaaggctcttggtttgctgctgtttgaggagagtcaaagctcagtgagtgtgaggaggaaggaatctacctagcagaggaggatctatcgaaggagaagagggtgggcgactgcaca

SEQ ID NO: 91411 - DNA, 1642 bp, Homo sapiens
ctagcttcacggctctgtctttaggatcagtcccagctctgtgatcaggccaggccaccccgggtttcctctgctcgcctcctctcagaagggcttggggattgtgctctccaaggttcttgacgtcactgggtcagtgcactcttttcctgaggccactcgatggcaggcggcatgtgacaccgaggatggcgctttctcagcaggagtctgtttgtttctttgccattgttttctataccatgaataaaccacagagggtggatctgttttccgtctcaggctactgtgattccagcagctgtgaacattcttactccggtgtttggatggaagccttgcctgttggagattgagaagttcacattgcgttgtttgagaatatgtcatgtccagcactggctcctcgtgcgtgctggccgctgtccttagggcatcctggcaggtcaaacagctccagagaagcctgcatgtttgtatccaaggccagccactgcaatgaggttctttttcaaatgagtgacttcacttcctggtcattgaattttaatacttgtcaaaggctgtttttattttaaaataaaattttaggccaggcacagtggcttaagcctgtaatcccaccactttgggaggccgaggcaggtagatcacctgaggtcaggagtccgagaccagcctgaccaacatggtgaaactccattcctactaaaaatacaatattagccgagtgtggtggcgcatgcttgtaatcccagctacttggtaggctgaggcaggagaatcgcttgaactcgaaggcagaggttgcagtgagtcaagatcataccattgcactccagcctgggcaacaagaacgaaactccatctcaaaaataaaaattttaaaattttgtttacctatgtgatggttttaattttttctaactgttctttgcagctagatactagggttactcaatttacacttttatgtgattcctcatctagacgttgcataaggtacaaaaaagtatatatatatgtgtgtacatgatggagttacatataaataacctgtaggaaaatatgaccttgattttgtgcagaaactttatctggaaacactgaaggtgccttcattagcagaactgcacagccgcctctgaaaaggtacgtccactcggcatggaggagtcggcgtcccttacccagttaataagatcaatgaatgcgcaggtctttcttcttctagcttccacccacaaataaaatggttccaaaaagaagatgtcgtcatcttaaagataagaataaggaatgtaaaggactacaagtgtcagtatttaagggatagagtcgttttcaggtaggtttatgtatagtcatataaagtaaaatagaaataatttttagcattttaaaaggctgactttatttctttttataaacccagtgcttgggtgggagacaaattttacctggctgatctggagctgcggggcaacataaggaaagatgactgccaatgtgtgattagaaacgatgaacctgtaatcactctggccaaagagagaagggaggcatggtgtcacctactcagacagagggtgagttgggatgcactcagcgggtggtctttaccctgcgtgtgtcatattca

SEQ ID NO: 91412 - DNA, 1700 bp, Homo sapiens
gttctgagggcagtgagggacaccatcacccacttaggaattcagccttggtggaagtggaccgttcatgtcaagccctgagaaatcagttttctctttgtttatcttggtgctaaacgttctggtttgagtacttttcaacccttggtgataaacacaccttttaataacacactacagatattcttcctagaagaataaattatttgtaagcagaccaatttgacctgctcatttcttacctaaaataatgaaaatataagatacatagagctggaacccaaggcatttttttctgcattgacccaaataatggggggaaataaagatttgctgattagtctacacttatttgttataatatcttactcctttagtagtgaattctaaaaacctgccgtacacagtgacagaggtggttgaagacagtagcagcacttcagaggatgacgacagtgagagtgaaagagaaggtgaatgacgtcctcaagagcggctggaagatgttgaacaaaaatggatattgccatgtgaccgacagttaagaaaacagtcagtcataaccaaatctttttcttttcttttctttttttttttttttttttttttttgagacagagtcttgctctgtcggccaggctggagtgcagtggcatgatcttggctcactgcaacctctgcctcacaggctcaagcaattctcctgcctcagcctcccgagtagctgggattacaggcatgtgccaccatgcctgaccaatttttgtatttttagtagagacagggtttcaccatgttggacaggctggtctcgaactcctgacctcaggtaatcctcccacctcagcctcccaaagtgctgggattacaggtgtgagccaccacacccggccaaccaaatctttctttacctcaaggataaatgattactgtcaccttgtggtgctggacttgataacggtgagaaattcttcattgacttaaaaataggctgatgataagaccatcaaaggagggtggacacagagaaacagcaggtgtggtctgattccgccggcttgtctgtcctgtctggcgcctctcgccactcaccctggcagagcagacatgcatctgggtgatgaaatgcactgtctggagtcagtccattcattttttttcacctagacctttgctacattgctacaaacctgatcttacacatataaattgaggtttctaatgtacacacttagactcagcaactgttgaaccagccctttcaaccatgagatagtgggatttaacataaccatctatgtgaattgatagtgttagcattcttggatagtgatagctcctcagagtaagttgacttctgatgaagagatagtccagggatagaaattggattgctcagtaagacccaggcctttccggggtgaagctgctggttctaaacaatcccttggacctgcagagtcctgagcaaatggcacaaaggttgctttttagtggaaattcacaagggcctgtggggtgcctggaggtgatctttgaatgcctacatgtcgtgagccctgcagacattcgccaccccatctgcattgtggctgcagcactggggggggtcaccaggtttaggggaggagtgtatgtagtcatggccacacccagaggctggcttttgtgctttgggtttctttgttgactgaaaaagc

SEQ ID NO: 91413 - DNA, 1032 bp, Homo sapiens
gtgattttccttttttgtagctaaattgggcaggctcttgggaagtagaaagttctggtgtttttgctggtgaaggttttgactgtggagctcttctaacacccatatcagtgtctgtttctctgcatgtggctgctgccctgttggtggagctctgggggcagagaccaggccgccgtccagtggcgccccgtgcgcaccagctgcctgctgtttacacccaggtgcgccgagtctctttcatacagcacagcaaatgataatagctagtgacaatgtgtttcctgtgcactcgtgaaaatgcagggaggacaactgcatgcttagatctgtttcttttttcagacattcaaatgttctaatatctgaagctaacattttgtaggatataggatgctgattatgtgaacaattagtcattggttttctgtactgctatgaatatgtctgatttcaagttttggtcaaatatctaaaatgcaaggtgaaagtgcctttgtctctatgcttctaaaatcgctcatgcttagttgtggtatggatgtcttccgcagtgtatcatcaataaaatttcactgttttcacagaaatgttgctttttacattttttaaacagtactttccctgaatgccaaacacagaataaaactttactcaccacactttctggtttgactaaaacgcccgtgaaggctgctagggagccagcgatgctgactggcaatgcaggcgaccctcgtgatgagcacaccggctgtggagggttctggatggaggctcagctcttgccattcatcctggcagatagatagatacatggcacgcacatcacaggttcagcacagggcgccagtactttacttttagggtaggggagagtgggtgagaaacatttgtactttaatatttttgtatatttatttactttttgagttggggtctctgtcatccaggctggagtgcagtggcatgatgatggctcactacaccctggactccaggctcaggtgatcctcccacctcagcctcttg

SEQ ID NO: 91414 - DNA, 1495 bp, Homo sapiens
gccaaggtgggaggatcgcttgagcccaggagtttgtgaccagcctaggcaacacagtgagaccctgtctccaaagaaaaaaaaatgaaacaagaaaaatctatgaaaaatatatgtgcgagagatatcagaactgggctgggtgcagtagctgacacctgtaatcccagcactttgggaagccaaggcaggcagatcacttgaggtcaggagttagagaccagcccggccaacatggtaaaaccccatctctactaaaaatacaaaaattagccaggcgtgatggcagatgtctgtaatcccagcaacttgggaagctgaagcaggagagttgcctgaaccggggaggcagaggctgcagtgagccaaggatgcgccactgcactccagcccaggcgacaaagtgagactctgcctcaaaacaaatgagagccaggtggacctctttggttacagagacgggccacaggtattcgtgatgacttaataaaatgaataacaaggtggctaactggatcataaactatgctgtgaagagtaaactccactctaaaatacgatattttaaaagagtcaagtcagattggaactagaaggcatgcccctagcatttgaaagagttacatctaattcattaaaaaatccaaagccactcgtgactctggggctgcaagcttaccttgataggcctttccagctctttccttgtaaatctcatcacgatgagtcctagaatcgtcaggccataaaacagccatgcggcaaagctgaaataattgactaacgagtttatgtcaccagggatgatataaatcgttgctatgataccctaatagaaagaagaatggatttgtaggtcattactacaaaacactgttctcatgtcacagaagaccgaagaagcagtttttcttgtgaataaacactttagcatgaaacgaacttctaggcattccttcatagttggggttaaacctgactttggctatgatagctcttctctatgaagcttgcagaaaagacctgggaaatttctgaatctttgaggttgtgattttaagcaagggaaaaataaaatattaggttggtgcaaaagtaactgtgggtttttttgttttgttttgttttgttttgttttgtttgagatggagtctcactctgtcacccaggctcgaatgcagtggcgtgatctcggttgactgcaacctccgcctcccaagttcaagcgattctcctgcctcggcctcctgagtagctgagattataggcaggcaccaccacacccggctaatttttgtatttttagtgagatggggtttcgccatctcacggttttaatggtaaaaaaccgcaattacttttgcaccaacctaatatgtatgaatattataccagcttcataattaagaattttccacacagagagttttcaatgtgggctggggccctggattagaagctcaggtctagtcttggcctgtgttagttgtgtggc

SEQ ID NO: 91415 - DNA, 1059 bp, Homo sapiens
tgttgcccaggctgaagtgcagtggcgtgatctcagctcactgagccttctcgcctcctgggttcaagtgattctctgcctcagcctcctgaatagctgggattacaggcgcctgccaccacgcctggctaatttttgtatttttagtagagacagggtttcaccaacttggccaggctggtcttgaactcctgacctcgtgatccacccgcctcagcctcccaaagtgctgggattacaggtgtgagccaccacgtctggctcaaaagatctttaaaaggtcatttttatcagctgactctcattagtatttcctaatagcccataattgtgttttgtgaggtcttctgtgccaagtttttatcttcctcttttgattttcagtttctaagctgactaaacaactaatgctcctggaggcaaaaacccacggccaggaaaaggagctggcggagaacagggaacagctggagattttacgtgccaaatgccaagaactcaaaacacactcggatggcaaaatcgcagtggaagttcataaatcaattgtgaatgaattaaaaaggtaaggatttaatgttttttctttttttttttttttcttttttcgagacagggtcttgctatgttgctcaggctggtcccaaactcctgggctcaagtgatctgcccatcccagcctctcaaagttttgggattacaggcatgagccactgcgcccagctgatttaatgactttttgagtataatgagtcactctgcctgtggttataggcagaatggagagaggttgctcagttctttctgggtttcttcacctatggtcatgcacagcatagtggcacaggtgtctgaaagtgagactgggactttttttttttgggacggactctcactctgttgcgcaggctagaatgcagtggtgcagtctcggcacctgtaacctccacctcctgggttcaagtgattctcctgcctcagcctcctgagtatctgggattacaggggcggctcaccacacctgcctaatttttgtatttttggtagagacggggtttc

SEQ ID NO: 91416 - DNA, 1031 bp, Homo sapiens
agtcccagctacttgggaggctgaggcaggagaatcgcttgaacccgggaggtttaggttgcagtgagctgagatcgtgccactgcacgcgagcctgggcggcagagtgggaatggcttcgggcaacggagctcattctgaccgcaggaggtcaagcctgtgcgggtgttgtagatgcctcctgtgcctcctgcatgcctctgggttcctcatttaagtggccatatagatccctgaaattggaaggatccaaggagagaaatgttggttgttctgggatcctgagctgggagagtcgttaaaaaacaataacaactgcaaccaaagaaaccatttcaaaaaagtataacttcttgccatttaaaaattttctggttgtgtttagatgtaagaaatatattaaccttcctttactctctatcttcagttggatataaagtacctgtcaccattgttgctggcttatgaagatatgatgaaagagaaggacgagctcaatgccaccctcaaggtaggctggcaaatgtcccagaagacacaagatttataaaaatataggaccgcttcaaattttataaaaacattttgaatgtaggtatacccagcatattatagataaccaaatgtttattagaggacagaaaggaggaaggaaggagtgtggcagggtgggaggcagggaaagaaggaagaggggaggaagtaagggagtgattggcagagcaggaggggtggatagggagcgaggggagaggtatggagggtcagagcagtgctgcatgagaagccatggctttctggacagccagcccatatgggctgagatcttggggtgcagggaagacagcaggggggaagtgcttctttcctgttactgtgcagctgcaaataccaccattagaagggacatttgggctgggcgcggtggctcacgcctgtaatctcagcactttgggaggccgaggtgggtggatcacatgaggtcaggagttcaagaccagcctggtcaacatggtgaaaccccgtctcta

SEQ ID NO: 91417 - DNA, 1059 bp, Homo sapiens
tatttagtagagacggggtttcaccgtgttagccaggatggtctcgatctcctcacctcgtgatccacccgcctcggcctcccaaagtgctgggattacaggcgtgagccaccgcacccggcctctgtatgatttttcaaagcacatattcttatgtcatctgaaacaatgactattcctttccaacttgaaatttttattttactttattgtacatgcaaaaacttccacaaactttcaatataacgttaactattcagtgttaaaaaacgttgtaacttttattcattcacacacacagacacacatacacacacagacacacacgcacacacagttcattgcctctgagcgtgaaagaggggagaaaagcaaacgatttgcaatttaataaaatctggataaattggatgttatttcttatagtataatattaaatttttttccctagttgctgcacctgaattactttatctgcgaaaacaagctcaagaactggtggatgaaaatgatggattgaaaatgactgtccatcgtttgaatgtagaactcagtcgatatcagacaaaattcaggcatttgtccaaggaagaggtaacgtttccgattgtgaaaatcagcttttcagatttttaagcctttactgttgaattgatttccaatcttgagaggttcttatttattataatttgatgtaagaaaagctctgtccaaggcacaatgtttctaaggaccattctgtttcttgcctccttcccttccttcttccccgtaataaaggcaataaagactgtaaaacattgggacaatacagaagtgtacaaagtaaaagaggccggatgaggtggcttgtgcctataatcccagcactttcagaggctgaggcgggagaattgcttgagctctggagtttgagaccatcctgggggacatggcgagacagtctctacaaataaaaaatttaaaaaaattagctgagcatggtggcgcatgcctgtagccccagctactcaggaggctgaggcaagaggatctcttgagcatgggaggtcaagggtg

SEQ ID NO: 91418 - DNA, 1077 bp, Homo sapiens
gttgggctaggcctcattctaacctgccttcttccctgctggcctgagggattcacccaagagcagagcctcttccttctcacacctttgcttgaaagccctgctggctcctgctgccctgcaagatgaactttccatgccacatcacaataggcacggcctcctgcagctctggcctccctttctggcctcccctcagtacctctcttcctgccacccgctgtgacttcatcaggccacttactgtttcctgtagaagccattcccttcccagggaccaaagaacatggcaccaggcctgatgtggtttttggaacaaagtcagttgattttgatgtaacattgtcaacatcaattaacattgtaaaattttcccctgaaccctttcagatataactggtagagcacgtcaaagatatacagaaataaccagagaaaagtttgaggcattaaaagaagaaaatatggacctaaacaatatgaatcaaagccttacccttgaactaaacacaatgaaacaagcaatgaaagaactacagttaaaacttaagggaatggaaaaagagaagagaaagctcaaagaggctgagaaggcgtcgtcacaggaaggtggggacagacagagtgcctttattagaggaatgagcaggacttcactcaattattttgagagttaatattttatgttgtgatatttgtgttggtaatttatgttgtaatatttcaggtttttttgttaatatccttatgtttgttgagatttgatttcatctgctatatcattattacactaaagaaattcctcaggttggaaagaagctgaatttacaaaaacaaaacagagattccaatacttcttttggaacttgatgcttagcttacatatatttcacttcagtttttatccctaagagaagcataaaaaagctcctcctttaccgtagacttaccaatgattatattttccttgctacttttataggttaaaaaaagaaatagtattttaatttgtatttctgttattattgaacttgaatattttttcatatctttgcaagtcattttctttttctttca

SEQ ID NO: 91419 - DNA, 1803 bp, Homo sapiens
gctcactgcaacctccacctcctgggttcaagtgattcttgtgcccaggctccaagcagctgggactacagacatccaccaccacacctggttaatttttgtattttagtagagatggggtttcaccatgttggccaggctggtcttgaactcctgacctcaagtgatccgccttcctcggcctcccaaactgttgggattacaggtgtgagccaccgcgcctggccaaacttcgtagtttttatcatctatcttgatgatgcctgacgccctttttcttacttttctatgtgcagcataataagagtgccacatactccgtgggaatgcagaaaacgtactccatgatctgcttagccattgatgatgacgacaaaactgataaaaccaagaaaatctccaagaagctttccttcctgagttggggcaccaacaagaacagacagaagtcagccagcaccttgtgcctcccatcggtcggggctgcacggcctcaggtcaagaagaagctgccctcccctttcagccttctcaactcagacagttcttggtactaatgtgaggaaacaaacatgttcaggccctgaacatttccggtgctgactcggccttaaacgtttgtgccataatggaaaatatctatctatctgttctcaaatcctgtttttctcatagtgtaaactcacatttgatgtgtttttatgaaggaaagtaaccaagaaacctctaggaattagtgaaaaaagaacttttttgaggtgtgttactatactgctgtaagttatttattatataaagtattgtaaatagaatagtgttgaagatatgaaatatggctatttttaatggtgacaattatgacttttagtcactattaaattggggttacctatatcagtacaatttgtagttgtttccaggtttggctaataatcattccttaacctagaattcagatgatcctggaattaaggcaggtcagaggactgtaatgatagaattaaattagtgtcactaaaaactgtcccaaagtgctgcttcctaataggaattcattaacctaaaacaagatgttactattatatcgatagactatgaatgctatttctagaaaaagtctagtgccaaatttgtcttattaaataaaaacaatgtaggagcagcttttcttctagtttgatgtcatttaagaattactaacacagtggcagtgttagatgaagatgctgtctacaaggtagataatatactgtttgatactcaaaacatttttcattttgtttaaagtagaagttacataattctatattttaagtcttgggtaaaaaagtagttttacattttataaagtaaagatgtaaatgattcaggtttaaagctctatttgacttcctttttttgtttgagatagcgtcttgctgtgttgcccaggctggagtgcagtggtgtgatctcagctcagtgcaacctccgccccctgggatcaagcgattctcctacctcagcctcccaaatagctgggactacaaggtgccctccagcatgcctggctgatttttgtatttttagttgaggtgaggtttcaccatgttggccaggcgggtttcgaaatcctgacctcaaatgatccacccacctcagcctcccaaagtgctgggattacaggcatgagccaccacaaccgtcccactattttactttttaaaatgacattcctactgattgatttttatcttgctataagttcgatgacaccgtgaatctaataaggttcactgttgacacagtacaagttacatagct

SEQ ID NO: 91420 - DNA, 1021 bp, Homo sapiens
gctattctggaagctgtttgttcagggctaaggtctcgttattacacaagatagggggtggggtgagaaatgtatgggtggggatggtggacccgccaccttgtcccctacagagcagcccctggcaggggctagtagatggccaatagtttctggtgatgccagggagtctttctgacagtcttgtccagatttacctctcagggaagtttccacacacagccccgtgggtgtttcttgtgttccccagcaaagcccaacattcctacctgtcaggaataagtaatgtggtttcgggcccaattactcagtcaaatctaaccctaagtgttcctatgccttatctagaaacctgaccacatatctatgggctggttagggcgtactgattccaggccagcagaagttggggaaagtatacgaacagaaaaaaaaacattcttatccgtagtttggaatggctgcttatctgagctctgggaatgtacgtaaaggaattagttattcaagcttccctgtaaaatgaaacacagcagtggtgatccaggtaattcagagtcaaactgaatcgtcgtcatttttggaagtggaaaggaaagagatgaacagttattttagttatttaatatttaattataatagcttaacattaaagttttttttttttttttttttgagactgagtctcgctgtgtcacccaggctggagtgcagtggtgttatcttggctcactgcaacctctgcctcccgggttcaagtgattctcctgcctcagcctccagagtagctgggattataggcgcatgccactacgcccagctaatttttatatttttagtagagacagggtttcaccatgttggccaggctgttctcgaactcctgtcctcaggtgatctacccgcctcagcctcccaaagtgctgggattacaggcgtgaactactatgcccggccaaagatattttaatcttaaatctgaagaaagacaaaattggaaaccgtttaatgctttaaacga

SEQ ID NO: 91421 - DNA, 1040 bp, Homo sapiens
ctcccgggtccacgccattctcctacctcagcctcctgagtagctgggactacaggcgaccgccaccatgtccggctaatttttttttttttttttgtatttttattagagatggggtttcaccatgttagccaggatggtctcaatctcatgaccttgtgatctgcccgcctcggcttcccaaagtgctgggattacaggcgtgagccactgcgcccggcctggtctcgaactctttgggcccaagcctcagccttccacagtgctcggattacaggcatgagccaccgcacccagctttccctggcttctcactatattttttctttctcattatgttactgtgtttaaacagaggtacagctctataagattattataaattactttctcaacttatattactataatttctcaagaagtggaaatgcaacttcttttccccagatttttatgctcttcctactgaaaatcttggaagaattattgttctctggcctgtagttaaatgcagagtaatgtaattttctagaatgctgcatcctgatagagattccttttctgcaactgcccctgtaccccacagtactaaaactcacaggaaaatctgttgtggccatgaagaaaagcagctggaaggccgggggtggtggctcatgcctgtaatcccagcactttgggaagctgaggtgggtggatcacctgaggttgggagttcgagaccagcctgaccaacatggagaaaccccgtctctactgaaaatacaaaattagctgggtgtggtggtgcatgcctgtaatcccagctactcgggaggctgaggcaggagaatggcttgaacctgagaggcagaggttgcagtgagctgagatcacgccattgcactccagccagggcaacgagcaaaaaactccgtctcaaaaaaaaaaaaaggaaaaaagaaaaaaaaaagaaaagaaaagcagctggaaacaaactagagaaagcctttccccagggccattgaaaggcccaaaatgaaaggtcttggcactatgtg

SEQ ID NO: 91422 - DNA, 1049 bp, Homo sapiens
tctctttatccactctgactgattaaaacaccttgacatcatatctttacacttgatcttagccaaaaggcctagaagcgatgacatcatttctttagatatgttaatatgccagtggaggttgctggtctcacgtcctgcattttaaggtgaccttgcatctgtcagctcagatctgcttgtgttcatttcacagtttaactttcaatgtgtaattctatatctcttggtttcactttcttatggggaaaccttaatgtatccactaagttttacatcaggggatacagggattaataagaaatttatgtggaataattacgtctatataagcactgagatgggaagtagctaagagtttatagttattgggaatttcaagtccatacatgttatttaatcatttactcatagacccaaatactctctaggattgtaaagttctaaactctttttttttcaggatggacaccctctacctttgtgtcttcacgacagaacagagcagacaaatctgttcttggtcctgaagattttatggatgaagaggtgcgtgtgcaaaactttaattgccaattagctggtgggacaggtctagttggttgctgtaactgccttctctctccccagaaggtccaatgtacgatttcctctttgtttgtaaggctttatcttttaggtatttgatgtgcagtgtcctgtacatcagtagagtcttgttcattggaggagcattttatactggggccaatttctaaaatcaagagtgtaaggggaaagtcatatacaggcaatttacttgaaaagcctcgtggctgggtgcggtggctcacgcctgtaatcccagcactttgggaggccgagacaggcggatcacgaggtcaggagatcaagaccatcctggctaacacggtgaaaccccgtctctactaaacaaaatacaaaaaattagccgggtgtggtggcgggtgcctgtagtcccagctactcgggaggctgaggcaggagaatggcgtgaacccaggaggcagagcttgcagtgagctgag

SEQ ID NO: 91423 - DNA, 1026 bp, Homo sapiens
tgcctttcatccctatttggattgttgctaaggagatggccaggtagtcaccctgtagttcttcacctagttttacacatgacgctctcacagttgtgatttgtattttcctccatgcttgtccttttggtggtttttcttgatcttttactccacggggtatatcctttggtgcccctaaggtacttcttctaaaaatcacgtcaatatgcttgtcttggaggaccacagccttgtgacctgggtagcccaatctgtccagggcggtgtgggccgggccttagtcactgagtcaacagaggtgtggggctttgcttaccacttgttcttccctttactgctgctgttgagtgatagcatgtatgacacgtactatttatgttcttagagataagaacgtaaaatgctgatgtgttctgtcttattctaatcatctctacttctggaattaatctatgacatcattttgtagaatcagagaaagaccttcggtacgttggcaaaattttggatggattttccttggcttctaaacctttatcttctaagaaagtaagaaaaactttttttctttctttttttactggtttagttcttaaaatatttgctgctatgtgatctgagttctattaacaacaggaaagataagtaaattctgttttcaaaaaacaacagcctggttactagtgattgtctagaaaaacattctacattagaaataccagggcgaggcgcagtggctcatacctgtaatcccagcactttgggaggccaaggtgggtggatcacctgaggtcgggagtttaagaccagcctgaccaacatggagaaaccccgtctctactaaaaatacaaaattagccgcacgtggtgtcgcatgcctgtaatcccagctactagggaggctgaggtgggagaatcacttgaacccaggaggtggaggttacagtgagccaagatcacaccactgcactccagcctggacaacacgtaaaactctgtctcaaaaaaaaaaaaaaaaaatca

SEQ ID NO: 91424 - DNA, 1032 bp, Homo sapiens
tctattgtcatctttatagttcttatcctataaaacaggcacattagcttctttctgtagaaatgggtgggaggatattcgaaatgcctgaccactggaacacggtggctcttgtgaccctccaggtccagaggggatgctggctggacctctggccagcctgttcttgtgctacctgcctgctgagtgttaacccgggaaggggcggggttaacaaggctcagaggtaacaggttttcctgattaaatcaaacatgatcttgcagcctgtattttctgggttttgtcttggtttgttaagatctatccacctccagagctgccaagagactatcgaccagtgcattatttcagacccatggtggccgccacctccgagaactcacacttactgcaggtattatcagagtcagctggaaaggcaacgcctgacccagggacacacagtaagcaccaactgaatgcctccaaacgggctgagttgcttggagagacgcctattcaaggtatgtgccatggagaagacggaaatcatttcacataattcgagttatcaaaatcaaaatggaaagttgttgttttcccactgaagttttttacatgaatttgtattcccaaactgtggaaataccactatttattgtaaatggcatacataatagtgtgcatatcttttacttctttttttaagttttatttttaaacttatttattttgagataatgtctaggtctgtcacccaggctgaaggcagtggtaactctctataacctggaactcctgggttcaagcgttcctcccacctcagactcccatgttgctgggactataggcatgtgccaccaccacacctggcacattttttaaatagagatgagggtctcactatgttgcccaggctggtctggaacttctggcttcccaaagtgctgggattacaggtgtgagcctctgcgcccagccaaggcttgtttttccaccttcagtttggttgatgtcattcaaatcacaacttttgttgtaagctcagct

SEQ ID NO: 91425 - DNA, 1045 bp, Homo sapiens
cttattcccaccttactcagtgtgcctaccatgcatgcttggcatgtagtaggtgctcagtaaatacttgttgagtgagcaaagcctcagggaaggcaggcagggggccatcgcaggatgggctatgccggctgggcaggcctaggggtgtgggattctccactgacccgaggccacgaggctacaccttggaggtgccggctggcaggacgggttgttggtgggttttctcccagctctgccagagatgcgggggacaggacctaggctgtagtccactgcatagggttgggggctacagctgcctcaagtctagggggccctccttggcctcccgtacacaccacctccatgaagtcacaagttgtggccttgcccttggccatggccacccttggctggactcgatcccaccatgggggaggcctgtgctgaagcccccttccccccactgcaacccgcatcccaaccaaagatgggccggcctttctcggcctcctctcccgacagcggcctgcagtgggaagctggagcagcacacggagcggcgtggggtcatctacagcccggcctggcccctcaactacccgccaggcaccaactgcagctggtacatccagggcgaccgtggtgacatgattaccatcaggtaggggcacccgggggtgtcggaaggaatcaatgtgggcccacgtgcatggggtgggtgagaatgtgtgtgtgtgagcaggtgtggagggcacacgcctgagggtgtacatgtgtgtgagcaggtgtgggatcatgtgcatgtgtgtgagcatatgagtgaggcgtgtgtgagcactcgtgtgaacaggtgtatgggtgtgtgcatgtgtgtgagcatttgtgagtaggtgtgtgtgcatgcagatgtgtgtgtgtgaggtaggcgtgtgtaggtatttgagcaggtatgtggtgtgtgcatgcatgtgaacacatgtaagtaggtgtgtgtgcatatgtgtgtgtgtgcatgtatgtgaacacatgtgtgcttgtgtacatggaaaagcccatg

SEQ ID NO: 91426 - DNA, 1128 bp, Homo sapiens
gcagcagccatggccagccaccttgtgctcaacaatggcaccaagatgcccatcctggggctgggcacctggaagtcccctccaggccgggtgactgaggccgtgaatgtggccatcaatgtcgggtactgccacattgactgtgcccacgtgtactagcatgagaatgaggtgggggtggccattcaggagaagctcagggagcaggtggtaaagcgtgaggagctcttcatcgttagtaagctgtggtgcacataccatgggaagggcctggtgaagggagcctgccagaagaccctcagcagcctgaagctggactacctggacctctaccttattcattggccgactggctttaagcctgggagggaatttttccattgaatgagttgggtaatgtggttcccagtgacaccaacattctggacacatgggcagccatggaagagctggtggatgaatggctgatgaaagctattggcatctccaacttcaaccacctccaagtggagaggctcttaaacaaacctggcttaaagtataagcctgtggttaaccagattgagtgccacccttacctcactcaggagaagttaatccagtactgccagtccaaaggcatcgtggtgaccgcctatagccccgttggcactcccagcaggccctgggtcaaccccgaggacccttccctcctgagggatcccaggatcaaggcgattgcagccaagcacaataaaactacagcccaggtcctgatccggttccccatgcagaggaatttgggtgtgatccccaagtctgtgacaccagaactcattgctgacaactttaaggtttttgactttgaactgaacagccaggatatgaccgccttactcagctacaacaggaattggagagtctgtgccttggtgagctgtgcctcccacaaggattaccccttccatgaagagttttgaagctgtggatgcctgctcatccctaagtgacctatacctgtgtttcctgtctcatttttttccttgcaaatgtagcatggcctgtgtcactcagcagtgggacagcaacctgtagagtggccagcaagggcatgtctagcttgatgttggatctgaagagccctgtcaa

SEQ ID NO: 91427 - DNA, 2640 bp, Homo sapiens
aagaacacgcaacacctacgggtcgaatagagaagaaatgaagcacttcgcaggcatagttggagggagcggagcagggccgacagccagcggaggtgaccagatgcgaaggatggaaatgcatgtgtcgcggggggaggagagtgttttccagggcagctggtgtgttgcttctcttccgcaggtttacgtgttgggttttcctcttgtttgaagtttatactgtaatctggcatcctgaaatgtataagatttagaaaggtctcaatgttgatgggtgacaccaaaattggtagttgtgtcagaattgactgcttatatgaataggttgtcacttaaggcagacttctcccaaagaaatgtgactcccagagaaaattttaaaagaaaatcctataagggcttgctttacgaagacattctacacctagaagctcttgatatttaagatgtggtcatctgttagcccttgagtagtatttgggataagctgttcataaggtcgattctgcttctggaaaaagttgctgtaaacaaggctaaataattacagggtacaagggagctgaagcatatttcagcttcttgattcctgcttttggtgggcacacttggctggttcagttatttttaatacctgcttttaaaaaaagtagatggaaacaaaacttcattgagaatatcctttaaattctcaagatcacatcatgtctgtctgcaaggctgtctgatcttggagagatggtttcatccctgggaaattaaacactatgtgctgagcccctggtaaagacaaataggacctcgtggggctgaatttggtctcgtggtctaagattgcctcacttggtcacagtaatggtaaatacaggtagccacgattccagctgtattgtgcgttcttgggagggttggttccatgggttgttatattgataggtacactggcctcctgcgtttgtggctttctagctctatcagtaaaaaaaagacaaaaatgagcatgacctcctaatggatgttcatttacaaatagtctatttgttttgtgtgttgtaaatcacttcaaaaggattgggttagaaagatgatgttgatgttcttctaatgctccagtgacccacttctgtactcccagaaaggggacgtccccttcctcatggaccctgcgctagatgcttgtgaagatctgcagggagacacgatgcggctggagttgacagacctagggaacaaattttcccagatgcccaaagaaaagagaaagcacagaccatttaggatacagatagtggtttagtactgtcaagatgtggtgtgagggaggagagagggtcaggaccttggatttgatcctgtagactggagccagagatgaattttcaccaggagaatgactcactcaggtttgagtgttcaattgctctggagacagaggttggaggaagcaggctagaccagagaccagtgtccctgagagatgatagtggcctaaggtgatttcgatgggattgggatggagaggaagagtagatgggaagttttttttttgtttgttttaggtggaattgtcaaatcccagagactaaacagagttaggaccaaggagaaacatctgtgactattttgaaatgttgaccttcattgaggaaatcgagtgaaaaatttattttggtgggcaaggggaggaatattgggttctaggtctgtggagaaaagggacaaaagggttaggaaaattcttgataggtttattttcccaggtgaaacttgagaaaaatttgattttgttttactcattctaacattctgcgctttcagtgtgactgacgtgaatgaacattacttgaattaagtttgaattaaaacaaagcctattacccacttagtccaccattctcaatattcattgggaatcagcagcagaggccctcagacttcagtgtattcagagttacttggaggtctccttatgaaaagattactcagctctgttcttagaactcctgattctaagtctggggcagcctgagaagttacatttctaaagagttcctggatgatgatgatgctggtccagggaccacactttgagaaccactgctcttcagctttcctgctgtttcctccttgagtgattcacatggaaggaagccaggcgccgccctgcatcctgtagcctgaactttggaatagtgtttgtccacagaggagccagacttgaatttaggactgagtgtccagctttcaaataaacactttttgcctgttgtaggtgttcagtaaatgtgtgtggaggaacaaagcgtaaatgagagtggccttttcagtgtaaaatcacttagctctttgatccccttttacttggttaatcttcactttaagagctatttatatggttaaagaacttactaaacaaaacattcttggagttattttgattatctccaagtttctctttcttacattttcaccagtttgtaggttcagtgaatactcttttcaggccaaagggcttacctttaaaacctcacctaccacacacgttcagcctagtaccttgcaagatgagtcaggcagaggtgaaaaagcccttccctgttcctgtatctttggatacggaaacaggcgtgaacgttg

SEQ ID NO: 91428 - DNA, 3954 bp, Homo sapiens
gcacaagacacactgcagagagtcaatcagctcaaagaagagaatgaacggttggaagcaaaaatcaaattgctgaccaaggaattaagtgtactcaaagatttgtttcttgagcatgcacacaaccttgcagacaacgtacagtccattagcactgaaaatacgacagcagatggcgacaatgcaggacagtagacctcaccctttccagactttagagcttgtggcttgaatgttaaaggtgtgaccaccgacaccactcatgtcaatggctgaaagttgtccatttccatgactcaaagacccattggaggctattttctgggatcagcactgaagagttgattagctaaaaatgttagccttgtaattcgaatatctggttttaaatgatagaggtttttgtgggaatcaaaatcccccaaatgttaaggtatatggtaaaaaaagaaatatctgggatcccgatgttcttaataaatcctgacttcccaagaaatgcttcttttttaagttgacaaaaggaatggggaactggcaggccgcgcagaaggttcttggttttaatggataggctgaattggattaagaaaagttgaatgccacctatggtaatctatttgtgattttcttctaaattatgtattataaattcgtagagctatagaaagcaatgagtgtgtaatttggagtgattttatatatggcataaactttgttttaacataattagtactgttttcccccaaaagtacaagtttttgagtagcaatgtcaggttaagtaaagaaacttcatcacatcttataggtagtgtgtggccaattgacttaaaaaatacaaataacatttaggaagcaaatagattaaacacaaaaataaaactaaagcataggaattatgtttttgagatacctttgggcttagattggcattgttttattctaaaaacccaactcagtggtgtagagaaacttgtgtaccaaaattttagtttctgcagatgctagtgtttttttggatacaattttgacaaccaagttagtaaacaaaatatcttaacagtttgatgacacaagctactgatgagggtttggaatattaattcagaaggtagtttctcttgtgttcaaaatagctgccatggggctgttacttttaaagtcaaaattttcttctgaaggctcattttggtatttgatcttaaccaagtgattattagagaaatgtatcaactccatgccatctcccaaaataattgtctaagaaaacttgaaagtgtaaggttttaacctttaatttatttctcttaaatacatcttttgatattgttgttgtgacatttctttttctggttagtgggctttccagactttgtaccactgcttctgtttattcatttatatgcttttgtgtcccataaattatttcagaaaatgctgataaaactcaggatattgacatttttgttgagactaaaaaatggcagtcgctaaagtagggactctagagtctggcttacgtcagtgttggtagtttagattgtctttgtcaacgttttttcttctctcttttgctttcttttctttctctttttttcttagcacagttctagctcaaatttgtgtattttttgtgtgcctgggctggagatgagagactgagtcataactgatttaaaagtttgtgttatcaggtatcttatttgaacatggtcatttttggccacattgctgtttcatactaggacttgggatgatgtagccagaataaaactcaagttgcaccctccggttggtggaagattgctgaccgtgccgtttctgggcaggagaagacatcatggtgtccagcaactcagcaaagccattcttaagagtcgtgaggtccttctgaatgtaaaactggagcccaggagaagctgtcccaggagggctgttaactccctatagagccaggagacaggataggggtttctagggtccaacaccagcttaccttggagtatgaatctacccatgaaggatgagagatgttttgaaaaactagccaggacacacccacaggatcctactggctccttagcagctgattggtgttacataattaacttaattggagatgcattaggtcacttgaatgtataagcaagcacctatggtaggcgctacagacatttaaatctcttgggaattcgatgctcccatggaatttataccagttatatgaattgacttaagtatcttgaaaaagaaactttagagaaagcatcaggggtgtgtactcagtatttcaaatcagaacacaagattggaacttttggaaaaatgggttcaagctttcctattagccatggaaatgcaaagtttagcagaagcaagcaattaggcagagaacaaaaatgttaagcatggtgttgtctatcttattgaagtggttggaaatgaaagcttttaatttgatagatttatcagtataaaattagggaaaccacgtgtggggaatgaatcaatttagagcttcgggaattgtgaggtgacttttgtaacttttgttctgtgtgtgacctgtgaaccactaggatgtgatctgcccttgtgggcaggtccagcatagttaggagttaggctttagcataaatttctagctgcatctgagtctcctgggatgggtgctctttggctggttttggctgcggatggtgagatcagagcagctcttcctgctgctggcccctgcaatcagttgttgggatgccagtgcagatcactaagtagtaagattttaatcaaacacgaccaggtccgaaatgcaggtcatgagtgtgaaattctcaaatttacataaaaagtagaagtatagacagtttaacatttggtattaaaggagaggaaattgtagcagcttttcacgtttcccagtccccattagagggcttgagaccttgtacctgaacaacccattttgcactcagtgctttctgatgccttaggagaattgttttgtttcacaaaagctgggaaggaagaagtccattctgcagctgttagatctgcctctcaggaaaaagtactaacttgttctttttgttcctggctttcatcagtttgtgagatttctctattttttttaaatataattttatttctttcaacaaatataaaataaaaaacaactttggaacaatgacttgtctttcatcgtggctttctttatattagataccaaaaagcagtccagatgttaaacagctgggaagcccaggcaggtgccttgctgtctttcctgttcccacactggacggctgggggtaggggtggggaaagtggggagacaggcagaggtatttgtgtccaagtctagatctccccgtttgcccttagtggataggaaaatagttttctctgaacatgggatacatctttagttatatttttagtcacttggtctaaactaaaaattataccagaatagggaaaggaataactgaataaatgggttcccgcttaatcacctagtgtctcagaacatggtttccatttagagagggaagaaattcttatgtttcgagatagatagtcaagaatttaaagtaaggcctttccccatctggagttttgtagtacatgtggacactgtcctcatttacgtcatagagtgtctgtagagatgaatttgctgatttcataaactgttgagtccagggagctgatgtgaattgaatatttcaagggaatgccatttaaatgcttttcttctctgatgcctcaattattttcatgtcttgggaaataaatctctgcttgctgcatcttaatgaaaagtggaggtcaggaattatttctatgggaagtgtggcccgtttcacttttttgaattagttgtgatttagaatccaataacgtgtcttggggaattttaccgagtgatgacatctttgtgaggggggccggt

SEQ ID NO: 91429 - DNA, 1073 bp, Homo sapiens
aaaaccaccttgcctaggagtacttctcacacttgtctgtcaggagcatctggcgggcgcttgtgaaatacacaattcctgggccattgcccctagacgttgggtcagatggtctgtgggggtcccaggaatctcttaccaaatgccccagtggttctgatgcctgttaggcttgggaaaccttgcagcaagtgacagggtgacaccagagccccgagtcccaggggctcaaagcaggctcctcggggaggactctgcccttgtcccgccaggccagtctgaggcagaagcagccgttagagggcctgtgctgccagcaccatcttcctggaactgacttgatactgacaccaggtgagccatcttttcagggtgcacggggtcccaaatgctcatctgcaaaggaataaaggggaagccacgcacaaaggaccattttaggaaaccttttattgcaaatgccattctgcatattgatttttgacagaaagtatcagaaatgcttctttcctgggaaaaggaatataaatgacagcaagacacattttagttgctactaaagaacagcattattttcaatcattttaagtcgctcatttaataagcaaggtataaaacagattaaaggtgggagcctgcaaaagggtaattaaaaaagtgtttcctccccgggaaacagcactgtttggtctgatcaaatgccgaagctgggatctgattctgggtgccgtctctcgctactggagtgctgaccagcaggctgcccatcacgaaaagaggttgcaaggccaggcccccaggtgcgctgggatttctggctggctctacttggggccagagaagggggtaaaggccttgtcacagcctgccatgcatgcttcaatctcttccacagtgcggggcacgcaggtcagcagctctatgccgctgtcagtcaccacgacgtcctcctcgatgcggacctgggtcaagccgacagacacacattatcatagagcagcctcatgtgccaggctagagggccgggcccattccaggcccaccccaccatgggatgggagcagctgacactc

SEQ ID NO: 91430 - DNA, 1111 bp, Homo sapiens
tcaagggaagatgtcactagggcccctgtcttgggactaaggagtctgcagctgcagtggaggtggcagatgttctgggagcaagaatggggcccgtgggcactcaccccgccaaaaccgcgaaagcgctgcaggacctcgcggttaaggaaggaggcgcgggccgggtccgccagggcctcatccaggaggtggtcgatgaagtagatgcccggctccacggtgagcaccatgcctggctgcaggtgccgtgcagtgcgcaggctccgcaggccgggctcgtcgatgcgctccacgccctgtggggaacagaggtgaggggcctgatgagcagctccagggctcaccgtggcctcatcaggagagatgggcatgtgagggccggtgccagtctcgtgggctctcttgaccattggggtcctcagcctagactcgcccctgctgtgctgggccatgggcaccctgataagaccttccaccctgcacatacccctggatcttgagtgtccctggccacactaccctagggcttgcttgagaagccctgtggccacccatgtgcacacacccggggcaagctgcccagacaggcctgtggggctggctgagggttgggctgcccttagccaggccccgctgctggccagaggagtggcagatgccaaaccactgaagccaaaaaagctcttaaggcggctgtgaagccccttggggccacagctttccttccaggcagcccaagtagaaactggccccagaagtcgtggtcccagctcccctaggccgaggcccagattttccgtgtgactgtccagggaggacaggtgccgtcatcagggtgggtctgccagccttagtgcgccagtgcaaatgtgccgtgtgcgcgtggcttggcaggtgtggctcccagaggagagctcggggccttacggcagggccctgggaaatagcccccagccttggagaacgcctgagggacagtggtagagccgctccctgcaggggcccctgtctgcgccccacactgccccagtgcacacccagcctggccttgtccactcacaggcacagctgagggggcctcagcttggctgagggcagcgggtgctct

SEQ ID NO: 91431 - DNA, 1033 bp, Homo sapiens
aagcatactcgtgcccactggctcagaggccctggccgccggccggatggtgccccggggacctgaggcgagcaggagctctcctgtaattcccagagcacccgctgccctcagccaagctgaggccccctcagctgtgcctgtgagtggacaaggccaggctgggtgtgcactggggcagtgtggggcgcagacaggggcccctgcagggagcggctctaccactgtccctcaggcgttctccaaggctgggggctatttcccagggccctgccgtaaggccccgagctctcctctgggagccacacctgccaagccacgcgcacacggcacatttgcactggcgcactaaggctggcagacccaccctgatgacggcacctgtcctccctggacagtcacacggaaaatctgggcctcggcctaggggagctgggaccacgacttctggggccagtttctacttgggctgcctggaaggaaagctgtggccccaaggggcttcacagccgccttaagagcttttttggcttcagtggtttggcatctgccactcctctggccagcagcggggcctggctaagggcagcccaaccctcagccagccccacaggcctgtctgggcagcttgccccgggtgtgtgcacatgggtggccacagggcttctcaagcaagccctagggtagtgtggccagggacactcaagatccaggggtatgtgcagggtggaaggtcttatcagggtgcccatggcccagcacagcaggggcgagtctaggctgaggaccccaatggtcaagagagcccacgagactggcaccggccctcacatgcccatctctcctgatgaggccacggtgagccctggagctgctcatcaggcccctcacctctgttccccacagggcgtggagcgcatcgacgagcccggcctgcggagcctgcgcactgcacggcacctgcagccaggcatggtgctcaccgtggagccgggcatctacttcatcgaccacctcctggatgaggccctgg

SEQ ID NO: 91432 - DNA, 1028 bp, Homo sapiens
gatggggagctgggctctgaggaggatccctgctctgtgtggggggtgggggcaggtctgggcatctccacccctgccacccttaggctgctgccgtggctggggcgctgtgctgtgaatggcgggcaacagccatactgcctgcccaaagccgtgcacccccagcccgcctgagaccccagcaccacagtggccaactctggcacttaaaggggtcccaacatgaaggacttgtgcccagtgtgtcgggggtgatggcctgtgtcccagtgtggactctcatccctgttcgccagccgagcccatcatctgccctccgccagccacagaggttcagaaccctgcttctcacagcccagccctcgccagctcagggtctccccggcccctcccacagcagtgatcgggaccatgcagagcaggctctggctctgcgccaaggcaagcctggcagggaggccctcgggagccaaggtcactccgcctggtggggctggacctctccaggaggtgccgcagggacttgctgggcgccctctccagccagtgagctgcacattgataggggccccccgccacgtgcctggccagagtgtcctggggccccggcctctgccagcacgtggcctgcccaaacccagcccccatggggccagggcaggaggcctcaccggcctcgagtccttatctggtgctcaagccaagtccagcagtggaagctaccatgaggagaggctgatgctgggattccacagagtccggggatgggacgggcgcacccgtgggctgctgaggctctacgtggagagctctctaagggcctccttcctagcggccatgctccagagccccacagagcctgtgtggcccccaaagctctgtgcttaggaagttctctctttggtggcctttgccccacaaacatgcggcagagatgagttggatttgaagccgggagttggacatctggctcccctggagatggtgcccctgctgttggcaggcggggccccgaacccctgccagcc

SEQ ID NO: 91433 - DNA, 1011 bp, Homo sapiens
attttccacctctgtgaatttgtggcagccccaaatgaccgaattggctggagactgttctgttgcttataaccaaagatgcagaacctgcgtgccttggggggccagctgtgcctgggccggtgtgggcagggaaagcccctctgcgctgcaggctggaccctggcagctgccgaacagatctcagtcagagtcgtgggagccatgtgcctgtagagggccaggcctaggggttggccagcacatggtgatcccataggaacctgcccaggctctggtgaatccaaggattacggcaggggtgctgtgttgaagccctggaaggcttgaagcaagaacatgagaagaccacatccctcaattctctcctctgggcaaaggtgacaagccaggacctcccatcactgctgggaaatggtttctattgttgcagggcagagagctggggttcgatcctgtgggtgctagactccacccctgccagggctatggaggacccaggggtcactcggcaggaggctggctgagcgggatggggacagcgggaggtgcccagggggaactcctgaaagctggccttgttgggaggatgctggctcccctccaggggacctcctctgcctgccctgacagacatcaacggcgcgcggtgggaggtcaagaggtaccagtggggcctgtgcaggctgcctggggttgggagggctgagggcaggacaggttggcctacgctggccgctgggagagagaaacaccaggcccatcctggcctcaacatggccatcatggtggtgactgtgacccctgcagggcactaccacaggccaggcggccttgcaggtgctttacacagcttaactcagtctccatgagtcggctgcttccccatttacagatgtggaaacggccacccagaggagggctttccatccaaggtcacagagcgctgagcggcacgtgaacctgctctgaccccatgccagtgtccagagtgggttgagccctccctgg

SEQ ID NO: 91434 - DNA, 1101 bp, Homo sapiens
cagggaaggaggggaagagggcactggtggctgctgagtgtgagggctgggacaggtctctcctcctagccaggctggccacccaccccccatgcccaggagcaacacaaaagaccaggcccagcaggggtgaggcctggcccatcgtcctgagacaacactgccctcttctggccagttctggaaggacaggcttgctgcccaccagctgcatcccgactgggacaaccaaggcctggggcatcctgggacacgtgctctagaaactctgcgaggggccacagtagattaaggcccccctccaacccccaccacctgatcgggaagtgagggaggcaggaggagtgtcccagctgctttcccaaccagagccctccacctctgccctgtggggtgagcctctccaggacctggggcggcctcaggcccggagtgctgcaagggatggtccctctctgggcgcactgcttcccagaatcgtggaccatgcgccccctgccctagctgcgaagcttgctggcctgcagtggctctggtgcccacagcccaggctgtttgtggaaggagggggcagcacatgggggctcagaagacgaccaggagaagcagggggatgagtcctggccacctctgtgctcacacaaacctgttcggggctggagtgagtggggaggggtcttctggggcctcccacttaggaatggcctccagtgatctcaggcacctcaatctgtgtgaacatgttgaaagtgttaattagcaagtgtgctgcgcttttgtaaccctgttcttgaaggtctgcctgaggggtttaaaaaggaaaacaaaaaaagcagcgaatggcccctctggtacagtgacttggagatggggttcatggcgaaccccaggatcacagcgggaaaagactctgagaacaacagcaaaacccccggaggcttgacggctacaggccccacatggggccgcttggctctgaaccaggctgagggtgtatgcagccaccacaaagtcccgtccctcacccctgcgtgcatgcgagtgggtgtggtggcatcacacccagagaagcgggaaggggcccgggggtggctggctggg

SEQ ID NO: 91435 - DNA, 1002 bp, Homo sapiens
aaggtatgaaactaaagcatgagcccagcgtagaattcccccgaagccgagcgcctcccagagcagtgcgcctgctgcaatggcctgctctgggttttagtcctttgactgggggaagacaccccagagatattttagcttctaggaatgggattttgtggggaatcagagctggtccagggcagccagattatacagctgtactgcagaagggtggggggtactaagaggaggccagccttttccatccctctctccacagtcccagatatgagcactcccccaacacgcacacacatggatacacacacagggaactgaccgaggctgtgctgcgttgcaatgatcacagtgtaagcccctgcctccctctctcgcagtggccacctggcacagcgtgggccctcttcgggcaagagcagcaggcccggtgtcctcaccgagctgggcaggccaggccctgatgcccacttccagcagctggttctgcagcacaggctggaggtgggagccacaggcagagctcaggccaggcctggtttattctcagacagctcccgtcccctggttgtcctgttccgtgtcttcgacccaaaagtgtcctccatgatgcgtacatcaagcggggtttggggctggctaggcccccctcctactgctccgtccttacccttccagcagcttccctggagctaggctgagtccactgttggccacagtcatggtccaagagggcctatgaaccagacaccctggttcctgcttcaggtcaggcttgtcagccaaggactgagacagacttcctgagggccgtccctcacccccagccagccacccccgggccccttcccgcttctctgggtgtgatgccaccacacccactcgcatgcacgcaggggtgagggacgggactttgtggtggctgcatacaccctcagcctggttcagagccaagcggccccatgtggggcctgtagccgtcaagcctccgggggttttgct

SEQ ID NO: 91436 - DNA, 1071 bp, Homo sapiens
gactgtggccaacagtggactcagcctagctccagggaagctgctggaagggtaaggacggagcagtaggaggggggcctagccagccccaaaccccgcttgatgtacgcatcatggaggacacttttgggtcgaagacacggaacaggacaaccaggggacgggagctgtctgagaataaaccaggcctggcctgagctctgcctgtggctcccacctccagcctgtgctgcagaaccagctgctggaagtgggcatcagggcctggcctgcccagctcggtgaggacaccgggcctgctgctcttgcccgaagagggcccacgctgtgccaggtggccactgcgagagagggaggcaggggcttacactgtgatcattgcaacgcagcacagcctcggtcagttccctgtgtgtgtatccatgtgtgtgcgtgttgggggagtgctcatatctgggactgtggagagagggatggaaaaggctggcctcctcttagtaccccccacccttctgcagtacagctgtataatctggctgccctggaccagctctgattccccacaaaatcccattcctagaagctaaaatatctctggggtgtcttcccccagtcaaaggactaaaacccagagcaggccattgcagcaggcgcactgctctgggaggcgctcggcttcgggggaattctacgctgggctcatgctttagtttcataccttaggatgaagcatcgtggctttcatgttgggataacagactgatttattatttaccgaacgcagtaggcgctcggcagatcaatttcaatacaacaatggactataaatgccaccagcaatctggcagtagcagtaatcaacaaaacatgttgttctaaatgctgcataataaattgactacaataaactcataattactctactggctacatttcaaagttagcactagaaaaatcaaatcaccaatttggacttggcattaacatcctcggatcactcctgcctctacagctgcagctgggagatgcaggtgccatgtgctgtcccggagggccgaggccacagcatct

SEQ ID NO: 91437 - DNA, 1036 bp, Homo sapiens
tgcctcagcctcccgagtagctgggactacaggtgtgtgccaccacgcccggctaattttttttttttattttatttttagtagagatgggttttcactgtgttagccaggatggtcttgatctcctgacctcatgatctacccgcctcagcctcccaaagtgctgagattataggcgtgagccaccgcgcccaggcttttttttttttgagacagagtctcactctgtcacccagcctgaagtgcaatggagcaatctcagctcactgcaacctccgcctcccgggttcaagcaattcttctgcctcagcctcccaagtagctgggattacaggtgccccccaccctccaccatgcccggctaatttttcatatttttagtagagatggggtttcaccatgttggtcaggctggtctcgaactcctgacctcaggtaatccacccacctcggcctcctaaagtgctgggattacaggcatgagccactgtgccaggcccagggactattattaagccccttttacaggtgaggaacaaagaggctcagtaacctgtccaagatcacaccacaagctagtgggggaggccaactttgaaccctgatctttggccccagggcctgtgctccacttttccatggtgatctctgccccacagaaggagacctgcttcttccaacccggtagttactgtctcagtgcagggcactggaaaggcacagttgtcttgcagagaagttctagttttaaaatacccataaaaaggacaaatacctattgcattatgaattatgatgacaaatgacatgttaccagagtcaggccagctctagtgaggaagaagtttctgcctgatgaagtggaaagagactgcctgggaaggggctcagatcccccagccacctctgggtcaaggtcggcctcagccaggaagccaggggccattgctgcagccccaacactgttttctctgtggcagagtcaggcatacagcaggcgctcataaatgctcctgagtgaagggaaggaacaggg

SEQ ID NO: 91438 - DNA, 1451 bp, Homo sapiens
gagtggtgattgctgacctccatgtctgcacctggggatagaactcttcccatgtcacaaccttcagaagcagcacggtggcacaggtggccctcctgggcatcccagctagggcgaagtgcaccatagctacttctccagcccaaggtgaccgcagttcattgctggagggccctggcggtctagtcccccacacagccaatgtctgggtggctggttgagtcggagcctggctgggctttgctggtgctgttttactttcttactgtccatcccagcaagataagaggggctagatgcccttcgtggggcctgctgatggctgtggagactggcgcatagactggacagtgggaggcacatcggaaagccgtggtcctgggaccctatcagcagaggtggcagaaaggcctcaccaccctcggtgcggggtcctgatgcccgctgggccctcccctctgggtggtgagcagccgtggctgagagcatgctgcttttgcaaaaggggtcccagcttcaaggctggggaccgaagttcctcctggatgcactgtgcaaacaggggacccctcacttctgctaggccagcatgtgactgtggggctctcggccaccctgtgctgagaggtcgcagaggcttggggatggcatgggcacctggtgctggttgaagctgggcaagtgtcatgatcccacgggtgaaaagactccagagagtgtccacgtgcccgggtgggtctaggtcttagcagccaggatgacccgtccggtgaggatgcagccagtgcgtctctccccagtgttggctgattcataataggctttaagcagtccatatattttcagcatgagctggagtctttgaatcatttatcttggcagctcttcttaaagctggagaaaggtagaaattcatctaggtgctgagaaaggagcccagaagaaaaaagtgtctggcggctgccgtgatgggtggcgtgcctggagatagtgctggtggctccgagatcaaacagatgagaaatggcttcccaggaagaactcggggaattctaagtaggtaatgagtagtgactgtcttttgatttacggcaagacttggcaatcaatctgtaatgctttgaagaggaaagaaatgaatcccgaacaggctgcggggtccaggtggtttggacaggcggcccttccttggtggtgggggcaggggcaggcaggctagaggtcgtggatttctctcttctgccacggggaataattcaggccgctcctggtgggcagcaggctgtggccagagctggcttgggggaagggactcatcacacctgtctgatgtcctctgaggtcctggctttgagcctggtgggactcgagttcagagctcaggtcatgggcagtgcaggccctggtggttcacacactcactggtggatctggggtcctttcttccaccc

SEQ ID NO: 91439 - DNA, 1043 bp, Homo sapiens
agtcccagcactttgggagtccaaggcaggaggattgcttgaggccaggagttcaagaccagcctgggcaacataggagacctctgcctctacaaaaaaaaaaaaaaaatgtttttaattagctgagtgtggtgacgcacccctatagtcccagctacttggaaggctgaggcaggaggattgcttgagcccaggaagccaaggcggcagttagctatgatcacaccactgcactcccatctgggcgacagagtgagactccatctcttaaaaaaaaaaagagaaaaaaaagccaaaaacctgatgctgactgttgatttcagataaatatttatcacgagtttaaggaagtagcattgtcttcctggcttactagattttatcaggaaaggatgtcgaattttatcagctgccttttcagcatctcccttggccttttccacgtgtgtgtttaatcagtaaactttttattttaggatagttttggattacggaaaagtcacaggaacattagagagttccatgtacctggcacccattttccctattatgtattagtaaagttattaacattactttagaacatttgttaccatggatgcacgttattgatacttaattattatcttaagtccatgctttattccagcggccttagcttttacctaatgccctcctcctgttccaggatcccatctgggagaccatatcacgttccattgtcacatctccttagcctcctctgggctgtgacagtttcttagaattgccttggttttgatgaccttgacactttcgaggagtatggctaggtactttgaagaatgcctttcaattttagtttttctttcagcgagacaggagttatgagttactgggaaggagagcacagaagtgccattgtcatcacatcacatcagcatgacttatcactgatgatgttgaccttgatcacctggctaaggtagtgcttgtcaggtttctccactgtaaagtcactcccctacccactcttctgtactcttggaaagcagtcactgtgt

SEQ ID NO: 91440 - DNA, 1112 bp, Homo sapiens
agttgacccacaatcagtgatgctaagactgatcactgggttacattttcccccttgacctggagagtaatctacctggtgttactttggtaccatgtgaataaatgcagccttcatacatatatctgttttgttttgttgttcctagagttttaatttgcctttcgtctttcttattgagagaagaaacatatcttcttcaccatatcactaagagctttaagcttcctattgattttatctgcagaaaggaatccatgccattctttttgtggatgtttttctcagagccacatacttggagttctaatttctactgattgctttctaggcttgctgtccagtgtctaattatacttttggattgactccagtttttaaaaatatcccattatatcacctccttctctttattggcttgtgctttctccctctccccacccttctacccttctctctctgctggagtacatccttaagtacttccccaatttctgagtttttgaatgtctaaaaaggactagtttccttctgtatttggttagtagtttgtctgggtgtagggttctataatttttgcatggagtgcaacaaaaagggggtgagtgtaacagagtgggtcatgcgctctttgacattgtctcagttaagtctcagtgtcgctatctgtaaaatgggaaggtagtacctgttctaggttgggttccatgggaagctgagtctgtgagccaagtaggcaggaagcgtattgaggagtgctctcaggatcagcgtgtgtgtcagagtaagggagcaggcttgggctgcgatgctgtcacaagggcatctcagctgctcccatggggagttttggtgctggagtggcccccagagatgtccccagctgaagcgagggagctgagtcttggctccctccatcgaatcaaggagaccagtagaggggtgtggcctcaggggatgagttgggcagtgcacccagcatccactgcaacttacaggacccaccatgcggcgggtccccagtaaatggcaatttaaagtgaagggaagctgcgtttgcctgctgagatttctctagctttgtgggcctgtcatgaatactggggagtaat

SEQ ID NO: 91441 - DNA, 1069 bp, Homo sapiens
cacccctcacccacagcccccgggagagcctggagagggcgggagagccctgcccactggatgtgcttgggtccctggactggctggtgactggccctgggggtctgtggcctgcattgctggctgatgccatagcagacaaggcccctgcgctcgaggctgctgcacgtggacagtgggcagctcccagccccaactttgggacctggatccccagcccctcccctatcatgcatcccctacagcccccatgtcttctgttgtcctctggtggaccaaggcagtgatggaggaaccgccttataattatgtatgagcccaagctgctggaatctctgtgtgtgatgtaggggtgatgagggattatgagctcatgaatatgtatcacctcccacctccccctatgctaagagcagtggggcgggtggaggggcgggtagtaggtttgctttttcactgcacagatcttcgtgtcctcctgggagtttccccaaagcggccccgcctcccacgcctggcagcaattagcccagcttgttgaaatgctggccatggagctgctctctctccccaggcccccaggccctcagaggggctacgggcacagccagctgctgcctgtcccagtcccgggactccctgaatccccccagcactacctggtgctgggtctccagtgtcctgcacacctttcctcgaccatgccatggaacctctctatggcctctgtttgggtctctgcagcagggggaccctcagctcctccacgtgtaacctggtgctgcctgggcttgtggtgggcactggaggagatcatgctcacctggagcctggcacagagctggtgctcagtgacagttgcccgcatgcaaaccccagcaaatcccattgctcctctgtgcctcagtctccccatctgcgtggtgggccaggtgggctccaggatcaccaattcccagtttcccagatgtcagtgagtcgagggccttctcagcggtgagagctttgcttgctcctcctctagagagaatgctgagcccccctggaccacgtctggcagctgtgtggt

SEQ ID NO: 91442 - DNA, 1029 bp, Homo sapiens
actgatggctgagatgcccctctgtagggcgctggcctcaaaatcagatcctttgtacttccccactctgccgtgaggttgccttccactcctgtcacagctggaggcaatgaagggagggggctagaggcagagctgggaacaactgagggacgcagggtgtttgttatggagccagaaagtccgagttgatgtgttgatcccagccacgcatttcgctgatggccctgccttttgtatttctgacacctgcttttgtgccgggctgtggggtcaactcggtgctgagagtgtggttgctcagtagcaaagggtctgtaggcttcccttgagccagctgcacaataagccctgcgtctggggcctccgaagtccaggcgaggcgctcgtcatcaattcgtgccccataactgctcgaggccgtgctaatggaggtgtcagaccttggccatttaacttttgagtcctgtctcaaatgcacaagtgaatgtgactgaatcatgcaaatttaattaacagcaggagcttgataccccgtgatcatttcagagaagccaaaagggagagaaagcaaagggcattgtgggctgcactgagcagtccattgattacggtgagaccagcgtctcccgggccctcagtgctccttgttgttgctccctgcagccgtccctgggccctgtggccagtacttcctggtttgggtggggagggaagtggtggaggactcagagagaggagcagattctgtttcctgcaggtgatgctggtccttagtgtcacaaaggctgagaatggcacataggacaccagttcaggagctcactcgtgaagttcatcacctccaagtcccaaggttctctccctccaccgtgttccgtggggttctccaggcacattatccttggcacccacaacacccccccccgccccccagttatccgtagagggtcttgactgcaagttgtccaggttgttgccattttgaacaaagaattggacaaaacacacaaaggaaagaatgaagca

SEQ ID NO: 91443 - DNA, 1058 bp, Homo sapiens
agcctaggcgacaaagcgagactgtctcaaaataaatttttttttttaaattgaggttggtgcctggatgtagatatggcatcagtgtcctgcaacctcagaaagttggctgggcatgagcaatctgcatggtgacagcgtggtgacagtaggctgtttggtgctgtctttggcgccatattcagggctcatctgactccagagcggctgtgttccctccagaggaaacccacggacccagacaacccggggacagagctgcattagctcaggtgccagaggatgcggcagacgccatctcatttcttatcagctggaggatgtgtgaccctgtggtcagtaaatcagcatggcagatcgtgaggcttacaaattggtcatggaaaaaagttgtgacttttaccctgtacaaaactacctgtcatttgtgatgtggtgttctagcctgcactggctggattcattcccggacccttagaaactcagcaatgcagcctgggccaccgagagactggggaagcctccgtgcaggtgggttgacaccaagaagcagccctggccccattgccaaagccaccttttaggaagtcagagagtatctgtgcaataatttggatgtttgtcccctgtgaatcttaccttgaaatgtgatccccagtgttagaggtggggcctggtgggaggtaggtcatgggggtggcccctttatgaatagattaatgctattgtgaggcagggagtgagttcttgctctattagttcccacaagagctggttgttaaaaagagcctagcacctaccccctacctctgtgatctcggcacacaccggctcctcttctccttccattttaagtggaagggcacgaggccctcaccagatgcaaatgcaggtgccatgcttcttgtacaggctgcagaattgtgagccaaataagccgctttttttttccttttttttttttttttctttttagagacagagtctcgctctattgcccaggctggagtacagtggtgctatcataactcactgcagccttgaacttccaggctcaa

SEQ ID NO: 91444 - DNA, 1015 bp, Homo sapiens
aatgattctcagtcccacactcctggtgccaggcctgttgtcactgtccctcgccctgcccctgcatgtttatggagcaggtattaggtgtcttgcactgtaccaggccctgtggacatgaggtgagcaaagctaagggtggtccctgcccttgtgagttagatggagaccctcctcatttattcctcattcactaattcattttctgccagacaaagacattaataaaaaaaatgactaatgtgtgattctaggctgtgataaggatataaagaatataaggaaataaacactcaggtactatgagacctaccaaagagcaatctgacctgcactgagaggttaggaggacttctcggaggaggtggcccttcagctgcggtctgaaggaggagtgggaactaagcagggttggtggggagtgtgggaggaaaggatggggagagagaatccagcatgccaggcaggcacaggcaagagcatgcaaagggcttcctgtggagggaatgtgtgagagggcatgaggagcaccatctgggagctgtgggaaggcccatgtcgccagcagagtgaagaagcaggtgacatgtggctggagacccatctgtgcagggtcttcacaaccagggagggacttgggactttatcctatgaactgctgcagagtaggaagaccagcgaggctggagctgcaggaatcttgcagaaagaccactgtggccttaaataggagtgaatgggcttcccctcagacattggtctggtccatcaggctctgtctcctggagccggggtggttgagcctaatgtgcaatggagtctgtctacactggttgaaaccagtgtgtgatgtaggcagtgcatctacgctggttgaaactagtgggcggtgtaggcggtgcgtctacgctggttgagctagtgcacaaagcaggcactgtaacactggttgagcccctagttcatgatgcaggccatctgtttatactggtggatctcagcacaccattcacgc

SEQ ID NO: 91445 - DNA, 1052 bp, Homo sapiens
cagcctctctctggcttgctgaggccagagctcttggttctttctgacaccttccctttttcctatgtgattctttctcccgggaatattcctccttacacctcctatagacatctgggtctgatttgattctgacttccaaagactcagctttcgtgtgtctgtttgaatctccttggcagaggctgacatgggctgggagtggcactgggatcgcacgtggatttcccctccctgttgctgtgcctggggctgggcctgtgctggtgcagaggctacctgctgtcagtggtcatcactaccttgccatccctcgcgacagccactcacacgcctctttctcacaaaagtcatttagcgaggattaccaccttggtgtgcgtggtaaattgcatttctcctggttggggccatcttgctgtttcctgcttagatttggggcctcatgaggtttggcctcatctgcaaatttaatttcatgaccattcatccctgtgaaagcacaatctatgcctattatttcactcttcttgattccctcttccacgagttaatgtgtcagcgcacagccatggcaaccactccccgccctccctccaccccaggcagccacctctaggttgcggctgaagctgggacctggagtcagaccacctgggttcaatcctagccttaccactcggtcactgtgtgggctagggacccagtttcctcatccacaaaacggggttaacaagagaatccacctcctagagctgttgtgcctaagagtccacaatcagtggcagctgctactgctattattactattattattactactcccgttttatcttgggtgtcaggaagcatattggtcaagggccttgcctggtgatgtgacagaggcttagggggcaggcagccccactggccagtgtcccctcaagttctgctttttcttttcttgtctctctctctctctttttttttttttttttccagacagggtctccctctgtcacccaggctggagtgcagtggtgcgatctcagctcacagcaacctccatc

SEQ ID NO: 91446 - DNA, 1020 bp, Homo sapiens
ttttgttttggtattttttgtagagacagggtttccccatgttgtccaggctggtctcgaactcctgggcttaagcgatcctcccgccttggcctcccaaagtcctgggattacaggcatgagccaccactcccgactccattgctggactgttttctaaaggggtcgtactgatgtttccacctcctcaccagtatatgcatgagtgttccgtacgtaactctcccactccacgtcctgtccaatacttggcattgtgagtttttcccattttagccattctatgagtatgccgaggtatcacaccgtggttttaattttatttctcagatgacgaatgcagttcatttttttaccaaggatattttggacctggaaacattattcaacaaatttgaaaatttcctttcgtccccaaattgtagaactcacttccatccccacattgtggaaacgtctggcagtgcttctgatttcttctgggcgggtttgaatctcccaggctggaagccaagggatggagtagacaagagtttctctggatgagtctggggaactggccacctgccccagaatcacgtgggttgctggtcagagatgcaggtgctgagccctggcccagccccggactcatcagacagcccttgacccattggtccttctagggctgttttttttttttcttgtcacgaaaccaaaaaaaaaaaaaaaaaaaaaaaagcatggatgctgccctttctgtcatgtccacggctgtgtcacaatgcccagaatagtcctgcacagggcagacctgctgggttgaagggtttcccattgttgtctccatcctctcccaccccagctgacttggcggggactcgttagtcaactgggctgccgtggtgagggctctggaagttggtttctcgctcgctggggggtgtcccatgtctgaatgacctcctccttctccaaagccaacttccaacagagctgcagccgtgcccccagcagccttgctcacccccagtcctctag

SEQ ID NO: 91447 - DNA, 1062 bp, Homo sapiens
ccactgatgggcacttaggttgatttcacatcttgactattgtgactagtgccgcaataaacgtgggagtgtagatatctttgtaatacgctggtttcctttcttttggatatatacccaggagtggatcatatggtagttctatttttagtttttttgtggaatctccatactgttcttcatagtggctgtactaatttacatccccaccaacagtgtacaagagttcccctttctccatatccttactagcatctgttatgccagacagactatttataagtgaattatatttgtagtttaggccagaggtcagcagactttttcgtaaacgaccatggagtaaatattctaggcttcatggacaaaaaggtcactgtggaagtcactcaattgccatcataatgtgaaggcacccacagatgatacagaacaggcgtggctgtgttccaataaaactttatttccaggaacaggtggctggagggtgtggtccatgggccacagtttgccgaacactggtttaatggattgcaagacacagatgggtatggaaatggaggaagatggcaaatggaaatgtgttggacatttaatcagaactagcatgtcgaaaggattgtttgagtatcttcaaaactgaaaaaaaaaaaaagcttttctcaagtgcaatcctgtagcctcttcctgctggaccagggtgaggctggggccgcagaacccaggagcagtgtcccccaaggaacacttcctctgtgactcctgatgggtagagggtggaggggatgggcaggccttcctcaagcctgagtttgcacatggttcacactcagtgggcatccgggaaagtgatcagggccccagtggcccacccagctctgggcaggcagcagacaaggtcagactggggtggacaaatgacaaaatgacatcctcaggtttgggaggggacaagtggtgtctctgcagctggaggccgaaaggcaggcctctggctccgggacggggtgtcggaaacggctgtgccccacacagctttctcgtggatcatgtctgtgcagg

SEQ ID NO: 91448 - DNA, 1034 bp, Homo sapiens
ttccagtctccaggattgccaggccctgaggccagagcttctgctttcaggaaattcactttttgacccagtagacaagacttacctcttctccaagagaaagacttggagaccaggccagaaccaggaataacaaacaccaatggccaggtgtggtggcacgtgcctgtaatctcagtactttgggaggcctgggtgggagaatcacttgagcctaggagttctagaccagcctgggcaacatagcaagaccctgtctctacaaaaaaaaataaataaaattagctgagtgtagcggtacacacctgtagtctcagcaacttaggaagctgaggtgggaggatcctttcagcccaggaggtcgagactgcagtgagctgattgtgccactgcgctccagcctgggtgacagggccggactttgtctcaaacaacaaaaaattcccaatgtactggctctgggggctgcagaaggctgactccacatttggtcgagcaaactgaattttacgagctgctttctttgtgaatgttttatcatagcgaatttggaacacatgcagtagtggagtaggatagtgccatgaacaccacataccgggcacccagcaccccccaccaacaccaggctggccccatccatagcaccatccacttccctcctttcatgtgatttttgaagtctataccagacatcctatcaattcagctataactatttcttttttctttctttctttttttttttttttgagatggagtttcgttcttgttgcccaggctggagtgcaatggtgcgatctcagcccaccgcaaactccacctcctgagttcaagcaattctccggcctcagcctctcgagtagctgggattacaggcatgcaccaccacccctggctaattttgtatttttagtagagacagggtttctccatgtcggtcaggctgatctcgaatccccaacctcaggtgatctgcccacctcggcctcccaaagtgctgggattacaggtgagagccaccgtgcccagcc

SEQ ID NO: 91449 - DNA, 1005 bp, Homo sapiens
aaactcccccgccctccttctgaaacccacttaccatgtaaagttacacggttttaacttgactctgcatccatttccacctgcagagaaagaggaaaatgaaagttctgggagatttagaatctcattgtaactgttaatttcagccaggatggaatccctttcctatccttgtcccagccatgactattatcatcctccgttgacctctctcccccctcctccacaagatgaagtgttaacaagcagaggaaaattagctccactcccccagcacaacatcccctgccctgcagaagtcgtggaagccataagccatccctccctgccttcctcccccttcatcagggctgagtggccagttgtcttcctcccctgaggatttcatcatcctcagatatcccagagagtgtttgcagttgttcatcctaaattacactgttgttttagcctgttgtgtgctcagagctgattaataaacagaaattaagtcacttatttactttttgcttcaaatcacagtgtgcgactcgagtggttgatatctcactgatatttgtgaatgcgtggatgagtgactggatctgcttgtgtgttgaatggaattcaaggttccttccatcagtcccaaaacatcattcctaagagctcacatgtgcctgtctgtttttttacaaaaacaccttttgtctcttctaatagtccctgaatgcttaggtaagagtggagaatgagagctctcttctctgacatccaggctctgggcatctctcaaaaagagatggtcaaagaatctgatgaggtctgctgaaaaggaagggtgccatagagaaccagaccagcccccatcctggtgagcggtgcctcctcacacaaaaagctaatggtttgggttggtgtggtcagaggagagcagctctcagagacagaggtgaggatggaggccctttcattttcctggtgagtctttccatactactttttaaaagaaagtcggtactttaa

SEQ ID NO: 91450 - DNA, 1102 bp, Homo sapiens
ttgctcacagctgcacccgtccttagagatctgacctcagctgataggatactcctcttctggaaggcgacaccttccccctggagttggcctgcaacccattcacatgctggtaaaccccttctccagggaggaagagaatagagccctgatttgtagcacttgccaatatctatggtgtaaatactcccactgcatccagctctaagctaccatgtaaaaataaacaatacgttgcttaggggatatagacatatgccacacacacatacacacacacacacatacacactactaagaagagaaaggaatgataaacacagaattctgtgaagtgattaccccggcaggagcaggagagggctgtccaagaggggcaaagagggagcgtcaatgatattgatagaattctgtttctgaaactgggtggtgaatacctggctgtttgttttcttcgtctttatagtgttatatattttcttttgcatgaatgaaatgtttcatgacaaaaaacaagtctaaggaaggcttttaagctttgagatttttttttaactgacacacaaggggggttcctagctctttgtggaggccgaggaggtggctcagcgggtctcctggctcccctgcacttgcccgctgggtatgatgacaaagtccacacttctaatgagttctggtggagaaggaacatggcctggggaaggagattttcctttccctcaggacaggcaggaagaggaggtggatgaggggctgtccacagagctgtcccgtccagtgctccctcctgccaaggacccaggggaatgccgcctgccactcacccaaagccaggctgttcgcactgtctgatccacggcatctagggccttaatcaatagtcatgtagctatgccccaggcactcgccaggcccaggcactcagcttccactggatggcggtgagctcagggaccctccacatcccccattatcatctccactctccaagggcagaagtgcaggacctaatgggtccgaacctgaccaagtccccacacctggtgagaagtggagacacagcttctgccaggacagatggggcctgcagcccatgctc

SEQ ID NO: 91451 - DNA, 1091 bp, Homo sapiens
ccaagtgacttgccctcatccatgtgcctggacttctgctgaacggcttccctgtgtctggccagatgcaagctgtatcttatcaccatggggatggtattaagagaggtcctaggttccctggcccatggagggtgaggggtgctttctgagccttggtccacaaggctgttgcaagaggagacacgcttggtaacatggcttgaaaggaaaataccaggaaaatctggtttgttctgaaatattttggggcaataatggtgagcatatgtttcagtgctgtcattagccgaattagcagacatggagctgcccagaaaacacatgtgtgagtgtgactgtgtgtgtgtgcatgtatgtgtgtgtcatctgctacagcctggaggcctgctttggggtgtggagacagatagagagatagtggcggtggagtcaatcagggagggctgcatggacctcgcagggtctcagagagcatgcagaaaggacaattctaagtgtctttgaccccatggtacatgactaggaggaataagccttctctggttttgtcgatgcctcccgcagatactctgggcagggatggaagcctagatgcctcaccgcaaggagcggccgagcgggtcctcgcttcacacacacggcagcaccggcaccgcggtgagcctgcagggtgggctgggtccctgccgggagttccctctttcccttcttccccagtgcctgtttactggctgtccttccttgggaccatgacactccaggtggctgttgactggctgtaggattatgtatttttgaaacaaaaatgctcttaatttgatgtgaaatttactacatgtataaaactcaacgccttaggtgctgaggaagtcactaatttagaggtgtctcgttactgagacaaacttgcaaaaaacccctgaatcccaattcacaaattggtgattcgtttgtcaggggatatttcacatctaacacataagcccacgacctttaattagaattttgcagtttgttttatgcccctggaggctgacaccttgaaaaattttttttcttgatttcttattgctaataagcatctttct

SEQ ID NO: 91452 - DNA, 1031 bp, Homo sapiens
accaagcccttggctactcccacccctctttagggttcctagttatccctagctcgacctggggtctgccagggcagttgccaaaccagagctggccaccctgggcactggggaggtggtatcagccctggctctgaggcctggctccttctccccggagtggacagggacaggcatcaggggctccccaagacccttctcctggtcttgcatttgttagaaccattgcccttcagaggacagggtaccggcacctgccttctctccagtccccatccgccaccactaggtgtggtgtgcatacgctctggcatgtgtgcacatatgtatgcactgtggtgcatgtgtgtgcatggtttctgtgtgcgtgtgtgtatgcctgtgttgtggcatgtgtgcaagggccctgttgcatgtgtgtgctgtggcacacttgccatccctcctgtctgcctctgtttctccctgtgggctccctgagtgagcggcagtaggggatttgtgccgtcatgtctctgggtgcctggtgttgacaggtgtgtgtcctttcctggatgtgtctggatctgcatgatatgtgtgtgttgggaaggaagggaccatgtgaccctgtgcctgttgcacaggcctgtgtgtctcacactcgtttacatgggttgggtggggaggatgtatgtcctggctcgtttactgggtgtgtggctgttggccggggtgttggatggttcatgtgcattttctgggtgggtctatctggcaagggtgtgtgcaccaggcctgtgaccagctggtttgtgtgtagggggtaaggtgcctgtgtcttgctatacctttccaggcctgtaacataacgtgtgttggcaggctggtgtgtacagctgggtgtgtccctctctggctgtgacttgcgggtgtaggcaggatgtgtggtgtgtcctgttaactgtagcctggctgccccaggtgtgtgcagatgttgtcaggcctggaacagttccagagtcacccatgtcaggtccctcgcccctcca

SEQ ID NO: 91453 - DNA, 1067 bp, Homo sapiens
ctccggcccgcggcctcctcgttccctcccctccctccgtcgagctccgggaggcctctcgcctcccttctccgggccccggcgtcgcgggccggaccgcggcctccccgcggctccctggtttccgccccccggaatgtccgcgcctgaagcccggggaactacgggactgagtgcgcggcgggcggccctgaagtccgagaacgggccggagaacacggagaaacgcgtcttccaactccgaaattcggggcttctgccgtcttagcacaaaacaaagccggagtattcaaagaatttttccgcccagcttgagttcatcgcggatgcgttgactacacagcacccattttctcactttgttcatttcaattcgtggcgatcttcctctggtgaactcttgagtaatgtgctaaaactttgggtttgctctgcgacgcagacattctcgaaatgccatcgatgccgtggagcagatcccatctccctcggctcatcctctgttggtatttacctgttaaaccggaatcctcaaagcctgttgtgcaaccacctcattagggcgcgtggtaaaaatgcttgctgctgccccgacgcccctgtttctggaaacgggttcaagcttgatccaggatccttcttgaccaggcaagcttgacctttgatccaggctcagtgggcgttgactgatccctctggaggctctctgggaaagggaattcggccgagaaggaaggtgcccctacccacagtgttaatatttggcatccctagagtctgtgtgggttttgtttccgttcacacgtgcagggcctttgctccgccaggaaaccagaaagaaaataaactttagctcctgaatcttaaaggaaatctcacaacagtgtaaaatactttgagggaagctagataacctaggtgattttcccagcacttctggtagaggtgggaactgcatagcatggttagggaccctgtggataggttaggtccaaggataaagaagaagattttcgaaatctgtaaaattttaaaaatcgttaacagataggggagtggtttcacgg

SEQ ID NO: 91454 - DNA, 1057 bp, Homo sapiens
tatgctatctgtttttcttgtgaatgtcgaagcagttgtttcagaaaatttcttctattttctgtgataaatactaatactgaatgtatttcatctaccttttgaagactgtgtcctatcagggcaaactgctggtaatggaaaaaaaaacaaaataagtaaatgaagaccgtgtcctctttgattcttctcttcttctttactgccttttttctttattttgatacacctttttctttccttccatcattgcctccctcctttccctcttttcttcccttctttccatctttcctgtaaaatttttcttgattccctgatttttctactctttttttctttagtaggtcctttcagtacctgctgcttgccaaaacgtgaaatgcagattctctttttacttgactctgaattcacctggctaagctctgttaggccttaggaagcttaatagagcttctctaattttgtagaagaagggcctttgactttttccctctctgcttcaggatgatctcatctgctactttggaagcatgagactttatttgttttgatggtactgaggttaggggtgagattgatttatttgtaattagtcctttctcctccttatccttccttttggataaaggtaaaaatataaaatcctcctgcctgctaaagtactgtttggccatcagagaaagggagcttcaggtagggcattccgcagtccctgtccccatcttagcaagttgaagatgctagtcaaaatttctctggggggcaggagagggcagaggatacttacgtatggattctggggttggtctttcagtttcaactaactcattctgtacctgaatgatactatttaataaaatttcgtggtatgagtttgagaacttgtcatgattttagggatattttaacttcctttttgtttctttcctttagttttagggaaggatcttctgccaaactacctgtgccactgtctttcctggaagtctcataagtactagaaagaacttttagaataagagtgtaggacattatttacactgaaataaca

SEQ ID NO: 91455 - DNA, 1001 bp, Homo sapiens
cgtgggaggttgagatagaaggatcgcctgagcccgggaagctgaggctgcaggaagccatgaccacaccactgcactccagcctaggggacagagacccagtctcatcaataaataaataatgaaaggacattttaacaccccactacaaccactaaagatacaaataaataaaaatataagaggaacacaacctcataatacagatagtcttttatattgcatatatttaacttcgggcaaaagccactctattttcctctttaaaaaaacttttttagctatagattaatgaatactttctcagacatttcagaactactgcttagtacttgaaatacaacatttagaatctggggtactacctgaatgtgatgagtagtcacacatctcatatcctttgttttcttgccagttcgatcctttggtacagaagacagaccgacagatcgtccaataccacctcgagatgaagtctttgaatacattatattccgtgggagtgacattaaagaccttactgtttgtgagccaccaaaaccacagtgttctttgcctcaagacccagctattgttcaggtaactgatggtaaatttgtcttggagtacaggtaaactccgcacagggttagccttggcttttttctctctagttgaatgttcatgtagcttatcatttccaagttactgggatacctgaaattactggataatgttctcatctaggtttttctctttgtatcataaattagaactaaggtaagaaacagctgaggaatttattatgaaatattttctaatttcaacaacaattaccatagctaacattgaaggctactctgtagaagtgctgtgcatataagataccctctgaggttggtactataattattctcacttttaacaagtgaggaagttcagatggagccacaatttgaacagatccaggcagcctgcttcagaatctaggatccgtgctaccatgctattgagatatggtt

SEQ ID NO: 91456 - DNA, 1074 bp, Homo sapiens
cctaaaaaacaaaaaacaaaatgtgttttataagtgattataaaatgtttttttcataggccaaaacttacataaaccatgatttcccattataatccagtggaaaaattgtaatgcttctattagtggtaacttaattttgaaatgttaagtagattgtgcctgtgtcggtttctgggttttgataaatgatcatttatttggctaactttgccattaatggctgaaatggtattgcacatttgtaagtgcatactttagataatcataaattggggaaatattactaataaattatccctgaatcatctaggtacataataatgcattgtcagcactcaccagttgtttgacacctgcaaatatgcacagatggacagtaacatttgcagcatatttgggggatttttttacgtgaaatgagcattttttttaagcaaaacattatattttggaataattatgagatgtgagtgcctaagcagagatgtacagcaaacattatcaggacagaaagcatgatgggagcacccgatgttacattcttcagttcatgctgtgaccaggcgacctcataaaaggaaaaatataatgtataagtacaaaccccattttttgttttggctcttttatatttgtattttttgagacagagtctagttttgtcacccaggctggatgcagtggaccgatctcggctcactacaacctctgcctcccaggctcaagcaatccacccacttcagccccctgagtagctggggttacaggcatgtgccaccacacctggctaatttttgtattttttttgtagagacaggctttcgccatgttgttcaggctggtctcgaactcctgagctcaagcgatctgcccatctcagcctcccaaattgctgggattataggtgtgagcaaccgcgcccagccaaaccccatattaagcaaaaacttgccaagagatcttttaaaaggcaaggaatgagtatggctactgtgtaattatctgaagggttttttttgtttgttttttggttttgtttgtttgtttttttgctggccttttagtttttat

SEQ ID NO: 91457 - DNA, 1314 bp, Homo sapiens
ccatctgccagccaaaaggcaggagagaatcaggagcacaggcgaggtagaactttagctgtttactgttccttaattgactgatcaatgttttccactcactttattttcattagaaggatttacttcatgtgaatgatcccagaaaattaaactgaatatgatagaatgtttggtctttcaaatttgactcaaagtggtggtggtgtgggtatagttttttgggcattgcacaggctttgttttgggttttttggtttgtttgtttgcatttctaactatggaagtttttgatgatgtaccctgagttgatttggcactttgcatgtcttcttctgtagctgaagtacacaaagtttcaaggccagaaaatgagcaactcagaaatgataacaagagacaagtaggtaagttcttggatctaaaagtcatattctatgcttctcaacagggagaatattttaaatatatgatacataattactataaaaaaatgaaaggcgggggttgtgactgtaaaggaggagcacaggggagtgtcactgtggtgacagaacagtcctttatcttgattgtggtggtagttttgcaaatctatatatggtagaacatcatagaactatgcataaagacataccaaaaaatgagtacatgtacaaactggtgacatctgagcaaggtctgtagtttagttaattagattgtgcctgtgtcggtttcttggtttcgataatgtaccataattatataagatgtgactgttggagtttgggaagttgggtgatgggcacaagggacgactctgaactagtttttcaatttttcttttctataattactttaaaataaaaagattttttaaaattttacttttctgggcccggcacagtggctcacgcctgtaattccagcactttgggaggccggggcgggcggatcacgaggtcaggagctcgagaccagcctggctaacatggtgaaaccccgtctccactaaaaatacaaaaaattagccgggcgcagtggcgggcgcctgtagtcccagctactcaggaggctgaggcaggagaatggcgtgaactggggaggtggagcttgcagtgagccgagattgctccactgcactccagcctaggcgacagagccagactctgtctcaaaaaaaaaaaaattttacttttctggaaaaaaattctacttagtggtaggcctttttttttctgagatggagtttcactcttgttacccaggctgtagtgcagtggtgtgatctcagctcacggcagcctccgcctcccgggttcaagtaattct

SEQ ID NO: 91458 - DNA, 1687 bp, Homo sapiens
aatatttttttttaagacagaaggatcatggtgtaattctggcttgtggccgaggcatttttaatagtagaggtgaatgtttcaaacatcctacttatctagatttatgtctggatatgctgctgtggggttttgtggtttgttttctcaaacccaggcagtttgccaaacctcagcaaacagcgcaaacctatcttgttaccctgtagtcacttctcatccttgtcagtatgtgtggagcatttcacgcaattgtgatcattaaactcatactggtttctgttctgcgtttttcagttaacatcaaatattcttcctctgtttttttcttgttagtcatttttcttgtgttggatatttgggttcccacgtttttcactataaattatgctgctttgtattgctttatcatgtctcttatgattggctgaaattttactgtgttatagaggagagagaatgtgtagatacaggaaggcttgaataatatagagccatctggagagacacagtaaagatggagtaggaagtgttttgagtcagtaaggattggtgcttgtctgttttttatctgtgatgtggaaataacacctattttcttgcaatttgtgccgattagtgtttatttttcttactataaatcttggttcctgttattctttccataaaaggctttctacattttgagaacccactgtgtgtctggcacttcagtttgccggtgttggggatatagcagtaaggaaaacaaagcccctgacctcaaggagcatacattaatttagtgcagaagcctccacacttgcctggctgtatactctgtcagtaacacatgtgagtgtggactccataaatacaaatgtttagaaattttgtgtgagctattctcagtctacatattaaatattagtgaaacttaattttttattttgtataaaaaatacaaatacaataaaatatatagagagacctgtaagcatttctgttgttgactgttgaatctaaagagcacaatagcaacatctgtgctaaaccagctattacatattgaatgtcctttgtatatattctttattatcatagctccaggtgctccttcagctccaaggagagggcgtgggggtcatcggggtggcaggggaagatttggtattcggcgagatgggccaatgaaatttgagaaagactttgactttgaaagtgcaaatgcacaattcaacaaggaagagattgacagagagtttcataataaacttaaattaaaaggtaagctttgatttttcttttcagaaaataatcttatttgatctgtgaattacagatgtttctcagattaggtgtttttatgtaattcagattagctgtcttgacttttctgatatgtgcttttgttcttagaagataaacttgagaaacaggagaagcctgtaaatggtgaagataaaggagactcaggagttgatacccaaaacagtgaaggaaatgccgatgaagaagatccacttggacctaattgctattatgacaaaactaaatccttctttgataatatttcttgtgatgacaataggtacagtttttaagctgttcttttatcttatgatattgattgaagtgtaaaatggtttcatgtaaattcacgaggtttaatgaatactaccataattgttttgttttgttttgagac

SEQ ID NO: 91459 - DNA, 1022 bp, Homo sapiens
atattacaggaacatattgaactcatatgccatgaacaactcgtgataacttagataagatgcttttttttttttttttttgagatggagtttcgctcttgtcacccagactgtagtgcagtggctcgatctcgactcactgcaacctccacctcccaggttcaggtgattctcctgcctcaaccccccaagtagctgggattacaggcacctgccaccatgcccagctattttttgtatttttggtagagaatgagtttcaccattttggccaggctagtctcgaactcctgacttcaggcgatccgccccctcggcctcccaaagtgctgggattacaggcgtgagccatcacgcctagccaagatgcttatttctaattagctttagtaattacttaggcttaatttgggagtagcactgcatattttggctgagggatattcttttaaacctgatatgctgaagattatttgcttttataatagagaacggagaccaacctgggctgaagaaagaagattaaatgctgaaacatttggaatcccacttcgtccaaaccgtggccgtgggggatacagaggcagaggaggtcttggtttccgtggtggcagagggcgtggtggtggcagaggtggtaccttcactgcccctcgaggatttcgcggtggattcagaggaggtcgtgggggccgggagtttgcggattttgaatatagggtaagtgttactgttaataaattctttggggttgacatgcattttacaagactcaaaacatttttacttgtttttgttttgggtgaattgttttgaggacattagaataacttccattttgacttttcagtagaggatatacgtgattcagatgtatatataaagacattatacaaaaaaagacagtatagtatcacctttatttcatgttaacagaatatacttttaacacccaaagagtctatctaggaagcacatactcccagaatggaagggcaagctttaacatttaatagcagtta

SEQ ID NO: 91460 - DNA, 1227 bp, Homo sapiens
ttagatgataaggaaactaaggaccccaagaagttaattgtcatgattgaggtacaagctaacaaatccaaaactcactctcttgacttgtggcctgattttccttaagggtaatattgtaaatataggccagtgcaatggtgtacacatgtaataccagcattttgggaggccagggcaggattgcttaagcccaggaattcaaggacagcatgggcaacataaggagtccctatctctataaaaaagtttaaaaattagctggagtggtggcacatgcctgtagtcccagctactcaggaggctaaggcaggaggatcagttgaacctgggaggtcaaggctgcagtgagccatgatcgcaccactgcactccagcctgggtgacagagcgaggcctgtctcaaaaaaaaaaaagaaaagaaagaaatataaccttatggtaagtttggttgtatggtgttttccccctcccaccgcccattcttttttgaggtgagaatggaaatcaggactagcaataataatgtaaccagctcctgttttatatgctgctgtcagggaggttaagccaccatggtgggtgataaaaatcacatctgtgtttcctcagatggggttcaaagacaacaaggtgtctgaatgactcagcataatgctctctctcctctccccctttcattttctcctttctccctctcctgtccccatctctttctctttttttttttttttttttttttacctttcagaaaaccacagcttttggaccctaaaaggtctggattgatcgtactgctttctgaaaggtaaaaaaaacaaatactttgggaggtgtgaaggttggctttgtgggggacagcaggttcatcttgtagctcattgctgtcaacttatgccataccatatgtatttcagtttaataacggggtgcaaatgttttggtgttgtatacacagatgaagttaagtctcacctaggaaatgtctgtttctaacagttggggtgagaatcagcagtaaaaaccaggtatatggtagcagctggtctagaggaaaataaaagcccttggctccagccctttgtacaggcctttagtttagggtcagtctctctggaaatcttgagatttttattgcttcctcactggttactttttaaaaattccccagtcagctttctacttttcagagcttatttcagatttaagagttatccttgtaaaatt

SEQ ID NO: 91461 - DNA, 2097 bp, Homo sapiens
agacaacaaagttgctgcatagtctacaaacaagtctctgaaaataggtgaatttctagctcttcatggtcctgaacattgatttcagtctttgcaaagaatgaagaagtgaattcgctgtacatttgtcaccagcactgggtttttgttttttgtttgtttttccgcttaatttcaaagataaaatgcagttacttttgggggtggaaggctcatcttaaaacatgagcattaaatatatttggaatagcagaaggttaagtaatttcttatgtatagttaaactaaagcagtacttcagtgggacttaacaagtattttttcatcactgaaaggttttttttttttatcactaaattgtatttggcaattgcaagttgcctgcagatagggccgtgatactgtgttttgagccacagaaggttgtgtgtgtgtgtgtgtgtgtgtgtgtgtgtgtgtgtgtatgtgtgtgtctttttcctcctttcttttggggaatcctgtaatatgaggtagcttatttcgtcaattaattagggtgctggatggtagagaattttgtcagtcaactatgtacacacagtaaatactgtttcttaggcaaaggtaacttttttatatagttgtaaaattccattatattccattgccaaagaaacattaagaactttgtatagctgtataaaaagcaactaattttttaaagaataaacattttaaagtcagcaaacatactgtgtccttgcagaagttgatgtgctgagcagcagccttatgggtgggtctttttttcttagttttccaggcttaacatttttgattttgttttttaatgtttggaacataaatgaagatttgatacattatttcattatctaaaaaggattaattattcatgctcattgtaagaacttcattttgtagcaaatggcatatcacaggatctgtccagataatcgatattttcagtatacaaatgtaaataatcacagatgagaatgtacttagctgtattttcaaataagtaatcttccccccttttgtaggactttaaaactaggcatcaatgaacctgtttttcctattatgcctggaatttagtcatgataccttgactcattccatcatatttcaagaggattcagagtgctagaaattattttggtagcctgtaacacacggcaacactggtccttgggcctatgatgacccacagatgactcagtatagagttcattgctaattataaattactagtgaatctttttgatattttaagctctagtgggaaaaatctggccacttttgtgtttttatgaaggccatggaataaaaggatccaaagatttaaatatttttatctaatattttgattgttttcttaactttctccttaaaacattcagtagtgataaagatatagaaactgcactgtaggagaattggaatatttaaggctggttgacattttttattttcattttatatcttttgtatagctctacaaggcagtgttttgtaatttggtttcattatgaagatccagtacttggcagccatagtttagacaatattgttcagtgctgtttgcttgcatgttaacaacaaaaccttttagaggacccacaaatcatgatattgaacacagttccgaggcattcagagcatcagagcaagtaccatggcaatacatgtgtagactgttggagatgtcccgggccaatttcaagaaagaaaactgtaaatactagttctacttgctctgaaattatgagtttatgcgttttcccagccctccgaatcactgactggggcgttttgtgccccagcaataactggcagcatggcatacctgcagtaccccttacaatattaaagcaaagtttttattctaaaacagaataaaactgttcaataaaaaatgctcgtcaaagttctttctctttaaatagtaacattctgtttcagtaggaacataatgaaaggaatcttttaaatggaagagcggaattataatgtttgtattccctgtaataactataaatcagttactttatttctaagattgagttattgttgcagatgtttagggaaagc

SEQ ID NO: 91462 - DNA, 1319 bp, Homo sapiens
atcagaaaaaatgtcatacacattagctatctatagaaaagatataagtcaaaagatatttcgtaaatgtagtttgaagaatctcagggaaaactttaaattcaaccaaactgacccagctataaccccaggaaggcatgcatggaatgtgtttgtagctggaaagcttaaacttaattttgtatcctcagaagaaatacttgtgtttctgggagaggattgggacagtgtctggaaattggggtggcgggtccaagagaggaattacgtggtgtgtgtgtagcactctctgggggcctgaccagaggagcagtgcagcgttccctccacaaagccatctgcactaacacacagatgggcgtgtccctgttgttgcctctggctgcaagggtctctcccttgcttagcgtctgtcctcccagtaccatctgagtagaagatagctgcacgtggagatttcttggtaaggagagaatgtgagtggttgagggctctgcatctaagctgcttggatcagatcctggtcttgggatgctggctaatctttcagttttctgatttgtagaatggggataatagtagcacctttctcttagtgttgcagtgagggctctgagcgtgctacccggcacctgtgataagtattcaatgacagtattagctctcgttggtattcataaagtagtaactggcctctggttcatacatcagttttctttgagcttagatagcctaaataattaatccccatggaactgcttgcttctgggtgcattgaataagctgataaacagacactgggaagtaatgacagataagctcttcctacactgctcatccagggaatccagcctgcagttctcaggggagacttctggagaaggctgttcttgagctgagtactgtgggaaaaagtaagtccagtgccacagcaagaggggaggactcttgggcaggggcatgacacgtccaaaggtgtggaggtgagagcaagcatgaggtatttgagctgcaggagattgagggtagagtctggacaggtatgaataaggagtagagggaaatgacattggaaagtgggagcagtccttgaaataactaataacaatgtctaactgggcactaacagcacttcaggtcctgtgctgagtccttcgactcactgcgctaaccaggtttgatgctgagagctttgtctacattgcattgtttaatcctcacaacaaccctttgatgtaggtacttacctctggtatgtgtggcatcatgtcacatgtcacctggtaggtctccctgcctttttttttgaaatggaatct

SEQ ID NO: 91463 - DNA, 1003 bp, Homo sapiens
ataatgttttcaaggttcatccatgtatcagtactttattccttttcatggctgaataatattccattgtacagttatactacattttgtttgtccatttgtcaattgatagacatttgagttgtttccagtttttggtattatgataatactgctccaaacgttcatctgcatgttggtttgtagacatgtttttcatttctcttggatatatatacctaggagtaaaatttcttggttgtgtggtaattttatgtttaaccatttgaggaactgccactgtgttttccaacatgtctgtaccattttgtattaccctgagcagtatatgaggattccaaattctctaacattttgtcaacacttgttattgtctgtttgattatagtaatcctagtggttgcgaagaggtatctcattgtgattttgatttgcatttccctgatagttagtgatgttgactgtcttttcatatgcttattggcatatcatctttggagggttcatctatatttgtgttttgtttgtttttttttctttagagatggagtcttgctctgtcttccagactggtgtgcagtggtgccatcttggctcactgcagcctatgtttcctaggttcaagcagttctcctgcctcagcttcctgagtagctgggattacaggtgtgcgccaccacgcccagctaattttttatttttggtagagatggggtttcgccatgttgaccaggctggtctcatgctcctgacctcaggtgatctgcctgcctcggcctcccaaagtgctgggattacaggggtgagcacctgtgcccagcccatccatatttgatcatcagttttggcaaggtaaattaagttgcaaaacctgaaactttaaaggaacaaacataacacatttgattgtagaaatgagggaaaaagagtgtgtgtgggtatgtgtgtttatgtacatatgtgtatatgtacagtggaagatgccataaacagatttgtaaaa

SEQ ID NO: 91464 - DNA, 1039 bp, Homo sapiens
aacaaacgccatttaaaaaaaaaagaaaaacttgttttcaggaaacattagaggaaatttggagaatttcagcattgcatagaagcagccttacaggtaaacggatttgacgggcaggctctgtcaaaattctgcagaagtttgatcttccttcttaaggactttgtgtgaagtaattctttactgcttttaaattgctgttgatcagcttctgggtttttgggttctaacttttttgggtatattgaagacacagtgtattacattatattacatttttaaacgttaagttatttttctgccattgtaaatacaagtatcaaaatattcttgcaaagaagtaaacatttttctcagcaagcatatccttttagtaagagagtggaatgctaaacagttcttatccagcattttggacatcttttattttttgtcagagatcctgtctacactgaaaatattaattatataaacctgttgtctctcacctctacattggatcacatggtcacctgcctcatggaaatgccttttttaaaacttcgatttgcagaactccactatttttatacctagctacagttttgagaaagaagaatcagaaccctgacccacttacggttgctgggacaattccccctcccgcatgtattgctgcagtgcccaggacagtaaaatggactacaagcggcgcttcctgcttggcgggtccaagcagaaggtgcagcagcaccagcaatacccgatgcctgagctgggccgagcactgagtgctcccctggcatccacggccaccactgcccccctgggcagtctgaccgctgcaggcagctgccaccatgccatgccccacactactcctatcgccgacatccagcagggcatctccaagtatctggatgccctgaacgtcttctgccgtgccagtactttcctcacagatctcttcagcactgtgttcaggaactctcactactcaaaggcagccacacagctcaaagatgtgcaggagcatgtcatggaagcagccagtcggctg

SEQ ID NO: 91465 - DNA, 1104 bp, Homo sapiens
ccagagcaatatttgttgtttctggaatttatgtactgccaggggatttagccataggccaataagggtctctctcagaattttcagcaactcagatgaaatggctaggcatttggattttttccttttggttttttaaggatttttataagcaaggccctgagagtcactttgacattcatccctggggaaagaggtctgtggcctaacattgccaggcaaggcctctactcaggagctcagtccaggactgtgggtgagaaaagctctggattcgagagtattcaaatatttgaccatttaagagttaggacaaaggatgatcctgtccccttgccatgtggccagtgcatgtgtgcagtgttcccaggtgcttctgacttacagccaagtttgggctgtggttattgattgacagatactgatgcctttgtccaggaatggtggttgctgactgtgtgctctgccaccctgccttggaaccagcagggcatatgtgagtcctgtccagtctatactcaccagtgactttgccccttagcccgagtggttcaccctcacagtctctctgttagagaagtgagttgtgactatggggtttcactagctgactagtgcctgtgacactggtacatcagcctaggaagtcagttactgggcacagagtcagaagacctgggtttggaaggtgacatctatcacttaaataaaattactttttcagtggaagtgtacataaataaaagaatcaaagtgacttgtgatttgtgcattcattccacagatatttattgtatgccttgtttctgcctgatactactccagcatgtcgattgcagtagtgaacatgacagaaatctctcccttcatgtagctagaagggagtttcgatcttagagaaggtagttagaaaaggtaccactgagaaggtgacattcgagtaaaggcctgaaagggatgagagagcaagcctgttggcccagaaaagaggattccaggcggagggagcgccgagcacagagtcccagaggcaggagccagcctggagtgttggaagagcaggaaagaacctgctgtggctaaaacagagtgaatggaagggag

SEQ ID NO: 91466 - DNA, 1068 bp, Homo sapiens
cccagcctcctgactgttcagctcacacacgtgaacctaacacctgccttggtcccctgctccatcttctagacaactcatgctgaggaccagcccacaggaggaggcctccgagttctctcttgacgtcttcaccttgaccttttttgccaccattttagtctgtccaggcctttctgccctttctacattccctttgctttcagccagtgatgccaccccctactacactgagcaaatagaatctccctgatggcagcccttcttcctcatgtggccaagccaccaccactcctgccatccctcttcacaaccatcttttcttccttcccctgcctcatgacagcagaggaggtgccctctcctcctgtccaggcttgccccgtgctggccttgcccccatcctcgagggcccagcttctgtggtgcgacctagtgttttctctccctcatcctcagcctgttcccaccagtacacaaagatgcttcccacagaaaagtccactctgccctgccctgtttctctgctcttttctcagccaacttcttggagtagttgtctacctttttttcacctttcattcattctaaaaaattactattttatttttactgcaccttgtggctccttactgctcctggcacaccccgtggacagtttactcagagtagtctaaaaagtaattattattgaagtatttcaggcacatagaacatttcacacccatcagtgtatcttccttttagctgcctgccatatttgctcatgcctgttacatatttttaacagaaaaatatcaccagtgcacttttttttttttttttttgagactgggtcttgctctgttgcccaggctggagtgcggtagtgatcacagcttactgcaatcttgacctcctcggctcaagcaatcctcctgagtagctcagactataggcatgcaccaccatgcttggctaattatttattttattttactttttatttatttttttaaagacagggtcttgctatgttcccaggccggtcccaagctcctaggctcctgcacccggtctgtaaatgca

SEQ ID NO: 91467 - DNA, 1054 bp, Homo sapiens
aagtaggtaagtcttttttccagggttcctaaaataaagggagatttcggccgggctcggtggctcaagccagtaatcccagcacttcgggaggccgaggtgggtggatcacctgaggtcaggagttcgaggccagcctgaccaacatcatgaaaccttgtctctactaaaaatacaaaactcaaccaggcgcagtggtgggtgcctgtaatcccagctactcgggaggctgaggcaggagaatcgcttgaactcgggaggcggaggttgcaatgagctgagatagcgccactacactccagccagggtgacagagtaagaccttgtctcaaaataaaataaaataaaataaaataaaataataaaataaaaaataaagggaaatttcctttctcttcaggatggttaattaggctttcaaaatttgggctgctcactttgcaatacaaacaatctagaacttctagtttatttgcttagatggtttattgctgcattttacttgagggggtttttcttgttgttgttattgttggtctaatgttgctagaactgtaccaccctcttttacctaccagttactatatatgttacaggcgacatctagactaagagaaagaggctgtgatggttgcctggcaggaattgaagttcaacaactcttttgttctcaaagtgcagcaattcctgagcaccagctaaaagaactgaacataaaaatcgacagtgctttgcaagtaagtttttcagaactgacatactgatttccacgggatagaaacaagggagggagttaaagttgtgatgttgaatcaattagaaagggttatagagtagtaattgaccttttaatagctatagaaatttaagatttctatttccattgaactttgtcatcttataatttgctttacgatcttgattgttaaaaataatttatttccaggcatataagatagctctggaaagcttaggacactgtgaatatgcaatgaaagccggcttccacctgaatccaaaggcgattgaagcaagtttgcaggtacacttttcc

SEQ ID NO: 91468 - DNA, 1032 bp, Homo sapiens
agaatatatatatatgtatgtatgtatgtatgtaaacacacacactaatttgagaggacccgtagggtgtctgagcccagccacctgagtttttagtactgtgttgtcaggctcttcccaggcctcaggtgttgtcttttgtgctgtgtggggatgcattgctgcctgtatttatgatcttttgccgtggttctgagcattcacctcaccatgtttacaaagaactgttttgtatatagacattttcaggcacgtgctttgcaccaaccctgcgtggctcttgtctgtgttagctgtcacggtgtgcacactaatctctgttaaagttgtctatggctgttctacttgtaagatagttttctatttccttcagtaatgtgtccacagtaccctgtatttcgagttccattatactgaagtactcatgttttaatagtgcctctccaaaggcctcaccttggacagaggtcaatccttgatgctccagcacaggtgacgtcactaattgtcactttccagtttgtttttctctattaaggaagacattttctaattgcatctccatgggctgtgagactgtgtgaagccgtttgtgtggtctccatgtaggtgctgtgttcccggcaccgccttgctctgaacactggtaattccaggtgctgcgcttggcagaggggtctcgccaaagcgcatgtgtgtgcatgtgtgaacgtgtgtgtcctttgcatggttgggcgtgggtgccttgctagggcatcagcaggacattgtgtgtatagttacaatgcttccaaactggaactctacattttgtatcttttaaagctcctataagtaaaataactattggctttattaaaaatatacatttaataatactttgtatccttgtttaaaatgaactgcagaggacattatgtcaaaagccctgcctgactcattgctttgaaaagctgcatactgagttggtttttaggtcagcctgtcctctgattctagcaaggggaagaccacttgggatattacggtgag

SEQ ID NO: 91469 - DNA, 1110 bp, Homo sapiens
tttcatcttggttttcctcaatagcccttaccaccagcagacacacatcatctgttgtacttgcttatttggcacatatgtatccacagcgcctagaacactgcctgtaacgtggaaggtgttcgatctatagagttttgtcgaatgaatgaatgaagccgactagtgcacagggagtgcagcggcgcgatggtagctctctgcagcctccaacacctgggctccagtgatccccgggctctgcccaccctccccactgccacttccgggcagaggccagcaaagcggcggcgcaagaggtagggagagaggagctgaggccccagatcagcggccgcgggcaaggtcgctcagcgggcacccggcctgggtatcggggcgcgggtcgggggcggggccggggctcaggggtggggccgggccgggccgggccgggcgcctgcgccataaaggccgccgcgcgcccacgcgcctcgcttgctgcgcgctgccggcgctccttcctcctcggctcgcgtctcactcagtgtaccttctagtcccgccatggccgctctcacccgggacccccagttccagaagctgcagcaatggtaccgcgagcaccgctccgagctgaacctgcgccgcctcttcgatgccaacaaggaccgcttcaaccacttcaggtgcgggcgggccggaggcgggggctgccacgcgcggcgcccggaaccgggcacgcgggcctggggtctggaggcgggggcagcggtgcccggggaccccagtccccgacctccaggccacggactggggcccaggccgagtccgcacttcgtccttggagtctccttggagtgcgttcctgggggcttgcagcctcgccgggagtctcggccccgggtctgcttcgttacgaggaaaaacgggcccctccgtggggacatttcccctcctcctccccgtgcagctctggccatttgagcaggggctcctttcgcagttgtgaagagaggccttggctgacgcagcaagcgggaaagggctgtccctttccatccgctcctggccacatgagcttgggagcgtctgcagggcgggcagcccgggcgggggtgtttgagggag

SEQ ID NO: 91470 - DNA, 1031 bp, Homo sapiens
agccaagatcacgctactgcactccagcctgggtgacagagtgaggctctgtctcaaaaaaaaaaaaccaacaaaaaaaccaacccatctctggaaaaaataaataaatcagctaggtgtggtggtgtatcccagctacttgggaggctggggtgggaggattgcttgagcccgggaggttgagtctgtactgagctgagattgtgccactgtcctccagctcaggtgacagagtgagacgcctccagggcaaggaagttgtggggtcctgatgggaatctggatttcctgaatgtcacttagggtgatcagtccatgtgatggtctttgggtgtgtggcggggcctttccagccatctgctgtgagtggcagagctgaagtgcattaaaagcctagtgctgtgtgatcagtctgggtgtgctcagccatgccacatggcgaggatggcactgcaccgtctggggtgctgtttccaggaaagccttcccttaaagctggccactggagtacctgactcaggctgataaggtatttatagttcaaaaaaagttgctgaatggcagtaatcccctggtgaggaacattccccatggctgtgctctccaaagtttgccaagattgggtgaagacgttcactgtgaccttgattgtagtggcaaaacctgaaaccaagctgtactcatttgtcaggggacttacaaagtagagtcagcacatattcatatactgtcatcctgggcaccaatagggattagggagctatagttggattgatctgccatgctgttcaggatggactgggaagttgaaaaaggaagttgcagaattggtgggtatggtaaagactcatttggtcaaatgaaggctgggtgtaattgtaataaagatagacacatttggcttggtgcagtggctcacacctgtaatcccagcaccttgggaggccgaggtgggtggatcacgaggtcaggagttcaagacaagcctggccaacataatgaaaccccatctctactaaaaaaaaatacaa

SEQ ID NO: 91471 - DNA, 1246 bp, Homo sapiens
taatcccagcactttgggaggctgaggcgggcagatcacagggtcaggagatcgagaccatcctggctaacacggtgaaaccctgtctctactaaaaatacaaaaaactagctgggtgtggtggcgggcgcctgtagtcccagctactcaggaggctgaggcaggagaatgacgtgaacctgggaggcagagattgcagggagccgagatcatgccactgcactccagcctgggcaacagagcaaggcttcatctcaaaaaaaaaaaaaaaaaaaaaaaaaaaaaaaaaaaatatatatatatatatatatatggtaaattaaaaacaaaaaaatagaggcacctgcgagggcctgaaagctgggactgaggtaccaggacacggcagtaatgatgtttttgagcagcggattatgcctgggggtttgggctgatggcatcttcgcccctgtgccagcgtgtccggagcggtgactggaaggggtacacaggcaagaccatcacggacgtcatcaacattggcattggcggctccgacctggtgaggagaaaactgccttggggtagggtgggagtctgggcactgttggtcccactcaggtctttactttctccagggatgggacctggctgtctccacttttcgtgggccctgaattcttattctctgatgctatgtctccccgcagggacccctcatggtgactgaagcccttaagccatactcttcaggaggtccccgcgtctggtatgtctccaacattgatggaactcacattgccaaaaccctggcccagctgaaccccgagtcctccctgttcatcattgcctccaaggtatgagtgccgaaaactgcccggcccctggccctgtgtgtgttggggtggggagggacagctgtcttgccatccccctggccattggtcccttttggtgggttccgagtgaaccatggtttgtggatcaggtcagtacagctgccctagactgtttccatgcctagcagcaaataaggttgactgatgaaatcctgaacacatcagtttgaacctttgtgtcctgaccacacccgctcgccttgcggcatctctgctcagcctgggactgctcgccactttcttacaaacctgtcctttatgcctgctccttttcttgttgttgtttttgagacagagtctggctctgtcacccaggctggagtgtagtggcgtgatctcggctcactgcaatctccgtctcccaggtt

SEQ ID NO: 91472 - DNA, 1536 bp, Homo sapiens
ccgccatgcccagccatgcttgctcctttctgatcccagagccatgccctgataatagaggggttttgtttgtttttatttatgttctatttactcacatgaatgtacataaaatatgaagaattccatctgaattctgagataccttccagcctgggccgaagagagcctcaggttgactgcagcccctcaggggagaagctgcggcctttgacctgcaggcttagggttggggggtgtgtttaccgtcccccctcctctggttttaaagagctggaatctcaggaggttatgtggcgtcactgtcactgacctgcaaatactgctccatgggacagctgggcattgccttggcctctactgctgaaccctggctcaaggcctgcacccacccctaagctcgggcgcccactgctgttctctttggttgcagacctttactacccaggagaccatcacgaatgcagagacggcgaaggagtggtttctccaggcggccaaggatgtgagtgggctatagggccttcctcgtggttagcctctgggctgggaagagcagggtgggcccctgagtgaccaagtctggccgtgtttctcctgaagttggaagtgaaggcggccttgccggtgcctgcctttgctagatgagatgattgttcatcttggctttgtcagacccagccttgcagatgtgacagaacctgctctcgctggctgacagcccttgcatggccctttctctgcaggcccttggcgctgcaggaactcttggccacacctattttataggggagggacgtccctgagccccgtatgcttgtaagatgggatgagcaggcggcctgtgacccgtctgctttcttgaccttgacctcgatgtgggccttctccaacagtctcagaaccaaggactgggaatctcagtcccatgcagggccttggttcctctagtgatgggaagtgactaccctttgtctccctgggctggctgtggtaacttggctctgtctcttgtagccttctgcagtggcgaagcactttgttgccctgtctactaacacagtaagtgcccccgtggtcccctgtactgccttcctgggagtgcccagcatgtccaggtcatggcctctcagagacgcggttcgtaggtctggtggatcttggcttggctgatggtatggaaggtttggttgcctgtgggctgcaagccttccttgccttttccgcatttacccattcaacctctgcagctttgaggagggaggcttggagtcagtgggatcacgataaccccttcttccgtctcccaggcctgactgatacacagaacccttcatacacatgaccttcctaggcctttgtgcccagcatctccccaaatgtgacatgctaggtaggggtagaggatgcattccatttttcacttaaggacataaagccccaatgaagggaggtgacattttgccccctacttagtgtgtgtggttttgttttttttttttttttttttttttttaagacagtctcactctgttg

SEQ ID NO: 91473 - DNA, 6909 bp, Homo sapiens
ccctggctctggggaaggtgaggctcagctcacggagcacagctccctgcctcccggagctcctgttcccatcccgctagcaaatgcttctttgcatttctctccctttgtttttttttttgtagaccaaagtgaaggagtttggaattgaccctcaaaacatgttcgagttctgggatgtaagtacaagcacttctgcactgggtgaattaagtgtcctttgccaagtcatggctgttgagaggcccatgaggtcaggtcagtgtttattgagtacctgctgcatacctagcttggggaaaggtagagaggccctcagagaggcttggagggcaagagcaacccaggcaggatgagggctccacttccacctgagggcgggctgagcttgcagggccacatgacactcccttgggtgcctgcctgcaacacccactgtggggtaacccgagtcccccttgccacgctcacagagttgaggttgtgagttattctcagtgatgacctttctctgaactgcagccaccatctgtaaaggccaagggcagggtgaggcatgaggtatgaccgggtaggcctggaaaggagcaacaggagctgcaggaggagctgggggggtggcgtagaggaggcgccaggctggggcagcttgcagagcaaaccctgccttgagtgacagggctgccgacccctctgtagcaacaggtggtccatgggaccacctctgctggagccgagcagtgagccacagctttccttgtgcacttgcctgagctcagcagtggtgtgaggagggctctgactgtgaagcccagggtgcaggggtgcagtgcagggtgtgatgcaggcactgtgaatgctgtgggcatggccgggcttacgtgcagggctctaacgctgtggcaggcgcagcagagagggcattgcccatttggtggttttcccacctggggctgtctccaggcatttggaccagaggccctttgcttggtgatggcatccacagacataacctcattcctttgaaagctctaaaggccttttactaccagggtctgggagagaatgaagccctaatcccttaagccatccactgtgtataatgagttaacttctttctagaatgagactagttacataccatccttggaagaattgacgagaatcactcaagtcattttctgcatcctgtggctcagatgcggaacactggtcaagagagactgtgcggcttctaataaatgttgcatggctgataatggagggcaggcaccttccacctcctccttgggatctggagcctgagcaggtggtgggcagggatgtgtgggtgctgctgccagccaaggagccaagcagatcggggtgtccttgcttgtcaccacccagcatgtagagatgagttagggtgtggcttaaggagaggatgggtctggcctcccaggtaaggcctaggaatgatagctggacacaggaacatggggccagggctggctggtgagacctaagtggaggcctcctgggccaggctagacagcccacaacggctggaggagggacctgcctgagttactagagtgtatcctgctgaatcaagaaggtgatatctgaagaacccagggataggagcaggcgaagttcctgcaggtggggtctcgggtgagctacagccatcagctcaggcctagggatgcagtgccggccctcaggtgagatcagaagagtcccgtctggtaggggtatgtagaagaggtaattcttggtccgccagggccagttttgcggcagccatgggtgtcgggatcaggcaggggtgtggtgggaaaccatggggtctctcagggctcggccagggtcagcgcacgccacagggccagttttggctggagaggcctgaagcagagccagagcaggtccaggtgagttctgaagaggagccaggacaggagagggacccataggtctgtgaattccagaggagaggcaggtatttagaggtggttctgtcaggtgaagtctgaggagccaaagctatgtatgtgcatatgtcagccgggctctgtgggaggtggtgtagacctatggcatgggacaggtgtgcacgctgggatctctggccggttccgaaaagtgaggatcaggtagtgggtggctgattgcacaagtttagaacccaggattagggacacacaggtcagcacctgcttctcagcatcctgactgggtgtgatgggcagagctcagggcgtcagaggcctctgagaatttgtgactgaagtccaagtctgtggcatcagggtctgcagagcccagatgcgggagaggtaggaatgtacctggtgatatgaggcaaggacaggggagctggggcaggtgaggcaggcaggtggcatgaggagctgtgctgggtgggtgcggtctgagtggctcaggttgggtaaagggccagagacctgggtctacagggcagacatcaaggctgagccagtcagacagtgtttgtcaacactgggctctcaccaggctccctcaggccgaggtcagcagccagggatctgtcatgtgtgaggaaagtgtctgttcaggttaggtgtgtataatgcagcctttcagagccgcgtctgtctgaggtcctaggagctggaatcagacaggtttgtatggctgggtttctaggggaggcctgaggagccaagactgtactcaggtaggcagaactggaccagtctggtaaggacgttggagctaaagataggcagacaggtcgagctgggtctgacaagtgagggctgaaaatctgtgattgggtccaggttggagctgtgtccttgggcgatgtctgagcagctctggtgggtgagcctgggtcccctgggaagagaccagacaaagggatggggtcagacaaagggatgacgaaccgcatccatcagaaaggtggatgaagcctgggtctggtcgaggtacgtagagcagatctagcaggcgaggtttcaggggttaaggtgagacacaggtatgtatttttgggtctcacaggttaaggtctgagccactgaggtcaggctctggtttgtatcccaagaccgagaagctgtgttaagcatggtgggtagagtttgtcaggtgacatctatgaaaccaggagcatgcaaagataggttgaccggaacagccatggtcaaaccaattaaactgtcctgcagttgaggtcaggcacaggtagaacggatctatcaggtgaggcccaaggagtccggattaggctcatctagaaagacctggatgtggtagatgacctctgaggatatgaagtgaaggcaggtggatagagccaggtctctcaggaggtctgaggagctgggatctggcacagtgagcaggtctggatttcccaggtggtgtcaagacagatgggtaggccaggcacagtggctcacacctataatcccagcaatttggaaggccaaggcaggcagatcagttgaagtcaagagctcgagaccagcctggccagcatagcgaaaccccgtctctactaaaactacaaaaattagccaggcatggtggtgcatgcctacagtcctagctacttgggaggctgaggcaccagaattgcttgaactggggaggcagagtgagccaagatggtgctactgcactccagcctgggtgacagtgagactatctccaaaaaaaaaaaaaaaaaaaagcgggggttgggtgtggtggctcatgcctgtaatcccagcactttgggaggccaaggtgggtggatcatctgaggtcaggagttcaagaccagcctggccaacatggtgacggggtgaaaccccatttctactaaaaaatacaaaaattagctgggtgtggtggcacacgcctgtaatcccagctactcaggaggctgaggcaggagaattgcttgaacccgggaggtggggtttgcagtgagccgagatcatgccactgcacttcaacttgggcaacaagagtgaaactttgtctcaaacaaaaaacaaaaaaaaaaaaaaaagaaaaaagatgggtgggtagaagttcttctcctgggtgaggttgaggagctgtggccaggtacaggtatgtaggtatgtggaattgagtttcttgggtgaggtctttggagcctggcccaggtacatcttcgggtctatcaggtctgaagaacgggagttaaacacaggtgtgtagaacagggtttggcaggtaaggtctttggagccaggatcagggcagcttcacaaagctgagtgtgttcatgagacctaaaaagtcatagtcaagcccaggtaagaagaaccaagtgtgttggatgaggtgtaagcagctgaggtgtgaagtagaggtaggcagagctggcccacaaggtacaagctcaggaaccctcatcacatgcaggtagggggtgctggtccaccaggcacaagcccaggagccagcattgagcacaggtaggcagacttggcccaccaagtatgatctgaagagccaacatcaggctcaggtaggtagatctggcatgccaggtgtactccaaagagccagagtcaaacacaggtaggtagagatagtctttcaggtgtggtttaaggagccaaggtcaactacaggtaggtagagctggcccactgggtgtggtttgaggagccagggtaagcacaggtaggcaaagctggcccaccaggtatggtctgaggagccagggtcagactcaggtaggtagagctgcctgccaggtatggtctgaagagccaggatcaagtacaggtaggtagtctgggtcactaggtgtggtctgagaacccagcgaaaagctcaggtaggtagagatagcctttcaggtgtggtctgagaacccagggtcaagcacaggtatgtagagatagcctttcaggtgtggtctgagaacccaggttcaagcacaggtaggtagagatagcctttcacgtgtggtctgagaacccaggttcaagcacaggtaggtagagatagcctttcaggtgtggtctgagaacccagggtcaagcacaggtaggcagagctggcccaccatgtgtggtctgaggagccagggtcaggcaggtagacaaaactggtctgccaggagtagtctcttgaaggagagctgaggagttaggttgaatgcaggtagatagagttggctctttcaggagttggattcaggcacaggaatgtgcccctgggtgtttgaggtgaagcctgaagaaccagagttgagcctaggtgtatagagcggcctcccaggtcaaccccatagcatgggggtctctacaggcaggcagaacattgtgggtttcctaggaggtctgtggcccctaagttagacgtgggtaggtagatgtatctctctcaagcaaggactttgtagctagagagacatacagctggggtcttgcaggtgaggtcattggtgcgtggttctggcttagttgtgctgactcagtcttaggcctggggacagtgggttagtcacaagttggtagaactacgcatctcagctggggagcacaggtaggcagagatgttccatttgatgaggtctgaggctcctcagtgagctcattggtgctgacgttaagcagagattggcagcattggatctgtctgtgagacatgaaaagccaagccagacacaggatgtggactgccgaggccaggctcacataaataaagctggaccctgggaggctgtaaggaatctgagttgggcttaggcaagggaaccgggtctgtcagtcaaggtgtgaggggtcaggttatgtgaagcctggtctatcagctgagatgtctggaacccatctttgacaggtatataactctgtagcctgaggcactggagttggacacaaataggcagaactaggtctcccaggtgaaaccattgcatcgatgctcagtgctggtatgtttatctggtgttgtcagtgagtctgccgatgcaggctcagtgctggtatgtttacctgattatgtcagtgagtctgtggatccaggctcagtgctggtatatttacttggttgtgtcagtgagtctacggatccaggctcaatggtggtatgtttacctggtgttgtcgtgagtctgtggatccaggctcagtgctggcatgttgacctggtgttgtcagtgagtctgtggatccagggtcagtgctggtatgtttagctgacattggcagtgagtccatggatccaggctcagtgctggtatgttgacctggtgttgtcagtgagtctgtggatccaggctcagtgctggtatgttgacctagcattggcactgagtctgtggattcaggctcagtgctggtatgttgacctgacattagcagtgagtctgtggatccaggctcagttccacagaggttgtataaacatggtctcaggtgggttcttgacacctgggttcaagcacaaaagtactgctgggcttgttaggtgaagtgggtggggtctagcacaggaatgcataatggtgaggctggccaggcctggggaaggtgggtcagacacaggtgagaccttcggtggtagggtcagacacaattaggtgagtagtgtgggctcttatatcaagggaaagccgtagtcattgtaggtgtttgtacctgggtctgcctggtgatgtctagggaaccctaaagatcagctgggacaggtatctgttctcagcaccctggtcaggtatgatagacagagctcagggtaatacagagggctgaggatctgtaaccagtccatggtgttggtctgcatccaagatggcattgtgctccagttgacacagggtctgagttaaaagtgaggaaagttgccaggcgcagtggctcacgcctgtcatcccagcactttgggaggccgaggtgg

SEQ ID NO: 91474 - DNA, 1648 bp, Homo sapiens
catctcctaaaaatacaaaaattagccatgcatggtggcacatgtctgtaatcccagttactcaggaggctgaggcaggagaattgcttgaacctggcaggcagaggttgcagtgagctgagatcatgccactacactcaggcctgggcgacagagtgagagaccctgtctcaaaaaaaaagaaagtgagtaaagtgaggaaaaaggtagatgatggttagataaggtgagatctggggcactggggcaggttaggcccaggacattgaactgactgaggagctgcatctataatgtatggtctcagaggccactgcacttaaaggtgaggtctagagacccatgtctgcagattgagggttcggaggctcaggtcagacactgcttggcattgctgggctgtcacaaaactgggatctgaggacctgttctcggccaaggtgagcagcctggactctgtcagccagagggctggctgtgtgctgaagtttagtttctagagctgagtctgggctgggtgtggtggctcatggctgtaatccctgagcttcgggaggctgagatgggaggctgaggccaggtgttcaaaacctgcctggacaacagagcaagaccccatctctacaaaaaatttaaaaaatagtcaagcatggtggtgtgtgcctgtagtcccagctactggggaggctgagatgggaggatcacttgagcccaggagtttgaggctgcggtgagctgtgatcatgccactgcactccacctgggcaacagagcaagaccctgtctcttaaaaaaaaaagaaaaaaatagaactgcatctgttagatgagatgtgagagcctatgtcaagcatgatgtagtctgtaggactgcgtctgtcaggtaaggttcccggaaacccagagcctttccaagtgagtggccccaccggtcatctcattgcccaagccagaaacctctcggccacactggagagctcccagaatgagtcctctgcactccccagtccatctccggggcttcaaagtggcttgtttgcttctgtccttgtcttagccgcagactgttctcagtcctcccaccgtgcctctcagcttccaccctgcggtccccaccccttcctttatcctctggaaggtgctatgcttccccctgcctcagtgggcttccaggagagaattaagccctcacagcccaaggcatctactggatgtaataagtgggcacctctccttcgtgtctagaaggttactagtcttggaccatccttgggagaactgagaagtcactcagatcattttctgtgggccttaattctgtcacgcttgagaaagactgctttggccacgggacctttgcatgtgctgttatggctgctggaatgctccctcagtgcttctctgggtcatgcctgctcgttcttgagatcaagggtcaagtacccctcaggttccttttataagtggcctcagcaccatgttccaatttctcctcagcacttgtttctcagtttcacatttattggcatgattatttgatgtacgtctctctcccacactctgtgtccgttgcctgtgctagaaatgtgggaggtgctccataaacagctgttaggaagacatccgtgaagttctgaggactctgatgg

SEQ ID NO: 91475 - DNA, 2909 bp, Homo sapiens
acaggtatgaaatctgggtcttcctgtgtctgagaaggtagcacctggcacaggtatgaggatctgggtcttcccaatgtttgaggaggtagcatctggcacaggtatgaggatatgggtcttccatgtctgaggaggtagcacctggcacaggtatgagaatctgggtcttccagtgtctgaggaggtagcacctggcacaggtatgagtatctgggtcttcccgtgtctgaggaggtagcacctggcacaggtatgaggatctgggtcttcctgtgtctgaggaggtagcacctggcacaggtatgaggatctgggtcttcccgtgtctgagtaggtagcacctggcacaggtatgaggatatgggtcttccatgtctgaggaggtagcacctggcacagatatgaggatctgcgtcttccagtgtttgaggaggtgagtttggactcaggtttgaggcccttgggcttccagtgcctgaggagatagcatctggcacaggtatgaagccctgagtcttctagtgtctggggaagtgaggctgggtacaagtatgaggatctgtgtccatcagtatctgaggaggtgggatcgggtcctggtatgaggatctgggtctgtccatgtctaaggaggtaagatctggccctggtatgaggatctaggactgtccatgtctgaggagttaccatctggtacaggaatgaggatctgggtctgtcaatatcagaggaggtaggaatctggtacaggtatgaggatctgcgtctgtcaaagtctgaggagttaccatctggtacaggaatgaggagatgtgtcttccagtgacttaggaggtacgatctcttataggtatgaggatctgggtctgtcaatgtctgaggaggtaggatctggccctggtatgagaatccgggtctgtccatgtctgagcaggtaggatgtgtccctggtatgaggatccgggtctgtcaatttctgaagaggtgggaatttggtacatgtatgaggatctgggtctgtcagtatctgaggaggtaggatctggtacagttgtgaggatctgggtcttcgggtgtctgaggaggtggcatttggcacaggtatgagaatctggatcttctagtgtctgaggaggtgggatctggtattaattatgagaatctggttctgtcagtgactgaggaggtaggatctggcataagcatgaggatctgggtctgtcaatgtctgaggaggcagtatctggtacaggtatgaggatctgggtctgtcatgtctggaggtaagatctggcatgagtatgaggatttggttctgttcatgtctgaggaggtaggatctggtgcaggtataaggatctgggtctttcaatgtctgagaaggtaggatctggtacaggtgtgaggatctgggtctgttaatgtctgaggaggtaggatctggcactggtaagaggatctgcatctgtcagtttctgaggaggtaggatctggccctagtaagaagatctcagtctgtcaatttctgaggaggttggatctggcccccttatgaggatctgagtctgtcaatatctgaagaggtaggaatctggtacaggtatgaggatctgtgtgtgtgtcagtgtctgaggaattaggaatctggtacaggtgtgaggatcttcatgtctctgtatctgaggaagtaggatctgatacaggtattaggatctgggtctatgtctgaggaggtagcatctgatacaggtatgaagacctgagtctgtcagtgtctgaagtggttggatctggccctggtatgaggatctgggtttgtcagtatttgaggaggtaggatctgtccctggtaggagggtctgtgtcttctagtgtctgaagaagtaggatctggccctggtatgaggatctgggtctgtcagtatctgaggaggtaggatctcatacaggtatgaggatctgggtttttcaatgtctgaggaggtaggatctggcacaggcatgagcatctgggtctgaccatgtctaaagagttgaagctgtgtgcaggtatgaggccttgggtctgccagtgtctggggaggtgaggctgggcatgggtgtgagaccctgggtctgtccatatctgaggaggtaggatctggtatgagtatgaggatctgggtgtgtccgtgtctgaggaggtgggccctggcacaggtatgaggcctggggtctgtccgtgtctgaggaggtgggccctggcgcaggtatgaggccctgggtgtgtccgtgtctgaggaggtgggccctggcacaggtatgaggtcctgggtctgctggtgtctgcagagacagggcccgacatctcagggaagaccacggtaagctcttcagtttgtcttgtggctgtggtcagtcatctgtagtctgccctgttggtcttcccatgtgttgccagcacctgcctgctgccttgcttcctggaggtgggttgggccagggccctccgagacgcccctgtgcaagaccagggacagggtttccggcaggaggtggggggcggggtgtgccggccctccctcagcaccttgtcctgtctctcctagtgggtgggaggacgctactcgctgtggtcggccatcggactctccattgccctgcacgtgggtgagtgtgtttctgtgtcttgcagcccctgtgggagacagtgttgcagtctaaggtcggggtagggggcttgtgtccctgaacatcatgctgtcctcacaggctgctggcctctctgcagctggctgggatatttatttcatgtccagaaggaaggtctgggtttttttgcgtgtgcaagttggcccccgtctttgcccctcacaactgcagtcctgtttctctcctatcctaggcagagtcagatccctgcactc

SEQ ID NO: 91476 - DNA, 1042 bp, Homo sapiens
taattttgtatttttagtagagacagggtttctccatgttaatcaggctggtctcaaacttccaacctcaggtgatccgcctgccttggcctcccaaagtgctggaattacaggcttgagccactgcgctcagcctctttctttctttttaaatgttctttcattttgccaagaactgggtttctgttccttttccagggcgacatggagtccaatgggaaatacatcaccaaatctggaacccgtgtggaccaccagacaggccccattgtgtggggggagccagggaccaatggccagcatgctttttaccagctcatccaccaaggtaggcccctgtggcctgggaagggtgatgttgggggagggaaaggatcttccagaagagatatctcacttaggtcagtgccctcctctaggccatatggctagctcccatgggctggggtcatgtgggtgaccacagtgcccttcacaggcaccaagatgataccctgtgacttcctcatcccggtccagacccagcaccccatacggaagggtctgcatcacaaggtaagagcccccatctggccccatctggggggtctggctcacattgcacccagacctctgaaaacctggtgcattggttggcaatcacgttagttttctattcctgccgtaacaaatgataacaaacatggaggcttaaaacaacactcttcttttgtggggtggggaggggggacagagtcttgctctgtcgcccaggctggagtgcagtggcacgatcttggctcactgcaaccttcccctcccggcctcaagtgattcttatgcctcagcctcccaagtagctgggactactggcactcaccaccatggccagctaatttttgtagttttggtaaagggggggtttcactatgttggccaggctggtcttgaactcatgacctcaagtaatctacctgcctcggcctccctaagtgctgggattataggcatgagccaccttcctgggctatctgaagagtttctgaagctcaaatatccagca

SEQ ID NO: 91477 - DNA, 1103 bp, Homo sapiens
atcttcgttcagggcatcatctgggacatcaacagctttgaccagtgggggtgagttgctcacttaggggagggccgggaatacctttgtgtcggctcagggatttcagtagcaacgttagagccttcctcataccactcttcccttcccttcccttcttggcagagtggagctgggaaagcagctggctaagaaaatagagcctgagcttgatggcagtgctcaagtgacctctcacgacgcttctaccaatgggctcatcaacttcatcaagcagcagcgcgaggccagagtccaataaactcgtgctcatctgcagcctcctctgtgactcccctttctcttctcgtccctcctccccggagccggcactgcatgttcctggacaccacccagagcaccctctggttgtgggcttggaccacgagcccttagcagggaaggctggtctcccccagcctaacccccagcccctccatgtctatgctccctctgtgttagaattggctgaagtgtttttgtgcagctgacttttctgacccatgttcacgttgttcacatcccatgtagaaaaataaagatgccacggaggaggttgtaggctcagcctctgattttttttttcctgtgatggtgctttatgtagcagagggcaggagcgctcagcaggacgcaggctgtgcctctgcggacacttaacactaagtggtgagcgggtctagagtggagcaaggtgccctgagaagacaatagtggggtgggggcacaatcagtcaggacggcaacttggcctgtgtcaccaaatcccaagactgttttccactcctcacctctgtgactgcagaaattggatactctgttcactcgatggttctaaaaactgcattgagattatgtttgtttcgggtgaattcctggacaagaccgaggatgactgccatctcctggcaagacgctcaggtagttcttttgctttaaaaggcagatattgaaaactggaattttttttttttgagtctcgctctgtcacccagactggagtgcagtggtgcaatctcggctcactgcaacctccgcctcccgggttcaagctattctcctgc

SEQ ID NO: 91478 - DNA, 1467 bp, Homo sapiens
tgaggtttttagtaagtggataggctgaaggaggaggctccaggaatgccctccagaatcacacctcagaactggccgtgaaggagctgctatgccacctctcctgctgtcaggaagcttaggtgtgatctggtgaactagaggctgtctttgccaccgaaccgttggctccaaagccttgttctgtctgtgtctacacaatggctaccttttgctatgtggtctttctttctacttcactctgtctcaagttcatgtttctctctagtagacctgattagcagacccctaatcatatctgaaaccctagctgctaaggggtctgggaaaggtagttctttcttttcagttcctgcaatacatgaagcacaacagaaagatattggaacggatggttgaataacccctgtactatatctgtcacactcaccccaaaaaggaaagacaagtattttaagtcacctccaacgtgcttttgagtacatagggtctagaaagtttgattggagtgtaccagaggggaaggggatggtgtgaaggctccctctggaaggcgcggcggtgggtggctggagccgaaggattagaataaacctcccaaatgtgctcggacctcattcactgagtatttttccagaaacagggaaacagccttgcagctgaggactggtgtgaaggtgctgatgactggggaagtgatactgaggaggggccttcaccacagtttaccttggattttgggaatgatgccagcagtgccaaagacgtagactggactgctcggctccaagacctccgcctgcaggatgctgtcctgggtgctgcccatcctgtgcctcctgggctgccgctcttcctgccctactacatctgtgttgcagatgaggatgattacagggactttgtcaacctggatcatgcccacagccttctgagggactatcagcagagagaaggcattgccatggatcagttgctttcccaaaggtgaggatgtgtgctgctgaggttgagaggtgactggattgggaagcagccacaagagttacccttcagtttcaccacaggacctggggaaactttcaggcagaacttgtatgtaggacctttttgcttcacttccttatcagccaacttgagttagcttgaaaaccctgctctatttataattgccgttaagaaagtgaagatgaacaaacagaagttagagatggcaagtatttatagaagacgcgttcactgactcttaaattttcttttatatttctaatatgtctttatagcagagacaggcaagttagaaaactaccatttgatctgggataataagattggggtgaaaaaatggaaaaaggaaaagaaaaacgccatttgtttattgactcttggctgtggctccagaactggcccaggacctcagagatgctttcagatcctcaattctgtaaaatgagagtgatggtgata

SEQ ID NO: 91479 - DNA, 1035 bp, Homo sapiens
tttcctgttcacatcctttgcctatatttttttgggggtgacacttgttaatttgtaagagctctttacgtatagggacatcagttttctaacctgtaaggaagtcttggctgggagttgaaaccccaggctagaaggcgacccttagactttttaggtctgatggcgggcctatgctggtgtgggaataacaccgccggtctcagctggaggtcgccagccctttgcaagagcctgccggtccccgcgggctgcagcacaccccggcgcgatgtgccctgcctgtgtctgccggaggctgtagtgcgcaggagcggaaaccaggccgcccttcccccacccgcttccggccgcggctcggttctcccgcctccgcctccgccgcggctcgtggttgtcccgccatggcactgtcgcgggggctgccccgggagctggctgaggcggtggccgggggccgggtgctggtggtgggggcgggcggcatcggctgcgagctcctcaagaatctcgtgctcaccggtttctcccacatcgacctggtgagggccgggcgcgcgcgcgtgaatggcgggctgtggtgcgggggctgggattcgggggttccggggctccaggggctctgaggctcagggcccggagcccgggaccggagttgcggagcgggggcaggctgagaggctcgggttgtgccccccccgcgggaggagactgttctttgggcacggggcgggcctccgctcgctgggccggctccggacgccgaggaggccgcgggcccccgcctccccggcagcgccaatgtgtggcgcttcgtgggcgtgaagccgcctcttatcctcccttcaaaacaaattcccggctgttaggagatgcgggagaggattgagtccctcgcggatgttgtgactttaattttgaggtccctgtcgtaactccgaagtaacgacgcggggcggaggatggcaatgatagcgaccaacgcgtcccgagcgctggtcacgagcgggtttacacacggaacgcgcaccatct

SEQ ID NO: 91480 - DNA, 1095 bp, Homo sapiens
ttttctatttcttgtagccaccagggtctcactattttgcttaggctggtcttgaaggtctgggctcaagcgattctctcactttgtcctcccaaagtgttgggattacaggtatgagccaccactcccggtgtagagaaatatgttaatatattttcagttagtgtttacctcgacagcacatatagttttaatgaattcacatatttttatggcatccagggagtttcctgaaatattttccaggatgattaaacaaacaaaatataccattctttcaaagtatttttgagaagtttatctctgacattaaatctagattcttacatgcattaaattattctttatcagtttaacaattttggtatggcgattcgaaaaacgctttctccactaatgtagcagatatcaaaagttctggattacaggtgctgagagtagtgatacagctcaaacatacgtaaacgtttgtcatttatctggggtttatgcatttgtagattgatctggatactattgatgtaagcaacctcaacagacagtttttgtttcaaaagaaacatgttggaagatcaaaggcacaggtaactatatttctcataccatttctataacttgatggagcttctatttgtgataccagattaatcctgcctgtcatataggagggaaaaaatgggtgaagctctcatttcagctgagagattgtgaaggataaagatatatcaagtaaaggactaaagattaagccctccttttttgttctaaaaaggaaataatcccgtgatggtgtaactttcatggcctctttatatttaagtttctgatgctttgcttaggatgcaccttgtgttcctacaccccctagaggttgactactgctatgtttgggggctagaggagcgttatgctgctgtcctagttgaaacaagacagttcccccgatctttgtttagtttttttagtgttccttggtgattcagagtcttaaaacatcttttccctttgcctgtctcccaacctgtttggcaaacccccacttgtttctctttttctttcatattttggcttcctcctccaggagtactttcctaa

SEQ ID NO: 91481 - DNA, 1828 bp, Homo sapiens
ttgccattcatgtagaagtgtgtttggtggtacgtgggtcagggggggctctccggttattttataagtataaaagtataattttataagtgtagcttaaccctaatgcaattttctcacatttttggacttctttggtgtttaatataaataaggtactatgtaagtagataacagcattgtggcttccagaagcagatttcagataggaacagaaatattgtagtaattcagtgttgtttatttttccaggttgccaaggaaagtgtactgcagttttacccgaaagctaatatcgttgcctaccatgacagcatcatgaagtatgctatagtgattacattgcaaagttgtataagggttttgtaagccaaatatataagctcaaagtcattcagcttttttaaaaaaaatgatttttctagaattattaaacagtggtggtttctgcttacagagtggcattctttttaccagttcataaatacatggtttgaatgatttagaatggtgagatagtttaatacttttaataaataagttacttggaaatttataaagaccttatatgcttgccttaagtaagaagatattttaaactatgaaatatccttatttatgatgattcagacttttctaaagtgtttgcctttttttgtttaaaagtttccctcccaaaataatctgtagtatgactctgacttctgtaatataacacttggaattgtggtagggcagtagtattgacagtacataaatatatttatctcagtaaagatagagtaaatatataattttggaggagttggagcaaaggaactgtgggccgaaattgtcctttatctatggtggtttagcttgcaagtaaatagtgttaaaaatagtccttgtttgaggtactggaattgaggtacttaacactttctcagggcatttgtatctccggattgtgttttttttgtgtgtgagatagggttttgcgcttattgcccaggctggagtacagtggcatgatcttggctcactgcaacctccgcctcctgggttcaagcgattctcctgtctcagcctcctgagtagttgggattacaggcgcacgccaccacactcagctaatttttgtattttagtaggcggggtttcatcatgttggccaggctggtctcaaactcccgacctcaggtgatccacccgccttggcctcccaaagtgcagggattacaggcgtgagccactgcacccggcctgtatctccggcttgttttttagttttttactctgtgaacctgcctgtagccctataacctccttaccctgtgttgctttcccagtgctgctaaaaacagagaccctaggggcctgaaccctgcctgatcctgatcatgtgaggtgaagtcagaggccaggcagatcctgggaatgtgttctttatgcgttcccaggcacttgctgcccaaagaaggcctagtgggactagtgaagtcatgccatctttctgccagtttgagatctttctcttgtgccctagctggccaaaaaggataggaatttgaaggaaataatttctttaaaatctgcttatgtttggaaagagtcaaaccttactatctatatgacatataatcctgatatcagttttgtttacagttactatgtttttttcagaactgtttattatactgcaaagatcatgtggaaggctagttattttggtgacctttttttattttgttttgtagccctgactataatgtggaatttttccgacagtttatactggttatgaatgctttagataacagaggtgaggttattttaatacttttaa

SEQ ID NO: 91482 - DNA, 1024 bp, Homo sapiens
aacctgactcatcttttttccctagccttaaactactttaatagttccaagttgatattccacattctgccttcatttctatcatgtattatctgctagttatattagaatagtggtgagtttaggaacaccttgaaacagtgttttgtgtaaggtacagcaatagaagagaaatatggcacgttggatttttaagattatgtgtttctgtgggtacttctcctggagtaaatttgtgatataaattctatttgatattttgctaagtgaatgtctcttaaatgtctgtaattaacagttgtattattctggccatagctataagaaaattgtacaaaaaatgaagccagtaagatagttttgagtctgtgtcatcctaattaaagataactaattttttttttcccaaaaactcatactgtttgttttacttccagctgcccgaaaccatgttaatagaatgtgcctggcagctgatgttcctcttattgaaagtggaacagctgggtatcttggacaagtaactactatcaaaaaggtaaagaaaagttttatttttttaacttcccaaatatttatttgagaccttggagcaggaggaaataaactttgtatttatataaaatgaacaggtgaacatccaaaatgtaaggacttttatgcttatataaaacttaaaatgcggggccaggtgcagtggctcatacctgtaatcccagcacttcgggaggccgaggtgggcggatcacctgaggtcaggagtttgagaccagcctggcaagcatggtgaaaccccatctctactaaaaatacaaaaattagctggacatggtggccggcgcctgtaatcccagctacttgggaggctgagccaggcgaatcacttgaacctgagaggcagaggttgcagtaagctgagattgcaccactgccctccagcctgggctacagatcaagcctctgtctcaaaaaacaaacttaaaatgctataaacgtgctcaaaagactatgggcaaggaaatct

SEQ ID NO: 91483 - DNA, 1133 bp, Homo sapiens
tcagttttgttttggtttatttatttatttgtttatttttttgagacagaatttcgctcttgttgcccaggctgcagtgcagtggcgcgatctcagctcgccgcaacctccgtctccctggttcaagcgattctcctgcctcagtctcccgagtagctgggattacaggcgtgcgccaccacgcctggctaattttgtatttttagtagagacggggtttctctatgttggtcaggctggtcttcaactcctgacctcaggtgatccacctgcctcggcctcccaaagtgctgggattataggtgtgagccgccatgcctggcacatatctcagtttttaaaacctcaacacggcttcatttgctattcagatattttttctttcagttcttttaagaagttaaatattgtagttacatttgaagagtcgttttccatgttttgaaactatagaaagagaattataatgtacttaacatttgctggttgcgtctaattttttttggcagcttattcatgttagaaattgtgtctttgtttcttttaactgttaaatgttattcttggaaccttattgaataccattctacaaaagactgttgtgtatgtcagtgcgtattaagttgttgaataagtggaggccttcagtatctgttgacagatcaagacggaagttctctgtctgcattgcagtatgagtctcatgactgcttgccatgtggctaccctcaagaaagcatattggaaggctgagggcatcagaaatggtgtttcagagaaaactctaaatctgctgcaatttatattaaaacagtatttgagagttttgattcttgaacaattagcctggctaatttttgcatttttggtagagatgaggttttgccatgttagccaggctggtctcaaactcctgacctcaggtgatccgcctgccttggcctcccaaagtgctgggattacaggtatgagccaccacgcccggccagacattgctttttatatccttgttactgtgattctgacacaccactgtgtattaagactgaaggtggctgggcatggtggcttacgcctgtaatcccagcactttgggaggccaaggcgggcggatcacctgaggtaaggagttc

SEQ ID NO: 91484 - DNA, 1050 bp, Homo sapiens
agtttacttaatttcaggagattataaggatatggctgtattccccagacccacttagttttgctcaaaaaaaaaaaaaaaacacatataagaaaatggctgcgaataatatttagataacatttacaactttgagaaataatttcttggaaagctgctgtttgtctttccagtagtttttctgtttagtgtgatcaaggtaaactcatatttgacactcaggtgtagtaatttttatttgggcttgtaagtcatgttcactgaaccaggagtcggcgtcctggcacagccttagctatgactggtagattcagttagcttttgtgttagtttatcataaagtaagcattttggagtcactaatattttaaaatttccttgacaacgtaaaacgtagttggaatatagatgaatgaagtgtttatattaccttataatgttgagaaactgccatcatggagtaaatttttctcatatcctgacttcatagggtgtgaccgagtgttatgagtgtcatcctaagccgacccagagaacctttcctggctgtacaattcgtaacacaccttcagaacctatacattgcatcgtttgggcaaagtacttgttcaagtaagagtgtatatttcttggcatgcttttcggtactgatgatggaaaatggagtcatttttatttaattaccttgaagagattgaactcaggatgtttaaatatggtgaagggatgctttagtagctttcttgcagtatttcttaggttaaatgtagctggccgggtgcggtggctcacacctgtaatcccggcactttgggaaactgaggtggtcggatcacctgagcgcaggagtttgagaccagcgtggccagcatggtgaaacacatctctactaaaaatacaaaaattagttggccgtgatggcgagtgcctgtaatcccagctactcgggaggctgaggcaagagaattgcttgaacccaggaggtggaggttggagtgagccgagatcgcgccactgcactccagcttggcaacagagtgagaatttgtc

SEQ ID NO: 91485 - DNA, 1014 bp, Homo sapiens
aggcaaggtggctcacgcccgtagtcccagcattttgggaggctgaagcagctggattgcatgaggtcaggagtttgagaccagcctggccaacatggcaaaaccctgtctctacaaaaaatataaaaattagccaggcatggtggtgcatacctgtagtcccaactacttgtgaggttgagacgggaagatggcttgagcccaagaggtagaagctacagtgagccgagatcttaacactgcactccagcctgggcaacagagtgagactttgtctccaaaaacaagaaagaaagaaactgggatacaaaaagatgctgatgaatgtgttattttcttattccttgaactcagaatgtgttgcatttggggatttccatgagtgactttctttttattcccaaaggtgagtgaaaagagttcagttctacatttattacggttgaaaataaaataatgatcgttttataggggaaccaacggaagccgaagccagagctagagcatctaatgaagatggtgacattaaacgtatttctactaaggaatgggctaaatcaactggatatgatccagttaaactttttaccaaggttagatttactttttttataatcatggatagatgtattgttgtgcatagatgtattgttctagttctgcttgttttaaaatagtccataaaattgaattaagcttctatgtatatgccttgtgatgtcctaataaaatgattgatgcagtcaggatatgcaagttttaaaatgttaccatctacactaaatctatcagtataacatctaaataggaggtaaaatgagaggtggcttgtataccttcttggttgtctttccttctctcactttttacagaacttcttcgttttcctgctgcttctcatcttcactttttttttttttttttttttgagatggagtctcactcttgtcgcccaggctggagtgcagtggcacgatctcggctcactgcagccccgcctcctgggttcaagtg

SEQ ID NO: 91486 - DNA, 1687 bp, Homo sapiens
ttatttttggaggggagggcacattttaaagatatcgcagttcagaagttctgttgtgaagcactttagtttaaaaatctgtatactttgtgtgcatgtccccatgagcttggaggcattgctgactggcatccctaggctcagtgattgtctgtagttgtacatttatttacaactacataatgtacatttatttgtatgattgtgcttcagactgatctttggagctaaatttagggaagcttttggagaggtgacttaggaaggcaggggcagtcggcagttcagggctcctttactctgcattcctcagagcacttctgcatttcgctgttttcaatgtagagattctgttagaacttccttttacaaatgtttttccttttgaaaattgttatgctgctggtatatgacatgtatctttaaatcagatttcatagtgtaatatagatcagcaatgacgttttcttgtatcttatcaattagggattatggggttcatgggatctgtctttcttttgtaagctttttaaagatgacatcaggtatctgttgacaatggacaaactatggcggaaaaggaaacctccagttccgttggactgggctgaagtacaaagtcaaggtaaagaatacattttagtcttggaacacctaagctggaaatatcctcgcgtaaagtctttgtatagccctgttgttgcttgaaaatgatatgtcttcatatattcaaacagtgcaaaaaaatatgaagaacaaaagtcactgaagtcccacacttcagaaatagccactaataacattttcaggagtgttctggtggtccgccctatgtacacagatgcaggcattcgttatacactgcgtaaatggaatcatactattgataaactctcacttgcttttgtcagtcagtatagttaactagtctcttattaacatgtagtgtttttgtattttccctgaaataaagttttgaaattgctatatatttatgtatatcttttttttttttttttttttttttgagaccgtgtctcgctctgttgccaaggctggagcgcagtggcacgatctcagctcaccgcaacctgggttcaagcgattctcccgcctcagcctcccgagtagctgggataacaggtgtgagccactgcgcctagcctatttatgtacacctttgtacccttgtgattatctctttaagatttaatctagaaacacatttttaatgtaaaatttttttaatgtttagaaatgaaaagttttttgaggcatagtcttgctatgttgcccagattagagtgcagtggctgttcacaggctgtcatagcacaaggcatccctggactcctgggctcaagccatcctcctccctcagtctcctgagtagctgggactgtatgcaactgtgcccagcatattttaaaattttaaatgtaggaaaactattgtagtggctgctttctcatcccactcccctttaacactccttgtctctcctttatctgaactgtattaggattaatttatgcacagcagtatagcacccattgaaacttaaaagatcccgggagacttgggatatcattttggagcagttctcaacaatcagggatagttatcaaacagatttaattatgactctagtagtgtccgcttactgagttctcattctcactaggtg

SEQ ID NO: 91487 - DNA, 1148 bp, Homo sapiens
ggtactgaggtggtcttgtacctttcctatctcaggtttaacagtttttttttttttttttttttttttttttgagacagagtcttgctctgtcgcccaggctggagtgcagtggcgcgatcttggctcactgcaagctccgcctcccgggttcgcgccattctcctgcctcagcctcctgagtagctgggactacaggcgcccgccaccatgcctgcatattttttgtatttttagtagagacggggtttcaccatgttagccaggatggtctcgatctcctgacctcatgatccgtctgcctcggcctcccaaagtgctgggattacaggcgtgagccaccgtgcctggccccatgataattattttaatggaatttatttcatatttgatttcttaatggtcggggattgaacttgttaaacagagcacagtagaggaatgatgttaattagtgaaatttctaatatatatatttttttctttaggagaagaaacgaatgcatcagatcaacagaatgaaccccagttaggcctgaaagaccagcaggttctagatgtaaagagctatgcacgtcttttttcaaagagcatcgagactttgagagttcatttagcagaaaagggggatggagctgagctcatatgggataaggttcgttttgacaatgtgtggcaagtacttacatgtcaaaagtgtgttttagttcttgagatgtaatagaagctagtcattttttgaatatttactagattttgaggaaatatattgatttggcttggatattttcagctctaattgctgtatggagctgaattttctgtacatgaattcaagcaatatcataaaacttcatttgggattctagtgatgtgttcagggtttataattatgttgactagaaaaataacgtgaatatattaaagtgaaatgtttcttgtgtagagtagatgtattcatagaagtcataaaatcatttggagaaaacatctcattggcctgatttgcccttgaaaatagtaagattgtctttgaattgaaatagttattactatttcagaggtctgaaagacagagctcttgatacaaaaatgagatgtaattattcttagaagttaaaatcatatttaatagtactctgcagtta

SEQ ID NO: 91488 - DNA, 1026 bp, Homo sapiens
tcaggcaatctgcttgcctcaacctactaaattgcttgagactacaggcatgagccaccatgcccagcctaaaacagttttcttaaattgctcgtcttttggcctggattctgtgtttgtccagcaaccttctctttactgatgaatggaaccaggaaagggttgccattgtcagtgagtggaattgagattccggtgtatacaactgagtctccggtgcctttgtttaggctggagtgagttcctagaagctggtgattcttggtgttcttgtcagactcattactggaccagaggagctgatgatgagaccccaccccctacttaacccacctccatgctactgtgaggtcctagctgactggtctttccctcagcaacctcttgttctagtcgaaagtctatagtattataaacacgtgaaagtattgttctgaaagtaatgcttcaaaatagtcaatttgtggagaaacttgttaaattgtttaaattattggcaggatgacccatctgcaatggattttgtcacctctgctgcaaacctcaggatgcatattttcagtatgaatatgaagagtagatttgatatcaaatgtaagttatttgtactaaagttgtatcactaaaaccttgaagttgttttttaaacagtgaaacatactcatccttttttttttttcccagcaatggcagggaacattattcctgctattgctactactaatgcagtaattgctgggttgatagtattggaaggattgaagattttatcaggaaaaatagaccagtgcagaacagtgagtatttctgtttgcatttttatgcaaccccccttaaaaaaatcattaattaaaagtacattaaacagataatttttaaaatgaaaacaataaaattggtttaaagcaatggaaaagtaatttttctggttaccaagtgagtgtgtgtttaagcttcctggaaattgcaacaaaaaggaaaaattaagaagttgcttttgcttttaacatttccaattttactgaa

SEQ ID NO: 91489 - DNA, 1050 bp, Homo sapiens
ctctgtccagattttgggattgattgattgattgattgattgactggagacagagtcctaaaaattttttttgctgctctgttgcctagcaggctggagtgcagtggtacagtcacacgcctcactgtgtaactcctgggcttcaggaatcaatccttccctggcctcccaaagtgctgagattatagatgtgagctactgtgcctgccttcctcctcctataaggacatcagtcagatcagattagagcccaccctacttgccccatttaaatttaatcattcctttaaaaagtcttatctccaaatacaatcagattctgagatactggggattagggtttcaacctttggattttggtgaacgggacacaaatcagcccataacagaggtttagctttttaaaaaatcaacctgactgctctatgaagatgtaactgaagtatctaaattattcacgtttcctagctaataatcacaagaagttgtcagaatttggaattagaaatggcagccggcttcaagcagatgacttcctccaggactatactttattgatcaacatccttcataggtaagagctattagtattttaattgtaagaaattatttgaatatataaactttagacaaaatgaaggaaaagtgttttcttatccttaaaccctgctgttcatttgaaactgtatagtatatttggttgagttggtcactgagttccgtgatgtttgacctacagaaaaatttgaggattcagaaattggcggggtgtggcggatcacctgaggtcaggagttcgagaccaacctggccaacacggtgaaaccccgtctctgctaaaaatgcaaaaattagccgggcatagtggcaggcgcctgtagtcccagctacttgggaggctaaggtaggagaatcccttgaacccgagaggtggaggttgcagtcagccgggatcgcgccattgcactccaacctgggagacagagtgagactccaacttaaaaaaaaaaaaaagaaaaccagaaataaaagaaataagcaaaaaatgtt

SEQ ID NO: 91490 - DNA, 2352 bp, Homo sapiens
ctgcactccatccagcctgggtgacagagcgaggcttccggctccaaacaaacaagtcatttaagactgggggaaattcttatggaaatttcttacagaaaataagaacactttgttattttttgttaattggtttttaacagtttgaaatgatagtttactagtgtgcaaagtcagcctatgtagtagcaggttggggttttgtatgcttgttttaaggagcaataaatccatgcatctgactattttgagtgaacaggtgcttgttaagtatggaatttaggcatgttagagtttccttgtcaccagtatgacttgggtatagtcctttcccctggattttcagtgctggtgcttggtatttttccaaataactgattgtttactgtattctgatttgaatatttactcctctccctttcttcctttagttaggaaactaaaggttaccagattttgacttctttgttttcatttctttgaccctatgtctgtggcattctttggaatatgtttactcttggctctaatgttctcttgagaattttggagacgaacattcagattatggcctgggtcattggttcataacctgttttttcccccctcactgaaattagaaaggtccgtcatcttcctttgaggaagagactatctggtagattttccaaaatcataatttgaaatgtacatttattgattctctactgtgggtaggtttccaaggttacagccatgagtaagataggtattctgcctttgattttgttggacgaggagataaaaccacctttagtatcagttctgcattggggatggttcctggcttcatcctctgctactatgtaagcttgggaagtcattcactgagtttcctttcctggaaagcagatactcatgtgatcttctttatagggttgtgatgattaaatgagttgtcatatgcacagtgctcagaacagttcctggcacattgtaagtgctgtattgttgttgctattgttaccactactaccattattagaatatgtaccctctgcttttctattggagaatgtggaggtagaatcaaggatgtgtaatgagtactttgagttacataatgcttgtcacaattttttgttttgattagaaaataaataggttcttatataaaacatttaaaacagtatggaaatacgtaatgtgtaaagtgaaaatgcagccattcttaagtctggtgtgtattagaagagtcagctttcaattatagaaaatacaggtgagcacaggtaactcccacgcttttacccattttctttttcccttttttctgaaataagctcaagagcaagatgacgttctcatagttgattcagatgaagaagattcttcaaataatgccgacgtcagtgaagaagagagaagccgcaagaggaaattagatgagaaagagaatctcagtgcaaagaggtcacgtatagaacagaaggaagagcttgatgatgtcatagcattagattgaacagaaatgcctctaaacagaaccctcttactatttagtttatctgggcagaaccagattgttatgtcctttgttccaaagggaaaaaattgacagcagtgacttgaaaatgattctgctccctttgaaagcattcattttgctagaactgttagacacattgcagtatgctgtattgaaagtaggaatatagttttaaaaaccctttgaacaaagtgtgtgcataaccagtcatgagataaaacaacacaatgcatgttgcctttttaatgtaaatacccgtaggtatcattaatagtttcaaaatattgtggtttagtaaagttgatacctggttataaatattatgcctttatttttggctagaagaagaattatttttagcctagatctaaccattttcatactcttaactgattgaaacagattcaaagaagtatcgagtgctatgcattgaaacttgtttttaaatgttagatggcactatgtatattaatgtaaaacaatgttaatttactcaagttttcagtttgtaccgcctggtatgtctgtgtaagaagccaatttttgtgtattgttacagtttcaggttatttatattcgatgttttgtaaaactcaaataacgactatacttatggaccaaataaatggcatctgcattcttgttacacatgcctgcacagttcctgtttctgctgccttatatctactgcaggaatgtcaaattcttttcattaaaaaaagaactcggtcgggcacggtggctcatgcctgtaatcccagcactttggaaggctgaggcaggtggatcacctgaggtcagtagttcaagaccaacctggtcaa

SEQ ID NO: 91491 - DNA, 1048 bp, Homo sapiens
ggcccgggcgccccgcagaccctgggctctccccgcggtgcctccgccgcccgcccctgcgtcctggcccggcctccacgcccctccgaggtcccggcgcagcgcggccgccgccactccccccacattccagaggccgcagcgccgtctccttcctcgcattcctgcccccgcaaaggagtccctccgccccgcgcgaggccgcggcgaggagggggcgcggcccggcgcctgggagcttacattcctccgccgcgcgcgccgccgagcagggcgccgcgtcccccggcccgcgcgtggccgccggaacgaccccggcccggcgccggccccgccccgccccgcgcccaggggtcccggggcgggctccgggcttcgggcggacgatgcggcggcccggccggagcggcggcgggaagcggaggcggaggtgacgcgccagggccggcgggccgggccatgcagcgctccagggcgggcgcggacgaggcggccctactcctggccgggctggccctgcgggagctggagcccgggtgcggctctcccggtcgggggcggcgggggccgcggcctgggcctggagacgaggcggcgcccgcgctgggccgcagagggaagggcagcggcggccccgaggccggggcggacggactgagccgcggggagcggggtccccggcgcgcggcggttccggagctcagcgcgcagcctgcgggcagcccacgggccagcctggcggggtccgacggcggcggcggtggcggcagcgcccgatccagcggcatcagcctgggctacgaccagcgccacggcagcccgcgctccggtcgctcggacccgcgtcccggtcccgggccgccttcggtgggcagcgcccgctccagcgtttccagcctcggctcccggggctcggccggcgcctacgctgacttcctcccgcccggcgcctgccccgcgcccgctcgctccccggagcctgcggggccggctcccttcccgctgcctgcactcccgctgccccctggccgggagggcggcccaagcg

SEQ ID NO: 91492 - DNA, 1994 bp, Homo sapiens
tcttttttttttttctttcttcttttttttttttttttgagacagggtcttcctctgtcgccgagactggagtgcagcggcgcgtcctcggcttactgtagccgtcgcctctcaagctgaagcgatcctctcgcctcagcctcccgagaagctgggactacaggtgcacaccaccatgcccagcttttcttcttcttactttttttttttttttttttttgtagagacagagtctccctatgttgcccaggctggtcttaaactcctgggctcaagcgatccgccctcctcggcctcccaaggtgctaggattacaggcttgagccagtgcgcccggcctgatcttttcttctttgcgtttggtgctctcattctatctgatcctttcatgcttcgtgatgagcagaaaggggtgcttccccgtctgccccgccacggtatgggtgtggacagcaaccgggagatggagtggcccaggtaccaccggataccgcctgacccaggctttggtgatggtagcggctggagagggagactgtgtgagggaagaaaagcccactttgcgggagaggggaaccgtgccagtcacacggggctgccctcgcccggactgtgctgtggacataggatgtttcctaaaggaatcctgctgcaggtgcatctgcaaagcccagcagcctcacagcctccacttcccagtgtggcccaggccccctgatctctagttcttgggacagctcttggggtgagattgtgagcggggcagaggtatactgtggggcctggggcgagaacttcccaacccgccttctgtattaagcacctggctttggtggatggatggtcaccatgcctgggaccgtggctgtcctggggtttgtgtctttgagcgttcaatggtgtcagcagctcacggctgccctgaactggatcttttttttttttttttttttttttttttgagacggaatctcgctctgtcgccaggctggagtgcagtggcgtgatcttggctcactgcaacctccgactccctggttcaagcgattctcctgcctcagcctccccagtagctgggattacaggcatgcgccaccacgcccagctaatttttgtatttttagtagaggcggggtttcaccatgttggccaggatggtcttgatctcctgacctcatgatccgcctgcctcagcctcccaaaatgttgggattacaggcgtgagccaccgtgcccggccctgaactggatcttgaggggtgaggagtctgtcagtgaggggccaggtgggggcattccagagagagggaagaatgagcagaggaggccaggcgggatgagagattgccccgctcttccccctggggttgcagcccagagggctcaggtggtcgagggcatatgtgggctaagaggaggtgcgcctgctttgggatggagagcgcctcccatctgtgaggtcatggtgagactctgtggctgggcaggtctcgtggcgcctgttggatggcctgggagcagggagatgtgccaggagctgtcatctcccgtgtcaggcaggtgccaggaagagaggctggggctgagttttgaagggcatgctttccagtgccctctgcaggggagagtgcccatttcccggcccctgtgtactgcagagcccgggggaggggggtgttctgtagacacccctgaatctttatatgatataggggtggctgaggtcccaggcaggtaatgtggagatgatacaagaaggtagggtgtggtggcacattttttttctgaggagctgctaggccgggtgcggtggctcacacctgtaatcccagcactttgggaggctgaggtgggaggagcacttgaacccaggagttccaggctgcaacgagctatgatcgtgccactgcactctggcctggatgacagagtgagatcctgtcttttctttaaaaaaaaaaaaaaaaaaaagctgctcagatcgggctgttgta

SEQ ID NO: 91493 - DNA, 1113 bp, Homo sapiens
gactgtgggaggtttgtcatcctcaccacgcaggtcttcctgtcaccactgacaccctaagcctttgtcagtttgttttttttttttttttgagacagagttttgctcttgttgcccagggtagagttcaatggtgagatctcagctcaccgcaacctccgcctcccaggttcaagtgattctcctggctcagccttccaagtagctgggattagaggtgcccaccaccacacctggctaatattttgtatttttggtagagacagggtttcactgtgttaaccaggatggtctcatctcctgacctcgtgatctgcccaccttggcctcccaaagtgctgggattacaggcgtgagccaccgcgcctggccgcctttgtcagtttcctctcttattctctcaacaaccttcctccctcctgggacccctacctttgcttctgacttcccttggaatcttgaggtcagcagttgtagtctgtcttcaccaccgtcctgccccttccctgtaggtgctccagtccatgtgggtctgactctcctgccgtctgagaggacaagggtccttccatcaccaacctccacctcctgcaccttcagttctcctcttttcattggccccttccctttgtttctttttaattttttttttttagagacaggatctagctctgttgccaggctggagtgcagtggtgcgatcacagctcactgcagcctgaactcctggcctcaagtgatcctcctgtctcagactcccaaagtgctgagattacaggcatgagccaccaagcccagtccctgcctgcttttttttttttttttttttgagacggagtcttgctccgtcacccaggctggagtgcagtggtgtgatctcggctcactgcaacctccgcctcccagatgcaagcgattctcccacctcagcctcccaagcaactgggattagtgtccaccaccacgcccggctaatttttatatttttagtagagatgaggtttcaccatgttggccaggctggtctcaaactcctggcctcaagtgatcaaccctcctcggcctccgaaagtgttgggattacaggcgtgagccactgcgcctggcccctgc

SEQ ID NO: 91494 - DNA, 1022 bp, Homo sapiens
ccccctgtgccctgcagcctcagggtaggccgtgggtcaccaggctggagagggcccctgccttggccaggggtgcgaggtgacccggctgcattgctgggtgggagctgctgtctgttgttcaggggcctggcccccgccctcccccccgaccccgacctcgcaaagcgcactcccgggcagggtgtggtctggaaggcggggctggcggggacatgggtgttcctgcatctcctagcgcagttcctgctggtgggtggaagggtgcctggtttaggcggggtcccaggagggggtgaggggtgacacccttggggagggggcctgcaaagggcactgcctgtggccacgtggtgtctgtgggaattggtcctggggactttgatgggtgtttgcggccccagttgccgccctgctccctcttccagggctcctggcttgggccccccgacccccctgctcagctcgggaaaatccccgtgcggctccagccccgggtcacgctcaggagcgatgagaggggcgccctggccacgcttcaggaaagcctgtgtctgcgcgcggggcaaggggctccacgacaaaaggacaagatttgacttaaattaagtttttcccttgaggatattttcattttctttaaaagaatataattttcttctaagatcttggaccagccttgttatttttaaagcaaatgccggcaaactcacaagtgtctagtttgtctgttacggagctggttttcaggtggtaagaaccttgtggtttcaggacttttgtcctgaaattcctctaaaacttcgccacgcgtgtccacctttcagactttagggtagtgtggggttccgtgtgtgtccgggtgttaagggcggtcgccccatgaaatgcagtgtggaggtccctccgtgctccccgggacacactgacgggaatgtggggtctggacatgggaggccctggtcctgatgcggaatccccaggggttcaggggacatctggactgaagtcactcgcccctg

SEQ ID NO: 91495 - DNA, 1030 bp, Homo sapiens
ttcacggaccagggagaggggcaggagttgtgcacgaaacgagatggagctgcatgaggtgggagaagaggaaaccgtgacatcgcagcggccaagggagccttccaggaggaagaagcgtctcccagggtcagggcttctaagagcagttggggaagacgaggactggaatttggatttggccacctgggggtgttttctgaacttggaggagcattcttgtgcccctacgatgcttgcagcagctaaggactccagacctgcagagtctgtcctgagacaggtcagacctcggcggtgggacgggaaaggggaactctctgtctagagacttgcgctccgatgtagttggaggtgctacactgtggctggccacagaccaacacgagcaatggaccacgagaggcctggggtagttagcctttccttcctgtgcagccaagaacggaaggatgagaggggttctttctgcctcctccttggcatgagcacctccacctccatgcccactctgtcctttctcccaggagcagctggccggagagtaacacgactccagccggacatggtcatgactatttcagcctgcaaggtcatgactctctggcccacctaggactcctaggggaaaggaagtgcctggtctaccgcccttcccctgcaagtctgaatgctgtgtggacagaggaggaggacccaataaggtaggggtattggagtactcgggtgcctgggaagatccaagcccggcctatagggtcaaggtcttttccaaaacaggggaaaccctttctggttcccgaaggtcctcccttccctattcgctgaacaggtgggtgccaagaagcccctgtcttgaggacagagagactgcggtctggcctccccagacccaggcagcctctaacatcacagccacagagcagaaactggcctggcttcctcccaggcccagaaggccccagctggccacctccctttgtttgtcttgggaggggcaactgctaagcaaacagggaaggggaatccc

SEQ ID NO: 91496 - DNA, 1384 bp, Homo sapiens
atgcgtgaggcctaatgagggtaagtgtggtttcttacaacttctgtggcattatgtgtatttctaagtgcgtgctggaagcccatgtgaaaggtatttcctgctgtagatcacaggccaaaaaaacaaaaaaaaaaaaaaaagaagaagaagaaaaacaaagaaaaaaagaaagtttaaacaaaacttctgaaaagaaacactatctctggtacaaggagacaggaaatgggaggttcagggccatagggggaagaggaaagaactctaccgaccctgaatagaacaagcagccactgtggtttcttccaacaagggacactccataagcgttaaagtttaggaagcagagctttgtgcatggatgtggagaaatcgcagaaacaatgataatgggggacagcaagttgcaaatgaaacagagggagcctaatcgtgtatctttttaaaaagatactggataataggtgatagtgttggtggatgcctcctgatgtagaaaaaggacagaaaagtacacagggtccaggcgtgctggctcatgcctgtaatcccagcactttgggaggccgaggcgggcagattaacctgagatcaggagttcaagaccatcctgaccaacacagtgaaaccccatctctactaaaaatacaaaaattagccaggcatggtggcgcatgcctgtaatcccagctattcaggaagttggggcaagagaatcgcttgaaccgaggaggtggaggctgcagtgagccaagatcgagccactgcaccactccagcctgagcgacagagcaagaccttgtctcaaaaaaaaaaaaaaaaaaaagcgcaggaaggaaacacaccaactgcatggcaggcagaaggctccttggggggcacgggaagggaaaggagggatggggagccaggcctttggttgtaagtgtaatcatttatttcttttaaaaaaaggacctgaagcaaaatggcaaaatgtccacatctattctatataggtacaggggacatagaggactgttatattttcttcctttttttttttttttttttttttgagatggagtcttgctctgttgtccaggctggagcgcagtggtgcgatcctggctcactgcaacttccacctcccgggttcaagcaattctcctgcctcagcttcctgggtagctgggattacaggtgcaagccactacacctggctaatttttttgtatttttgatagagatggggtttcactctgttggccaggctggtctcgaactcctgataggtgatccaccctccttggcctcccaaagtgctgggattacaggcgtgacccaacgcgcctgacctgaaataaatattatttaattaaaaaactaaaagcattacact

SEQ ID NO: 91497 - DNA, 2882 bp, Homo sapiens
ggagacaggatcgggaccagcccaggcccacaggccgcggagccctgggcgcgccgggagtaggcagccccctcctgcctgggccccctcccaccgtccttggctgttgcgggtctcggggctgccgggggtgggggcttcctgcgtctctccaggaccgcgtgcttgaggtcatggagggcggggggtcctgtgtgctcggaattgacttcttactccccttccggtccaggtgggcgcatgtgcttccgactgtgaattgtcttgcaagtgtgtgtacgtgtgtctggggctgctagcctgcagcagctttgggcctctgatagagttcctgcgtgtaacttaaccactaattctgaccgcggctctgtgtgtcactgtaagttacctgtgtgtgtctggggctccaaatctgtggctgtgagcagctggttgtgtgcgtgttgtgtctcattccatctgtagctccctgtgcaaatataaattacccctgtgtgtctgagtgtgacgttggagtgtttgtacatgtgtctggagttaccgtgtgtagcagctctgatccttcttgggctgtgtgtgttttaccattaattctatctgtagctccaagcgttgctgtaagttaccagtgtgcgtcccattgtgacttagtggtgtgtgtacaagtgtgcctggggctctgggttctaccatgaccctctgtgcctgcatatgcctgtaatttagctctgaaacgctcttctttttttttttttcttttgaaatagagtctggctctgtcgcccaggctagagtgcagtggcacgatctcggcccactgcaacctcctcctgctgggttcaagcaattctcctgcctcagcctcctgagtagctgggattacaggcgtgtgccaccacgcctggctaagttttgtatttttagtagagatggggtttcaccatgttggccaggctgatctcgaactcctgacctcaggtgatccacccacctcggcctcccaaagtgctgggattacaggcttaagccatcgcgcctggcttgaaactctcatttagctctgtgtgccaatgtaagttacatttgtgacattgttgtgtgtctggggctctgtgagtgtggctgtaacttaatttgattccatctttgtgtgaacattcccttgtgtattcctttgtgacagtattgagtggtgcctaggcctctctgtgtacagctgagaccctctgtggttttgtgtgtgtgtgaacagtgtgagaccccttgtggctctctgtaggcttggaaccctcccttctaagaccctgggagtacccagggcactttggaggcaataatgataactgacgttgtccacctgttacagttagtatagcatgtgccacgcattattccactacctggccactgtgtcctcgagatccacgccctgctcggctgcattattcccaagtcctgcttgactgtgagcatcagggctctccaccagctacagccactgacacctccaccccttgccactttactttttcttttcctttttctctttcttttagacgcagtctcgctctgtcgcccaggctggactgcagtggcacgatctcggctcactgcaacctctgcctcctgggttcaagcgattcttctgcctcagcctccctagtagctgggattacaggtgcgtgccaccacacctggctaatttttgtatttttagtagagatggggtttcaccatgttggccaggctggtctcaaactcctaacctcaggtgatccacccgcctcggcctcccaaagtgctgggattacaggcatcagccactgcgcccagccccttgccactttagaagtagccttttctctgtcttccctgccagatggtgagcccagtgcgggcacgggaacaactcagtggggatgtgttggctgaccgtgggacctgatttacctgggactatgtatgtgtcacctggggtcttttgggactggtctttcactgtatggctgtctttggctctttgctgagacttcctcgtggctatgtgtgtgaatataatttatccgggactttctgtgggttgctgtatgtttctgtgaccctctgcagctctgtgtctgtgtgcacacatgcatgtgtctggataacttttctgggaaattgccatgtgactgtagcagactagcaatgctgcaggtgtgtgtgtgtgtgtgtgtgtgtgtgtgtgtaattactctgtggctctctgtagcatacctatgatgctgttgctctgtgcgtgtgtgtgtgtgtgtgtgtgtgtgtgtgtgtgtgcatatgagagagagagagaggaaagagactccttgcaattgtagggaaatgcagtttacccctgacacctactgtgtgacaatcattgagtttcccttttatgcacacctgtggatgcatccgcccttttctgaccagaggctgctctgggtccactggggcctaggaagttggaggtcaggtgtctgcggaagcaaaacaacatcccttccgagtctcctcgcccctataacagtcccccaggctcctcccttcactctgccttcagctatcctggttgggcagccgcagggtccgcccttgagtacttcctctttgcccagccctggagcaaaaactgggggcgtggtccctgccctgtctgtgtgccttgagcctctcttcaggattccggcccccaggccctgcccctagatctgtggctgcgggaaagtagggcaggtctgtgtttcaggctagagggctgagaaaagcaggcaggggaggatgtggtcctgctgcttaggagtctctccctgctcaccagtgctgtctgggtgaagccaaactcctgactagggtcaccaggc

SEQ ID NO: 91498 - DNA, 2027 bp, Homo sapiens
agagggaccacccaggaggaccctgatggactcagatgatcccaggctccctcccactacaggtatgggcagggatgggaacagggagaccagggaggaggctgctgggatggcccaggggaaaagcagtggcctgggccactggctgtttaattattttattcacgtattttattccacaaatttattttacaagtgttacatgagtgcctaccctgcatcctgtcccgcattgtgctggggacagagcagtgacccacagacccgtgaaggacttggacctgtcatcagacagtgacggcccagagtagtccaggatgggagctgcccaggggactgtggggtcacgcatgagccaaagtcctgaaggacaaataaggatttgctaggcaaagaagaactacgatctggacagacagaatggcatatgttaaggcttggaggtaagagagacaactttgagttgccccaggtggtggagggaatcccacctgcaccccagaatacatcaaggcccctaaatgggaatcctgccttgaaataaaccaagcccatggccaggtgcagtggctcacagctgtaatctcctagcactttgggatgctgaggcaggtggattgcctgagctcaggagttcgagaccagcaacgtggtggaaccctgtctctactaaaatacaaaaaattagctgggcatggtggtgggtgcctgtaatcccagctactgcggaggctgaggcaggagaatcacttgaacctgggaggcgcaggttgcactgagctgagatagtgccactgcactccagcctgggtgacagcgcgactctttgtctccaaaaaataaagaaaaaagaaagaaaccaggcccgtatcctatggcaagtggtttgccgctttgagctagtttcctcctctgtaaagcagggatggtgaatcatatcaaaggcaccggcttgagaaataatacggttaatcatacggagagcttgacatatttcctgataaggagtcaacaaagaatgtccttttaaagttcccaacgccatccccacagtccttattacagttcgtgtttgcacagtgaagttgggagtgtcctgtttgttcagtgtctgcctccccaccagaaggctcattccccaagggcaggggccatgtcctgcgggctctactgatgccagctccagccagcgtgcagattattcatttagcctctggtggttattgagcattcactatgtgcctagagttttgggctctagggacccggtggtaaccaagacctgaaggtcacagtctgggtagacagtaaacaaacagtaaacaagcaggacactccagatagcctggggtgtggcgacagaggtgcctgccttaggctggatgatgcggaaggagagcatttgagctgaaggggacagagctggtgatgccggggccatggaaggacattcaggcggagggactacaaatgtggaggccttggcgtgggaatgagattggagagcttagggacaaaagcaggctgggatggccaggggagaggaaggacagggagagggaggacatgaggtcagtgaggttccagggccaaatcaccacaccaaggtgaggtctttgcttttacctggagtgaggtgcacccagggcagggctcagacctgactcagatggtcacaggtctcctctggttgtaggacaccagtgaagaggctgctggggtgtccaggctggaggtgatggaggctggagcagggagaaatgggtataataaaaataacggatgctgggtgcggtggctcacgcctgtaatcccagaattttgggaggccgaggtgggcggataacctgaggtcaggaaggagttcaagaccagcctggccaacatggtgaaaccctgtctctacaaaaaatgcaaaaattagcggggcatgatggcgggtgcctatgatcccagctactggggaggctggggcggaagaatcgcttgaacctgggaggtggaggttgcagtgagtcgagatcatg

SEQ ID NO: 91499 - DNA, 1419 bp, Homo sapiens
ctttgcagaagatgcagagctggtacagtgtaagtgtctgggcaaggggcttgctggagggctgggaggaccgggtgctgggccaggagccccaggctgcaacagtcaaggagtgcgtgctgagatggagtgggtgcagacctagggtcacgttctatgctattatttatgtgctgtgtgaccttgggtgagttacttaacctctctgggcctctctctgtccttgagaaacagccccaccttacaaggctgaagggaacattgaatgagtcagtgatgctggtgggtgcttggtacggggcccggcttacataagaaatctgtaaatggcagctgtcattgtggctactggtgtgttgtgtgcgttggaatctgtcagggacttaagagactgagggggttccaggagctttgtggggcagcattgggagtgtgaacccccatccaggttctcacctctcaaacttcctcagatgctgagccccacttataagcagcgtaatgaggacttccggaaactgttcagcaaactccccgaagcagaacgcctcattgtgggtgagtcccggacccccagtcccagctcctagcccagccctgtgactctccgccagcccgcgggcgccggctgagcctcgtgacttgggtgtcctcctgtctctccccgcccctctcagattactcctgcgccctgcagcgtgagatcctgctccagggccgcctctacctctctgagaactggatctgcttctacagcaacatcttccgctgggagaccacggtgagcccgcagcggggcagggtacaggggcgggggcccccatggccaggccccaccccgctcctattgaccctcctgctgtcctcagatctccatccagctgaaggaagtgacatgtctgaagaaggaaaagacggccaagctgatccccaacgccatccagatctgcacggagagcgagaaggtgacggaggacccggtgacgggaccacgcggtcccccgctcagcaggccgcctcccccaaacatgcaaagccccatttgttctgcaccctgagttctctccgagctgtccccttctctctgttctcccggcccaggcgcccatcacccctgacctgatccccgcaccagcctctcctctctttccctgcaacctgttacctcacacagctgctcaggaacagcagaaatagtaaaactcttccatgtatgtggcacctcagccgcccctcccttcgtaagtctccccgatgttgtgtcctgtccctgtcattgtggcctcatgtccgttggttgcaagatggctttctcaccagcggtccaacaagaagggggacaggtgtgggggacacttcccagcagacttctctttgtgttttgttggttaaaagtggatctggccaggtgtagtggct

SEQ ID NO: 91500 - DNA, 1050 bp, Homo sapiens
ctgtagtcccagctactcactcaggaggctgagacaggaggatggcttgagcccaggaggttgaggctgcagtgagccgtgatcatgccactgcactccagcctgggtgacaaagccagaccctgtctcaaaaaaaaaaaaaaaaaaaggatcaactgaccattcttagtggcaaaggaggctgggcaagttccctgggctccccccatcacatcccagcccctctgggctgaccctgtctagagatgcatctgtcccctccttggactgggagctccaaggacagggccaggggtcgtctccccatcccagtgattctggaattgtccagggcagggccgggcgcaggacagacgttttgtggaactaatgcaggggtgaattagtggattcatggggccaaagatgtggcgtcagcgcagatgagggtggcgcttccccacctctgtcctggtcgctccccaacctgctcacacctctctctctctctctccctgacagcatttcttcacttcctttggggcccgtgaccgctgcttcctcctcatcttccgcctctggcagaatgcactgcttgaaaaggtgggcctgggtgaggcccgggtggggatggggggtttccagggggaccatggagccagggaccccagaacttgcggagctggaggcagccctggctcttctccatgggcaccaggcccagtgcccctgcagctcctccctgggccccacctgaccccgaagctgagtctctggcaaagggacatgaattggtgtaaaccgtcgtaattcttccctggggctgggaatgattttcaccctgaaggacatccaggttccactggcagcgggggagtgtggatagaggctgggaggtcatcacaggatgccggctatggctggtccacagcacctcagagagccccagccccatcctccggctgagcggcactcacgcgctgccttctcagaggctccgatgtccctggagcaggcaggagtgctgagggtcccattcagcatcctgagagagggacagcgcacagtcag

SEQ ID NO: 91501 - DNA, 1043 bp, Homo sapiens
cgggtgtgtggtggactccgaggtgctgacgcagggcatcccctaccaggactacttctacactgcccaccgctactgcatcctgggtctggcccggaacaaggcgcggctccggtgagtggtggctgggcccctccacccgatgccctggtggccccagggcctcctgtccactcctcaagtcagcagcagagccttggttcccaccctggtggaggaacagaagcgtggggttcctgaggcccttgtcctccgaatagtggagggtagaggaagagtggccctgggatggctcctcccatctacagagggtgtttgagcctcaagactctgaggatacagcaaagccaggcaatatcacctctctcagggagctcatattctagtggggaattggacaatagagaaatgatcaggaaaatctgcagaacattcactggcagttaggcctatggagaaaaatgaggaaaacacggcaggctaaagaagcagggtgtggaggcttttacacccgacacgctggtcagggaagggcctactgggaaagaaatgtttcaccaagaacctgaaggagctgagagcaactcatttgggacagcaggtgcaaaggccctgaggcaggggtgtgggcaatggctggagtggagtaagattgagtgagtaggagctgagattaaagtggtgaaccggggcccggcacagtggctcacacctgtaatcccagcactttgggaggctgaggcaggagtatcacttgagcccaggagttcaagagtagcctgggtaacgtacggaagccctgtctctacaaaaacaattttttttaaattagccagggtccaggtgcagtggcttacgcctgtaatcccagcaatttgggaggctgaggtgggcggatcacttgaggtcaggggttcgagaccagcctggccaacatggtgaaacccatctctactaaaaatacaaaaattagtcgggggtagtgatgcacgtctgtaatccctactacttgggaggctaaggcacaagaatcacttgaacct

SEQ ID NO: 91502 - DNA, 1558 bp, Homo sapiens
tgctcacagtagatgtagactgagcacttacctgcagctgggctgttctaggttttaagcatgactgctttatccccacagccagcctttgagaagatgctcttgttatcccagtttttttgagacagtctcgatctgtcacccaggctggcgtgcagtggtgcgacctctgccttccaggttaaagcgattctcgtgcctcagcttcccaggtagctgggattacaggcacccgccaccacgcctggctaatttttgtatttttagtagagacgggctttcaccatgttggccaggctggtcttgaactcctgaccttaagtgatccaccggtctcagcctcccaaagtgctgagattacacgcatgaggcactgtgcccggccgttatcccggttttatacataggtaggcgatatgaggcatccagaggttcgaggagctcaggagcttgcccgaggtcacagagtgggtaatggtgacagctaacatgtgctgagcacttagtgtacaccaggttctcagtgctcttcagaaccctgaaataatcctgtggagcagatgtgttatagacccgtatttcaaatgaggggattttggctcagggtggttacgggacttgcctgaggttaactgaggtaacaagcagcagagccaggatttgaacctaggccatcggggtcacaggcacacactaagccccttcctctgctgcctctgagaagttaaactgggtgcagcatggctgtgctcttttcaccaagggaccctggggtggggcagtatggcctctagaccgtcctcagtttctcaatggcaaggtgggggtgggcgacatcaccccccagcctccagcgttcacccccgaccctgctcacctcctccccgcagatgaagttctcgctggagaagctgcaccaaggcatcacagtctcagaccctccctttgacacccagccccggcccgatgacagcttttcctgaggaccccggccacgcagctgttcccccacatggacagatggacacacagagcctcggcggccactgctggcacggtgtgagcgccaggcatctcccacccgcccctcccgacggcccaaccaggggctgtgcagacgtggggaccacggaaccgagatgcactttagaccagggagctggcccggcctctggcaggccccccactaacttattttgcccggctgaggttgtggggggcgcctcctggggtgcacgattccctcagctctgggtttaatgtattatatttatttggggccgacagtgccccaataaagggtcagaagtggctgtggctgtgcctgtggggccctgggagtgggtgggagcctcctgttgcactcagatcctgccatggtggggaggggacctctgtctgtgttctggggccatagtcactgaaacgatctggaattcccgcagcatcttacacaagctttacatcatctgaggtcaacgcaggaactccggggacagaccgtggtagctggagttcaaatcctgcttcctagcagtggtgtaaatgcagcaggtca

SEQ ID NO: 91503 - DNA, 1084 bp, Homo sapiens
ctttaaactatgtgtgtattttgcattatatatcggtgagggaaccataaaattctgtgacgtgctggagagttggggtctccagctgctggaatcaggctgccctgtctctgctggaggagtgtgtctggtggctgggaaagaacggcagagaatgatagcctagaggccagatggggcttgggaggatgactgaggaacgtgtgtgtgctcgtgtgcatcttggctagaggcaaaagcggggtctggttgactccaggcgtgatcctagccccccacccctgtgccctccctgcctgaggtcaaggtgtctgagcccatctgtgtgccatctgtgtttgtgggtgtcagggcaggggacagaatcagggtcaggtaagggaagagaggcccaggcagtgacaccttcccctccctggctacccctagatcctgcgctatgagaatgaggtgttgcagctggaggaggatgagcgcttcgagggccgcgtggtgtggaatggcagccggggcaccaaagacctgcaggatctgtctatcttcatcaccaatgtcacctacaaccactcgggcgactacgagtgccacgtctaccgcctgctcttcttcgaaaactacgagcacaacaccagcgtcgtcaagaagatccacattgaggtagtggacaaaggtgagtcgggtgctgcctgcccctttaccgtcacccaccggagagccagatggagggacagatggcaggcagtggacaggacaggctggctctgtgcctggccagccaaccgcccacagcagcgggctgagggggaggggagcagcccctcctgcccactccagctctggcctctgtttctctccagcccacggagaggtcaaagcatgcctgtcccccacagacgctccgggtacagaacccagctctgtcacctgtgctgtatgacctctggcaggtgccttctgtctctgagccaaagggttgtcctgggcttgcccgggataataatccgatgtgtttctcggggtgtggtttgagccattcttccatcatggggttcatgaggattgagcagctgcaggcacacgcctg

SEQ ID NO: 91504 - DNA, 1155 bp, Homo sapiens
tgtctttaaaaaaaaaaagtccttgagtcatgattccagatgcaatcgcagatgtgggggctgcaaccctccgatgggctggggttcacgtctacaccacatggctggagcacaggccaggaggggctccggctggggaagcatgtggggagcctggctgtgggacccaggcggccccgggccctgtcgccctgcagtgcaggtcagctctgcggacgctcggctcatggtctttgacaagacggaagggacgtggcggctgctgtgctcctcgcgctccaacgccagggtagccggactcagctgcgaggagatgggcttcctcaggtactgggggccctcggaggggtgggagccgggaggggctggggagcaggcctaacccctgccccgcccagggcactgacccactccgagctggacgtgcgaacggcgggcgccaatggcacgtcgggcttcttctgtgtggacgaggggaggctgccccacacccagaggctgctggaggtcatctccgtgtggtgaggagggcagcgggcaggtggggcaacacctcagacccccaaggcactccctctccccgttttccttccacctgtcttaactggtctctatttcctttctttctgtgtctccaatcccatctctcccagtgattgccccagaggccgtttcttggccgccatctgccaaggtgagatcctaaaactcagaaccctctcctttaggcccttggggaggccacgtcccctcaagctccccaggatggggccatgtactttcagaccccctagggcagggccaagcctgggctctggggacctgggctccagtcccctgtcgccgccccctgctgacccttgtcccacagactgtggccgcaggaagctgcccgtggaccgcatcgtgggaggccgggacaccagcttgggccggtggccgtggcaagtcagccttcgctatgatggagcacacctctgtgggggatccctgctctccggggactgggtgctgacagccgcccactgcttcccggagtgagtgccccccaatggcgctgatgatggggaggcagaggagcggagagacagtggggaggagggcggattgtgcccaggcaggtggccaccctccacccctttccctggtaggcgg

SEQ ID NO: 91505 - DNA, 1025 bp, Homo sapiens
gccaggactttgcttagactcgctcctcccggcagggcgcacctaggcgggtccatcgccagccggggagaggggtttgggcagggagggaacaggtgcgcggcgggacccgccctatctcaacaggtgaatcgctccaagtgggtctcggttgcatggatctcggtgcgcttggtttggccggagcagatgggggccggaagggacctgtggtccgcaggcgccctcccagcgggccagtcacttggttcgggccctgggggacggagcgcacctgggtcagcccacttccggggagggaggcagaggaacccctccccgccgctcacccctaagcccagccctcggctcccacccttgtgtacctgggccgaaccattcaccggagcgcgcagcgggtggagtgtggctcggaggaccgcggcgggtcaagcacctttctcccccatatctgaaagcatgccctttgtccacgtcgtttacgctcattaaaacttccagaatgcaacaggacggacttggagtagggacaaggaacggaagtgggaaggggaggagcgtgcacccctcctggccttggtgcgcgccgcgccccctaaggtactttggaagggacgcgcgggccagacgcgcccagacggccgcgatggcgctgttggccggcgggctctccagagggctgggctcccacccggccgccgcaggccgggacgcggtcgtcttcgtgtggcttctgcttagcacctggtgcacaggtacggggcacggggcctctgacgctgcggaacgccggagggaactgtagagggggatggatggagttggaggcggcgggaagcgggaagcgggggtctcagaggctgggaccttccgatcccctgggtcttgggcgatctgttgcgcgcgggagtgagaggaattccccatttgtgccggggagcgctccccgcgcccttatctggaagatagcaggaagtgaaactccctggacggtgagacccggagcggcagggagaatggaactc

SEQ ID NO: 91506 - DNA, 1046 bp, Homo sapiens
atggagatattgtgggggctttagtccctccatggcaaagcagttcaggcaaacaactccatggttttccctccaaattcaaaaggccccgggtaacctggaatccttcgtagtcggttttgaagtggggccttgggcgctgggggcatcaacatggccatctgggcttgcctgcccaggccacacagaggccccttgttgtgggtgaatggcaaagggaagaggggactggtgtggttcagaggccacaggctgggaagagggatggcgggcgagtccaaggaaactggccgtgtcaccgtgcacctgccacttcagccccacgggtctataaaatgggcatgattatcgtggctacctcactggtcctggcaattaaggaacaatgtgtgccaggcactctgtaaaccacatacttgcgagtgtcaagctggtgacaggtggcgttcctgttgaagcacctccctgagctcacagcaacccttgctgtctctcctcttgccctcagctcctgccagggccatccaggtgaccgtgtccaacccctaccacgtggtgatcctcttccagcctgtgaccctgccctgtacctaccagatgacctcgacccccacgcaacccatcgtcatctggaagtacaagtctttctgccgggaccgcatcgccgatgccttctccccggccagcgtcgacaaccagctcaatgcccagctggcagccgggaacccaggctacaacccctacgttgagtgccaggacagcgtgcgcaccgtcagggtcgtggccaccaagcagggcaacgctgtgaccctgggagattactaccagggccggaggattaccatcaccggaagtatgttgggcagggcagggggatgaggctgggcttgcccgggtggtgggactggcgtccttgtgcgggacctggagtccccatctgaaagctcttgagtgccagtgtctgaaaggaccattgaagggagcaattctttttttttttttttttgaagatggagtcttgctctggactccaggctggagtgcag

SEQ ID NO: 91507 - DNA, 1013 bp, Homo sapiens
acagagaggttaccttgttcaaatgggtgcataggaagtcaaagtctggagctggggtttgaacccaggcagccctgagaaccttgttctttttttttgagacggagtctcgctctgtcgcccaggctggagtgcagtggcgggatctcggctcactgcaagctccgcctcccgggttcacgccattctcctgcctcagcctcccaagtagctgggactacaggcgcccgccactacgcccggctaattttttgtatttttagtagagacggggtttcaccgttttagccgggatggtctcgatctcctgacctcgtgatccgcccgcctcggcctcccaaagtgctgggattacaggcgtgagccaccgcgcccggccccttgttcttaactgtaatgctgcctcctgataggatgtgcctgttgggactaagtaaggggcagtcattcattcattcatttggtatttatcaagcatcgactatgtgtcgttggtgctggggatagaggtgattgggatggctgaagtttctgtcgtcaaggagatgacattctggtggagtgagactggcagtaaataagcagataaagaaagagtatgagaatttcaaagtctgggcacggtggctcacgtctgtaatctcagcactttgggaggccaaggtgggtggatcacctgaggtcaggagttccagaccagcctggccaacatggtgaaaccccgtctctactaaaaatacaaagattagccaggcatggtggcacatgcctgtaatcccagctactcaggaggctgaggcatgagaatcgcttgaacccaggaggcagaggttgcagtgagctgagatcgcaccactgtactgcagtctgggcgacagagtgagactctgtctcaaaaaaaaaaaaaaaaaaaaagactccgtcaaggtataagaatgtcagagagtactaagtgttgcaaagaaaataacaccaggctgggtgcattggctcatgcctgtaaatttcagcac

SEQ ID NO: 91508 - DNA, 1146 bp, Homo sapiens
cagcctgggcaacaagagtgaaactccgattcaaacaaaaaaaaaaaaaagctgggcatggtggagtgcctgtagtcctaactactcaggtgggaggattgcttgagtccaggaggttgaagttgcagtgggctataattacaccactgcactccagccagggccacagagtgagaccctgtctctaaagaaagaaaaaaaaaaacaacctcaggctccgagggcaccattactgctctatactgaagagctgtgcagcttttccagacccgaaatgtcatccacaaaacagaagtgataatggtcctgcctcacagacttcttgcagtagtccaggtgtttagaacggggtgtaaaaggccgtgtgcccttggtaggaatctttgcatatgcatttgatcatctgcagcctgcccagcccactgcttgccccctcctgggtgtgctgggaaggggtctttggccctccaggggttaggtgccccagcctccaaggtgccctcacgccttttcatcccgactcagatgctgacctgacctttgaccagacggcgtggggggacagtggtgtgtattactgctccgtggtctcagcccaggacctccaggggaacaatgaggcctacgcagagctcatcgtccttggtgagtgggcctgggaagggggaggcatggcccttccttttgtccgcttctgttctgtctgccctcccctgtgtccgccctctgccctccagcttaccctctgggctctgtcgcctgctctgctctcccccaggctctgccagtcacttaggctcccctgtgccctgcaccccaggcagggaccactggcccacagtgcctccaatcacccaagccaaactaagagaagagtggagacaattggagactctgccttttcaaagtctcatttttaaaaaaaatccagacttggggtccgggtgcggtagttcatgcctgtaatcccagcactttgggaggccgaggcgggtggatcacttgaggccaggagttcgagactagcctggccaacgtggcaaaatcccgtctctataaaaaatataaaagccaggcgtggtggtgcacatgcctgtaatcccagttactcagaaggctgaggcatgaggattgcttgaacctggg

SEQ ID NO: 91509 - DNA, 1793 bp, Homo sapiens
tacaaaaaattttaaaattaaccaggcatggtggcatgcacctgtgagcccagcttcttgggaggctgaggcaggagtatcgcttgcacccaggaggtcaaggctgcagtgagccgtgactatgctactgcactctagcatgagtgacagagaccctggctcaagaaacacaaacacacacacacacacacacacgcatatagtccattaggcatcagggcgatgatggcatcagggagcctgggaaactctactggacattcatgggagaacaagtgaaaaaggcaaataacatcttagtgttattctaaaatttcttcttttggccttgtggacaggaccacgctttgagagctgtgactgacatgcctctgtcctgttgcgagggcctatagtgccaagtgcatgagctctggggagggcttcgtgggtgcagagctgggcctgtggaggcccctcagacacaacactggtggggctcagagctccaggggcactcgagggaagacaagaaccggctctgagatgcgtgaatgtgacagtgcatgagtagagatggagaccttgtgggtcccagaaccaggactgcatatgactttcatatgtgggtatttttgccttcatgggtcccttcctgttttaaaaaaaatgtgtgattatgttgtcacaaagagtttattcctgtatattgtgttaatttgtgttcagatttgtaaagtaaaattaaaccatttcagccaggtgtggtgacacatgcctgtagccctagctacttaccccagaggctgaggtgggaggatcgcctgagcccacgaggttgaagctgcagtgagccatgatcacacccctgcactccagactgggcgacagagctgagatcctatttcgtgggccctaggtccctgtgcctgctggaacaggacatccctatcaccgtggttggagccctttggggtgctaagacctatgaatgagggaaacttagggtgcccaagctgaggtagagccctcagaaccccctgggatttgtattggagccctcgtggcataacacaggtggattatgcaatgggagtttcttacctataagcacccacatgtgggcgggtggagggtaggagccatgcactagggcttcagcccccagccccttcccgcttcagggcacaccttgcacttggccagcctggagctgggctttcgggggtggcacagcctgggctggctctggccagcataatctgtttctcttttgtccctccagggaggacctcaggggtggctgagctcttacctggttttcaggcggggcccatagaaggtacggggggtggatcctgagttgggcttctcgggagctcccatacatcacctactgcttctgactctagttagtatccccttccccactaaaccctgctcactgtggacccctcactaacctggcctgactgtggctctgaggcatctagtggtctggcgctgggcctaggctaggctgggctgaggagagcctggggtgcaggccagggctctgtgactggcacctgcggtgctcttgagggtgtggcgtctgggcagctggctctctctttggtctgggggctgcagtctgtctccctctgtgcaggctgcctcgttttctgccttgtgttttttgcacctgggggagggccgtaactggggaatggccgggatggtagaatggggagtgtgctgtgcccagcctctggcacaaaaaatccagccagggctgcaggttccttggtgagctttgcaaatcgtccccgacc

SEQ ID NO: 91510 - DNA, 1132 bp, Homo sapiens
catgtgccaccatgctggccaatttttaaaaattttctgtagagacagggtcttgctatgttgcccaggctggtcttgaactcttgacctcaagtgatcctgcctcaggctcccaaagtgatgggattacaggcatgaactaccacacctggccttaaacttaagcaaatttttttttttttttggagacagtttcactctgtcgcccaggctggagtaaagtggcgtgatctctgctcactgcaacctccgccccccgggtttaagctattctcctgcctcagcctcccgagtagctgggatataggcgcctgccaccacgcctgactaatttttgtatttttagtagagacggggttttgccatgttggccaggctggtctcgaactcctgacctcaggcagtccgctcccccgcacccctaccttggcctcccaaagtgttaggactacaggtgtgagccaccatgcctggccaaatttaagcaaatgtttgaaaacacatacccacaggaatgctgcacattttacccagctactatgtctagggtcgtatctagcacaccagcatggctactgtggagagctgggactggatgtgagatgagagctaaaggggaagtaagcaaaccaagcaggggaaggtaagagaagacagaagacagagagagagggacctaactctatgagaggagtcagacatgtgcaattgaaaaagacttgctcctgtctctcttctgtgaatgtttgtgaatatcccaacgggacactttcacagaggagctgattgacgtggtcacagccatcagccttgggacaccagaccacagtgtgtacactaagtggcactgatggacacttcagcatccctctagctgctgtcccgtttcccctcctcggggaccacagctgttgccagtccttggtttccttcaggagggtgtctgggtagaccagcctgtgtgcacacagtccaagatacatgaacagtgaagtgccaggcaatccttgcaagcatgggcaggtggagagctgaggcctgcttgacaccttcctgctcagaagcccagtgagcagtttccctccctagggctcagtgtcatcccctataaaatggggcttatggcagagct

SEQ ID NO: 91511 - DNA, 1391 bp, Homo sapiens
tgagggcttttaaggtgggggggtgaaacatgtctccctgatacctgccgcagggactcttggtgcaaaccctggaccccgggctcctccagcagtcagtgacaccccccttccctgcagccatgagtgaagtcacctccctccacgaggacgactggcgatctcggccttcccggggccctgccctcaccccgatccgggatgaggagtggggtggccactccccccggagtcccaggggatgggaccaggagcccgccagggagcaggcaggcgggggctggcgggccaggcggccccgggcccgctccgtggacgccctggacgacctcaccccgccgagcaccgccgagtcagggagcaggtctcccacgagtaatggtgggagaagccgggcctacatgcccccgcggagccgcagccgggacgacctctatgaccaagacgactcgagggacttcccacgctcccgggacccccactacgacgacttcaggtctcgggagcgccctcctgccgaccccaggtcccaccaccaccgtacccgggaccctcgggacaacggctccaggtccggggacctcccctatgatgggcggctactggaggaggctgtgaggaagaaggggtcggaggagaggaggagaccccacaaggaggaggaggaagaggcctactacccgcccgcgccgcccccgtactcggagaccgactcgcaggcgtcccgagagcgcaggctcaagaaggtgagggccgccctccctggcgtccagaccgtccctgggcccccagccggtccccgcggctcatacccttctttctttctcccttgcagaacttggccctgagtcgggaaagtttagtcgtctgatctgacgttttctacgtagcttttgtatttttttttttaatttgaaggaacactgatgaagccctgccatacccctcccgagtctaataaaacgtataatcacaagctctggagagaaccatttgttcggccgcgcggggcgggggaccggggctgctcccgtatgcgtctgtaaagcgccgcgtcccgggggcaccggagtccggggccgggaggaagagacccagcctggcccggcccgcgcccgcgccgccggccggagaacgtgccccgcgcagccgccgcccgcctgcgtgcgcgccccggccccgcccaggcgtgcgcatgcgccccggccctccgccttcgcgcaccgcaggctggccgtccgggacgcgcgcgcgctcctctccccttccagcccatcccccccagccccccaccgacctactttactgtctccaaactcgggcagcccacctggcccccgacgaccccagcccctgcaccgggtaccccgacgttccatccagacccgcgt

SEQ ID NO: 91512 - DNA, 1027 bp, Homo sapiens
cgggtctggatggaacgtcggggtacccggtgcaggggctggggtcgtcgggggccaggtgggctgcccgagtttggagacagtaaagtaggtcggtggggggctgggggggatgggctggaaggggagaggagcgcgcgcgcgtcccggacggccagcctgcggtgcgcgaaggcggagggccggggcgcatgcgcacgcctgggcggggccggggcgcgcacgcaggcgggcggcggctgcgcggggcacgttctccggccggcggcgcgggcgcgggccgggccaggctgggtctcttcctcccggccccggactccggtgcccccgggacgcggcgctttacagacgcatacgggagcagccccggtcccccgccccgcgcggccgaacaaatggttctctccagagcttgtgattatacgttttattagactcgggaggggtatggcagggcttcatcagtgttccttcaaattaaaaaaaaaaatacaaaagctacgtagaaaacgtcagatcagacgactaaactttcccgactcagggccaagttctgcaagggagaaagaaagaagggtatgagccgcggggaccggctgggggcccagggacggtctggacgccagggagggcggccctcaccttcttgagcctgcgctctcgggacgcctgcgagtcggtctccgagtacgggggcggcgcgggcgggtagtaggcctcttcctcctcctccttgtggggtctcctcctctcctccgaccccttcttcctcacagcctcctccagtagccgcccatcataggggaggtccccggacctggagccgttgtcccgagggtcccgggtacggtggtggtgggacctggggtcggcaggagggcgctcccgagacctgaagtcgtcgtagtgggggtcccgggagcgtgggaagtccctcgagtcgtcttggtcatagaggtcgtcccggctgcggctccgcgggggcatgtaggcccggcttctcccaccattactcgtgggagacctg

SEQ ID NO: 91513 - DNA, 1953 bp, Homo sapiens
tccagtaccagttccgcacagagacaaatggaggacaggtgagcggcgggccgcgagggcgaacgggcgggcgggcgggcgcgccgggaaggctcggacctggccccagcgccggcctcgccgctctgccgccccctgcaggtgacataccgcgtagtccaggtgactgatggtcagctggacggccagggcgacacagctggcgccgtcagcgtcgtgtccaccgctgccttcgcgggggggcagcaggctgtgacccaggtgggtgtggacggggcagcccagcgcccgggccccgccgctgcctctgtgcccccaggtcctgcagcgcccttcccgctggtaggtgccctgccacccctgggtgggggggggagggagtggagaggggacactggctctgctcttggggagccccgggggtggggcaggtgtcgcccagcggatgctgccttcaggcctcaggctgcatggggccagatccctgttgtgcaccgtgaaacctggggacagtgctcttggaatttttttttcccgcaaaatgggaatgatgtgtcttaagaggaaagtttcttagagtgcgaaacggatttgctcagcaagtgatcgctgacctcccgccatgttccagggctgtttgaaacacaggacagaatgctacacgcagaaggagtccccactcctgttaattgcagagaatgcagtaaaccccaagcacagcaatgaggggacgggatggaggaacagagaaagctaagggtagcctctgccctcctactccccaggctgtgatccaaaatcccttcagcaatggtggcagtccggcggccgaggctgtcagcggggaggcacgatttgcctatttcccagcgtccagtgtgggagatactacggctgtgtccgtacagaccacagaccagagcttgcaggctggaggtgaggagtagaagtcagattggcaggtgggggaggcaacgggcccagcagggagggaagcccccccagccagttctgacttcaccctgccttgccactaaccccccactctccctgcaggccagttctacgtcatgatgacgccccaggatgtgcttcagacaggaacacagaggacgatcgccccccggacacacccttactctccgtatgtgcaggggacacctggagggcctggtgttgaaatggaaggaagaggggtttctggagtagaagctgggcagttagcatgaagtgggcacatggtgtaatgttttttttctttgcctgtttctgctgctctagtgcacataaagtatcatgtcttttgtttttgcagatggatttaccttgcaaagataattttcaaatctaatacttagcagatgcttgggcaaacagctctgcgataatacatgccccctttttttttcctcctcttgtagaaaaattgatggaaccagaacaccccgagatgagaggagaagagcccagcacaacgaaggtgaggacaaggtgtggctccgggtccccctgaccaccaccctcacaggctcagccagccctggagtgtggagtgacagagagagaagccactcctgggcaggccacaagtgctccagagggctttgctggacgctgtaaaggtagaaagtgagcaacgaggggagagtacagtgtcagaagtagagggacagggagtgtgaattggaactggccatttgttgacccggctggtgatcttgaattcatggcccacatctaagatggtggacttcacactcccatacggattgcctgccccacttgaaaaatggggctgaccgggctcacgtgggctgacctttccacgtggcagctgtcatgctcacatcccgcactcccatgcctgcctggcctccagaagtaggtctgttcccccagggagcacatctgagggagaaactgcatgaagttctgcctctggctacctaaggc

SEQ ID NO: 91514 - DNA, 1067 bp, Homo sapiens
gcatctgagcttggttttgagatgcagtgagtttgaggggcccccagagcagccccagccccacgacttacctgtggtggggcgtcagggtggttcttaatctccgtacctgtcttccctctgtgaaatggtggaagcacagccgccccgggcacctggtggggatgcagtgagtcttggtggccacacagtaaggcgaagagaggactcagaaccctcccaccccactctcacccccgcctctcccttagttaatctgactccaggcagccttgaaactttctcaccctgtgaagcagtcttcatcacctgcccacttctccagctccgtcctgtctccgctttcctgacttgcagagcatctgccccaatctgctcatcctcccagtaccctcagccatctggctcatggctctaccaaaacagctccacttccggtcacccgtggtgaccccattgccacatccactggcctcctttgctgtctgggctccaagcatctgatgctgcctgtttccctctgttcctttctggaatcttcctttctcctccatcctctctgattctcctgtgatctttgcctttcctaccccactgttaacagtgaaatttccagggctgtcccagttccaagtgagtagatgggggtgccggggaatctgtgttttccatcagctcttcaggtgatttgtcatagtggacaagcttgagaaactgctttggctgcgagtgtttctttttttttgagaagggggtctcactctgtcacccaggctggagtacagtggcacaatcacagctcactgcagccttgacctcccaggctcaagcgatcctcacacctcaggcttctgagtggctgggaccacaggcaggcgtcatcacatggggtaatttttttttatctgtagagtggaggtcttgctatgctgcccaggctcgtcttgaacttctggcctcaggcagtcctccggcctcggctacaggcctgagctgccacacccagtcttgctggtgtttcataaggtccggcccctcccgtcggcctcaggtgtatgacttgtgag

SEQ ID NO: 91515 - DNA, 1037 bp, Homo sapiens
gcctctgctgcccccttccccagcccttagcacagagagggacacatgcccctcccccagctgcgtttttttatagtagatttttaacaaaaaacggggagaaataatgcatttctgtggatacagtgcccaccgccctcctccacttggaaacggtatcctccctgcccatccgtctgtctgtcgcccttctcccggccctcactaagccccggcacttctagtggtctcacctggaggcaagagggaggggacagaggccctgccacgtcccgctgcctcctgctctctggaggtactgagacagggtgctgatgggaaggaggggagcctttggggggccacccggggcctggacctatgcagggaggccacgtcccaccccacctcttgtttctgggtccctgctcccctttgggggtgtgtgtgtgtgttttaattttctttatggaaaaattgacaaaaaaaaaatagagagagaggtatttaactgcaataaactggccccatgtggcccccgccttgtctgcttgtgtgtttgtccatctcaggagtggggagggggcctggggtctgcagagctccacgaggcatggttctgctgttgtgcacatggctgtgcatggtccctgccagctgcaccacccattacccagtggttggttggatggatggaggaattaaggaatgaatgtcccctttgaggccctagacgtgcatgagggtgtggggagctggggtcaaggacatgtcccatgttggaggagaggcaggggtctccgtgtcaacagttcctgaaaacacaaccagcccctggccctgccctgctgggccaaagccctcccctctgcaccagccaatagtggggcctggccttgagcccctcacccccagggagggcagatggccagggcgccaagcttggcccgtcagcctgtcgccttgcaccaaggctctggcgcctgtgctgtgacccctgcccctgctgatgatgaaacctgtcctcagctgagatgcagcgatgcctggtagggctg

SEQ ID NO: 91516 - DNA, 1050 bp, Homo sapiens
ctcattctgtaacctctcgtactcctgacctcaagtgatccactcactcttcggcctcgcaaagtgctaggattacagcagtgagccaccatgcccggcctctttcagtgttttgagcaacaacctaaacacctttatcagtgcctgggaatgttcaaggccccaggcgtgggttagtgaagcttgcagtgaaaacaggcagccggcggggtcgtagtgaggtcaaggcgctctcagtcaggacagagaaaaaaggaggggaaattggagggccctacaggaagctaccgcccccatccttggccacactggccttgccttgagccaaggagtctccggggccgggcctcgcgttggctccgggccaccctcagacctgattttgcccctgcagtcgcccctgtgctcctcctggagtcccactgcgcggcagcccgagacacggtgcagtgcctgtgcgtggtgaagtccaacccggagccgtccgtggcctttgagctgccatcgcgcaatgtgaccgtgaacgagagcgagcgggagttcgtgtactcggagcgcagcggcctcgtgctcaccagcatcctcacgctgcgggggcaggcccaggccccgccccgcgtcatctgcaccgcgaggaacctctatggcgccaagagcctggagctgcccttccagggagcccgtgagtggcgtggacttggggtgggagccacaggagggagcgggcacgtcttagatccaagctcccaaggctgaccaacagccacagagcatgggctatgcagattgacagaaaggtcaaattctccctttccggttggagaggagaagccgccctgagtttgccccgagtttgctaggacctttgaggcatgagcccctccccagggccctctagcatgaaagggattgccctggcacgaggaggctccgtgccaatcagtcagtgcaaggatgccccggctgtgtgactacattgactgtcatcccagcatgtctccaaagttctcaggtgtcgtcaccaccacccatagccctaagggcgcctgg

SEQ ID NO: 91517 - DNA, 1124 bp, Homo sapiens
tcaggaagacaggcaggctgaccccgcctggaaggcacccagagacaagaggggtgggcgtagtgacctcgtgcccttttaggggagatgctgctggccagaggccgttagggcccccactaccaactccatgttactctctctcaccagtggccaccaccatggatacaggccccgaccagtcctacttctccggcaatcactggttcgtcttctcggtgtaccttctcactttcctggtggggctccccctcaacctgctggccctggtggtcttcgtgggcaagctgcagcgccgcccggtggccgtggacgtgctcctgctcaacctgaccgcctcggacctgctcctgctgctgttcctgcctttccgcatggtggaggcagccaatggcatgcactggcccctgcccttcatcctctgcccactctctggattcatcttcttcaccaccatctatctcaccgccctcttcctggcagctgtgagcattgaacgcttcctgagtgtggcccacccactgtggtacaagacccggccgaggctggggcaggcaggtctggtgagtgtggcctgctggctgttggcctctgctcactgcagcgtggtctacgtcatagaattctcaggggacatctcccacagccagggcaccaatgggacctgctacctggagttccggaaggaccagctagccatcctcctgcccgtgcggctggagatggctgtggtcctctttgtggtcccgctgatcatcaccagctactgctacagccgcctggtgtggatcctcggcagagggggcagccaccgccggcagaggagggtggcggggctgttggcggccacgctgctcaacttccttgtctgctttgggccctacaacgtgtcccatgtcgtgggctatatctgcggtgaaagcccggcgtggaggatctacgtgacgcttctcagcaccctgaactcctgtgtcgacccctttgtctactacttctcctcctccgggttccaagccgactttcatgagctgctgaggaggttgtgtgggctctggggccagtggcagcaggagagcagcatggagctgaaggagcagaagggaggggaggagcagagagcggac

SEQ ID NO: 91518 - DNA, 1038 bp, Homo sapiens
tttgtagagatggggtctcacttttgttgcccagggtgctttagaacccctgggctcaagtgatccttgacctcccacagtgctgggattacaggtgtgagccaccgtgcctggcctcatgggttttctttgttttgttttgttttgtttttgagacagagtctcactctgtcactcaggctggagtgcagtggcacgattttggctcactgcaacctccaccttccgggttcaagcgattctcctgcctccgcctcccgagtagttggggttacaggcatgcgctaccacacctggctagttttttattgttgttgttttttgtatttttagtggtgacggggtttgctctgttggccaggctggtctcaaactcctgacctcaggtgatccccacttcagcctcccaaagtgctgggatgacaggcatgagcctctgcacctggcctcgtgttttttttttagttagccattttatacgtgtttactgaacacctgtcctgtgcccatattctaagtgccttacctgcattaaactcatgtaaccttcacaacccgatgaggaagtgctaccgctgtcattttttgcatttttttactgctgtcagggcagaggggaggggagtgagagggagagcctgctggagtgcaggtggctggtcccacctcgggtctgcactcctgtttccactgcctgaatgaatgaatgaatgggctgccctgcaaagccatcacacatgcatggttatcctcttcctgtctcctgctctgtcagtccactttccatcatctggcccaacgagctcttctcagataccccccatttcctgccttccaaattagggacacttgcgattcctctgcaacaattgctgagttggcctgaggcaaagactgtgcccccagaagaccccaggccctccccaaggctgtcatgggccccagcctcctgcccaccaggctgttttgaggattccattcattcattcaaaggaagttctgaatggctatcagggcctgtacctgctaatgccagag

SEQ ID NO: 91519 - DNA, 1049 bp, Homo sapiens
aggaggggatgtgtgcaggccagggtccagccttgcctgagggttgcacagtgttttaagtgacttctgcactggtgggcctctcctcccgaaaccagtctctccctcttaactccatacagtaagcaaggcccgggaagaagttgggtttccctgccatccttcctgccccagcccctcatcctcaactcaccatcaacccttccacgatcccaaatcgctcgtggatgactttggcgaggggagccaaacagttggtggtgcaggacgcgttgctgaaacagccaaggtgtgcacggacactgtgaggtgagtcgcagagccacccctccacccttacccctcttggggtatgcacgcagacttggttttatgaaacgtcaggatgagggtgagagggatctgtggggacactgtcagactgaaggaggcactgaggtgcagctggggaggctccccaagcttgtcctctggaagtcatgcgtttttagcagatagtttcgggaaggagaagcagaagccaagcgaccaggaatccagtggggctgagggtggggaggacgagtctaccctcccttccacacattgcaggatgtcactgcccacattacctcacaatgttcatggagccagggttatagtcattttcattgacacccatgacgaacattggtgcatccggtgagggcgcggagatgaccacacgttgagcacctgcagagatgtggtcctggggaggaagcgcaggtgtcaggggcttctggcaccatcatccccccagctagccctgggcacctctccccagcttaccgaagctgcctgtatggagaggtacacgcctgtggactccaccacgtaggggctcccgacagccctccaggggatctgtttgggctctttgctgtggggaagtggcagggctgagtcagtctcccctgcttgagccccaccttcatagtccatggctttcaccatttgacaggctgagcaggtaccggcccacctgcaaccacctgcgtcccctaccccacacacctacttgttccaga

SEQ ID NO: 91520 - DNA, 1520 bp, Homo sapiens
ctgcccaaggagcagcaccttcagacctgactcagatgccctgtgatcacccagaactcaaacttccagccccctcggggacccggggacctatcctctatctccccgattcctgtaattttgccaccatctggtggttcctcttccagatgggcccccagaacctgtcctgccctcttcctacccacgaacttcccacaaatcccacgtggtttatcttgatcccctcaccttgaagtgacctctttctgctttctgttctcagatgctgttcttggccactttctttcccacctgggaaggcggcatctatgacttcattggggtgagaggggccagggaagggaagggagttcaggaatggggctccctgtccccctgtgcttacttaagcctcaacctgacccgcaggagttcatgaaggccagcgtggatgtggcagacctgataggtctaaaccttgtcatgtcccggaatgccggcaagggagagtacaagatcatggttgctgccctgggctgggccactgctgagcttattatgtcccggtgcgtacagcagcctggagcccagacccctgagaagggacacctgggttccacgggggtgctggagggcaggggctcaaagcctggtgctgaaggtgtctgagtactggagaatcccatcctttgccttcctcagctgcattcccctatgggtcggagcccggggcattgagtttgactggaagtacatccagatgagcatagactccaacatcagtctggtaggcagtcgtgctctcccacatacacatttctgctggcggccatactcctccccaaggcctggccccgactttctgcctccctctaggtccattacatcgtcgcgtctgctcaggtctggatgataacacgctatgatctgtaccacaccttccggccagctgtcctcctgctgatgttcctcagtgtctacaaggcctttgttatggagtgagttgggtggggtttagggctgggtccaaagtggggtgggttatctagtctcccttccttattgtgacattttcctgcaggaccttcgtccacctctgctcgctgggcagttgggcagctctactggcccgagcagtggtaacggggctgctggccctcagcactttggccctgtatgtcgccgttgtcaatgtgcactcctaggcttggtgtctcagacattgatgtaccttttccctgcctcactccaggttttagtgaagtaaacagtatttggaaagttgttgctgcctccatttctctctcttgggaactgtctcccaataccgtgtccacctgggtctcagaggccctggttctgtctcaggagccaggtagacaagctggaagctagccagtcactgacttgtcccatgtcttgttcctcaggctcctggtttgccaggagtagacagaaggtttggatgatctttgagcagtggcagaggccagggccctcagggaacagatgatagaggggagctagaatccaagaga

SEQ ID NO: 91521 - DNA, 1029 bp, Homo sapiens
cctcacgtcggcagctctgggcctggagcccgtggtcctggtaagagtcctggtcatgggagaaggggcagggagcctggagtcaggcagatgctagggtccccctcaggtcccttcctcctcttctccctagcgtgatgtccgaacagcctgcaccctccgggcccagttcctgcagaacctcctgcttccccaggccaagaggggcagcctcccgtgagtgtccctagcccccagagaccctgtaaagaccctgggttttaagtgggggtctcttatttattaattcctcagacactgagcttctgggctacgttctgtagaaggggacttccaggctgggaatagaaggagacagtctctcatcacaaacagtgacagccaggtggtcagggctgttgcgggagtgaggaggcctgagaggctctgggcacccagaggcagtgcctttcccagctaagaaggcagggaggggagaggttctctggtgaggaggcttagctggggtgaagggtccagagagtgtcccagatgaacaacccatgtaaaggccccaaagccagcaggttggtataattggggaactcaagtctaacaggcatagggaagatgacagcccctaccttatagggtggtggtgataactagaggataattgacgtgtcttgtaacgttctctgtccgcttacccaaccccacagaacccctcatgatgaccactttggcacttcgtaccagcagtggctgagctcagtggaggtgagagggcagggctctcaggaaagccacaccctcccgctccttgatcaaaacttagggtgccaggacctaactcttgatgacagccctattcccatggggtctcagctcacagccctgccccgatcctgccctgacttcaccctccctccccctagacgctgctgacaaaccaccccccaggccacgtcctggctgccttggagcacctggctgcagagcgggaggcagagattcggtccctgtgcagtggggatgggcttggcgaca

SEQ ID NO: 91522 - DNA, 1071 bp, Homo sapiens
atggaggcggagatggccctgtaaggcccgcgacagagagtgataaaagtcgtcccagagccagagccaccgaatctcggagcctccaggcctcgataggccggagatacggctctaacatggggaagtgggaccttcgggattgtgggggcggggataggggagaggttggcaggggtgagggtcccctcgcgatatacccacagttccaaaattggtacgaggtcctgagcgctgatgtctgttctactcctccaggtttgagcaggaagttctgggggctccagtacctggaatcccaactgctgtgcctgcggtgcccactgtccccacggtccccacagtagaagcgatgcaggtcccagcggctcctgtgatccgcccaattatcgcgaccaacacataccagcaggtacggctgagctaaggcatgtaagtcagggaacacaatgcctcgaacagagtaggtgtttgtgtacagagagctgttgacgttttggcttgttgactaattagcatgacaaatattttatatgccaggcactgagaacacagtaatgactgagagagacatttctgccctgtgggagcttatattctagaacatgttgtccagtagagctttctgcaatgacgagactgttctgatatatttaaaatttatatttaatagttcgttattctcattagtcacatttcaagtgctcagtagccaactatatatgactagtagagaaagagagagaaattattaagatgaaaataggctgggcgctgggcgtggtggctcacacctgtaatcccagcactttgggagaccaaggcgggcagatcacgaggtcaagagatcgagtccatcctggccaacatggtgaaaccccatctctactaaaattacaaaaattagctgggtgtggtggcacgtgcctgtagtcccagctacttgggaggctgaggcaggagaatcgcttgaacccaggaagcggaggttgcagtgagctgagattgcgccactgcactggagcctggtgacagagcgagactccgtctcaaaaaaaaaaaaaaagccct

SEQ ID NO: 91523 - DNA, 1091 bp, Homo sapiens
actgctgaggagtttgtggcaccaaaaagattaagaatctttgcagtgtagattatgccaacaacggaggcagcccaccagttatttttatgccgtttaaccgtaggaagtcacttagacaccctgttccttcctcgtctgggcaatggtgatagtaatagttcctaccttttagagtggctataggagtaaagtgtgtagaacagcgcctggcatgtagtaagcactcagtgagtgttagctcatgttatttggggaccaggcttgattttgctgaggagttgtaccccaaccctgccgcgacctcgacactcagatgtgtggattcgccctgcccctcatctctgtgtatgttgagaggcaggaacttgttcacacccagcccattgttccgtgcctgccctcttccattgatcctgggtagtctggcttgctcagggcccctggggcccctgctgacacccactcctttcgcctccaggattcagcaccatggcggaagacatggagaccaaaatcaagaactacaagaccgccccttttgacagccgcttccccaaccagaaccagactagaaactgctggcagaactacctgggtaagcaggacctttccctggccacatacctcgagtcactcaccgcttgcctcttcctaggggacccatccaccccagcctcctcccttttattctgaacatccttactctggaaggcccatgcctctcatcacctgctgttcaggtccaggctagggttacaaactttagttcctgcaatgattttttttttaatttaaattttttattattattatggtttggttttgtttttttccagagatggggtctcactttgtcacctaggctggagtgcagtggtgcaatcatagctcactgcagcctcaacctcctgggctcaagaggtccccctacctcagcctctcgagtagctgggaccacaggcccacactactgtacttggctaatttttttgtagagaagaggtctcagtttgttgcccaggctggtctcaaactcttggcttcatgcgctcttcctgcctcagcttctcaaagtgttgggattatag

SEQ ID NO: 91524 - DNA, 1060 bp, Homo sapiens
ccttctcagatccatacatgctgtggcatatagcttgctcattttcattgctgtccagttttctacaatttattctatgcctgtacacttgtgtgatttccattttggagttcttacaaatggtgtggctgtaaacatctttataaatgtaattttgctgggtgcagtggctcacgcctgtaatcctagcactttgggaggccgaggtgggcagatcaagaccagcctggccaacatggcgaaaccctgtctctactaaaaatacaaaaattagctgggcatggtggcaggtgcctgtaatcccagctacttgagaggctgaggcaggagaatcacttgaacccaggaggaggtagaggttgcagtgagctgagatcgcaccactgcactccagcctgagtgacagattgagaccctacctcaaaaaaaaaaaaaaatgtgttccaactcttgatctgggctgacttgaacccctttcttcacagacttccaccgctgtcagaaggcaatgaccgctaaaggaggcgatatctctgtgtgcgaatggtaccagcgtgtgtaccagtccctctgccccacatcctgggtatgtgcctcctgccagggcccttgggatgctggggtggggtcttagcagaggggagtgtggtggcttggtgggagctcatctgtgaggggcagagggaggacagggcaccacactgtcccaggactcagtgcctttcctcccgcctagaattacctccctgtctccttctgctgatgcctctcaaccagtcagggctctcagctgaggcgaccagggtgctttgctagatgtagctcactcatgcactctccaaatacacactcagcactgggctcccatccctgtgtagctcacaattctgtgcagtcctgtccttttttattaggaacatttttttttctttttttttttctttttttttttttagacaagggtcttgctgtgttgccaggctggaaaggctggagtgcagtggcgcgatcttgcctcactgcaacctccgcctcctgggttcaagcgattcccctgcct

SEQ ID NO: 91525 - DNA, 1112 bp, Homo sapiens
gtgtattgtttggcaccttttttgcacttgactatgtatcttgaagatccatccattcatgccagaacataaatcagcctcgttttttttcacagctgcctgctattccatctcccctgtttggacaaacagcatagtgttgacttgaggttttcaaagcagggcccacccttggagctctgtacagtgacacatctccccatcgacagctctgcagtgggcctggggttttcctgcccattactctcctcccagcatgtcagcttgttcagaacagtgatttctgtcttttggggtcactgctgattccccggcctctagaatagaggttggcacacagcaggtacctgtggatattggttgaacaaacaggtgggcaaagtgaggaagataagaagtccatccgttcagtttccccactgcggagggaataacactgtctttccacaggtcacagactgggatgagcaacgggctgaaggcacgtttcccgggaagatctgaactggctgcatctccctttcctctgtcctccatccttctcccaggatggtgaagggggacctggtacccagtgatccccaccccaggatcctaaatcatgacttacctgctaataaaaactcattggaaaagtgagactatgcgtgtgaacgggccaggcagtggcaagaagctgggctggaatcagtgccctgaccagggaggggcttgaatgagtattttctctgttttgtttttatttatttaatttaatttaattttttttttttttatgatggagtctcgttcttcacgcaggctggagtgcaatggcacgatctctgctcactgcaacctccacctccagtgttcaagcgattctcctgcctcagcctcccgactagctgggactacaggcacaccccaccacacctggctaatttttgtatttttagtagagatggggttttaccatgtcggccaggctggtctcaaactcctgacctcagatgatccacctgcctcggcctcccaaagtgctgggattacaggcatgagccaccatgcctagcgttttttaacttaattttattgaaccttggccaccctctctgtgccagtcaatgagt

SEQ ID NO: 91526 - DNA, 1050 bp, Homo sapiens
taaaaatacaaaaattagccgggcgtagtggtgcacacctgtaatcccagctactcaggaggctgaggcaggagaattgcttgaacgcgggaggtaaaggtttcagtgagccgagatcatgccactgcactgtagcctgggtgacagagggagactgcgagactgtctccaaaaaaaaaaaaaagccagctgtaagatcaaaatcaccctcagattgtcatagccatcagcagggcggcacctacttgtgcagggcctgggttcaacatcagctccctggggccccgaaaccacccgaggaggtggacagtgccatggtccccattgcacaagtgagaaaaccaatgctcagggaaggtggtgactttcccaagggcgcacagtgactctcgctttcagcggctaccctcatgggcgtcttctcaaacttcccccatccccctgcccagggctgcttcgaacacatcggccacgccatcgacagctacacgtggggtatctcgtggtttgggtttgccatcctgatgtggacggtgagaggcggggagcccacaggctgggtgggctgggggtggggggcggagtgccctcatctcgctgcctcctcgccagctcccggtcatgctgatagccatgtatttctacaccatgctctgagggacaggaggggaaggcaacatacacaccccggactcctccgcatcctcctcctgcttcctccgctgggcctggatggctgcctcacctctcacctcccaacgtccctagcccttacgtccttccacttccaagatctttttccaggttcctgagccctactgtgtctcaggtgtgccctgaaaccccagggcttgtgtgcacatatccttagcccatctttcaagggacctctccatgatcccacctcccattcacagatacctctcttgtagctctctgacctcctccttcatggcaggcatcgccattcttgctgaaccgtttgtgattgccatttgagctctggaagcctctattgccatgagagttctgtcacggtcactttactgt

SEQ ID NO: 91527 - DNA, 1058 bp, Homo sapiens
atgtcaggtgatccacccacctcggcttcacaaagtgctgggattacaggcgtgagcctacatgcccggcctaatactcgtattactgaataaaatttgaaatctgatttttttttttttgagacagagtcttgctctattgcccaggctggagtgcagtggcgcaatctcggctcactgtaacctccgcctcctgggttcaagtgattctcctgcctcagcctcccgagtagctgggatcacaggtgtgcatcaccaaacccggctaattttttgtatttttagtagagacagggtttcaccatgttggccaggctggtctcgaactcctgacctcatgatctgcccgccttggcatcccaaaatgctgtgatacaggcatgaggcaccacgcctggcctgaaatctgatagttcttattcttactggtagacttgaccaatgggacactaagggaaaaatgtgcaaggggctcggggcacaccctggctgcaaagtcaaagcttcccagaaatccttgtatcatgaacttcttgaggcacaacccagcttgatgtaacaatgtcaacacagcaacacaaataccaattctccttaaatattataattaaaatcaaaccatcagaatagaccaatgggagggatgatcatttgttttgtgaaaaagttctccctctatttcacttattttaaatatcaagccctcttcccaagccaagttgaacaagattcaatttagaaaaattctgtgaactcgccactcttcccgtgaacccatctctttccacaaatgaaggtggttaaattccccacagcattttatatagattaagagcgattatccaaatcttacatgaactttaagtatgtttactctttcgccaggcgcagtggctcacacctgtaatcccagcactctgggaggtggaggcaagcggatcatctgaggtcgggagttcaagaccagcctgaccaacatggagaaaccctgtctctacaaaaaataaaaaaaattagctgggcgtggcggcacatgcctgtaattccagctactcgag

SEQ ID NO: 91528 - DNA, 1986 bp, Homo sapiens
tcaaaatttgttggataaatgaaaattttgctataggatcagggataagagaataataagaaacagaaaaagaaagttgagcctctaagaccccatcccttccccagattaaagagttctgaagtgtgaaaagaggggaaacctccggggaccttgaccccttgggcaggaagtgaaagaaacccaagtcctgatttcagagaaatgtcatttgtcatcagcccaagaaaaggagatttttctcttcgaagaccaccacacgtccttcctggggttgcccctttcagagcttgatgggaggatctgagtcactcacacacccacccccaggtcattcccaggcagcaaatgaggcttcccagtaccaagtcagggagagggaggaggccagcttctggctcctccaccctattcttgggatccaaatgtttcaatcctttttacttctgcagctgtgtgctctgccgtcatctctaagaaacaaccataccactgaatgctactgtgtacttacaaaccacactcatattcgtcacgtcatttcatcttcacccccacctccaaatgaggtaagcagatattatgcctatttcatgaatgaggttactgaggcccagagaagtgacttgcccaaggtgactcaaatagtaaatggcagagatgaaactcaaaggcagggctgattattccaaggtccttgctgccacagatacacttctttgactctaggagttcacaaacgaagtgaggagacaggaggctaggggcagaatgtgtgcattctggaggtagagggggtggtctctcctgcaggcagaaggcagaggcagggttagaaaaccacaccccttcggggggactgtggcagactgatacttgggacatccaatggaggcctgtgaggtcaggggcggggctagctccagggggggccccaggagccccaacagtagttcagagcatgcggtgtcctggaagaagctacaagcggtgagtgatagcctctctccagctgaggccttcttcccatcacaactctttctgtctcctccctgccaacctagagccctctccctgaggtgtccaagtgcagccctccctgccccaagggcccttgctcacagggaacctgcacctaggactctgcctgctgggtgctaagacactgaggttctggttctcttcgtatctgggttcccagctctcttcttaaaagccaatgtggtggttttgatgtgtgagaaactcctgcctggttgggtgctgtctttctattcttcactttttgtcttatgaaaaacaaattaaaccatctccttacccaaatcttgagaggaaacagcctccctgtctccagtccccacgtcctttcctcccatctcctcaggagtccattctccaaaaggtctctccatcattgggtcaggagcctcctctcctgtggcttctgcacctgctctcctctttctctggatgggaatgtctggttccttccctgaggatgtgttctagaagcttcagcttcacagtgatgactgccggatgccttagcgcctgcgctcctgcagccaggatccctatcatgctgccctctctgcctttcaggagcgatgggcttttgggggaggacccactagctttctaagctctcccgtgaaactgtgtcatgctccatcccttagtgccggcgttgactgggttttgtggtgatccttgtctggaatgaagaaagcctggcttgcgcagaggtgtttccctgcagaggggcttggagaagcagaagtggcagtatctgctatcttttacgtcagagactgccaactggcagacttcccgcacgcctgtcttaaacccactactagatatttctgttaactgactggcccttgctctttaagtcctgaatttggtctgatttccattctctcgccaccatgcctacctgctatgattctggataagctccaatcctctcttgggttactt

SEQ ID NO: 91529 - DNA, 1760 bp, Homo sapiens
ggcttgaaatgagatgagatgttcctccctcccctttcaaccatggacctcacactgtggacttcctcttagagcctctgagttaggtacccaagccaaggcacaatgtccctgccccccataagactgcccagcccctatggctctgatcggctggtacagctagcagccaggctccggccagcactctgtgatactctgatcaccgtagggagccaggagttccccgcccacagcctggtgctagcaggtgtcagccagcagctgggccgcaggggccagtgggctctgggagaaggcatcagcccttctacctttgcccagctcctgaactttgtgtatggggagagtgtagagctgcagcctggagagctaaggccccttcaggaggcggccagggccttgggagtgcagtccctggaagaggcatgctggagggctcgaggggacagggctaaaaagccagatccaggcctgaagaaacatcaggaggagccagagaaaccctcaaggaatcctgagagagaactgggggaccctggagagaagcagaaaccagaacaggtttctagaactggtgggagagaacaggagatgttgcacaagcactcgccaccaagaggcagacccgagatggcaggagcaacgcaggaggctcagcaggaacagaccaggtcaaaggagaaacgcctccaagcccctgttggccaaaggggagcagatgggaagcatggagtgctcacgtggttgagggaaaatccagggggctctgaggaaagtctgcgcaagctccctggcccccttcccccagcaggctccctgcaaaccagcgtcacccctaggccctcgtgggctgaggccccttggttggtggggggccagcctgccctgtggagcatcctgctgatgccgcccagatatggcattcccttctaccatagcacccccaccactggagcctggcaggaggtctggcgggaacagaggtgagtggcggggtctagtgctctgcctccaggctgggagggcatggcccaggaggggcagccctgctgggtggaagggcactgcatctctactgcacagttcctgagctggggaagagacaagaagctgctgccacagggcacgccaaagcccagcccccgggggaggacttgggataccccctcttcacgaaggggccaggctcccaggtttagccaaggctgtaactcttccccaccccatcccaggatcccactgtccctaaatgcccccaaagggctctggagccagaaccagttggcctcctccagccctaccccaggtaagcccctcgctgtcctgcatacacctgtaacatggtgtcttctctgggctggggctcgaggagtccagcctgagcagggcccctacctcccactgttccttccaggttccctcccccagggccccgcacagctcagccctggggagatggaagagtctgatcaggggcacacaggtgagtcgggcgggggcactcgtgcctcagccccactgtagcccttgatttcctgcctgaatggtacagtgagttggcgctgggattcctggccctgccctcctttgccttctctgtccccacaggcgcacttgcaacctgtgcgggtcatgaggacaaggcaggctgcccacctcgcccgcaccctcccccggcccctcctgctcggtctcggccctatgcgtgctctgtctgtggaaagaggttttcactcaagcatcagatggagacgcac

SEQ ID NO: 91530 - DNA, 1050 bp, Homo sapiens
agaagcagctgtgacaatccccaaacctgagcccccacctcctgtggttccagtgaaacatcagactggcagctggaaatgcaaggaggggcccggtccaggacctgggacccccaggcgtggaggacagtcaagccgtggaggccgtggaggcaggggccgcggccgaggtggtgggctcccctttgtgatcaagtttgtttcaagggccaaaaaagtaaagatgggacaattgtccttgggactcgaatcaggtcaaggtcaaggtcaacatgaggaaagttggcaggatgtcccccaaagaagagttggatctggacagggagggagcccttgctggaaaaagcaggaacagaagctggatgacgaggaagaagagaagaaagaagaagaagaaaaagacaaggagggagaagagaaggaagaaagagctgtagctgaggagatgatgccagctgcggaaaaggaagaggcaaagctgccaccaccgcctctgactcctccagccccttcacctcctccacccctcccacccccttcgacatctcctccacccccactctgccctccaccaccacccccagtgtccccaccacctctaccatcccctccaccgcctcctgcccaagaggagcaggaggaatcccctcctcctgtggtcccagctacgtgctccaggaagaggggccggcctcccctgactcccagccagcgggcggagcgggaagctgctcgggcagggccagagggcacctctcctcccactccaacccccagcaccgccacgggaggccctccggaagacagtcccaccgtggcccccaaaagcaccaccttcctgaagaatatccggcagtttattatgcctgtggtgagtgcccgctcctcccgtgtcatcaagacaccccggcgatttatggatgaagacccccccaaacccccaaaggtggaggtctcacctgtcctgcgacctcccattaccacctccccacctgttccccaggagccagcaccagtcccctctccaccacgtgccccaactcctccatc

SEQ ID NO: 91531 - DNA, 3564 bp, Homo sapiens
gccacagagggtaggtggggagactggacagccatgtcaggtttggggatgaccccacacttgggtgacatgcaccaagagcctaggagagagggagccaagtcaggtgctcaggggttaggtggcaagtgggctggagtgctaggtcctagagcaacttcatttgggggcaccaggaacctggcgctgtgagaaagcgagagccaggttgtgggaaagcagggaagtgaggtagaagcctggtggctttgtggctccatcccctcctccctgcctgctgcaatagatacatcatcggcgtccgagactgagagtgtcccgtcacggtcccggcggggaaaggtggaggcagcaggccctgggggagaatcagagcccacaggttctggagggaccctggcccacacaccccggcgctcactgccctcccatcacggcaagaagatgcgcatggctcgatgtggacactgtcggggctgcctacgtgtgcaggactgtgggtcctgtgtcaactgcctagacaagcccaagtttgggggccctaacaccaagaagcagtgctgtgtgtgagtagctggggcgtgacctcattcccgtggttgttggtcccctaggcttcctacctcactcctcttctgcctggccagagcagtggggttggcattcttgtggagagcttcctctcttcccccagaccaccagtcccctaccctggtgacgtgctgctcccctccccagataccggaagtgtgacaaaatagaggctcggaagatggaacgactggctaaaaaaggtgacgagctttaaggagcatttcttctcaaaaccgtgttagagtttgtgctgtggagggagctgtttttctttgctctcctcccttgcagctcaccctctccatcttctccgttgtgtgctttcatagctcctgcgttcattccctgccccgcttctttctggcttctctcccagtgtcccatgtccctggctgagctcaaatcctactaagtcccctgttcccgcagccggacgatagtgaagacgctgttgccctgggattccgatgaatctcctgaggcctcccctggtcctccaggcccacgccggggggcgggagctggggggccccgggaggaggtggtggcccacccagggcccgaggagcaggactccctcctgcagcgcaagtcagctcggcgctgcgtcaaacagcgaccctcctatgatatcttcgaggattcggatgactcggagcccgggggcccccctgctcctcggcgtcggaccccccgagaaaatggtgcgaactgcttaatgctttctctgttgatcatttatttggtcttgtgtcttttgtgtaggagggacaaggcacccagacccagggctctgtcagtctgatagagaaggtggctgagggcggaggaggagacagtttttaggtggatgtacagaactggcctatgaggttctcagtgagcctaatgagtgagacttaagggtcatcctaggcctggtgcagtggctcacacttgtaatcccagcacttttgggaggccaaggtgggaggatcacttgagcccaggagttcaagaccagcctgggcaacatagtgggaccccatccctataaaagcaaaagttagttgtatgtggtggcacgcatctgtggtctcagctgctcaggaggctgaggcaggaggatcgtctgagcctgggagttcaaggctgcggtgggctatgggtcacgccactgcattccagtctgggcaacagagcgagaccctgcctcaaaaaacaagaaaaagaatcgtcctggcgggtcttggttagttaaagaaggccctgggaatccaggtaacatttggggttgtagaagaagaggggcgtggaaggggagtgacctcactgctcattgtgtcctgcctagagctgccactgccagaacctgaggagcagagccggccccgcaaacctaccctgcagcctgtgttgcagctcaaggcccgaaggcgcctggacaaggtcagcacggcccgctccgagagccccttccctccaggagctacctggcaagtcagagtgacagacacacctgagtgtcgtggtgtgtccacatgagaggacaggccctgagggatgaggcgggccttgcctgtctggaaagcaaaggggtctggatcagggtctgggtccagtaggctgggggaaaggcggtgaggagaggagtctgcatcacggccaggctggcagctctgaattcccccacctttcctccccaggatgctttggcccctggcccctttgcttcttttcccaatggctggactggaaagcagaagtctcccgatggtgtgcaccgcgtccgtgtggattttaaggtatggcattgagtggggcgagtcacagagcctctggttggaagaacctcgatgactgtgtcatcgagaagccaggtgggtctgccttgtatgcctggcggccctctgatcctgcatcctctcttcccccaggaggattgtgatttagagaacgtgtggctgatggggggcctgagtgtgctcacctctgtgccagggggccccccgatggtgtgcttgctgtgtgccagcaaaggactccacgaggttagatctctgcctttcttcacagacccccagctctctgtcggtcctcacggcctgattccttgggccctctcagctgggtctcatcccttggccctctggcctcatgctatgcccatcattcactcctttaccctgtccccagctggtgttctgtcaagtctgctgtgacccattccacccattctgcctggaggaggccgagcggcccctgccccagcatcacgacacctggtgctgccgtcgctgcaaattctgccacgtctgtggacgcaaaggtcgtggatccaaggtttgggcccaagggctggccagggtgggtggaggcctgaaggtgagggcatccctgtgccagcaggtttcgccatctctgtctccacatccaacagcacctcctggagtgcgagcgctgccgccatgcataccacccggcctgtctggggcccagctatccaacccgggccacgcgcaaacggcgccactgggtgagagatgaggttcacccacttgctttgtctctaatgaatatcaccaccacccccaaacttgctctaggctggggctctcaggaggagcagaggttggggatcctcttaagaattgattagtaatgtttcctcttcaaaaatttcacataggtcagatttatattcagaatttgcatggagtggttttaggggcttatgaatctcacattccgtgggctcagaatcccctgctatagcctgatgtcctctcctgccctcatgttcctcctccgtgtctgtcctgcgtgttttctcctcttacctgtccctccttgcctgcttcctgcatatccccaattcctcctcgcccgtctcccgctcatgttgctccagtccagtgcctggttttcccctaacatcgccctgctcccccagatctgttcagcctgtgtgcgctgtaagagctgtggggc

SEQ ID NO: 91532 - DNA, 1273 bp, Homo sapiens
gtggctcacgcctgtaatcctaacactttggaaggctgaggcaggtggatcacctgaggtgaggagtttgagatcagcctggccaacatggtgaaaccccatctgtactacaaatacaaaaattagccgggcatgatggcgggcacctgtaatctcagctactcgggaggctgaggcaggagaatcgcttgaacccgggaggcggaggttgcagtgagcggagatcttgccactgcactctagcctgggtgacagagcaagacactgtctcaaaaaaaaaaaaaaaaaaaaagcctcatcctcaaggagcttttagggactagtaggggcccaaaacaggggcatagtggaggcagctaaggtactgctaatccttgaacagagacactcagggctgagtgggaactccagcacctctgactccttctcttccctttctctaggaaactactgcccgatctgtacacgctgctatgaagacaacgactatgagagcaagatgatgcagtgcgcacagtgcgatcactgggtgcatgccaagtgcgaggggctctcaggtgagtcagtggagcacctgggctgcagcctcaaccctgtggggacccctgcccccaccacaggccccaagaggactggtgggctaagggtccttgctggcctaggggctgctgggagccctcacatcctctgaaaccacttttccctttcccacttggctatcctagatgaagactacgagatcctttcaggactgccagactcggtgctgtacacctgcggaccgtgtgctggggcagcgcagccccgctggcgagaggccctgagcggggccctccaggggggcctgcgccaggtgctccagggcctgctgagctccaaggtggtgggcccactgctgctctgcacccaggtctggagggccctggaggcaggatgggccggggctaggcccacccccagccctgctaacttccccgctttgcagtgtgggccagatgggaagcaactgcacccaggaccctgcggcctgcaagctgtgagtcagcgcttcgaggatggccactacaagtctgtggtgagtggtacaccaggaggagcaggtgggtggcaggaggagagggctggaattgtgcagaggggactcagtctctgacaaacccccttacagcacagcttcatggaggacatggtgggcatcctcatgcggcactcggaggagggagagaccccggaccgccgggctggaggccagatgaaggggctcctgctgaag

SEQ ID NO: 91533 - DNA, 1016 bp, Homo sapiens
ccagatggtcagggcagtgatggagaataccagggggcggtgggggcccggaggggtacctgctggagccgaggtgtcagggaaggcttcctgaaagagatggcattggagcagagctggggaggaagagtattgcaggcatgaggagcagcatttcgtatgtccaagctggcacaagagggcctggcttatttggtggactgagagaaattccacatagagagggagtagcgggtgtcatggcgagttcaggctggtttgtggatgggcccccgttcagctgcccttgttgggcacatcagctgctaaccctgcctgtccacagcggagtccttcccaatgcggtgttgcccccatccctggatcatgtctatgcgcagtggagacagcaggaaccagagaccccagaatcagggcagcctccaggggatccctcagcaggtactgggaagtgggggtccagaagccagggccctgtgttggtggcctggctccgggtcctgattcttagacctcccttcacatttcctcttcagcattccagggcaaggatccggctgccttctcacacctggaggacccccgtcagtgtgcactctgcctcaaatacggggatgcagactccaaggtgagggctgctctgtgacgcaccaggttgtggggcctgttccctggcctccccacatcatgccactcctcttctgccccaggaggcggggcggctcttgtacatcgggcagaacgagtggacacacgtcaactgtgccatctggtcggcggaagtcttcgaggagaacgacggctccctcaagaatgtgcatgctgctgtggcccgagggaggcagatggtgagggcgcgggcgcagagaggtggacagctctctggctcttggggaggcctcctccggtgcaaacagctcttacttcacattccctacctggcatcctttcactgccaggctgaggtctcttggttgccctgggacgttggtgctgatggcagctttttcctatgt

SEQ ID NO: 91534 - DNA, 1261 bp, Homo sapiens
ggagagcctttgccgtgccaggctagacagggacccatgcagactcagtgacagtggtgcctggcgcccagccccagccctggcttctcccctgagctgccctcccctacgcagcgctgcgagctctgcctgaagcctggcgccacggtgggctgctgcctgtcctcctgcctcagcaacttccacttcatgtgtgcccgggccagctactgcatcttccaggatgacaagaaagtcttctgccagaaacacactgatctcctggatggcaaggtgggccagaactgtggggtacacggttccttccccacctctcttcctgttcacttagggacccccgtggcccccaggcctggccctactgcctctcagtgtctcctcatctgttttcccagaggcctttaggccaagcccctgactgttcagacttccctggcatccacctcccccaccaatgcagccacctcactttgccaccccctcttccaggaaattgtgaaccccgatggttttgatgttctccgccgagtctatgtggacttcgagggcatcaacttcaagcggaagttcttgacggggcttgaacccgatgccatcaacgtgctcattggtaagctgcctgctctccgccctgtcctcctaccctgtcctgcctgcctctcctgacctccgctttgcaccacaggttccatccgcattgactccctgggtactctgtctgatctctcggactgcgagggacggctcttccccattggctaccagtgagcggtcggggtgatccatggggccaggggactccatagctggatcccatttcccaagcatcctaaccgtcttatcccacatgccaggtgctcccgtctgtactggagcacagtggatgctcggaggcgctgctggtatcggtgccgaattctggagtatcggccatgggggccgagggaagagccagctcacctggaggctgcagaggagaaccagaccattgtgcacagccccgccccttcctcaggtgtggctttggctctgtcttcttcctgaataccgctctccctaaacaaacctacagatctctgttccccgctcccttttggaaagtccaggaggcttgcttttgcttcagttgctgtaatgtaacggcagctcgcttactgccatgccttgtgtgccaggggctgtgcccggcttttcatgggaagtgaggtggggagagcggcacgctgcctacttgaggtggggtactggcttttggacgact

SEQ ID NO: 91535 - DNA, 1023 bp, Homo sapiens
tgtgggcaggctttgacacagagcccctaccaccccaatgccatttctcgcctcttcagagcccccaggtggtgaggaccccccactggacacagatgttcttgtccctggagctcctgagcgccactcgcccattcagaacctggaccctccactgcggccagattcaggcagcgcccctcctccagccccccgttctttttcgggggctcgaatcaaagtgcccaactactcgccatcccggaggcccttggggggtgtctcctttggccccctgccctcccctggtgagcaccgggcatgtgggggttgggggtggagccgcggaggtgggagctgctggtaacaccaaccctccccccacaggaagtccatcttcactgacccaccacatccccacagtgggagacccggacttcccagctccccccagacgttcccgtcgtcccagccctttggctcccaggccgcctccatcacggtgggcctcccctcctctaaaaacctcccctcagctcagggtgccccctcctacctcagtcgtcacagccctcacacctacctcaggggagctggctccccctggcccggccccatctccaccaccccctgaagacctgggcccagacttcgaggacatggaggtggtgtcaggactgagtgctgctgacctggacttcgcggccagcctgctggggactgagcccttccaggaagagattgtagccgctggggccatggggagcagccacgggggcccgggggacagctccgaggaggagtccagccccacctcccgctacatccacttccctgtgactgtggtgtccgcccctggtctggcccccagcgctacccctggagccccccgcattgaacagctggacggcgtggacgacggcactgacagtgaggctgaggcggtgcagcagcctcggggccagggcacgcctccttcggggccaggagtagtccgggcaggggtccttggggctgcaggggacagggcccggcctcctgagg

SEQ ID NO: 91536 - DNA, 1019 bp, Homo sapiens
cttggcagtggcgggtgagtgcgggtgctgaggctggcagagcaggcaagggggcagatgggcgggagatgcggctcatccttctcgggctcgccctcccaggtttagccgtgtgaggatgaaaacccccacagtgcgtggggtccttgacctggatcggcctggggagcccgctggggaagaaagtcctgggtgagtggccaggcccctctccctggagggtctgggacctctgtccttccccttcctgacaggtctcttctcgcaggcccctccaggaacggtcccctttgctgccacttccggaagatggtcctccccaggtccccgatggtcccccagacctgctgcttgagtcccagtggcaccactattcaggtagggaccggccttgccctctccctccttgcctgtgcctggctcagctgggtgactcacagatgcaaaatcagccctctttcaaaaccagtatctactcccaggggccaagcctgaggctcggtgctagagttagagatgaccttggggagcctctggccttgtgggagaaacagacatggaaatgacatttcgcctctacgtgggatccttttaagggtctttgtccagcatgcccaagagcctaggggagggcctcagagcctagcctgccaggagctgagagagagcttcctagagtagccaaaggtgaagttctaggatcatctagagggaatgcagcccagctagcaccgagatgagggtcagggacagtgggaagatcagaagagtggtgtcccagaggcccagggaagggagtcgtcacatctcagctgccacagagactgccaggcctgtggagtctagcgttggtgtccagtgagagcaggtggcacagggtggggccttgtgtccaagtccagaattgagaccatggttgaagaaggcaaaacagcccaagcacttggccagagttcagctaaggatcgggagcgggaggtgggcgagcagcgtggaggtgcttggtgtgagggccaaga

SEQ ID NO: 91537 - DNA, 1176 bp, Homo sapiens
catgcctgtaatcccgccactttgggaggccgaggcaggaggatcgcatgagcccaggagttggagaccagcgtaggcaacatggcaaaaccccatctctaaaataaaaatttaaaaaagttatttctagagctgacatcagaaaaatgaaccccacccatttccctgttagctctgtcttcaacagtatattcctccttcccctgctgccacctgcaggaagtgcacctttgacatgttcaacttcctggcctcccagcaccgggtgctccctgagggggccacctgtgatgaggaagaggatgaggtgcagctcaggtcaaccaggtatggagtgtgagctggggggcgggtggtggtctggaagggtcttagagagtgagcaggggtgagagaggtcattctgagcaccagcctgggtgacactgctgtccctcaccagacgtgccaccagcctggagctgcccatggccatgcgttttcgtcaccttaagaagacgtccaaagaagctgtgggtgtctacaggtgagtggggttgggggggaggatgccccttgggtggacggacaggtgcactgggtagggggtactgtctggtttctgtccccctcccccctgagttccctgttcatcctgccctgcagatcagccatccacgggcgaggcctgttctgtaagcgcaacatcgacgcgggggagatggtcatcgagtactctggcattgtcatccgctcggtgttgactgacaagcgggagaagttctacgatgggaaggtgggctcccagtggctgtgggaagacagtgggtgaagcgagcctgtccgcggggacagagcacctgatctccccacctcatccctgcagggcatcgggtgctatatgttccgcatggatgactttgatgtagtggacgccacgatgcatggcaatgccgcccgcttcatcaaccactcctgtgagcccaactgcttctctcgggtcatccacgtggagggccagaaacacattgttatcttcgccctgcgccgcatcctgcgtggtgaggagctcacctacgactacaagttccccatcgaggatgccagcaacaagctgccctgcaactgtggcgccaagcgctgccgtcggttccttaactgaggccgtggctgcccaccacgacccctcacacctcc

SEQ ID NO: 91538 - DNA, 1041 bp, Homo sapiens
cagctgcctgcaacgcttcgggccgcccccctgcccgggtgagaatccgagaccgagccttgcttgggcggagcttgcaggtgatagggagcggggaaggggcgaggtctgtgggctacgggccagagaggcttgcttaggggtctaagcggtgggccttatgcagatcagacagggatggcaggcagagcctgtgcagatagtgcgggctaccgtagggcaacagcgaatggatatggctggagaggcgggataggggccgcgtggaaagggtgggctttatgtagagaagccgggagtgggcggagcttcgtgcggagcaggctggaggggggtgaaaaggcgagcccggagaaaagtgacaagaccggggcgcacgctaataggctggaagcgtcctggaggggcggggcacgctgggatagggcgaagggagagggcgttgcccgcgcaggggcgggctaggcggccgcactggagcgcagctttcccgctagactatgagttccgggaaaactgcggactcaatgaccacggcgatttcgtaacgcccccgttccgaaagtgttcttctgggcagtgcaaccccgacggcgcggagctatgtagcccctgcggcggcggagccgtgacccctactcccgccgcgggcgggggcagaaccccgtggcgctgcagagaggtgcagatgggactcccggcagggcaagggcgtgctggaggtggggggcctagatgtagggagccggcgtagccccacgtaaggggtggggccgtggtttcaggaggtggctggcctgcaggggtcgggaggtcctaggttaaggtagttgggccttgcggggcccaactaccttatcagataccgtatcagatgggatgtggccccattaaaggatataaagttgggaggtttgggagcgggcaggagtggagtgtggcctccagctttactccaaccccttatccccagaggccggtccctgccaaggggcactgccccctcacacctggaaacccaggcgcccctagctcccagga

SEQ ID NO: 91539 - DNA, 1150 bp, Homo sapiens
ttttttctcattggacctttctgcaggctcctcccaccggtcttcgtgccgttttcccgggaacttggtcgcgcccccatgcgtacaggctacacacggcggctgttcatctttgccagtcccttccatcccgctgttcatccttgccagtcccctccatcccttttctggtttcttaggggcaaaggatcgccgatgcactcatgatgcttaggctggggtgtaaggttccacccccaaccttcatgcctcactctctgttcatgcagccctgccctctgagctcaggccccgccccttttaaattctgtgcagaccatagtgctgctcaacctgtaccggaatccacagaacacagcccaaactgcagacggatcacactgtgagtaagggaccaggcctgggggcaaggtgaacagcccccagtaggctacactctgattccaccctgcccgcccccaccccaggtcatgtgagtgacgtggaggtgcaggagcactatgatagcttcttcgaggtgagggttggtaggggcagatggggtttcttgtgggagctcagctgagttcctccccgtcttccacaggaggtgttcacagaactgcaggagaagtatggggagattgaagagatgaatgtgtgcgacaaccttggggaccacctcgtgggcaacgtctatgtcaaggtgcttgctgccccccacttagggcccagaagtggaggcgtttcaatgcctgatggtggccactgtaggctctcagcttgaatttcatcactaaatccagtccagccccagagcgggtagtgagtcccctgaagatctctgagttctcctgctgaccctgactgacatttcctgcagttccggagggaggaggatggagagcgggccgtggctgaactcagtaaccgctggttcaacgggcaggctgtgcacggtgagctgtctcctgtcactgacttccgggagtcatgctgtcgccagtatgagatggggtatggtagttcaagggtgggatgggcacttggaatcccagactttgaatgcgtggtaggggctgtcagtgacaatggcttcctccatctctctaccctctatgcagggaatgtacccgaggtggcttctgcaacttcatgcatctgcggccca

SEQ ID NO: 91540 - DNA, 1128 bp, Homo sapiens
tgcggtggagccctagcgactccagaccgtatccagcccgtcctaggctgtgctgctctcgccgttggtcctccccagcctcctgtagtccctggaagagcgatcggcctcacctgcggtccatcccgcggctccctccgcgcttccggccgctctgctccttcacccaacaggccccgcgcgcatctccgtcgcttagcaacgccctatcagccccgcccctctctgtgcccgcgccggaggcgagcggcctccaaggcgaccaatgaaagagaggaaacagaagtacccggagggaggtgtttcaggattggctgggacgactgcctgcccgacagggcgtgtttgattggagaacctgccgagtgtagcagtaattggcaagaccgtgcaccaatgggaaggatctgaggctgggcttgcggttaggaggtgatctaaagtaccctcgcttaaaagtcccgctttttaagcgccttcttgctgcagaagtcctgtcccgaccccggtctaactaccattctttctgttgcaggggcagtggggcgggttggggggggggcgcgctctgccctctctctaaccgctattcctccatcagttgggccaatcagtccgtcccaacggtcatctaacttctttcttgctgcaggagcagctggttgcatcagttgccaggtctgggctcctggccgaggtagcgggatcaaaatgagctatttccagccccagcgcgcggcccccggggggccagcctgaactgttcatgctcgcgccccctggcctctgcgcaccagaggctgagtcagaggcacagaattaggcccggcctgccgggggactgggcccaaggtctggctgaggataagggtagggagggcctgttctatgtcctcctgacatcctggcggggctaccgcattctccaggaatctgctcctaaagacctccatctgcgtcatcctcagagctgccaggggggaggcagtggattaaagggactggaaactcttccgtgggcctcttgggtcctgggccccaatcaccacgctgtgctccccacacccgcaaggctccccctcctcagccttagtttcctcttctggaaattggggaatcttcatgtca

SEQ ID NO: 91541 - DNA, 1033 bp, Homo sapiens
tgctaatccaccgggcgcggtggctcacgcctgtaatcccagcactttaggagactgaggtgggcggatcacctgaggtcgcgagtttgagaccagcctgaccaacatggagaagccctgtctctactaaaaatacaaaattagccgagcgtggtggcgcatgcctgtaatcccaggtacttgggaggctgaggcaggagaattgcttgaacccaggagatggaggttgctgtgagccgagatcgtgccattgcactccagcctgggcaacaagtgaaattcaatctcaaaaaaaaaaagaaaaaaaaaaaggtgctaatccaaaggggaaaactgggtctctcctccctgaggaggaggagcagatcctaagctggcatgtgaggttaccaagggcagtacaacctgcattccaggccctctgtttagaacccccttcccagcagcctttgggttggggctggcgtctgaccctgtcaccctgcagaacctccacacatggaactcatccctgctggacctggagacgctgagcctacagagcagagctgccaggctgctcaaacgcaggtgcccgcacccctgcccccatcacccttcctactgcggctccacgtggcccaggtctcgagacctccattgcctcactcctgccttctccctgcagcaaagcctccatctcctcctcctcctccctcagccccagcgatgccagcacttcctcattccccaccagctctgatggcctctctcccttctcggagaccttcatccctgactccagcaagggccttggccccagggcacccggtaagggctgagaggcaaagactgagggcagcctgggtgcaaatcccaactctgccactgaccagctatgggactttgggcctctctgggccttgtttctccagctgtaaaacagggataaggccagatgaggtgggtcaggcatggaggccgaggcgggcagattgcctgagctcaggagtttgagaccagcctggccaatgtggcgaaacccggtatctac

SEQ ID NO: 91542 - DNA, 1427 bp, Homo sapiens
tatgttgggattttagtaaaagctaaaacacttttttctgggaagttaagcaggggcatgtatcccccagatcttcaatgaagacctacagggcatctctccatggttctaactccactttttgcctgtcagggaccctgggacctccactggcctgaagacacatatcaggatccaagaggaatctatgaccaggtggccggagacttggacactctggaacccgattctctgcccttcgagctgaggggacatctggtgtaagagccctctcaaccccattgtcctgcacctgcaggaatttacactccactggtctctctcattacagcctgggccgagctggttaggtgagctccataaaacccaaagggacttggtgtcaggagaggacatggagggggctgagtgacagagatggttcagctggtaccagagtagaaacaaggtgcatcctggggttggctttagaaactaaacttctccaaaaggacagggcagattgtaaacgtcgtctcaaaaatgaaatgctgccgggtgcggtgactcacgcctataatcccagcactttgggaggctgaggcgggtggatcacctgaggtcaggagttcgagaccagcctggccaacatggtaaaactccatttctactaaaaatataaaaaattagccaggagtagtggcgcatgcctgtagtcccagctacttgggaggctgatgcatgagaattgcttgaacccaggaggcggaggttgcagtgagctgagatcacgccactgcactccagcctgggcgacagagcgagattctgtctcaaaaaataaaaataaaataaaaataaaaaataaaatgctattctgagggtccctaagtgcttcatgaagtaaagttttcagaagtggggaaagacatatgaaaaactctgttcattttgcattccatgacgtctgaaatagctaataataagtggaatttatgaatccatgttgcatcctacctattattttattatttccgacagttatctaacacaggaggcataaactatgacacatgtaaacataagtatgctccataagcattaaaataaacagacaatcaaaagaagctagaggaaaagaatatgtactgtgtgtgtgctttcgtttatagaaattctaaaataggcaaaactaatctacggtggcagagagcacagcagaggtttcctggggccatgagaggagggttgactgcaaaaaggcatgggagaactttctgaggtgttggaaatattctatataacgattgtggtggtggttgcacgggtgcacagatttgtcaaaactcattgaactttacacttaagatgggtgcatttttattgtacataaatgatatctcaataaaagtgattttaaaaacaggcttcataataacagcccagta

SEQ ID NO: 91543 - DNA, 1006 bp, Homo sapiens
gggcacagagacctctgcccatctgtttctctgaccctgggggagggacttggtcagggctacactttctcggggagacccacccctggcctacagcctgttgtctgggattcactgaggggtatcttccacccctaggaccctcggggctgcccctgctgcctgtgctgttcgctcttggggggcttctgctcctctccaatgcctcctgtgtcgggggggtcctctggcagcggagactcaggcgtcttgctgagggtgaggagagacccttccctgccagggtggagacccgagggtgatagggaaccctgtggttgctgcatactgaaggtcttcctggggccggggtggggggcttgcatagggtcactgagccctttattcctgtttccttcaggcatctcagagaagacagaggcagggtaagtggggatatttttctgtaaagaaggctctgagggaggtttgggggagactggtggcggggggcagcactcaacttccccccacaccttcatcctggaaggtcggaagaggaccgagtcaggaacgaatatgaggagagccagtggacaggagagcgggacactcagagctccacggtaagtgggggtggccctggtgaccccacaatcagggcaccgacggcgactgaagccctgccgttagcatcaggttgatcattgcccttccgggcacagtggggtcagaggatggaaagggctttgtttgttttgcgtgtggggaacaggtcagcacaacagaggcagagccgtattaccgctccctgagggacttcagcccccagctgcccccgacgcaggaggaggtgtcttattcccgaggtgagttaggaccatgtcaggattccctcactcagaggtacccccgacgcctggactgggtgccttgatcgtgtctcccttccactccaactccaggtttcacaggtgaagatgaggatatggccttccctgggcacttgtatgatgaggtagaaaga

SEQ ID NO: 91544 - DNA, 1024 bp, Homo sapiens
caataagagtgaaactccatctaaaaaaaaagaaaaaaaaaaaaagaaagaaacttaacccttcattttccatagaagtaaccatttggtcttgaatttttttgctgtttcttttggttttgttttcacttacttctttttaaaattattttttattttaatgtttaatttgagacagggtcttgctatgttgcccaggctggtctcgaactcctgggctcaagcatctttcagacttggtctcacaaagtactgggattacagggacagtttggtgtttgccagagcagtgttcaccatgaccttacagaacatgagtatgctatgaacaatgagaagcgattgtatatttaaaatcattcctagggaaaacctggacagaatcttctggaattcttttgtatcctctgactgctttcccatctttctccccataggccgccctgaccctccatcaggattaaaggttgtgagtctgaccccacactccgtggggctggagtggaagcctggctttgatgggggcctgccacagaggttctgcatcaggtgggtccttgtcgaggcaggagggaagggaatgggctagggcacttccctgaatttactatccccctgtcctgcaggtatgaggccctggggactccagggttccactatgtggatgtcgtaccaccccaggccaccaccttcacgctgactggtctacagccttctacaagatacagggtctggctgctggccagtaatgccttgggggacagtggactggctgacaaagggacccagcttcccatcactaccccaggtgggaagggaggcttgggcaggttggagtattcctcagaggatgtgtagggtagtatggtgaagtcaatactattccccttttatgatgagttactgaggcctatagctgttaagcaaattgtccaaggtcacacaactagtaaaagataaagatgagattgaaactcaggcagatgaacttgagaccaaccgttaaccacaacccatactatct

SEQ ID NO: 91545 - DNA, 2103 bp, Homo sapiens
ctgatctccaatctgtccttgaccctaaccttaacaacaatcttgactccctgcggcgccccctctgaagaccgtccagagttcctgggggagcaggtgctggtggtgaccgcggtggagcagggcgaggcgttgctgcccgtgtccgtgtccgctaaccccgcccccgaggccttcaactggaccttccgcggctatcgcctcagtccaggtgagggaagtggtcatggggaggggtcccggggatgggaggtcctgccaggtcccttattctggccttccccagcgggcggcccccggcatcgcatcctgtccagcggggctctgcatctgtggaatgtgacccgcgcggacgacggcctctatcagctgcactgccagaactctgagggcaccgcggaagcgcggctgcggctggacgtgcactgtgagccccgcccaccatggaaaccacacccacccaaggaaccttgcccattgtggagtctcctcattgtgggagctccgcccacccagggatagccacccatcctggaaccctcccgttctggaagtcccagccgcggtgtaaccacgcccactgcggaacccctcccactagagagacccagtgtggaatctctgcccagagagggtgcccgcctagacacggaagctgctcccgtcaggaatgagagcccactgtataagccctgctacacacacaattctggaagcccactcaactcactctaattatcacagaggcatagtggagggtggagacaacctcaccaaccttgagaactctcctccaaccctttggtattaagggcagattgtgtccacacccataaccttcctggaacccctaagacatccctcccacctggggccctctcacacccagacctgtctgggcccaagtgtcttccccaagcctctgccttccaccagatgctcccaccatccgtgccctccaggaccccactgaggtgaacgtcgggggttctgtggacatagtctgcactgtcgatgccaatcccatcctcccgggcatgttcaactgggagagactggtgaggatccagcctttggtgaatagaggtggggtcaaggggttgtggtttcttgactgtgagttccttgggagtggggaccacatacatctgtatgacccttataactatatactcgccagggcatgctcccagaatgaataactgttggtggcaaaatgaatgcatggataaatggctagacagccaggcgagtgggtaggtagatggatagataggtcaaaaggtaggtaagtggatgaacaggtggatgaatgagtgagtggatggaggaacagatggacaagtgaaaggatggataaatgggtgagtggatgggtgggaagatgattgaaggagaaaaatcagtggatagagggtagatgatggacggatacaccatcagaggaaagatatctatggaaggatgatggatgaattgatgaatggatgggtgggtagatcaatggaaagatgaataaataggtagctgggtaaatgtctgaacagatgcatgtatttatgggtgtgcaagcgtgagtgaatagttgagtgaatgggtggagagctacaggggtggatacatgggtgcagagaaggaagacaaatgggtggaggaatgagtgagtgaaccgatgagtggatggaaagataaatggatgaatggagagataagcagatggataaatgaatggatggacggatagatggttccaagcataagtggttgggtgaatggatgggtaggtggttgcctggattggtggatgaaaagatggattgagtaaatggatagatggatgacaggagaatttttttttcttcaatacctctgtggagggtgattgtggctaggagaatgaggctacagaagggacaatttgggcagtgatggatctggggctagactgggaggccaattctggactcttgggcctccagggagaagatgaggaggaccagagcctggatgacatggagaagatatccaggggaccaacggggcgcctgcggattcaccatgccaaactggcccaggctggcgcttaccagtgcattgtggaca

SEQ ID NO: 91546 - DNA, 1078 bp, Homo sapiens
gggctgcatggagccgtcaggacaagctgcgcggttcccagcctccctgcctgccccggcccggcaccgccgcctcccagccgtcgccgggcaaccaggccgaggggcccggccggccgagtggggagaggggttgggctgggactgcggggtcctgggaaaggaggggccgagggcctggattcctgggtcttaggacgtgctgtagtttgcagcaataacaagggaacagagggatattttgaggaggggttttgaggctgggggagtcgaggtaggggtcccaactgtcccccaggtatcggtgtgccctcttcccgacacgcaggcccgggggagccccggaccccgcatcccccagggcgcggaaactggcgaggccccaggagctcccatttatagctcagtttccactgagcgcagtccctctaggacctgggctgagcaagtttcttccactctctcccttccctcctcctcaccccttgcctgcccctcaaccccggcagggcgcaggtgtccaacccagccgggaccccctccctcctcgaacccaggtgttccggctcccagaccccaattgagctgggggcgcccacccgccgggggatcccgccctgcgtcccccattcatccgcgtctcagccgcgggagtttctcaacgggaagagggcggagctcccggggggcggacccgggcggggcgagcgggatcgggccctcttggggtctcccagagacccaggccgcggaactggcaggcgtttcagagcgtcagaggctgcggatgagcagacttggaggactccaggccagagactaggctgggcgaagagtcgagcgtgaagggggctccgggccagggtgacaggaggcgtgcttgagaggaagaagttgacgggaaggccagtgcgacggcaaatctcgtgaaccttgggggacgaatgctcaggatgcgggtccccgccctcctcgtcctcctcttctgcttcagagggagagcaggtaccgcacgaggggagcggaggaatatggggtgggggtggggagttgcttgcgggctgcctcttcactagcg

SEQ ID NO: 91547 - DNA, 1041 bp, Homo sapiens
cggacagagggggcaagggctaatgcagtgggagtggcctggaaggagctttacacccagcgggggctggagaccggacctattgaaggcgaggcttttaggagaatcggagtttggaggcggcgtggcctgattgattgaggttagcggagagtgcgctggacagacccggctttgttacagcctttggggagggcaagacctctcctctgagtgacctacagtctccatcccagctcccccagtagtgaccgccctgcactctgcgcctgccttcctgaggggccctgctcgcctccagtgtctggttttcgcctctcccgccccagatgccgtggtaaggaaatgtcactcctcccgtgacccatccagccgtgatccctgacctcccacctggccccccgaaactactgtgaccatttctgacttcccagacatccctcctgcttcttcctcccctcctcagtctcctccgtgtcctccctcttttgtgcccccaggtctggtcttgggatgagggcttcctggaggcggggtcgcagggccggttcctggtggagacattccctgccccagagagccgcgggggactgggtccgggcctgatctctgtgctacacatttcggggacccaggagtctgactttagcaggagctttaactgcagtgcccggaaccggctgggcgagggaggtgcccaggccagcctgggccgtagaggtgagaccccagcccgaagaccccaaatctggagagtctaaaccccacaaacgcagggatcccccagccgagggctgcaaaacctcataccctcaaatgcagaggagacctccaaacctcgggagtctcaaaactgtgggctcattgattcccaagacacccctcaaccacaaatgccttcacattctgaatcctaaactgagagactcctcacacctaggggccccaaaaagggaaactccaatgattgcaaagcaaattgcaaagtaaaggacccctcaaattctaagactccctaaagccagggagtttaaactcact

SEQ ID NO: 91548 - DNA, 1090 bp, Homo sapiens
tccactccagcctgggcgacaagagcaaatctccgtctcaaagaaagaaagaaagagggagaaagaaagagaaaagggacctgactactggagaggggtggctggcaggggcggggcagtgggctgattgcccccatctgatccccccagatgtacccggagctgcagattgcacgtgtggagcaggctacgcaggccatccccatggagcgctggtgcgggggttcccggagcggcagctgcgcccacccccaccaccaggttgtgcccttccgctgcctgcgtgagtcccaggcggggagaggggaactgaggtgggagtttctgaggggcaaggttctgagcccctctctcaggcctacattaaggggctgggtgcttgtgtcctaagtggggcagagaagcctctgaggataaaatatctggattctgaggagggtggggttggtggctataggaggatctcaccctggtgtcccgtgcttccccagctggtgaatttgtgagtgaggccctgctggtgcctgaaggctgccggttcttgcaccaggagcgcatggaccaatgtgagagttcaacccggaggcatcaggaggcacaggaggtcaggacgttggcccacccgtccccagcccccacaacccaggaactgggacctctaacaccctccgccaccagaaccgaggagtctgggccaccagcatcctcttcgcacttgggatctaagaatttcatcccccaaccccttcctctagaagcaggaatccaggctcccagcctcatcaacccccaaccctggcagcccagttccccatctaccccctcccatcccacaatcctggcatctgggcccactcttcctacaggcctgcagctcccagggcctcatcctgcacggctcgggcatgctcttaccctgtggctcggatcggttccgtggtgtggagtatgtgtgctgtccccctccagggacccccgacccatctgggacagcagttgggtgagtgggagggaaccctccatgcccatctcaaggttcctgaggcaggggatggaagcctgggagcccaggcctgggttcttactgcct

SEQ ID NO: 91549 - DNA, 1336 bp, Homo sapiens
ctctctttgatgcatttatgtctctatcaggccccgccccctgattctggctctgctgggccaatctcacctttattaacctgacctaccccatggagaccccactcatgttagcccccattccagctctttgtcccacccctatcgtgtcatttatacacagcctgtctccagtttgaccctgcccaggccaggagccctgcaaggctttgtccctttcaccttaacattggtcagttctgctcccagattgctcccactcaatcttacagtttacatcctcacattggctcccagtgggcctagtcccacctccactctgcctggccctgtagcccaccccttccagtccataacctttggttctgcccaggcctggacccctggaacgccccccaaccccatgtagccctgcctttccaggctctctttgaccaggctttgacccatcttctcctctcctgaccctgtgcccacccgctccccagcacttccagtccattctgcagactctggaggagcaggtgtctggtgagcgacagcgcctggtggaaacccacgccacccgcgtcatcgcccttatcaacgaccagcgccgggctgccttggagggcttcctggcagccctgcaggcagatccgcctcaggtgcggggaccgtgggggcagagagcagagggtgagaagggtcagggcgggcttgggcatcctgtgtcccttccacaggcggagcgtgtcctgttggccctgcggcgctacctgcgtgcggagcagaaggaacagaggcacacgctgcgccactaccagcatgtggccgccgtggatcccgagaaggcacagcagatgcgcttccaggtgctcacatccttccagctcccaaatgcgccgctattcctcagacgcccgcgcctcaggctcttctcttgtcccttagaccctctttctgtctcttggaccccttcctatcccctgaacaccgcttctctgccccttcccagtctctcagctcagcttcctgaccctgaaacatggaccctcacatgctgtgtctttgacccctgcttcttggcccttggattcctactccccccgccgtcgatcctatgttctgtcccttggattttcactgcctttcccagaatcgtcttttttttttttttttttttgagacaggttcttgctctgtcgcccaggcaggagagcagtgtgcgatcttggctcattgcaacttccacctcctgggttcaagcaattctcctgcctcagcctctcgagtagctgggattacaggagcctgccaccacactgggctaatttttttttttttttttgacaga

SEQ ID NO: 91550 - DNA, 1050 bp, Homo sapiens
ctacctcggcctcccaaagtgctgggattacaggcatgagccaccgcgcccggtcgagaatctccttcttgttccttgaaccctcttcctgtccctcaacctcctttctccataacttcacttgttttccctggaacccctgttctgtgcgctcaaatttgaattcccctttcctggatgttttcttcctgtctatgaaactccattctgtgctcttgaactccaaatcttgccttgaaccatgtcatttctatatgaccctccaatcctcaatctctgtctctggaatcccctcaaaccccactttctgttccttggactttattcttcaatttccttctcctatggcccagttcctaacccttgtaccacacatcctgtccattgcatgtgccgcttttcctcagtcgctattgaattcctccttcatactgcttcagtttcctcatctccagcctgcattgcgcagttcatccttcatgtccactcacccacaggtgcatacccaccttcaagtgattgaggagagggtgaatcagagcctgggcctgcttgaccagaacccccacctggctcaggagctgcggccccaaatccgtgagtgtctattaccctggctcccattacagatctctgagggcagatcttgactcctaaatgttgggcccccccaatttcatttattcctctataacaaacagcccagaccttagcagtgaaaatcaacaatgatttttctttgttcatgattctgccatccggtctgcgctcagcagagtggttctttcagtggtcttgccagtggtcaagcatgcagctgtatttagctagcagatcatctaggggctgggagtctagcacaaatggacctttctctctctccaaggaagcgcaaggcctctcttctccgtggagcttctccatgtggtctcatcagcagggtagctagattccctacatggtggtttatgctctctaagacatcacagtggaagttgctaggtcttaaggcttgggcccacattctatttgttaaagcaagttacaaat

SEQ ID NO: 91551 - DNA, 1848 bp, Homo sapiens
ctcagacactggtgggaaaattgtcatgagaaatgtacagttctggaaggtgtatggtgtgaatggtacaccctgagacgtggtgttgtgcggtgcacaagacatacaactgaataaggcactcttggtggggctcgcagaagagggccagcatcttatttatttatttattaattttgagatagagtgtcactctgtcacccatgctggagtgcagtggtgtggtcatggcccactgcagccgtgaactcctaggctcaaatgaacctcctgcctcagcctcccaagcagctgggactacaggtgcgcaccaccacgcctggctaatttttctattttttgtagagatgaggtcttgctgtgttgtccaggctggtctgcagctcctggcctcaagtgatcctccttcttcagcttcccaaagtgctaggattacaggcgtgaaccaccgcactccgccaagggtcagggtctttaaagactcctggattctgtgggagggcacctaggtgtgaggctggccctgacctctgccattcccttcccctcaggagatcaagagcaacaagacagttctgcacttggccgtgcaggctgccaaccccactctggttcagctgctgctggagctgccccggggagacctgcggacctttgtcaacatgaaggtgggagctggggctgggaagtgcagattgtgtggggtacggtagggggggcagtgggatgttaggggtcctgggggctgtggacgtggaggggacgatgtgtgggatctgcaggggaaagtataggaagcagacacagattgccccagaacatgtagtccgtggacacagggatgcatgcagcgtggctgtggccgggggaggtctgggatgtgaaaggacaagtgtaggacgtagacaaggcagaaattgaagtgcagtttagaggcctgggccagctgagcccagatccccaccagccctccccttacttttccaggcccacgggaacacagccctccacatggcggctgccctgccccctgggccggcccaggaggccatcgtgcggcacctgttggcagctggggcggaccccacactgcgcaacctggagaatgagcagcccgttcacctgctgcggcccgggccgggccctgagggggtaagtaagcactgagcctgcctgtagagtggcctctgagctcgcgggcgcgggatgacctccctgccccacccaatgctcgctttcagagaatgacttctaatctcggaaggtgacttcagccctcaggcaaccctgactctataatgtgacctctgacctcagtgtttcatcctttaccccagaatggtgacttctctgatctctaccccaaccctgacctcacagtgtgacctgtacttccaaccctgaatcttgcttgacctcaaggtgtgacctttgatccccccaagtgtgacctcctaccccctgcccctaaccttgggtcctgacctcagatgtgacctttgacctcttacctgttcccttcaattccctctcattcctcacccccaggtgggaacccccagccagcagcccctttcccttcactgaagttctgcttcctgaccctttctcagtgtacgaacccaggccttgaccttcttcccacatctttatttttatttgtttgtttgtttatttatttattttgaggcagcgtcttgctctgttgcctaggctggagtgcagtggcatgatcatagctcactgcagcctcgagctcctgggctcaagggatcctcccacctcagcctctccagtagctggtactacaggcagtcaccaccacacccagctaattttgtttttttt

SEQ ID NO: 91552 - DNA, 1059 bp, Homo sapiens
gccaggctggtctctaactcctgatctcaaatgatccacctaccttggcctcctaaagtactgggattacaaacgcgagccattgtgcccggcctcatagtagttttgatttacacttccctaatgattgtgtccagcagcttttcatgtgcgaactggccatttgttagtgggttttgcttcttttaaaaactgctgagccatccataaacattttcaaaatgcagggtatgtttttcagtgttaaggcaactgttttgatgtgttttcctttgctctctatcaccaaatactgtacatacaaatagtaagactgggctttgtgttgtccattgttaatcctaaatgcaacaaaacacatggagactttgaaaatccttcagaataatgctatagttaagattttgctaaagcaagtgttttttctaactccttgagctgcatattgccttgagtaatcatcatccgaattgtatcctcttcggtggcacttttgtttcttttgaattcttcccttgcccaatccttcaggtatttgcgatcagaatcatttggaacttgctgaattgtttggaaaatccttctgtagaggagaagaacttgttgccttctgatgaactgctttaacattagtgttgctggggtaagcgggaagtggccatgtctgccagcagtccgccggagcctcagctggtctttttccttctctctttctccattccttaccctatctgtccctctcccctcgtccatctcttcatctcaccataacccttttttttttttttgaaacggagttttgctcaggctggagtgcaaaatctcagctcactgcaacctccacctccccggttcaagcaattctcctgcctcactctccagagtagctggagtagctgggattacaggtgcacgccaccacgcctggctaatttttgtgtccttagtagagatggggttttaccatgttggccaggctagtctcaaactcctgacctcagatgatccacttgcctcggccttcctaaatgctgggattacaggcgtgagccactgtgc

SEQ ID NO: 91553 - DNA, 1059 bp, Homo sapiens
tgtagtcccagctactcgggaggctgaggctggagaatcgcttgaacccaggaggtggaggttgcagcgagccgagattgcgtcactgcactccagcctgggtgacagagcaagaatgtctcaaaaaaaaaaaaaaaaaaaaaggtatgtgcaggactctatcctgttggtgctctatctccagcctatgcccagcacttagtaggtcctcaatccgtacctgtggagtcactacagaccagacccaggtctcttgcaggccctgcctcatgctggctctgtccgctcttgggtggagactcacagcagaggcccaggccctccaggacagcacactggtaccagccatcagctcacaggcaggcatggggcactttgtggttccagggatgtggtccacttcggccacgcaggcctggaagaaggactgtctggtgacaggtgtgtgtgacagggtgccagtgggtccctggctaggcaagaggctacaggcactggaccacatcgtgtctgtgccagggtcctcggtggctgccggacagactgaccttgggcaagtatgcggcggggcgcagggctcgggcctcggcagctgccaagtcatccacctgctgtcttacctttgcagttgccatggaggccacggggaatcagaggtcggaggcggtgtgccaggactggtgcgggaagagtggagggggatcagatgcatgtgagaaggaacatgggggtgaggtatgaagaaacacgggactgtgggggaggggagagccgaggcgagggggttgtaggcaacactcaggatgggcattgtggagtacgaccagcaccacggcaggaagtcaggggaggggcgtggagaccaagggaggaggagagagagtagtagggtgggcagggcggtgtggggagaaacagggattagcattagggacaagggagggatctagagccagggaggagtctggagagactaagaggacgaggggctattctgagaggaagggttggtggtgagggaggggcaggcagggaaggggtttggggaggagccaatgg

SEQ ID NO: 91554 - DNA, 1027 bp, Homo sapiens
gtcgtcaggctggcaacccacgccgccaggctccccggtcggggcccgcgggcgtacgaaggcgcccatggcggtggcgtggcccgagcgtagcagctgcagctggcgccgcccgcggcggtacaggtactcgatgcgcagcacgtcggaccgcggcaggcccgcatgctgccggaactctgcccgcactcgcgcctcggcgcccggcttcccacgcccggcgcgcagcagatcgcggtacaggctcagaacctgcctctgcagccggctgtgccggctcatgaccgcggctaagcagagacgctcagcgaacgacctgcgaaccgcggagccgccacacagccagcaaaggccaaagggcaaagccacagccacttccgcccagcgcttcccttggcctccaactcccgcctcccgccatccggcgctgccgcgtctgactggctgtcgttgcagttacgtaacagccggctgggagaagtgggcggagtcgctggtcgcggcctcccacgtaggggacgtgtgttcttgaggggacagcagttctggggatcctggcaccgcctggagggcgttatgtgttcggactcctaggtcttgggttggagggaacagagggtcctcacctaactcctgcattctgggagaagaggaagctaggggtttttttgtgtgtgacggggtctcgctgtcgcccaggctggagtgcagtggcgcgatcttggctcactgcagcctcgaactcctgggcccaagcgatcctcccacctcaactcccctagtagctggaaccacagacgcgcgcaaccgcgcccgctatttatttatttatttatttatttatttatttatttattattattattatttgcagagatgggtctccctatgttgcccagaatggctcgaactcctgggctcaaacgattctcagcctcccaaagtgttgggattccaggcgtgagccaccgcgcccggctaccggttcggactttgggtcccaagggcacggggcactgggagagac

SEQ ID NO: 91555 - DNA, 1036 bp, Homo sapiens
ggttcatctcccctctcctgccccagggccttgtcgttcactgtagctgaggctggacccttcagccaggtttgagaaatttccaggtctgagaccctcactactgcctcaggggctccgagccagttctcagctccaccatttcctcttccacacaaagatgttaaatcacttgccctccattagggagccaactggggtatctttgggggttaagccaggatgagccccctccacagatctgcccaggggagaaaactatgccgcttcaatcaatgtgccagtctacagggctccggaaggagtcagatccccacacctatcacctcccagatggtcccttccaggtgtctgtgtgcgtgtgtgtgtggtggcaggggggctgggggtgtttcaaaaatcctgaaatatataaaagctttaagaccaccaacagggaagtagacatatccccaattttattccctttgtccaacattccgagagggaaggggcaaatgagtcaatgttgcccctcaaaaccatcaagtaggggcctttgggggtcttcagttgatcaaccagggtgatagacccctaccccttcctcatggtcctggcttgtcacaattaatgggggaaagttttccagaaggggattccgggcttctcaccgctcatcagggcaccttcccaaaacgttctcagcaaaaagtctgcacttctcagagttaaatacaggagaggggagactccttgaggagccagaagtgggtatgttctcaggggtcaagagaagggcgtctcaggctctccctgtccaccgggggtcgtcctggctccccgtaccttcgggcaagtagctcttggcttgacactgtccagcccgccagcgtcccaggccgccccaagccctcatgggggaggagcaccgacctgtctccaagcatcggaaaaggcgggcctcccttgccgtccatcacggggctctctaggccccctgcgtcgccaaggaggagtctctgacatccccaattcgtcaagctagtctcttaag

SEQ ID NO: 91556 - DNA, 1156 bp, Homo sapiens
gctggtctcgagctcctgacctcaagtgatctgcccgcctcggcctcccaaagtgctgggattacaggcatgagcaaccaggtttggcacggaatcaggaaattagaatgcagactatttgctgggctgaaagagccctgtccagccccagaactctgagtagattgtgagacccacaactctcagaccacggttgtgcagccctgattcctaaatcctggtagacacaggtgggctttggggccaaaggcgttcccaggaaaaaaggcaaaccacaaaatcctaggaacccaccgccccagggaatggtcccacagacacagatgacccatttccatcccggaggtaaaggcccctatgttggtctaggtgggaggatcatagaggggtgatcctgagaaaggagtgacccccttcccacctcttaggtttttaatgccccaaagccaaagtggacccagctctctgggagaaagttacagaactggggtaagtatccctggctgggggcaggagtgattctgggatgtaggctggggcaggggactcaggtccaatagacttaagacatcagagggtccctgacagctcaaggggccccaagagccaggaggattctgaaggggtcagtggaggtcctgagggattagggatttcctgatgagttgggagtatctgaaagggacctgtggtctggagaagtgaggaaacctctgaaggacccagtggctatctccaaacggtcaggggtccctgagaggatcagggtgcttccagccactgtggaatccctaatgggggatctattgctataggggggccctcaggaccccattgccttccccaggtgggcttcctcatccccgagggatggttcctgagcggctgcccccatggctccagcgctacgtggacaaagtgtcaaacctcagcctctttggaggcctcccagctaaccatgtcctcgtgaaccagtatctgcctggggagggcatcatggtaaccacacaccctcggcccgtgtccccccactcagacttctgagctgtgctggggcaggggactctgtacccaccctcactcattaggcagccacatctcccaaacaggcattcacctccctgtccctggcttgggaagcccccctttgacccag

SEQ ID NO: 91557 - DNA, 1025 bp, Homo sapiens
cttgaacctgggaggcagaggttgcagtgagccgagatcgtgccatggcactccagcctgggtgacagagtgagactccatctcagaaaacaaacaaacaaacaaaccacagccagagaggtagaggcagaatccagaaaggcctgatagcaaacactgggggaaaggctgggggtgatgggtgcagatgtccccgctgcctgcctaagggcgtgaccctgtcatcctcctttccaggttgctgttctgctgctggttcccctggatgctgagggcggagatgcagtcttagaggccctggacacctgacaaagagacagagtccccactagcatctcctgacacccgaggagccctgagtcaccctgagatagagattcccagtaacacatccagagtagagacccctgttagccagccctcgatcattgaggccccattattaacagatactcccataataacccccaaatacagaccccatgtcacccagaaagagattccctgagtagcaccttcaggctagtccctatccccaacccctcagagcagattcccagattaacagatttccatatcaccccaaatgatggtgaccctctccacataatgcattacaacagaacattcttgaatcacccaaccctggatcagaaacctccccattaacaaacactgccccttaagtcctcttgaaataaacataggtcacacccccaaagcaaaagagtaacagacattcatgtcattgttccccatttaacatcagtcctctcaagatgtcgtgaccccatggtcaccctgaagcccttagattccaacccctcaatcagagacttccttcattaacaaagacccttgttcttatccctcaagaagaaacccaccataaccagcccactgtcacccctaatttacagacaccaaaacagtcctggaagtgctaattacaggaccccccaagtcttcctaccctctgcaccctcaagaaacccccagtgccttgtatgaagcccaccccacat

SEQ ID NO: 91558 - DNA, 1026 bp, Homo sapiens
tccagcccaaacccagggcaccacctggagccctgatcccccctcagatggcctcctcctcccagaccagcaggacagtgtggacacccccgagcccccagccctttcctcatagatccctggggcccagctctcagtcagaccctggccttttgtggctctgacttctccccctccccgtgtctcctcaggattggcggatccactgattcccccggggacagcgttggagccaaaaaagtgcatcaagtgacaagtgagttaggggatgatatgttgggaggagtgtacgtttggggatgggaggaagggtcatgggttctcaggtatatactggtgacagtctctggtatttaattggggacacagggtccaggaaaatgatgagacaaggtccacaaaaagataggtgctagaggatatgaggaaattagcaacaaggctcttcggggacatgaggttgagcagatactggggacagggatagtcactgggggacatggtgggaattatggacaagaggcccagatgggtattgggaatgtaggatccaggtggggactggagacatggggaggtattaatgagaaggggtctggatgggtattgaggacacaggtggtctgtcatcccctcacttgacatcctgccctcctcttcagtgacgcagcccaaacgcaccttcaccacagtccggaccccaaaggacattgcatcagagaactccatttccaggtgtgtggccaacccctgtcccctctcctatgtgacattcagggagagggatccataaggcagttggacccagaggtctggagctctggtcagggctggaaagagaggttaggaaaacttgtgacttgtaagcatacccagaaacagtctttagggtgtagggccccgcactgaattctagtgaattccactttcgggtgggccggtaaaggaagcagaacacccttcactccatacgagcctcagaacaacagctagagaccgggcggggtggctcatgcctttaatccc

SEQ ID NO: 91559 - DNA, 1363 bp, Homo sapiens
aattcgggggttcctcgctggttcccacccgtggaaatgcattttgcttctgtaaatcacagcctagtcctgctatattttaacccccgttctatcgcctttagacgtcacgatcatagctcactgcagcctcactgccctggcccccgctgagtcattaaggtcccttcgagggttcggtccagagtgttacctgccccaactcttcctcgcttctaccccgccttctctcaccttctgcgatctctatcctttttcctcaccaaggtgggattcttaatccatattgtcactcaaaactatgagaaagacgtgagaagttatttataaaatctctgcagtgctgcctggggaggagggcgtacagaacagttccctaaatcctgagacagaaaaatggaaagaaatgatttcacagtaggtagaaggaattccattagcacagcggcaattaaaaaaattgttttccagctgtgtaggcacaaaatctgtttttataaaatggagatgataagaaccatactactggtagggcgcggtagctcacgtctgtaatcccagcactttgggaggccaaggtgggctgttcacctgagatcagttcaagaccagcctggccaacatggtgaaacccgtctctacaaaaagtagaaaaattagcccggcatgctagcgcgcgcctgtaatcccagctactcaggaggctgaggcgggagaaatcgcttgaacctgggaggcggaggttgcagtgagctgaggtcatgccactgcactccagcctgggcgacagagtgagactctgtctcaaaataaataaataaataaattatactattgcattggagggaaatgaaattttaattgtgatcttcttggcacggagtccagataaagggaggatacctggtagctgctggtggagcttgttcctgccccatgactttctcctgcactgtgattataccgcccactcctggctacagggctctggctgtacctcccatgtgctctctgtcaccaaggttcagtcacactggcctgcttttggttttcctgaggctccatattcttttctgcctcctggcctttgtgattggtgagtcctcagcctgggctttttgctgcaatctgcctgtctggctccttcccatccttcaagtctcagcctgaatgtcgctatcttgaaaggccttctcgaaccccattctaaagcaaacagccaccttcatctgtcacccagcaccctatacttcatagcctttatcttatatgttcctgaaagtgccctttgagctattaaactacatataacaatagcaaattcagagaggcgttatagcaaagtggctaagagcacagactg

SEQ ID NO: 91560 - DNA, 1103 bp, Homo sapiens
gggcccagtaatgctgatcgacagataagacaacatgagtgccatggcttggttgtttgtgttggaatcctggcactaccccttcctggatgggtaacccctcttggcctctgtttcctcaactgttttgttcctttttttttttgagacagagtctcactctgtcgcccaggatggagtgcaatggtgccatctcagctcactgcaacctccgcctcctgggttcaagcgattttactgcctcagcctcctgagtgcctgggattataggcatgggccaccacacctgactaatttttttgtatttttagtagagacagggtttcgccatcttggccaggatggtctcaaactcttgactgagccaccacacccagccttgtttaaattttaaatattactgttcatgtggttttttactcgttgaaaccgctcaaatttctggactgtgaatctgatgtggggaaactgtctacctttggtcactactgtgtctctcctgtacagcccaaagtgctagctttggagccagactgcctgggtttgtatatcaacattgccacttgcagatgtaggatcttgggcctcagacttcttacctgtaaaacaggggtgataatagagccttcttcgtggcttgttgggaggattcaagtcttttatacatataaaagtactaagaggccgggcacagtggctcatgcctgtaatcctagcactttgggaggccgaggcgggtgtatcacctgaggtcaggagttcgaggccagcctggccaacatggtgaaaccccatctctactaaaaatacaaaaattagccggacatggtggcatgtgcctgtaatcctagctactcaggaggctgaggcaggagaattgcttgaacctggaaggcggaggttgcaatgagccaagatctcaccactgactccagcctgggtgacagagcaagactccatctcaaaaacaaacaaaaaaaagtacttagaaacttattcacaggtcaccttctcaccgcggcattcgcccccttcccctgtgctcctaacctccttatctgctttcttctctcttgcacccatcattacttggcatctatttc

SEQ ID NO: 91561 - DNA, 1966 bp, Homo sapiens
aaagtgctgggattacaggcgtgaggcaccgcacccggcccccattccttctctcctgttccaccccatttattgtgaggcttctggtcttgaagtcacttcatggcccaagatggagttctggctgtcgtgtgcgtatttcaggaggggaactggtaggaagcagggcaaagggttccctttgacgagtatttcaggaagtcccacacagcatgtcagtttacttctccttggccagactaagtcatgtagctgtacctgcatagttgcaagcataaaactggggttatgtcagtaaggaaagagaggcgagtggatatccaggaggcagcttgccctgtttgttgcagtaaggagccacgggaagcctgggaagcaggttgacttgatgatgaatattccatgaagttgccaaagtctcacttagcgacatttacttagttatctacacaccaatttaccatctcacgtagggagacaattattagattgttaaggaacaaaggtaaaaataagattaaaagagagaagggagtagaaggaaaccatacaatctgggaacagtgaatcttgctgccagaaacctacgagctagcctgttcattcagtgcttgtgcaggctagctaggagtatcagaaacattttggctctttatggattttccagaacaccttgagtatttagcagtggagcacaggctgcaggctaccttgatgtgatgcctgccaggatcctcccatcagcaccacccgtttagttaggccaggcctgtaccatttcctgcatctctatttctcagtgttacagggtggatagggtcttaggatacccactgcggcagagggagaagaaagcagggtccgcatacagtgtctactccatttgggtttggtgtctcagggcggaaggggcctttgcatttacccccatttctctgtgtgctttgctgggcacaccagcggcactggctctgtgggagctgcttgagctcacctctgctggcctcttccgaggcttgggaggcagaagagggcagagtcctatcagagtcgccaggatggggtctggctggccaccctcagcggaaccagtgatcagctcttttctttatccccaggaagtctctcagtgctctggccttctcccctgatgggaagtacatagtgacaggggaggtgagtcgtgatcgtgactgagtgggagtcgggggctggggggtcttggaagccattccttctgctcccggcaggcctgggagtccctggaatagctccttcctgggccagaacagccctgtagcagatgggggaggtggcttttgggcacatcctgtggcaatgccatcttcggccttgacaaccctctagccctgcccagtacagagcccagcagcagtaacgaccccaccttccctagaatgggcataggcctgctgtgcgcatctgggatgtggaggagaagaatcaggtggcggagatgctaggccacaagtatggtgtggcgtgtgtggccttctcacccaatatgaagcacatcgtgtccatgggctaccaacatgacatggtgctcaacgtctgggactggaaggtaagagccgaccagcaggcctgtggcaggcagccagctgccacagcatcctatgtcttgggcacagggagagctacatgagaggacgcagtaaagtgctcactcacccaacagataacagctattgagcacctgtgacatgctgatcccttattgtagggcacaaggcaggctcccagctagaagcattatacatatttttatattgaccagctgtgaccttaggcaagtgacttaacatctctgtgagtctgtttcctcctctgttagatggatatagtagtacttatcttgttgagttgtgagactttaatgagttgataagcactggaaggctgggctttggaacagctgtggagctggcagaagtgggtacca

SEQ ID NO: 91562 - DNA, 1056 bp, Homo sapiens
gccattgcactccagcctgggcgcaacaaaaaactctatctcaaaaaaaaaaaaaaatttaagcctaaaattcaaccctgttactacaagtgacttacctgaagttgcagtctgctgaacaggtattttccatacacagctacgtttctctgtagacagcagtgacaattctgtttccgttcatgcctctgcctacctgctggcacatgtctttcaatagcagcagtatgctatatcctgatttcacaaatcttaaaatatgctaaaatgggtgtcttagacccaaggaactgtaagtcttctctggaggcctaaggctgctctgtcagtccccatatccccgggccaggccacgtgaagcaccaaatccactggggtcccttttgcccctacaggtctccctgtcttcctgcctctgtgtcagccaggagctcatcttctgtggctgcacagatgggatagtccgcatcttccaggcccatagcctgcactacctcgccaacctgcccaagccacactaccttggggtagacgtggcacagggcctggagcccaggtactgccctgtggggagagggaatgggaggggcccacccagagtctgtccactggcattcatccatgcttccagatccatctatctgtctgtccatcccacaaatacccatcatgactctcagccctgggcattacaaagcagaaaagtccttgccttccgaggcaagcctcacagtgagaagtgaggctgggtagggggaagaaacagtgagaaaacaaaggaataatatcatttcagatagcggtcagcatggtgaagaacagtgcagagcaggtgtgaatgtggcggagtgtttccatccacatggctgacccctactaagtggctgctaagtgccagccctgggctggaagcaggacatgcctattataatgaagcagcaaaatctctgcctctctgcagtatagcaagggggctcgatgataagcaagtacacgaaaaagataatttcaataggcatgagtgctttggggaacacagcagggactcgggaagga

SEQ ID NO: 91563 - DNA, 1620 bp, Homo sapiens
cctggtgagaaggagctgctgtgtggagagctgggtcccagcagttgaggtgacagcacactgggcttgttacgttgcaggaatagtaagggactgtgtggccagagcccagtgtgtccggggaggatggtgggagatgaggccagtgtggggcgcctgtagtctatcctcaggtcagtgggcagttgctggggtttcgggcgttggggtaaatgaccaggccttacatgttaggtccctcagctgctgtgtcgagagtggatagaagcactaggctgtggctttcttctcctttgttgcaagtctgttttatggaattgggggctacctaaccagggggtgccaggtgcctagggctgcctctttgtggatttctggatgctagctcctgggtgccttttccacgacagggcctgaacaggggaactgggtgtcatgaaggaaaggagggggcgagcaacccacaggcagtgttgtgttgtagtagtcgggctcacagctctgctgtcttctgttgtgctctgtgaccttgggaaggtgactatacctccctgtgcttccgttttctcatgtgtaaaatacagtacctagctcttattgtggttgtgagaatttattgcaggtaaaactctcggcctggcacagtgtaaatgctcagtaaactgtagccttcatagggagaccccaggccaagggacagctccccagcctccttaggacacagaggctttttgatcatgcgttggtgaggccaagaagaggtgggacctgagatacatgcctattatctttctatgctcagagagagagcaggagcttgggttgggtgaaatgatgggcgataaatgttcataggaatcaaaaactcaattgctctcggggccaggcaaaaatttccggtttgtagcctctatatgaaaagcaaagcagaggaagagggaagagggaaaagtagaattggagcaggagagatggatggccacaaataccatgagggatggcattgccggggaggcatctccactgtcactagaggtggctgtcactactcagtgacattgatggtgattgattacccatgtggccttgttagcttcctcttccacaggaaggcggaagcagtctacccagatacagtggcactgaccttcgaccccatccaccagtggctgtcctgcgtgtataaggaccacagcatctacatctgggatgtcaaggacatcaacagagtgggcaaggtgtggtcagagctcttccacagctcctacgtttggaacgtggaggtgagccccccccccacccccttgcccctgcttggcctctgcacagttccccacagtttgggaacccattcagtaattccttcagaagatactcattgactccctcctatgcatcaggccctgtcctaggtgctgaggacacagacacaaaatccctgcccttaacaagctcacatttggatgggaaaggaaacctggaaacatcatcagtgaataacacgccaagcagcagtaaccctctgaagaaaaatgaggcggggaaggggaaggggaatgcaggtggtattctagagaggagaggggtcagggaaggcctccctgaggacatatgagcaga

SEQ ID NO: 91564 - DNA, 1056 bp, Homo sapiens
atctcttctgccccagagggcttttacaggaatccatgcttaagtatagggcctgggctcttagaggtgcccgtgcaactttagctctttctctactattttccaaacaaaattcatttttatcctatcctataatttgtcatcttcattgtggtataatatacatccagtaacatgcacagattttaggtatacagcttgatgaactatctgtgtaattcacgtgtgtccactaccctgggcaaaatctggagtgttttctacctcatagaaacccccttctgcccttcccagtcaggtccccgcaccaggataaccagtgttctgacctctcaccaaggactgggtttcctattcttgaacttgatataaatagacacgtagagggttgggcctcctatttttggtgccacacctcttcctcatctgtaaagggactgataatgcaggggcagaccaggacaagctggttgcgagtggagggcatggcacaggccctggttcacagcctccagcagtggggctgctggcatggttcctggcgcactgttggtggccccagccatgcctgcctcagaatggctgtgctgtcttccccatagtcagagagtccccaggaagctggccgcgggcacccctccttcctgccccagcagaaggaatcatctgaggccagtgagctcatcctctactctctggaggcagaagtgacagtcacagggacagacaggtgggtgtcctttccaccaagggagccttagttggaggaacccccagctgatagctgcatcctggaagaagtgctctctgccttcccagtgggcttgtgggagtggggacagttgaggcctggatggggcaggagcccagccttagttccctggttccaggtggggtacaggagggcctgacctgggggaaggagggggcatttggaggaggcggggaggctgtcgcagtgctcctgcaggagcagcgggtacaggtgcctaggggctccgggtggggctagctgttgagtctccagctgaagtccttgttccctctctgccccca

SEQ ID NO: 91565 - DNA, 1661 bp, Homo sapiens
caggctgtgggctcctgaccccgactctgtccttcagactcgggggagtcagaggccgacctggagtgcagcttcgcagccatccactccccagctccgcctcctgaccctgcccctcggtttgccacgtcgctgccccatttcccaggtaagcaggggccagacacgcaggggactcgctgctcgggcctggcttagggccagtcacaatgtctaagcacaggccctgcacttggagcccactgagcctggaagacggggatccctgcttctcagcctgcgggcaacagggcagggatgggtggggcccgctttctccatttcaggtggcgtctgctgtgactcatggtgttggctcctcttgtccctcccctccttccctgtcaggatgcgcaggtcccacagaagatgagctgtccctgcccgagggacccagcgtccccagcagctccctaccccagactccggagcaggagaagttcctccgccaccactttgagacactgactgagtccccctgcagaggtagggccctgcctcacccacacctgccgaggccgtctgtgcagcctgggcacagcattggcgtccctggagttggctccccagcagggccaggagggtgagtggagagcaactgcttcgttttttttgagacggagtctcgctctgttgccaggctggagtgcggtggcccaatcttggctcactgcaacctccgactccctggttcaagcaattctcctgcctcagcctcctgagtagctgggattataggcatccacaaccacgccctgctaattttttgtatttttagtagagatgaggtttcaccatgttggccagactggtctcaaactcctgcctcagatgatctgcccgccttggcctcccaaagtgctgggattacaggcgtgagccaccgtgcccggcccactgcttcactcttgacctgagcctcacgatgcctcctcacccactgcccctgctcgtaccctgtgtctgtacataagggtttctggggagtgccccgctgggctgtgggctggcctagggccagggctgctcggcgggaagggttatgagggtcccctcgggatcttcccctagagctcttccccgcagctctgggagacgtggaggcctctgaagctgaagaccacttcttcaacccacgcctgagtatctccacgcagttcctctcaagcctccagaaggcatccaggtagaagctggccaagcactgcccaccctctggctcctcaacagtgccccagggcaggctgaatgagaatcatcccccctgctctcctccccacaggttcacccataccttccctccccgggcaacccagtgccttgtgaagtctccagaggtcaagctcatggaccgaggcggaagccagcccagagcaggtactggctacgcctccccagacaggacccacgtgagtattgggcccacctccgtcagggcacggggctgggaaccctgaggccttgtcctcacctcagagctgtgcctgcaggtcctcgctgcagggaaggctgaagagaccctggaggcctggcgcccaccacgtgagtgccccagtcccagacggacagtcctgggtttctcggcgagtggccggatgtccagcctagctgtggggcgtggg

SEQ ID NO: 91566 - DNA, 1092 bp, Homo sapiens
tagttggctcagctccaaagatggatacttgacctggccacagggactgtgccattcattcattcgtgcattaacttaaatatttaatgagcattacatgttgggctttgtgctaaaccctgggacatgggacatggtggtaaacaacacagagaactgacagcttcaatggggacaatgcccagactaaacctttaaggaacccgtcatatgtatcacgaagtgacacatgcttaggagggacagaggagggcgagggagtgcagggtggggacaggggttgggattacaaaccagaagataagaagaggcttcagggaggaggctgcattggagcagagacctgtaggagtgaaggggagggagccttggggacccagagaagtgttccagacagaagtacagcatggagtccacccagtcgctctggccgctcacaccaatggaatgcagctcatcttgctcattcccttctctctaccccaggtgcacttggtctgttacagggcagccctgcccgctggagtgagccctgggtgccggttgaagccctgcccccatctccccttgagctgagcagggtggggaacatcttgcacaggctgcagaccaccttccaagaagccctcgacctttaccgtgtggtgagctaagccccagagttgggaaagggttgaggggtctcttgagaccgcccggccttggtggcccctgacaaggctggcatcccttgcagttggtctccagtggccaggtggacaccgggcagcagcaggcacggactgagctggtctccaccttcctgtggatccacagccagctggaggctgaatgcctggtggggactagtgtggccccagcccaggctctgcccagcccaggacccccgtccccaccgacgctgtaccccctggccagcccagacctgcaggccctgctggaacactactcggagctgctggtgcaggccgtgcggaggaaggcacgggggcactgagggcgcagcccctccaccgcagccctgctgcttctgaggacttaggtattttaagcgaataaactgacagctttgaggaatggttcctggtgtct

SEQ ID NO: 91567 - DNA, 1106 bp, Homo sapiens
cccccttaggtttttacaaagccctcactggctggtgtcttcacccagtgaatgggggacaggggtggaagcagggacaccagtgaagtggctaccatattagtcccggcaggagctggaggtggtcctagtggtagcaatagaggtagcaagaaatggttttcaccaagacaggcttctactcaatgggtaggcatggatccagggtgatcctgaaatttcatggggatttcttctatgtccagaagcttcacagggatttctcttctgttggcaggtctcacagatttcaagcctggctactggattggtgtccgctatgatgagccactggggaaaaatgatggcaggtaacaagaattcccactcaggtgtctgtgtgtgcatttgtgtgtaagtccatgcgtgctgcttgctgagctgcccatgccagcttctagagtggagccatgtgagggtcctctgaccacacccacccctatcctttcctgcagtgtgaatgggaaacgctacttcgaatgccaggccaagtatggcgcctttgtcaagccagcagtcgtgacggtgggggacttcccggaggaggactacgggttggacgagatatgacacctaaggaattcccctgcttcagctcctagctcagccactgactgcccctcctgtgtgtgcccatggcccttttctcctgaccccattttaattttattcattttttcctttgccattgatttttgagactcatgcattaaattcactagaaacccagaaagtatttagaggacttcatgatttggggacccactgggtaaatagtggcccttcggtatcaggggccagcctctgtctcctcatatcttgctgttcccccatcttctcatcattcccacctcatctgctgtagctaccaggaagaaagggaagggaagggaggggatatcctttgcctttaaaaatgatgtacagccagctgggcacggtggctcacgcctgtaatcccacactttgggaggccagggcgggtggatcacgaggtcaggagatcgagaccatcctggctaacacggtgaaaccctttctctactaaaaatacaaaaaaattagcc

SEQ ID NO: 91568 - DNA, 1165 bp, Homo sapiens
ggaggcctgatcagcggggccgggggcggcggcggcggcggcggcggcggcggcggtggtggaggcggcggtggcggtggaacggccatgcgcatcctaggcggagtcatcagcgccatcaggtaaggcggagactatcagaggggcggggcctgggaatgggaggagcctcagtgaggcgtggtctgggaggggcgtggtctaaaaatagaataggattaacctggaggctaacctgggtacatgaattaggccggggaggcctggtttgagagttctgctgtaagggggtggaccccagtgaggcggatatcagtcattgggggcggtgcttgatatgggagtagtctgattgtgtgggaccaggacaatgtggtcctgaggggactgatgtggagttttggcgggtggggcttatgggtctgggctcagcctgcattggctaacctggagatgaacgttaaaggtgcggagccaatgcgtctgagtgacattttacggaaggggcttgacttatgagtgtggtcagaggttttaggtgggttaatgaggaggtgagcccaggaggaagcaagacctaatggggtagggtaaatggcccagaatgggctgggcttgctgggaactggctggattaatggagaaaaatgccctggtagggatagggcaggttggcttaattagccacggccacttagcagtgatcccttgaaggggcggggaccaatggctggggtaggatgttgggaagacgggcatttaggaagcgggccatggagtagggtcttgggcagatggcacctgaggaggataaggccttgggaagctggggcagagcctctatgaagtgagccctccaaggggcggggtcttttgattctacgtgggattttttaggtttagggtggccaagatgactgaaatctgccactgggtaggtgtgcctggcaggaggggagcctcccaggggaccggtctctgggtttcctcgagggtggggttggcctgaggaagggagaagaggggcacgaccagggcagtgtggattgggacagatgaggacaagaacaaatgaaaggcacagcaaccaagtaaggaagataacggctggggtctggagcgttggggctgatggttctgtagtgctgcccgttggaggccccgc

SEQ ID NO: 91569 - DNA, 1037 bp, Homo sapiens
accagagcgacaccacaggcaagctgggctttgaggaattcaagtacttgtggaacaacatcaaaaggtggcaggtgtgtagaaacctctgaaatccctggcacccagacccccaagccatggagacactatgccccacaatgctcacttggacccaatgtctctgtcctcacaggccatatacaaacagttcgacactgaccgatcagggaccatttgcagtagtgaactcccaggtgcctttgaggcagcaggtatggctggcagggacatgctggggctgggagtgggatgggtgagaaaacctctactcagctggtctgggcctgactcctgggcatgggagtgggttgggccatgtggcccccgcacctgaaggactacatccatcttagggttccacctgaatgagcatctctataacatgatcatccgacgctactcagatgaaagtgggaacatggattttgacaacttcatcagctgcttggtcaggctggacgccatgttccgtgagtgacaacccagctgtcttcctgggtggggattcctatgacctctatggaccaaggtctcctctaagcctgactttgaggtgggcgatgctaggggcacagtggtgattgaatcagttccagtttctgccctcatggagctcacagtctggtggaggagacacaagtccccagacagtgacagttcagactggtgatggctgggagaggggaagctcagggcagagtgatgggttgtgatgggggcagcacaggccgagggtctagggctctggtgaggggaagagtgagcagagcgtgctcagattgtgcttggggaagcctagagggcaaatccaatccaggaggaacctgatgcagcccaaggggtcagggagggctcactggagagggaacattgagacctgaggggatgaggagagaacttagtgagaaggtagggaatactgttgcaggctgagggaacagcctgtgcaaaggcctagaagggaaagaagatggggcttctgatgctttttgtta

SEQ ID NO: 91570 - DNA, 1807 bp, Homo sapiens
ctctgcatctcctcctccaggtgccttcaaatctcttgacaaagatggcactggacaaatccaggtgaacatccaggaggtaaggacccccatattggggtatgggtgcctgggaggaccccacccctcagcccttcataccagctctgagctgcagtccccttcctcctattttgccagccgtccctgggtgagggcaaaggggctggtgctcttggggttccctgtcctcactctccaccctcctctccccagtggctgcagctgactatgtattcctgaactggagccccagacccgccccctcactgccttgctataggagtcacctggagcctcggtctctcccagggccgatcctgtctgcagtcacatctttgtggggcctgctgacccacaagcttttgttctctcagtacttgttacccagcttctcaacatccagggcccaatttgccctgcctggagttccccctggctctaggacactctaacaagctctgtccacgggtctccccattcccaccaggccctgcacacacccactccgtaacctctcccctgtacctgtgccaagcctagcacttgtgatgcctccatgccccgagggccctctctcagttctgggaggatgactccagtccctgcacgccctggcacacccttcacggttgctacccaggcggccaagctccagaccgtgccagacccaggtgccccagtgcctttgtctatattctgctcccagcctgccaggcccaggaggaaataaacatgccccagttgctgatctctatgggatctgcctcctgatctgacccgagagaggaggggtggctcgggctctgggtcctggggagcaggggaggtagtagattcgtccccagggctggatccgtggatttcctcgtctttttctcgtcggcattttttgtctcatcctgagctgtggaggctgagacaggacccagaagccccagtgatctctgcttctgcttccagagtctgggctggagggaggtctcaatgccactcctggccctgtcccccaaggccatgtttgcccctcttgcagcttctccatccacacttggcctctgcctctgttgtgtcatggaccatgctcagtgtcttccttcccacttgaggacaccaccccacgtccccgggtcccgagggggagcctatgggtgctgtttggggtactcagcagagggctgagaggtagcaacatcctaggagtatccctggtccagcatgaggcaccgagggctgggggcagtgggcagtccacagggcagagatccctggctggtgggaggatgggcttggtggggaggggtggacacaaacacagacacacacagaggccagcgtttattgacacttgttcaagtctctcaggccccccaggcttcttggtcttaattcctggggaaggaggcccagccaagggagtacaagctgtagacagtgcctagaaaggggaagcgttggagacagaatgagacctaatcccctccctggacatcccaggcttttaaggccttcaggctccctggttcccagcctggaccccagctctagttcggactccagctcccttcccagattggactcctattgtaaagccccctggctttgatctagaccgggctgggagctttctccccgactcctccctgggcctcagccccaccactaacccagcccccgtcctgggacaagagcccaaaccctagttactcccctccctgcaggcctgactccagctcagtactcgacccccttcctaaacgccaacccc

SEQ ID NO: 91571 - DNA, 1019 bp, Homo sapiens
caatccactcttcggagacaactggggacccccaccccggcccaaagccccgggtttgaacttgacatctcgggaacccttaacactggcctcacccgggccttctcaggcagcctggacgctcccggggacctccattccggtccccacgttcccgggacctggtttcctccctttaatccaggaaaccctcccccaacaaaaatctcaggacttaggccccccagaacaaagtccttctgggtcctctcccttccaggaccctctaggcagcccggtcacccccaggccagactccagggcgagtcccctcccaacccagctggcagttcgcgggtaacagaatccaagctattaccctcctcgcctttgggacgctcgctagggatggggctgtccccacgtccaggcctcagagagcggggtcccacttcaggacacccctccaggtgcctccaatacccgcccacctcccaccccgcaggtgtcccaggcgctgatccgctccttcagctccaccgcccggaaccgctttcagaaccgagtgcgcgagaaacagaagctcttccaggtggggggtcggggggggtggggatccgacgcgccagccgggagcgcgccgagccggggcaggcggggcgcgctctaaggagcagccagcacccctttctcatcagacacccccacatccaggaggacaatgacatcccgttgtacctgaagggcggcatcgttgacaacatcctgtaccgagtgacaatgacgctgtgtctgggcggtgagcgcagggcccgtctgggctgcgggggaggcggggctggacccagagtaagaggtggctggtttctgggcaggactgaccaggatctgggttgggggttggcgtttaggaagggggtcgagtactgagctggagtcaggcctgcagggaggggagtaactagggtttgggctcttgtcccaggacgggggctgggttagtggtggggctgaggcccagggaggagtcggggagaaag

SEQ ID NO: 91572 - DNA, 1549 bp, Homo sapiens
tgagtcggggcctggctcgttttgacatttttgcgcccacgagtcttcggagagggcgtcgccactccagaccttccagcaagcttgaagtcatctgacgctaaaggactacttacctcaagagctccatcgtcacagaaggaggcggccaagttcgcggggggaggggaggagacagagagtcgaccagtaaagcctcaagggaaatgtagtccaaggcctgagaagcgacgttgctggtaatagaaggtaattcagtaccagcctgggcctggccgcggtgaccgaggcgggccgcgtcgcggagacttctgggagtgcttcctcgctctccgagtgcgcaagcgcagcgcaccgagtggacattttggtctttgtccgcgggtcagtacggcccctgggtccacgtggcgcgaaagtaggaggtgggatctgggcgtctcgggtcggtcggaccggggaggttaaaggggaggattcctgatctttaggggcgcggcgcgagggcagggagtgggtgtaagagcttctggcctacgtgcggggcggagatgggggcctctgaggcgggtttgagcgagtgtgaccgagtttgtcctcaaagtttgacctgatgtttgggattgttgagtgaatgtgaaactgggtgcgggattgtgtgtgattgtgcctaagagggagatgtaggagaccagcattgaggtataacgtttgagctgcacttcccttgtcgaaagtgctgataattataacggtgccatcttcctggagcgtcttttttacttgaaaattgaaggggtggaaaagctaagtggtgaataattttaaaacgagtttttatataaaagcatttctttttaattggagtggcatgcaaatcaccgtgacttttttttttaattaaacgagagtgtttcgaaggaactttagtttcggggtgcctacttcagactattcaaatccccatctttggggtacttaaatagggctgttaagcaaagccctagactaaacagcattgtacgctttgagaagcaatcccatataacggcgcccaggatgagggagtcaacggttttaggttaggcacagttatcctcattttttgaagaaagcttaattgttgcagtgtttatctatgagtctggactaaatcctaggtgtcttaattccttaatgagtcgaggcgttctcaggttgtatggattttgtgaagtaatggagaatgctactgacgtctccaaagatgcgttttctaaggaaatcaccccgcccccgctgtcgtcattgacatagttttaaattacaaaaagttaaataaagtaattgggtaccaagttaatatctataaataaatagccttctaatttacaaatatcagttagaatacatagttgaagaaaactaatatttacaatagcagtaaaaagataaagtattgtggaagaaacttaaaggttcagaactattaggaaagaactttaaaatactactaaggggcataacaaatgtgaacaaataaatataccatgtgacattaagaagtgtg

SEQ ID NO: 91573 - DNA, 1029 bp, Homo sapiens
tataaaggtaaaatgaagggcttaccatatggcagccatggttctgggcactttatgaatttaactcctttgtgctatggttctttgtactccattttagaagaagcctgagaagatgatgcacagatagagaggcaccaggacttgagaggcaccaggacttgggaggcatgttgatccatctccaggaaagactgagaaaaagagcgttgaatataagaaaaaatacttcctctgttctcagatcgtatttgttttaaggccacacctttttgaagttttcagtttgaaacacaacctggactgaaatcatgagggaggttgtgtaggaaagaatcatcaagggacttagttgggagcttctctaccacagcttactccttatggtattaaccccctttaagtgtaaatgtctttggtttaaaacgtttgtacctcatctgttaccagagtgttcatactggagagaaaccctatgaatttactgaatgtgggggaactgttactcatatgttgcatttcgtcgaacgtgcaagtcatgctgaagagaaaccctgtgcttctaaggagtattgacaagcccttagctagatgacaatctcattgagaagcagaaaattcatgctggagagaaactagtgaaggtagcaatacttcattgaatattagaaaatttttctagagagaaagcattgaatatactgagtatgataacatttcctctcaaaccttatcccttactctgcatttgggagatcatacacagagaagccttataaatgtaagagatgtggaaatatcttcagccaaaagtaaatcctcactcatcaagaaatttttactggagagaaaccttgtgaatgtgggaaagcttccattcagatgtcacacctcagccagcagagaatttacagtggggaaaacccctttgcctgtaaggtatgtggaaaagtcttcagccacaaatcaaacctcactgagcatgagcattttcacacgagagagaaaccttttgaatgtaacgagtgt

SEQ ID NO: 91574 - DNA, 1015 bp, Homo sapiens
acattccttggaacaatttgagaaatacttagcggttctacttatgagtatgaatgctcaggaaatacgcactaggatatttactgtggcttgatttgtagtagccaaaaattagaaacaactgagaaagcccatcacgaacaatatgggaaattcttatgtaatactatatatctgtaaaatgcaacaaatgaaatccacatgtattaacagaaagatcccagaattgttgaggggggatcaagttgcagaatgatacagatagtacaatgacttttttgtaaatttgaattaaaagtttcctcataaaactcagtactatctattggtaatggatgcatatatgtatgtacatgtttttgaaacggattggaaggatacagaccaaactcttgatagtggtcacctgtgaagagtggagaagggaaaataatgagtgtgggaggtgggatgggtattggttaaaggggacttcagctttttatataaacatccacttctctttcaaaagacttcaagtaaatataagaagatactgattgattctggattgtggtatagggatatcttgtcttattttttgtacttttctgtatttttaaaatttctcaaaataggaatgggagtgaggatgggaatgctgtatctgtggaagtcatgttatactggattcatttccaattaaatactaaacattttatagaaaatatttctaaaattttatcacggatgaatggatggacttgctctctatgtaatatgaaattaatctattttattaaaatttaaaaggacagcacaatccaaatctgttttaattattttaacatggcatacacactatatcggggtccccagctccccccagctgcatggcaggaggtgagtggcgggtgagcgagcattgccacctgagctccacctcctgccagatcagcggtggcattagttctcataggagcgcgaaccctattgggaactgtgcatgtgaggaatccaggttgtgcgcttctta

SEQ ID NO: 91575 - DNA, 1137 bp, Homo sapiens
tttatatccagaatctccagcatcattgccacaggccaatcaatacgttttccctctggtcagacacatcagttccttttgatatagagacttgattccccatttcctgtttccttgttcccatctggtctggtttactctctcagtcacagctttcctgaaactttacctacttcctgaatcctatgttgtcttctttttttgtttactccctcgtttttgtggaccacatcctctagaagtttctgaagaaactcttcttgagtccttggatgtctacaaatgtcttttctcaacactcaaaacagaatgatagtttgtttatgaaagtctaggtcagagtttattttctccatcagaatattgaagaatcgttcttattgtttcttgcttttagaggtgttcttgagaattccattgcccctctaatttttgatgccttttatatgacctgctcttctctctggtggcttttaatgtctttatcccttattctgaaatttgactctcagctatttgggaaaagagagggagaaagatcacatgtatcgttgatttattatatgacaggtatagtgtgaggcattgcatatacaatttcatttaattggaaaagccctcttagctgaatttttgtaccttcccaaccttgtttggataatggaggtatcctagcatactcaggcagtttcatttggaggaaacagaatgacctggaaacccagtgattcagttgtgcttatttgtttacagtcctccactgcttcccagacattcatatgctcactatattttacttcctctaccttaatctttttcttctctctttccttcacaaaagtactttttaaaaaattaatgaagtcatatacgtggttattgttccaggagtcagtgatgttcagtgatgtgtccgtagacttctctcaggaggagtgggaatgcctgaatgatgatcagagagatttatacagagatgtgatgttggagaattacagcaacctggtttcaatgggtaaggacatctgtccatagtaatttagattctgcccttggaaggcctacttcctccaatgtgaaatgctcacctggctttcaaaaaccagtcgaattttgatatcctgttccacaggaatg

SEQ ID NO: 91576 - DNA, 1688 bp, Homo sapiens
taatagtgtattggaaaattcattttacattaaagtgacatgaatgtgggaagtccttcagcagcaattcaaaacttaaatactatgatgtttaataagtattatagtgtaaagaaaacccgtacccccaaaactcccacaacaagcattatcaatgctgtacttctaggagtatactcattaaagttaggatctagtcatggacactacttaatgtgttcctggaaggcctacagatgcattaagaaatagatatgagatgtatgaggatttgaaattaagagacaaaattatcatttttgtgatgttttgctacatatatgaattgtaaaactagaatcatcaaaattatttgttgttgaagcagtcataaaactgagactgagacagaatattgaattcagaaatgtgtgcatgaatatatggggaattggtaattgatagaggcggtatcccagattggtggggaaatcatggattacttaaaaattaattgactcttcatatggaaaaataatatctcccatcataatataaaatatttttcttatgaattcttaaagtactaaagactaaaatgcaaaaagcaatacttaataatataacagttttataagaagatgtttttaaaaccttagggcaggaaagaacttctaaaacattccagaatacccggtagttccactcttgagtatggtagtcccctattttctgcaagagatggactctaagacccccagtggatacctaaaacccagataggaccaaactctatgtctatgtttttttcttatatatacatacctatgataaaatttagtttacagattagacacagcaagagatttaaaacaataataaacataatatggaacaattataacaatatactgtaatcataaaagttatgtgaatatgatctttctctcagaataccttattgtactgttctcaactatttatgaactgtggtgactacaggtaactgaaaccatggaaagcaaagctgtggataagggggaactactatatatatgcatctacccaagaaacatgaacacagggagtcatgtactggtctatagctgtatagttcattgcaccatgagttatagtagccagaagttgggaaacaaatgctgtctcttgtgaaatagatgaataaaatgtgatagtaacatagtagagtactctctagcagttaagtgacaaattaagtctatatattaacagaaatatttttaaaaaattagagtgaagaaaaatgatgaacatattgtaatgatgcttctgtgaatttgaataaaatcaacactaaccagccctagtactaagaattggttatggataaattatgtaaaactaaagaatggattgaaaggatatgtatatactcagttcccaaaagtggagtggttacctctaggaagaaaggaggtggaagggaaatgttaccaagcatggtagttaaaggatacttcaattttgtatctatttcttattaaaaagaaacattctaagtaaacataacgaaatattaattctgggtggtggtaatatttgtgttcattctatcattcgtgctatttatttccttaaacttctgaaagttaaaaagtccagataggagtgaggaagctgtacatgaaacataatggacttacattcctagtcagatactaatattc

SEQ ID NO: 91577 - DNA, 1553 bp, Homo sapiens
ttatgcctgtaatcccagcactttgggaggctgaggtgggcggatcacccaaagtcgggagtttgagaccatcctggcccacatggagaaaccttgcctctactaaaaatacaaaaattagccaggcatggtggcgggctcctgtagtcccagctactcgggaggctgaggcaggagaattgcttgaacctggaaggcagaggttgcggtgagccaaaatcgcgccattgccctccagcctgggcaacaagagcgaaattccatctcaaaaaaaaaaaagaatctattttacagtaatacatttctgaaattatattaataatgggaaacttcaaaggtgttagtgatattatgttgatgataatgataacctaatttattggacgcttattacatgccaggcactatatattatattaactttttcaattatgatttttttgtacttccttttagaagaagcctgggaagtttataaacagataaagacgcaacatgaaagacttgtaagttaagtctcatctttctctgtgaaaagacagactgagggaaaatttaggaaacaaagtatttcctctgaacagtcattgattcttcaagactacccttctgtgtatggaactcagtttaaaagaatttgaaacctaatttatatacaatctatacctaaatatgggagaagctatataagaaccattaagaatataaagagaatgttacattttatccctttttgtaatcatctcatctcagggtaatcaatgtgagaaaagtcttccatcataaatttaacttcattagatacctgagaattaatattgaaaatacaccatatgaatttagtgaatgtgggaaagctttcatccttattacatcttatttgatactagggaaatctcctgattaaattcacatgcatgataggcatgttggaaagtcttcagcatgaatcagatctccttcagcatgatcaaattcatactggagagaaaccttatgaatgtaatgaatgtagaaaaacttttagcctgaagcaaaaccttgtagagcataagaaaatgcatactggagagaaatctcatgaatgcactgaatgtggtaaagtgtgctctcgagtctcatctcttactctacaccttagaagtcacacaggaaagaaggcatataaatgtaataaatgtggaaaagccttcagccagaaggaaaacttcctttctcatcagaaacatcacactggagagaaaccttatgaatgtgaaaaagtttctattcagatgccaaccatcatcagacaccagaaaaatcatacaggaaccaaaccctatgcatgtaaggaatgtggcaaagcctttaacggcaaagcatatctcactgagcatgagaaaattcatactggagaaaaaccatttgaatgtaatcagtgtggaagagccttcagccagaagcaatacctcattaaacatcagaacatccatactggaaagaagccctttaaatgtagtgagtgtggaaaagcttttagccagaaggaaaacctcattatacatcagaga

SEQ ID NO: 91578 - DNA, 1144 bp, Homo sapiens
ctcactgttcatcagagaactcacacaggagagaaaccctatatttgcaatgaatgtgggaagtccttctgccaaaagacaaccctcactctccaccagagaattcacacgggggaaaaaccctatatttgtaatgaatgtgggaagtccttccgccagaaggcaatcctcactgttcatcacagaatacatacaggagaaaaatccaatgggtgtcctcagtgtgggaaagccttcagtaggaaatcaaacctcattcgccatcagaaaactcacacaggcgagaaaccatatgaatgtaaacagtgtgggaagttcttcagttgtaagtcaaacctcattgtccatcagaaaactcacaaggtagaaaccacgggaattcagtaagtaatgtggctttttttgtaaaaaaatgttaagtcatagtaaaccctgtagatgatgttgcttgcaagcgtaatatccaacagtttaaggtactataccacatggtaacctactgtttgccagcctgtaaaacacacacacacacacacacacacacacaaatattattagacaaattagatgacaaaaatcattaagaagtccaaactttttttttattactagcttcagcagacaaaaacttcctctgtcaaggtgttataaacatttaaaatcacattttccatttccatacatatctttttgttcatcagtaataactagttggccaactgactgtggtccatggactacacagtgagtagaggttctttaaaagaaggaggtatgaactgtatttctcattgcaaatacaaaataaaaattagttgttacctcctcacagttgaccatgattctgacttctaacattacaaattagtttttactattataaacctttctataaattggattatatatcatgtattctttcatatacagcttattaccttcatcatgtccgtgagtctaatcattagtacgtgtggcagaagtttatttatttttatccagtatagaattcaattatatgattatatcacaatttatccattctgctgttgatggacttttacattgtttacagcttagggtcataataaatcatgcttctgagaacatacttgtcttggtgtacatacatgtatttctcttg

SEQ ID NO: 91579 - DNA, 1033 bp, Homo sapiens
cgcgccttctccacatccgggcgtttccggccttggactacatttcccacaggcgcccgggcggttttcgaactttgatctctggttccccttccaaattctcatagtgcgtggctgggatgagggcggcgctcacggtgaggaagccccgagctcccgggacgcagacagggtgtgcagggccgtagctcgggcctgtgtatgcacctgtgcgtgtgtgtttgatgccaggacaaggcggcggtgtgcgcggcgaggaggctgcgacaggtgcgtgattgtgttcctgtccctgctcggatgcgggacctttgggtggccgtggtcggctgtcgggtgtgtgacactgtagggtttgagaccttccatcatgacagtgctgctgtggccgtgtgatggaagagccttttaggtctgtggtgttgtgtgtgtaacgggtaaagcttcatttctgcagtgctgtgtttaatgttgggactgaggggtctgtcgaagatctccccaatgtgcctgtgaggactatgatccatgcctatgttaagcagagtcatcttgcaatgaagcatggcccgcgttgtcttctcagggcacacctgtccccagttctcagcctggtgtttgacacaggggatcctggcggagtgcccacctaagcggcagttttagactcgattgtttcttgggctctgcatctctgagttcccagcttccttttttctcccgctttatagctgtatagaccccagctgcagtgaaatggccatcaaaaagggaagggataatcgagtggtggaataaaatctgcaaacagaaaaaggacagacctgttttcggaacgaggcttttcgagttgtaagtgtcccttaagcagagttctgggaagacgtcgtggggagaacctaggagtaggattccttcctcagaggctctcccttgggaactctcagaggtcaggttccatgtgatccacatcattcccagagctgtctccgcaggagacttaacgtgaattttgagaaagtccccagtcctg

SEQ ID NO: 91580 - DNA, 1038 bp, Homo sapiens
taagatgaggttgagcacagtggctcatgcctgtaatccaaacactctgggaggttgagacaggagtatcacttgaaccaggagttccagacttgcctggacaacatagggagacccccatctctgcaaaaaataaattagccaggtgtggtggcacatgcctctggtcccagctactcaggaggctgaggtgagaggactgcttgggcccaggagtttgaggctgcagtaagctgtgatcaccccactgcactgcagtcggtgatggagcaagaccctgtctaaaacaaaacaaaacaaacatgtaagactagaaaactgtacaggctacaccctgaagaatagaaaatcctatggaaaatttgccagggcatgctaaaagactaacatttttataataaaagtagatgggatagctcttgaacatcaaattccagaaaaatttcactcatgaagatacatgaaaaaaacttacatagatgaacccaatatttaatcaaagaataatatagtagatatttgcttataatgtttaagctctgagcaggatggataatttttatttttgaggtggagtctcactctagttgcccaggctggagtgcagtggggtgatcttggctcattacaatctctgcctgccaggttcaaatgattctcctgcatcagcctcccgagtacctgggattacaggcaccctccaccatgcctggctaatttttgtattttcaatagagatggggtttcaccatgttggccaggctggtctcgagctcccgacctcaggtgatccgcccacctcagcctcccaaagtgccaggattacaggtgtgagccaccgtgaccagcctggatgggtaattctgaatgatgaaaagttactttatcaatttcttctaagtgaagttcttggtatcttttagtgttacatgagttaagaaatggtgactatatgtacacatatttagcacattttgtaagtcacacctttaacaggtagttccctcctaaattattgtcatctatggaatttcacaa

SEQ ID NO: 91581 - DNA, 2510 bp, Homo sapiens
gctggtctcaaacttctgggctcaagcaatccatctgcctcagcctttccaagtgctgggattaaaggtgtgaatcactgtacctggccttcaaactatttttctgtctgaactatcacccataattatctcctttaacctaaatgcagcataccctgctattgagatcctagtactttggtaactctggatcagattacttccctcatattagactgatattctgctatttcccagcattcctatttttaagctctgaattatataagacattcatcatagtacttggaaacttgtaggtattttatgacttattattctgttattgaggtgatacctggataatcattttttattgagctcctcagatgaatatgatcaaaataaaacatatttctcatcacttgactcaacttttatttcttttaaatttctacttatttcttgccctttttttcatattgctcatatttgagaattttctaagccattcacttctcatatgctttacttcaagattttctatatctattttagaagttgtattgctttttgtacatacaaccgtatgatgtttttaccttcttatttttcagacatgcagtcgaggtgtcagaccaagaagttattaccaaaaaatggcatttttgagagagaaatagcccaattggaaataatgagaatttgtaaaaaccacagccttgactgtttatgttttagaggtgactgggaaggcaacactcagtttcaaacacttcaagataatcaagaggaatgcttcaagcaggtgatacgcacctgtgaaaaaaggcccacttttaaccagcatacagtgtttaatctacaccagagacttaatacaggagacaaactgaatgaatttaaagaactggggaaagcctttatttctggttcagatcatactcaacatcagttaattcacacaagtgagaaattctgtggagataaagaatgtgggaatacctttcttcctgattcagaagttattcaatatcagacagttcacactgttaagaaaacatatgaatgtaaagaatgtgggaagtcttttagtttacgttcgagtcttactggtcataagagaattcataccggtgagaaaccttttaaatgtaaggattgtgggaaagcctttagatttcattcacaacttagtgtccataagcgaattcatactggtgagaaatcttatgaatgtaaggaatgtgggaaggcctttagttgtggctcagatcttactcgacatcagagaattcatactggtgaaaaaccctatgaatgtaatgaatgtagaaaggcctttagtcagcgatcacatcttattaaacatcagagaattcacactggtgaaaaaccttatgaatgtaaggagtgtgggaaagcttttactcgtggatcacacctaactcagcatcagagaattcatactggtgagaaatctcatgagtgtaaggaatgtggaaaagcctttattcgtggttcaaatcttgctcaacatcagaatgttcatgttggtaggaaaccttataaatgtgagaaatgtgggaaagcctatatttggagctcacaccttgctcgacatcagcgaattcatactggcaggaaaccttatgaatgtaagcaatgcgggaagacttttacttgggcttcgtatcttgctcaacatgagaaaattcacaatgagaggaaatcctatgaatgtaaggaatgtggaaagacctttcttcatggctcagagtttaatcgacatcagaaaattcatactggtgagagaaactatgaatgtaaggaatgtggaaagaccttttttcgtggttcagaacttaatcgacaccagaaaattcatactggaaagaggccatatgaatgtgaagaatgtggaaaagcctttctctggggttcacaacttactcgacatcagagaatgcatactggtgaggaaccttacgtatgtaaagaatgtgggaaatcttttatctggggttcacagcttacacgacataagaaaattcatactgatgcagaaccttatggatgcaagaaaagtagccacatctttagtcaccattcatattttactgaacaaaaaattcataatagtgcaaatctctgtgaatggacagactatgggaacacctttagtcatgagtcaaactttgctcaacaccagaatatttacacttttgagaaatcctatgaatttaaagattttgagaaagcattttcttcaagctctcacttcatttcactcttgtgaaatattatataaaagtgtaggaagggctttattcatgactcattaattgatgtcatttatttttttctcttgaggaacaccacaaatgtaagtaatattggaaggcattttaacagagcacacatccagcagcagcagcagcagcagcagcagagaattcatcatgcaatcaatataggaaagaaattactgatcagttatcaattgcagaatatcagggtaaaattttatg

SEQ ID NO: 91582 - DNA, 1203 bp, Homo sapiens
agctgtgaaccccagataaaagatttcccacattctttacatacgtaaggttcctcaccagtatgcattctctgatgtcgagtaagttgtgaaccccagagaaaggcttttccacattcttcacattcatatggcctctttccagtatgaattttctggtgtcgattaagttctgaaccacgaaaaaaggtctttccacattccttacattcatagtttctctcaccagtatgaattttctgatgtcgattaaactctgagccatgaagaaaggtctttccacattccttacattcataggatttcctctcattgtgaattttctcatgttgagcaagatacgaagcccaagtaaaagtcttcccgcattgcttacattcataaggtttcctgccagtatgaattcgctgatgtcgagcaaggtgtgagctccaaatataggctttcccacatttctcacatttataaggtttcctaccaacatgaacattctgatgttgagcaagatttgaaccacgaataaaggcttttccacattccttacactcatgagatttctcaccagtatgaattctctgatgctgagttaggtgtgatccacgagtaaaagctttcccacactccttacattcataaggtttttcaccagtgtgaattctctgatgtttaataagatgtgatcgctgactaaaggcctttctacattcattacattcatagggtttttcaccagtatgaattctctgatgtcgagtaagatctgagccacaactaaaggccttcccacattccttacattcataagatttctcaccagtatgaattcgcttatggacactaagttgtgaatgaaatctaaaggctttcccacaatccttacatttaaaaggtttctcaccggtatgaattctcttatgaccagtaagactcgaacgtaaactaaaagacttcccacattctttacattcatatgttttcttaacagtgtgaactgtctgatattgaataacttctgaatcaggaagaaaggtattcccacattctttatctccacagaatttctcacttgtgtgaattaactgatgttgagtatgatctgaaccagaaataaaggctttccccagttctttaaattcattcagtttgtctcctgtattaagtctctggtgtagattaaacactgtatgctggttaaaagtgggc

SEQ ID NO: 91583 - DNA, 1018 bp, Homo sapiens
acttggtactttgttatcgtatcgtttaaaaacgaatacataggagaacctttgataatatgtatcctaatttgttctccttacctgttttaaaaaaattattataaaggttaacaaaatggtcttactttactgtcattcaaccagtatgaattccctcatggcgaatgaggtcagagcgactaccaaaagcctttccacattccttacagtcatagggtttctcaccagtgtgaattctctgatgtcgagtaagatttgagcctttattaaaggccttcccacattcattacattcatatggtttttcatctgtatggattctctgatgttgaataagttctgagctctgaataaaggcctttctacattcttcacattcatagagcttctcaccagcatgaattctgtgatggttagtaagtgttgaggcactattaaaggccttcccacactgcttacattcataaggtttctcaccagtatgcattctctgatgctgaataagccttgagtgttgagtaaaggctttcccacattctttacattcataaggtttctcaccagtatgaattctcagatgtagaaaaagttgtgaacttttagtaaaggcttttccacatactttacattcatagggtttctcaccagtgtgaattctctgatgatcattaaggtttgagcaatacttaaaggcttttccacattccttacattcatagggtttctcaccagtgtgaatcctctgatgttgagaaaaatatgaactacaactaaaagccttgccacattccttacattcatagggttttttaccagtgtgaatcctctgatgtcgagtaacgagtgagccacgactaaaggacttcccatactccttagattcatagtgtttttcaccaaaatgaattctctgatgttggataaattgtgagttttgattaaaggtctttccacatatcttacattcccatggtttctcttcactcatagttttttgaggtggaataagaaatgt

SEQ ID NO: 91584 - DNA, 1049 bp, Homo sapiens
ccctcccacctcagtctccctagtagctgggactacaggtgcacggcaccatgaccggctaatttttgtattttttgtagagatgggattttgccatgttacccaggctggtctcgaactcctaagctaaagtaatccgcctgcctttgcctcccaaagtgctgggattacaggcgtgagccacagcacccggcctagtttttataatcttaaaatttacattttgcactgataaaatcaggaggaagatgtatagctatttttaaaccagaattattaagccagtctttttaaaaatttctgtttttgagctagcagttcttgtgaggttgtggggttatttttgcggggtgcgggggggtacttgtttttttttttcttttttttttgcaattttataactatttgatgtatttgacaatcagtgattagttctcatccacattgactgtctgtagatttttgaaagtggtaacagatacatagataaccaaagtatagagtttatttggtgaatcttcatccccattacgtattctggacaaccgcacatggattcgttatgggacattccttattcctttggcccagacagctttgttgagcctggtatcagtgcgcacatctggagttcccatctccttcatggcaaatttctgaatctctttgagtgtccgaggggcacgcttcttgaagcccactccatggatgcgcttgtgcatactgatggtgtattctcaggtcaccaccttgtggatggcagaacggccctttttcttctcaccacccttctttgtgggagccattctgccggatccaagttggaaagacttgtttattttttaaggctagcacattcaaactactagaagttttctgtgactgtctttgcactacaatcacacacttggatagcccacaaagctgaaaatatttgctatcttattctttatttaaaaagttgcccaacccctgctcgctatgaaccagagtagcactcctttaattttgttgttttattttcagctttattaaggtataattcacat

SEQ ID NO: 91585 - DNA, 1066 bp, Homo sapiens
tggtgaaaccccatctctactaaaaatacaaaaattagctaggcatggtggcgcgcgcctgtaatcccagctactcgcaggctgaggcaggagaatcacttgaacccgggaggcggaggttgcagtgagccgagatcgcaccactgcactccagcctggcgacagggcaagactctgtccccaccccaccccacccccccaaaaaaagaggggaggttgtgaaattgtctgggagataataacactgcggcttatgtgcggatatgggatacctgtcactgtgggggttgtggctgtgtgttcccgtggtgatgtgtgattgtgactctgcgacagtgtggggtgcctacgattgtgcagctgtaattgtgtgtttcctatggtgtgtatgtgattgtaactgtgttgccgtgtgtggctccttgtgggcaggtgagacgtgcatgtcgccttaagtgtgactgtccctaaatgtatgtggcattctgtgtatgagtatggggtcctgtcaactatgcgattgtgactccagaactctgtctctaggaaacctctctgaggtctggtcagattccaaccctggacagcagtgaacacaacctttcccctgagccactggaattggacagaatgccccattctcctctgatctccattcctcatgtgtggtgggtaatggggctggggaagaactcttacttgactaatctgggtaccaagaaaaacctggtgtctcacagttactcttccctctcccaattttacctttctccaggtgtcacccagaagaggaggaaagaatgcatgatgaacttctacaagcagtatccaaggtgtgttggggtttcctctttttcttctgaaaattcttgcttaaaggaatgtcatttaattataggtccctataattttcccatcacagaaaaggatggttgctccacttatgcttgctgaattttcttctcaaatatttattctgatttaaaaataaaaggatgattaatttagagatctcaaaaacacagcattaccaagaaaaaataaaatttagccactcagataacta

SEQ ID NO: 91586 - DNA, 1008 bp, Homo sapiens
ccacgccgattcctgtcagctcctcgcctgggcccacccgaaacggctgctccctcaactctcaacatccagccgagcctcggagttgcgggtcgccgtagcgctgcgcaatggagatgagcctcccggggaacccggcccaagcctcaccctcacacaggaaagcagatgtgttctggccggaagttgagtggggccgcggggcctgctgggaggtgttgtcctcggaaacgtcgctggcgcggagggatggttcggcgctttaggcgtctgtcacagacctatctgcgggtcgccttcacccagcatctcagaaactgcgcgcgggatgaacattcgggtgtttccggcaggtgacgctgccgagtccccgcagcagggggcgagcaagggactcgcggttgacgggacacggatcctctaaggcccagagtgtcccgagtagcggcagtggggagtgctcagggtacgctaatggtgagtggttgcagttgatgggacaaaaaactgtgatgggagttagtgtgggtgtgtggttgtgtgtgtgagtgtgacggcacgaataatctgatggggtgattgtgatatttggttgcgcgggattatgatgaaatgtgtgatatgtgtgtgattatgattaaggctgtagcgagtgtgaacgtggcgaagtgtgcgtgattgtaatatgtctagtagttcttgtcttgagctggcttttctgtagcatttggcacagttggtaacggcttgaaaaacacttatttgttttctactgatcctccctccttgttggccactcctctgtagtcttctttgctgtcttttttaccctagtagcccttggccctttgtaattttccactattccttggcgaacttttcaggttcattattatcttatgacttgctgcttttatgtatgttagttagctattgccatgataataattatgtctaaaaaccacccctgaactcaatgccatacaacagcaagtccttactctcctg

SEQ ID NO: 91587 - DNA, 1793 bp, Homo sapiens
atacaaaaaagttagccaggcatggtggtggatgcctataatcccagctacgtgggaggctgaggcaggagaatcgcttgaacctgggaggcagaggttgcagtaagcagagatcaggccactgcactccagcctggacggcagagtgagactccatctcaaaaaaaaaaagaaaaaaaaattttaaagatcatcccaatctttaaatttttggggtaactattattatgtacttaagataaacttcctgttagaaataaaacagcaagattctagggagataaaatattgccaatagattcattgggcactgcatacttagccctccataaatccccatcagaccccatatgattaaattagccatctgtgtccatttcagtgtctatagctagatggcagttaacatttcttattgcttcaaggatcattcatctgtagagggtcttctagccacctggtactgaagatttctatattcctttgtctgaaactttgaagcaaatctgtttcatttctcttccctcagcttggtgttctcaagagtctgccctttccgaggaagaagaggatacaaccaggcctcttgtacgtcttaagcatttatttgtttcctgcattattttgcagtgcagttacggtgggttcttgtaacctaccaatgtgttggaaaaaataaattgatgaaaataaaagtgagaaaaaatacagatagaaaatcagaacctggggaaatttgagatatggctatgcagaagcaggtacatacagaattattaaagttgagttcaaatttaaatatgatctggacagtcaaagcaaactgggacacttaagtttattccgtaagtccataagttgcaccatttatgaggaaaaacttacaattatttaagtaaaaggcttttaactggcaccttgttcaaaaagaaactctaaaatatagttggacttctgtatctgtagattctgcatccatagattgaaccaactgcaaatcaaaaatacttgaaaaaaaaatgggtggttgtatctgtactgaacatgtacagacttttttcttgtcgttttctaaacaacatagtgtaacaactatttacatagaaatcacattatattaggttttataagtaatctagggacgatttaaagtatacgggaggacgtacattggttacgtacaaatcctacaccattttatataagggacttgagcatcagtggattttggtatccgtggggggtcctggaaccaattctacatggtttcctagggacgactgtaattccttaattcttacaatttttagcttagcttttagaagttggtcttggccaaacttcaaaaattcaaattacctggaagagtaagtggaacacatatctttcaaatgatcctacgtatatattttcttcaattgagtttttaatccaagttgagctaaattatactaatattctatggcagaatcttatagttctgatatccatagcttttcacatcttttttatggtctcagaagatatagtcttcatcctcatcttacaaaattacgtattctctgctcttgattctttttgtttccacctctgaagtcactcacacacctatattttgaatgttttctgcttaactgcctctttttcttcagcttatgtctttcacatcatgaaatatacacacatacttcttttgaccatatgatcatatggctcatccagttacttctgttggcgcggtggccctagcaaacctctctggccctcgacaggcttgagtttaaatcttggct

SEQ ID NO: 91588 - DNA, 1774 bp, Homo sapiens
ttatctatttctgaaacattcatcagttgattattgtgtcaagctctgttctgagtcacatttactgtgttatttagtcttcacatcaaccctttaaggagaattccactttatagatgaggaaactgagactcaagtttggctatttgtcaaggtaacacaattagtaaattttgaagccagagtttgaacccatgacattggataccacagcctattaactggtaaaaaatatctaaacccagctccgttttgaaagtttagtatttcagcattttttttcagtcagaaatgtgtcagtcacatgtctgttcagcctttctgctgcttttgtgaatagaaaacaggcgttcattcttatccttggggtctgcaggttaactatgtgggcatctctgctttgggctgcagatcagctggccttggcttaggctccacagtgggcttgtgtctgctctgcatatattcattctgagtttcagctgaaatggcacagcttcctgggccaaggtcttcatttgctgtctcactggagcacatgagccaaggtaaagggtgtaagcaaatttcaggcctttgctcacatcatgtttactgacattccttttgccccaacaaagggctcagacaaggcccacattagtagatgggacattagtacaggcaggaagtgaagactcgctgaataatcaatttatcacagtaatattttctaatggaattattttttgttgagtttgtttttgagaccaggacttgctgtgttgcccaggctggagtacagtggcatgaacttggctcaggtgatcctcccgcctcagcctcccgagtagctagatgataggcatgtgccatcatgcctggctaatttttttattttttatttttcgtagagatggagtctcactatgttaccaaggctgttctcgaactcctggcctcaagcagtcctcctgcctcagcctcccaaagtgctacgattataggtgtgagctactattcccagcttcactgagattttttaaactttaaacatattgaaatatagtcttataacttaaaaaaactttattaacatataagtcacatactataaaattagcccatttaaagtatacaagtgagtggtttttagtgtattcacagagttgtgcaaccatcaccataatcaatgttagaacattttcatcaccctgaaaagaaaccctttacctgttagctttcacttcctgttttcccttaaggctctgatgtaggcaagaataaatgatttctagctctatggatttgcctattttggacatttaatgtaaattgagtcatatgataaactgttatcctttgtgttgcctttcgcttagcattatgttttcaagtttcatgcattttgtagcttgtacgagtactttttatttctgaataatattctcttgtagggatataccacattttctttattcattgattaatggaaatttgattcatttccccttttaggctattatgaataatgctgataagaacattgatgtacaagtttttatgtggtcatatgttttcacttctctgaagtttgtacatagaaatgaaattgctagatcatatggcaactctatgcttaaccttttaaagaattgccccactgttagccgagtgcaatggctcatgcctgtaatcccacactttgggaggctgagatgggcagatcacctgaagtcaggagttcaagacccacctgaccaacatggtgaaaccctgtctgtactaaaaataa

SEQ ID NO: 91589 - DNA, 3826 bp, Homo sapiens
ccaaccattatttctttgaatgttttttctgcacctttctctcttcttcttctagtactcctacctctgacccctgagtaccagctaaacaagttcttgtatgttgtgatcacaatgcctaattttgatgacttcaaattaattagcattatgtttttacaggaaacagtgacatttaaggatgtggctgttgaccttacccaggaggagtgggagcaaatgaaacctgctcaaagaaacttgtatcgagatgtgatgctggagaactacagcaacctagtcacagtgggtaaggtggcttggtagccttgcaatttaacagagaattcttttccatttctgaaatgtgtgaagactgtaacttgccagatgaatctagcctttcctttctccatgtgactatatgtgctccactcttcagtgttaaaggctgattactttgtgtcattgtgtaagttcattcatcctcatcttttataagccctcaagcttggacttagcctaagatctgaatggttgtctccagcattgacatccacatcctttgctatttcttgtaataggctgtcaagtcaccaaaccggatgtgatattcaagttggagcaagaagaggagccctgggtgatggaggaagaaatgtttgggaggcactgtccaggtgaataagtgaaaagcagctctgaatgagaaagccacatgagagttgttcagtgaagggttgatatcatttcacaatttccaagattttcttaaaggccttattcttctagagtgacaaatgggatggagtgctttagattactgtgacatttctaggtattattcttcctattttgcagatattttcctcttttaaattgtagagggccagtagccctatccaatttcataataccaaccttccctaattcattcacagcttcactttcaggattattgttcctctctctatgatcctcgggcactctctttcctttatgtttatggtttcattttcttatgcattcagtatttcatggttgtgtagtaattttaaaacatgtttcacacttaggtttcttttcatttctttccttctttcttttttaaaaagccttagatttgtgtttggttaacaatagtttcacttcccattgtgcttcacaaccctcacaatcccatggcttagaaatgtaaaagtttctggcttagaaatcccatggcatctcctttctgcttattcctgccttccattcctttaatttttttgaaactacatgaggtccatccttggttgaaaagatataaccaatgtaaccaatattatacctataataccaatattataccttttgtgcaaaagtaaatcttcctcttatcctggacatggtcccttcctttccacagttgcatacacttcttttttggagttatcctggctatttttgattatttattttaccatatgaattttagactaaactgtctatttccagagaaaaacctgttggaatttttattgggattgtgctaaatatataaattaactttcagaaatttaacatccttttaatgccaatgttttctgtctaagaacacacactgtctttgttcagattttcatatctacttctgtgtcctttagaaatggagctttccaagttttcccattgttgcttttatacatttcactataataatgggtaagaaagctataaaaccatccttatttacagataatgagattgtatccctagaaaacacaagcaaaccaattgagaaagtacaacaaatagtaacagaactcagtgaggtggtaggatatcaaattaacaaagaaaaatcaatagctttcatatatacttcaacaaccaagtagaagatactaaggaaagaaaactacatttatagtagtaagaacaaagatgaaatactcttctgggcatggatatataacagtataccaaacaaaatcctgtctttatgagcttataatttaatggaaactagagtccctgaggttttgcatatgggaaaatatctttttaacctttacatttggttgatagttggctgtgtgtaaaattcttgaaccatactttcttttccaaagagttttacagacagttacctgagggatttagacaattctctgttgtttcctagattcaaatgttgcttggagaagtctgaagcctgattatttcccctcataggtgacttattttccaggatgcctataggtttctttttctttaaagcttaagtggctttatgaggctatgccttggaattgatcaatcagtatcagtttttcctttcagcttgtggattcatgatttttgttccttgaaatgtcgtcatatagatttcatgctcgtttcttttgtggttatcattgtcatctttcgatgaaggtatttcctgctgtagccactgtttacagaaggatagtgttgaagactgtccagaaaaatactctgagttggtaagaagtctctatacctcacactgacctcctttatcatacaaggttttgtgttgagagttggtttaccctttcattctcccaagttaaagagagattattatttgcatacttcctctagaactcagtgtctcttccatcttcctatgctaacaaactgcttatataagaatactggctgtttgcatctctttgttcagccctgcctttgtaccatttgtcagggccagatgaagtccattctgtacctgccacaatttcaagacatctggcaaaaaaatgactcattcattctgcccacaagggggtgcctctgttttagagaactctgttccctgtactttttgttggagataagaaacaggaactgctatctctgggtttcttccctgcctaatccagtctattttctgttctttcctcctattctggggatggagtttagctatctttaaggttcattgaagatgtattttctttctttttttttttttttttttttttttgagacggagtctcactctgtcatccaggctggagtgcagtggtgcagtctcagctcactgcaacctccgcctcctgggtttaagcgattcttctgcctcagcctcccaagtagctgggactacaggcacgcgtgaccatgcctggctaatttttgtatcttttagtagagacggggtttcaccatgttggccaggctggtctcgaattcctgacctcgtgatccgcccacctcggcctcccaaagtgctgggattacaggcaagagccactgcatctggccagaagatatattttctttttctgtttcttcttcatgtttgcagagtgaagaggagacagagatgtttaattctaccatattgaaacaggaagtcctctatgctgtatttgatccatttcacccttcttggaaatgtctttcttctttgtgcttctctaaaggattcaaattcttccttggttctggtttattgtttatttcttcttcccttgtgaaatatcttttacatgacttctttctcatctctcactggacatcacccaaagtagttctgaattacaatagacttctttttcctcagagtaccttcatgctatatctgtgttcatgctattaaataggtatttaactctagaaatgacagcattggaatatgtatctttaatgcctccagaattttgaaactcttcatatctctgccattaattatgagtgctcttacctaagttctagcagttatttaactttaatatcattttctaataaatggtcctcaatatttccagcctacattggtcttgcccatctctcaactaacattctattacacgtctaccagagtggttggaat

SEQ ID NO: 91590 - DNA, 1497 bp, Homo sapiens
gtggcttcatactggagagaaatcctgtgaatgcaggaaatgtaagaatgcttttaggtaccagtcatgtcctattcaacatgaaataattcataataaggaaaaagaacctgaatgtggagaatgtaggaaaatctttaatagtggatcagacttgattaagcatcagacgcttcatgaaagcaaaaaacatagtgaaaataacaaatgtgcctttaatcatgattctggaattactcaacctcagagcattaatactggagagaaacctcataaatgtaaggaatgtgggaaagcctttcgttccagctcacaaattagtcagcatcagaggatgcatcttggtgagaaaccctataagtgtagggagtgtgggaaagcctttccatccactgcacagcttaatctacatcagaggatccatactgatgagaaatactatgaaagtaaggcgtgtgggaaggcctttacccgtccctcacacctttttcgacatcaaagaatccatacgggtgagaaaccccataaatgtaaggaatgtggaaaggcttttcgttatgacacacagctgagccttcatcagataatccatactggtgaaagacgctatgaatgcagggagtgtggaaaggtgtacagttgtgcctcacagctgagtctacatcaaagaattcatactggtgagaaaccccatgaatgtaaggaatgtgggaaagcctttatctctgattcacatcttattcgacatcagagtgtccatactggggagaaaccctgtaagtgtaaggaatgtgggaagtcctttcgtcgtggctcagaacttacccgacatcagagagctcatactggtgaaaaaccctatgagtgtaaggaatgtgaaaaggcctttacttgtagcacagaacttgttcgacatcaaaaagttcacactggggagagaccccataagtgtaaggaatgtgggaaggctttcattcgaaggtcagaactcacacatcatgagagaagtcacactggtgagaaaccctacgagtgtaaggagtgtgggaagccctttggtggtggctcagaacttagttgacaccagaaaattcatactggtgagaaaccatatgaatgtcagcagtgtggaaaggccttcattcgggcctcacaccttagtcaacatcaaagaattcattcaggacagaggagtgaatgaagaaatgagggatggctcagaatttgattgacatgagaaagttcatactgatttggaaaaaaaaacttatgattctaagtgtgagacaccttataaatgttaggaattagcagggatttatttatgtttcagaatttattacacatcatgatacaactggtgaaaaattgaagacctccatgaatgtaaagaaagtagggaggcctttttggtggctcagaacgaagtcaacctcagggaattcaaatgggggagaggagggcagtgaatatgctgagaggagttaatcattcaga

SEQ ID NO: 91591 - DNA, 1035 bp, Homo sapiens
ggtggcgcacagctgtaataccagcaacttgggaggctgaggcatgagaatctcttgaacccgggaggcggaggttgcagtgagctgagatcgtgccattgcactccagcttgggcaacaagagtgaaactccatctccaaaaaaaaaaaaaaaagaaagaaaatgtaaatgccatatatatgggacaccaatttgctttagctaacaaagtattcatctgacaatacttgaggaaggctagagtagtatttaaaatgcagcagattctttcatcccacataaatcttgttaaatattcacgagctaattctctaaaattaactggagctgaatcaatgtggggaagaatttaaccaatgtttagtttttactcacccttatcattattactcatttcttttagggtgaatttattaactacatctacattttctcatttataaaatagtactgttagcaccatatttcttagctgcattgtgggggttaaatacatttatattatttaaagcagtgtctgtctagtattgaaagtgtgctaaatgaaggcgtttattgtttttctttgttattttcttaatcatgcattattagacatgagaggaaggacttatatttgcagtgactataggaacatattgcatcatctctttttctttattgaaggttaggtaattccttctggagaaaaatttaatactgtgaagcctttatttatagctcacccttttgccttactaggcaaataatgtgaagaaacccagtagaataaaagtgggttgctgtgaagtcaggcggaagatttagatatttatcaaaacttttcaaaaggctgggcacagtagctcaagcctgtaatcccaggaatttaggaggccgaggcgggcagatcacttgaggccaggagttcgagaccagcctggccaatgtggcgaaaccccatctctactaaaaatacaaaaaataagccaggcacgatggcgtgcatctgtagtcccagctacttgggaggctgaggcaggagaatcacttga

SEQ ID NO: 91592 - DNA, 1015 bp, Homo sapiens
atgatgaaacaatgaagaactgccctttccctggacttggtgcgaaataagaaactgcaggagtatgttgtaagtttatttttatttttatttatttatttatttgagacagagtcttgccctgtcgcccagactggagtgcagtggcacaatctcgactcactgcaacctccacctcccaggttcaagcgattcttgttcctcagcctcctgagtagctgagactacaggcgcctaccatcacgcccagctaatttttttctatttttggtagagacagggtttcaccacgttgcccaggcagatcttgagctcctggcctcaagtcatcagcccgcctcagactcccaaagtgctaggattataggcgtgagccaccgtgcccacctgcatatgttgtaagtttatactccactttttacaatatatctgaggcctggaaagttatttttaaagacatttttatatatacacacattcaactttcgtaaagtttatattcagctttttatagtacatctgacattgtagaaaagcattttcttatatatagttgaaatatatattcaactttgatttagtaaagtatatgaaaaacataatttacattcagcattttatagtgtatgtttatattcagctttttatagtatatgtgaaatcctagaaaagtattattttcctgaataagaaccaggaagaaactgattaaagagctataccacataatttctctagtactagattatcttacagtcttctacctcttcaagatacaaaagtcatggctgtgaggctatcattacccttttaccaaagttggaaaaggacagcatccaaaataagtcagctataaaaaaaagtaaagtcggccgggtgcggtggctcatgcctgtaatcccagcactttgggaggctgaggcaggcggatcacttgaggtcgggagttcgagaccagcttggtcaacatgatgaaaccccttctctactaaaaatacaaaaactagccaggcga

SEQ ID NO: 91593 - DNA, 1414 bp, Homo sapiens
cgtctgacgcctgcgcactgagcgcgggcgggcgggcactcccagaaacctccggggcgctgcaggcgggacaagcaggttccacaggccgagcccacgagcccctcgaggggtgagcggcccgggcctcctggcgttctggccggctagccaagcgctggactacatttcccagaggcacggcgtccggagcgctggactacatttcccagaggcaccgctcccggagcgtagcttcatttccgttagtttgcgagatttggaggcctcgcgtggggagagggccgcgtctgtggaggagcttggctccgcacctgctgggctggcgaacccgaaattgggcttggaacccgggagccagatcttggaccctgaactgcacctctgtcaaggtaggagtgtccgggatgccggagcggacacgcgcggagaaagcgtcgctggggttactcgtgtggccgtgtctccggttttgtgtgcaggctacagcctgcctggtattggcgactgcctgtgcatacacgactggacgtgtgtggctgtggttttgtgtatgagcatttgtatgagtgtgagttgtgactctgagggtgtttgtgactgtttgcttacctggctgggatatacttatgtgactgtgattttatgtgtgccgcgtgtataattggggtttgcctgtgactatgaagtgtgtgacagttgtgacaagagtgtttggatgttcttgtgtcactttgaggttgtgtgtaaacctgatatcgtgggatggatttgccagtaaatttaaggtgtgtgacagtgttgctgtgacacggtgtttattaccgcgtgtttccctgatttcgtactgggttgggtgactgtctgattgtgtgtgactgtggggttgtgtgtgctgttttcatgactgtgtaaagagactaaaattgcagctttgaaagggtgtttttggcggtatgtgtctctgacaaggtgcttggatgtaattatatgccttgtacttaatgggattttgtttgagacaaggtggtctaacaatgtagcataattgggtgattgtgcctctagctgtgtaactgtggaaatgtgattatgtgtgactttatgtggccatttgtatattctgtgaccttatgggggtttagtccagtacagaagtaaatttctttttggtatttctggggttcatttggggctgaggtctgcctatggattgtgagtcccatgtggctctgtgctcctcccatgtggctctgaggacttaaggactttttgatttgaccacagtggctgccctttcatccatggcctgtattgcttcatttctgtatccatcctcggttcaccttgggaaatgtagttacttacgagttcacgacttcttccctgcgtcctcttgccttatagccttaag

SEQ ID NO: 91594 - DNA, 1039 bp, Homo sapiens
gccttcactcagaagtcacacctcaatatacatcagaaaattcacactggagagagacagtatgaatgccacgaatgtgggaaagccttcaaccagaaatcaatactcattgttcatcagaaaattcatacaggagagaaaccctatgtatgcactgagtgtggaagagctttcatccgcaagtcaaactttattactcatcaaagaattcatactggagagaagccttatgaatgcagtgactgtgggaagtcctttacctccaagtctcagctcctggtgcatcagccagttcacacaggagagaaaccctatgtgtgtgccgagtgcgggaaggcctttagtggcaggtcaaatctcagtaagcaccagaaaactcataccggagaaaagccctacatttgttctgaatgtgggaagacctttcgacagaagtcagagttgattacacatcacagaattcatactggagagaaaccttatgagtgcagtgactgtgggaagtctttcactaaaaaatcacagctccaagtgcatcagcgaattcacactggagagaagccttacgtgtgtgctgagtgtgggaaggcctttactgacaggtccaatttgaataaacatcagacaacacacactggagacaaaccctacaagtgtggcatctgtgggaaaggcttcgttcagaaatcagtgttcagcgtccatcagagcagccacgcttgagagaaacagtgtgagaaaacccccctgagggttgggtctgattgtacactgttgcacgcatgcagcagaaaaatatgtatattattgtaaatagaaatgaccacagcagaatgtcacacatggctgttctggagagggcctctgagaaggcactgaatgaggcgagggacccttcctacattgtcaccatccccagtaaaccttgggtcattattcatactgacaaggaaccgagtcaatttggtgaataggaaaagccttctcatgaaaactacaatagaatactgttaccaaattcttcctaagaaagatcgta

SEQ ID NO: 91595 - DNA, 1050 bp, Homo sapiens
atgcgccaaatttgaaaagatattcacccagaagtcacagctcaaagtacacctgaaagttcttgcaggagaaaagctctatgtatgcattgaatgtgggaaggcttttgtacagaagccagaatttattatacaccagaaaacccatatgagagagaaaccctttaaatgcaatgaatgtggaaaatccttttttcaagtgtcgtccctcttcaggcatcagagaattcataccggagagaaactctatgaatgcagccagtgtgggaaaggcttctcttataactcagatctcagtatacatgagaaaattcatactggagagagacaccatgaatgcactgactgtggcaaagcattcacacaaaagtccacactcaagatgcatcagaaaatccatacaggcgagagatcctacatctgtattgaatgcggacaggccttcatccagaagacccatttgattgcacaccgaagaattcatactggagaaaaaccatatgagtgcagtaactgtggcaaatccttcatttccaagtcacaacttcaggtacatcaacgtgttcacacaagagtgaagccctatatatgtaccgaatatgggaaggtcttcagcaataattccaacctcgttacacataagaaagttcaaagtagagagaaatcttccatatgtactgagtgtgggaaggcctttacctacaggtcagagttgattattcatcagagaattcacactggagagaaaccttatgaatgcagtgactgtgggaaagccttcactcagaagtcagcactcacagtgcatcagagaattcatacaggagaaaaatcgtatatatgcatgaaatgtggactggccttcattcagaaggcacacttgattgcacatcaaataattcatactggagagaaacctcataaatgtggtcactgtgggaaattgtttacctccaagtcgcaactccatgttcataaacgaattcacacaggagaaaagccctatatgtgcaataaatgtgggaaggcattcaccaaccggtcaaatct

SEQ ID NO: 91596 - DNA, 1037 bp, Homo sapiens
cacccttctcatgaaattactcacccttacccttttctctgtgttcaagctggataagccatttttaccttcccctctagcctctgctagctgctctataagcaaaaagtgacttattatcccttgaaaaagtgtttggatttcaaaccttattacagggaatctctggaaaaaaaaaagacttctttccacaatgaaagggaagatgatgatagagatgatgtgagattgtatttcattctagaataacagtgacagactgataaccagatagaatattatcagaaaagaaaataagtatctaagtgatgttgctttaatcaagaaaatattgactacaaataggcattatgaatataaggctatcagaaggataattcatgtgaacccaaacattttacatccccctaaaaaccctatcagtgtgacttatttggaaatggcttgaagcataatttagatctacacattcatgatagaaacgatgcttcaaagaatgttaagaagagtactaactatggtaaaatgtctttctatacttactgtgaatgtactccaacaggagagaaattatgggaccataatcaacatagaaaaatcatcggttataaaccagcttcctctcaagatcaaaaaatttattctggggaaaaatcctatgagtgtgctgaatttggaaagagcttcacctggaagtcacagttcaaggtacatctgaaagttcctacaggagaaaaactctatgtatgtattgaatgtgggagggcttttgtacagaagccagaattcatcacacatcagaaaacccatatgagagagaagccctataagtgcaatgaatgtggaaaatccttttttcaagtatcgtctcttttcaggcatcacagaattcataccggagaaaaactatatgaatgtagtgaatgtgggaaaggtttcccttataactcagatctcagtatacatgagaaaattcatactggagagagacaccatgaatgcactgactgtggcaaagcgttcacacaaaagtccac

SEQ ID NO: 91597 - DNA, 1049 bp, Homo sapiens
actccaggaggcggactcctccactgtacggaatcgatacgcatcaaagatggcgacccacacaaataaacaccataagggcgcggttatattctctgcccgtgagcgccgattacggaaactgcacgatgtctctaaatatgtgtgtgctccctgttgactgtgggctgaaattggcttccaagttaatttagagcatgcgcaatatcaacagtccataaggggaggtgctagaagtcggaccggaagtggaagtggtccccgaaggctatttcgccgctggcgtcaggactattttcacgttttaatgccgagaggtctctgtgacgattttggttggttgcaattagggattctgtgaagtcagtaatagaggagttgtctgtggaattagtgatggtggtttcggggcatggtgatgggggtctgtgacgtccgttgatggttgtctgtgacagggatttctcgggtcattgatggggctctttgggatgagtgattggggtttgggggtcagtgacgggagtctgtggtcagtgactgagggcctgtagggtcagctatggtggtcggtgaggactgtgatcagcttgctttctgacctgagttgaaagttcagttctttccatttcagcctgtaatataaagattaacaagttttgatgtgtagcagtttcgtattgttcaaatctaagtgtttaaaaatttttttcagtaattgtttttctttgacccatgagctgtttagaagtgcactttatggccgggcgcggtggctcaaacctgtaatcccagcactttgggagacccaggcgggcggatcatgaggtcaggagatcgagaccatccttgctaacacggtgaaaccccgtctctactaaaaatacaaaaaattagccgggcgtggtggcgggcgcctgtagtcccagctactctggaggctgaggcaggagaatggcgtgaacccgggaggcggagcttgcggtgagcccagatcttgccactgcactccagcctgggccacagagcaccaaaaaaaaaaaaaaaaa

SEQ ID NO: 91598 - DNA, 1083 bp, Homo sapiens
caatcactcatcccaaagagccccatcaatgacccgagaaatccctgtcacagacaaccatcaacggacgtcacagacccccatcaccatgccccgaaaccaccatcactaattccacagacaactcctctattactgacttcacagaatccctaattgcaaccaaccaaaatcgtcacagagacctctcggcattaaaacgtgaaaatagtcctgacgccagcggcgaaatagccttcggggaccacttccacttccggtccgacttctagcacctccccttatggactgttgatattgcgcatgctctaaattaacttggaagccaatttcagcccacagtcaacagggagcacacacatatttagagacatcgtgcagtttccgtaatcggcgctcacgggcagagaatataaccgcgcccttatggtgtttatttgtgtgggtcgccatctttgatgcgtatcgattccgtacagtggaggagtccgcctcctggagtgttgactagagtaaggcaaggattttcacatagaatgcaagactgtaaccagtgtgaccacgcttgtacccaagaagaagttcctgaagataggatctggagctttatgtttttttttgtttgtttgtttgttttgagacagagtcttgttctgtcgcccaggctggagtgcagtggcgccatctcggctcactgcaacctctgcctcccaggttcaagcgattctcctgcctctgcctcccgagtagctgggattacaggcaagcgccaccacacccagctaatttttttgtatttttagtagagacgcagtttcacgtctctactggtcacgctggtctcgaactcctgacctcaaatgatccacccaccacggcctcccaaaatgctggggttataggcgtgagccaccgcctccggctgttatatttacaatacctaagttaccccttggttacggcacactgcagaaaacaacgatttactaggagaaaccatgggggaactaggaagccagggatcctgagagaaataagggagataagaggaggcatcaggatggtacaatctattttttggag

SEQ ID NO: 91599 - DNA, 1060 bp, Homo sapiens
tacctcagagccaaagaatcttccccatatgcatttatttctctcaggagacctttaatggaggctagaaaatgatccacttcatgttacacatattgtatgatatacttatctcttatgtacacacgcatacttatatagatatatgtatatcatatatatctatataagtatatatatactatatagtatgtctatatatactatataaatatatatacttatctatatatactataaagatactatatatagtatagatactatatatactatatagatactatatatagtatagatactatactatatatagtatagtatctatatatactataaaagtatacttatgtacatatatatggccagtcatgttttaatatggaaaatagcccaaccattgtatatttaccagcctttccagttgattctgatccacatccatatttgagtatcattgtagtaacttatttgcgtagttaccttcctctgcttcctgcattatcttactaatttctttgtctttcttgtccattttttcagataacacagatatccttgtgaaccctgtgtcatttacctagtagatactattcttactttaatttttccatttctattataaaagtttaatttttcacaaataggaaaaaagaacatttaccattttattttctttcagatctggaatcgatgtgtgaaaccaagttattatctctaaagaaggaagtttatgaaatagaattatgccagagggagataatgggacttacaaagcatggccttgagtactccagttttggagatgttttggaatatagaagccaccttgcaaaacaactgggatatccaaatgggcattttagtcaagaaatattcactcctgaatacatgcccacatttattcaacagacattccttactctccatcaaataattaataatgaagacagaccctatgaatgtaagaaatgtggaaaggcctttagtcagaactcacaatttattcaacatcagagaattcatattggtgaaaaatcttatgaatgtaaagagtgtg

SEQ ID NO: 91600 - DNA, 1082 bp, Homo sapiens
ttctatttttagtagagacagggtttctccatgttggtcaggatagtcttgaactcctgacctcaggtgatccacctgcctcagcctcccaaagtgctgggattacaggcatgagcgattgcacctggctttattttttgttgagacggagtttcgctcttgttgcctaggctggagtgcaatggtgcaatctcggctcgtcacaaccttcgcctcccaggttcaagtggttcttctgcctcagccttttgagtagttgggattacaggcatgtgccacaacacccggctaattttttgtatttttagtagagacggggtttcaccatgttagccaggatggtctcaatctcccgacttcaggtgatccacccgcctcggcctccgaaagtgctgggattacaggcgtgagccactgcggccggtctttttattttacaaatgtacatttttaattgttaagccaaaatcacaaagcaaaaaattacaaactaaaaagccaaaattaattgtaatcatacttatagatggctgctctcaatttggtagagaaaatcgtgctatactttgcttttttaagaaagtgtaattatgatatgcatgctgtacccttaactgcttttatcatgccaaagatttcatgagtgccatttcagtaaatatagatttttattattttcatgacatatttaatgactttaaaatgactattcccattatggttgccactaaatttttgcagctataaaagctgacctcggctgggcacagtggctcatgcctgtaatcccagcactttgggaggccgaggtgggcggatcacaaggtctgaagattaaggccatcctggctaacagtgaaaccccgtctctacttagctgggcgtggtggcatgtacctgtaatcccagctactcgggaggctgagacaggagaattgcttgaacctgggaggcggaggttgcagtgagctgagatggtgccactgcactccagcctgggggacagagtgagattccgtctcaaaaaaacacaaaaactgctgacctcattggatgcttatttttacttttaaaacatttat

SEQ ID NO: 91601 - DNA, 1055 bp, Homo sapiens
cctccaaggacagactcattgctattcctggaatacaccaaacatgttcccaccataataactttgtactccttcttttaaagctcttccccagatctccacaaaacttacttgctactttcactgaagttttgttttgctaaatgtcacttcctcagagaggccatccttgacctccctatttaatagatcactcagtaatcaaactctatcccttatttcacttgcactcattgccgactcaacaaatcatcatccatctaaagaggatagctctgctccatcacacatttgagcataacactgactaaaaaagatattaaatgttttgtagaaggattatatgaacaaaaggtggagagagaagtggaaggggtgctcattgggctatttgtgattttccctgtggtcccaaagtcctgaaaaatgaggtcaaatgtctgaaaacaaagtgaaagagcatgcttacctgggacatggctttacaaagccccacagccattcctccttcttcagttttctcttctgaagaagaacaaagtcctgagaagggagagttaatgaagaaatgatgatgtgccagccctgtgtttttggtccaagacccacaaaaatactactgcccctttcttctccctacatgggccagcctcaccttttccaagatctggccagggtggcggggtggaatccaatgctgaacttaactcccaaagtcttgacttatatattaaggacgcatagcctgaactcaacaaaatccaaagtctgtcctacggccaacaaggtggttcatgatctggcccctggctgcacctctgacctaatttcctacccttccgccccttactcgccacactccaggcacatgtcttcctactgttactcaaacactgtacaccccttcttcagggttgtggacttttccttccgtctggaaccttctcccagacaccagcatgggccactcctctttattcctatctgcattcaggtgtcccttcatcagagggacttccctgaaaattctacctcaagggaacccctgttccagg

SEQ ID NO: 91602 - DNA, 1788 bp, Homo sapiens
atttgagaagtcatacaggggaaaagccttatgaatgtgataaatgtggtaaagccttctctcagtgctcactgcttaatttacatatgagaagtcacacaggtgagaagccctatgtatgtaatgaatgtgggaaagccttctctcaaagaacttcccttattgtgcacatgagaggccatacaggtgaaaaaccctatgaatgtaataaatgtggaaaagccttctcccaaagctcatcccttactatacatatacgaggacatacaggtgagaaacccttcgactgtagtaaatgtggaaaagccttctctcaaatctcatctcttacccttcatatgagaaaacatacaggtgagaagccctatcactgtattgagtgtggcaaggctttcagccaaaagtcgcaccttgttagacaccagagaattcatactcattagaaaccctatgaatattgtgaatatggcaaggccatctgaaggaattaacacctcattgcacattacatgatcacttccagagtagaaaactatgaatgtgggatagccttctgaaaaagccacaaatttatgaaacattagagaattcttccaaggtgacaaattatataatgaaaaagctgttaccagaaactttcagcagacatcttattgataatatttaatcagcattctcattgaaatctgaaacaaggtatcttccatcagcataacaacacaacacttgagctcctagccaatgtattaagtaaggaaaacaagtatcaacgaagaactataaaaataacttttatacaagaaataattagaaaatgtgttgatagaaaacctaagaataaacacaacaatgagttaggtctttatcaagttataaaatatgttgaaaggcacaaaagaacacctgaaaaatgatattttgtctgaaaagacttgacattgtaaaaatataatttctctcccaaatcactaagtttaatatacttctgaagtttacatcagttttattttaaggaacttcacaaacttatccaaaaattttatgtggaaaagtaaagaaacacaaatagctgaaacaaacttgacaaagcaagtagagaagacacactctattattagatatatcatgtacttatttaaagctgctgtcatttaaacaatgtattaccaagtgaataaatcaagcagtagtaagatagtgagcattcatacaaaaatccaagaagatacaggaattctgtgtatgacagtgctattgaaatcactggggaatgaatggcttatttaataaatggaaggttcataggagaaaaattttagctttctactttatatcatatacaaaaataaaatccaactaaagaccagaatataaaaagcaaaattttaaaactatgatgaaagtagaatccgttactttagggtaacaagatttctttaaaaaacatgtaaacatggaatagtctgttgaattttggtgtattggcctcacaggcacccacaaatgtacacaaagagatatatatcactgtgttcctgaatcatggtttgtattgcccaaaattggatataacaaatttttatcaattgtggaatagatgaataagtgtgatcatttctgtgataaaatacagaatttagaaacaaaatctacctatagttatatggatagattacaatatataatattgagagaaaaaattaaaatgcacaaaggaacacagtataacatttgtataatttaataagatcttgcaaagaacagtactgtgtattggtcatggatcca

SEQ ID NO: 91603 - DNA, 1027 bp, Homo sapiens
ctcttgtctgattgctctggctagggaaaagtacggatttaactctcttaccatcagtacctccgatacacattactcacacataaaaactttttatttgttcctcaagatatatcaccttttaaattcttttaaattgctacttcttttttaattgctaattatgactgtcttaaatgtctcaatactttaaaatactttaggtgttttgtcagtttcataattttcctgcatatatgctttcatgatgctacatgtattctctgatacagagctcccacatacgcacccctgtttctatccaccctgtgcccaagctctgcatgattattccaatcatcctcacacctattaagaacctttgtggtatgaatattcttggcatttctgatagatttaattatcattccactacagggtgacctttaatccaccctgtgtgtgcatgtttctgaaactaaagacaggcctattttaatgacttttattctcttccccagctctacttctgcaggccccatcccttcccagaaagaagaggaaatgactgagtcccaggtaaatgttaaatagtgtatttgtttcttgccttactctccaatgcaatttaaggggattgcagtaattcatacagtaaattataaaggtctgtatacataaaacatattttcaggggaaatagagttgaacgattaaaactagggaagagttaaaatgtgggtattttatgaaattcattcagagagattaaagctgggcttcaaatttaaatttcctttttacaggtaaagaaaaccagagcaaaaatttgttacataattttcattgtaacaataaaaaatcaacattttctaacagaaataagcttttcattgatacctaggtcaatgaaaacattgtagtgttacttcttgtagttgataaacctagctcttttgatgttctctttcgatcaaggataaaacaaagtgtaactatcaaaatagcccagcattagaaacaatgcaaatgaaaattaacaggaaaa

SEQ ID NO: 91604 - DNA, 1101 bp, Homo sapiens
tatataaacctaggttacgtgtgtaatgcattgtgttacgatgttatgatggctatgatgtcactaggtgataggaattttttagcttcattaaagtcttataggaccactgttgtatatgtgatctgttgttggctgaaacattgttacgcagcacatgactgtattgtagtactttagggaaaagatattggtgatctggaccagagtagtaaaaatgctaagaagtagtcatgtactagatataatttaaaggtagagctgctgtgatttgctgacaaactgaggtagagtgtgaatgagacaaggtgacacaatactgtttttatgagtaacttgaatgggtgtgtcattaactgagaaggggaacaatgtaggaaaaactgacttggaatgtagtgagatttcagtttggaatatagtatgtgaaatgtgagaatgcccattagacattcaagtggagatatcaagttggcagttggatatacaagtatgaaattcaaaaagagagacaaaagggagatctaagatctaggatggagacatatatttgggaattatcagcatataaatggtatttaacacgagactgaatgaggtcacttagagggtaggatagatagagaaaggtagaggcaaatgactgatctctgagtcactccaacataacaaactctgggaagtaaggaggaattagcaaaagagactgatggggactagcttgaaacgttgaaggaaaactaggtgagtgtgatattctggaaaccaagggaagaatgtgttttaacaagaactgtgtcgggtgccacataaaatgaggagtgagaaagaagcatggaatttggcaacatgaaattcatttattagggaccctgaaagcagtgtccgtggaattttaggccaaagagagaactggaaaagaaaacgttggagatatcaagtctagacaactcttgaagactttttttttttttttctaaatggaagaagtgaaatggaatggtagctggagttaagaggtacacattctgtttatatactgattgaaatgatccggtagagagagaaactacaatacaggagagaaagcagataatataa

SEQ ID NO: 91605 - DNA, 1046 bp, Homo sapiens
ttggtcaccgatttctattataaagttttcgtttgtttattttgtgtagaacaggaaaatatgttttggtcttgttttctttcagatttggaatccagatatgacactaaaaagttatttcaaggaaaggatatttatgaaatgaacttatctcagtggaaggtaatggaaagaattaaaagctgtggacttgaagaacaagaaagtcctcatgaggtgtgtttcaggcaagtgacaaaaaccacctctgaaaaaatgcctacttacagaaaactcacatctcttcctctgtatcagaaaagtcataacagagagaaaccctacgaatgtggggaatgtgggaaggcttttagagtacgacaacaacttactttccatcaaagaattcatactggtgagaaaccctatgaatgtaaagaatgtggaaaagcctttagacagtgtgcccacctcagtcgacatcagagaattcatacttctgacaaactctatgaatgtaaaaaatgtggaaagatcttcacatgtggctcagaccttcgagtacatcagagaattcatattggtgagaagccgtatgaatgtaaagaatgtgggaaagcctttagagttagaggacaacttaatctccatcaaaggattcacacgggtgagaaaccctatgaatgtaaagaatgtgggaaggcctttaggcagtatgcacaccttactcgacatcagagactgaacattgctgagaagtgctatgagtgtaaggaatgtggtcaggcctttctgtgtagtacaggccttcgactacatcacaaacttcatactggagaaaaaccctatgaatgtaaggagtgtggaaaggcctttagagtgcggcagcaacttactctccatcagagaattcacactggtgagaagccttatgattgtaaggaatgtgggaagactttcagtcgtggctatcatctaactctccatcagagaatacatactggtgaaaagccctatgaatgtaaggaatgtcagaagttctttcgtcgttactcagaacttatttc

SEQ ID NO: 91606 - DNA, 1105 bp, Homo sapiens
agggaggaggatctgttcaggacaggtctgcacaacccattctttggtccaaaccagcccgccttggggtcagagctggggaccaactggcagccctcctgctgaagtgtctagacatatgctttgatgccgcagagtctctgctcttcaattccttgtgcagctgagctgatttcgctgtggttttggggaggacatctttgtctaaactacctcttacctatcaaaacttgtctgtgtgttgggggtgggagttgcatataggaatggagaagtagtaccagtttttaaaatttggaaactctgaggcagttctcttctcatgattttacatgttctttctgcagctctggtgtctgtggaccctgcttctgaagtacatgaaccttgaggaaaattgaccagttctagcagttctaaaatcatggctcgtgtaagttggaatttctctctactttggaattctgtcatttttttcaggttatgtgaacattctcatttgttattctgcaactttctaacagagccccattcaacagcttctccccagtcttccccattccagcacgggatggagccagccagattcctaagtgcccctgtcttctccatctgtatctgtattagtccattttcacgctgctgataaagacattcctgagactgggtaatttataaggaaaaagaggtttaatggactcacagttccacatagctggggagaccttacaatcatggtggaaggtgaaaggcatgtcttacatggtggcaggcaaagagtgaatgaatgccaagagaaagaggaaaccccttataaaatcattagatcccgtgagacttactcactgccatgaaaacagtataggggcaactgcccccatgattgaattatctcccaccggctccctcccacaacacatgggaattatgggagctacaattcaagatgagatttgggtggggacacagccaaattgtaccagtatccatgtgtgcattgaccaaatcattcagcatctcttgtgtgctccttatctgtctagagcagagatggggcagaaatgaagttcctagaagtgggcattttatctgaaattctcaggat

SEQ ID NO: 91607 - DNA, 1027 bp, Homo sapiens
ctatgttgcctagactggtctcgaagtcctggcctcaaatgatcctcccgcctcagcctacatgtgttctttcaaacccagagaaattcacaggaagagccaactcaatcacttgaaacaccaggtagaaataagaaaaagttatattgcagggatcccgcttggagatgttgggggcctaaggtgagggatccagctgccgctgaaagaagggaggagatttgcccaggaagacaggagccagtaaagtgccctgaccacagtgggtggtgggggtgaggggctggtggtggagcatcagtgggaaatatcactcctcatatttgcgagaagtgtgccatggttggaaggtggcttaggtggcgggcagaccaagttcaaatcacagtatagccactaacttgtaagatgtgcactgagcttttttcttcattggcaaaatgggtatgatagtagtctttacctcgggggtcgctggagactgaatgaaatgtctgcaagactttcagcacattaggctgtcattagccctgtgcagttagctactattcttattttattgagttgacagatgtgttgagaccctgctgtgagccagggtcctatcctaggcactgaggattcagcagtcaacaagacagacaagatccttgctgtcctagggtttacattctagccattctagcccgggaagacacacaataaacaggatcatttcactttgtgtttttgagatggagtctcgctgtcacccaggctggcacaatctcagctcactgcaaccactgcctcccaagttcaagcccatctcctgcctcaggctcctgagtaactgggattacaggcatgcgccactatgccctgctgatttttgtatttttagtagaggaggggttttgccatgttagccaggctggtcttgaactcctgacctcaggtgatctgcctaccttggccttgtacagtgctgggattacaggcgtgagccactgtgcccagccttttctttcttttttttttttttaat

SEQ ID NO: 91608 - DNA, 1118 bp, Homo sapiens
aatcccatctctactaaaaatagaaaaaattagccaggcatggtggtgggcacctgtaatcccagctacttgggaggctgaggcaggagaatcaaacgaacccaggaggcagaggttgcagtgagccaagatcacaccactgcactccagcctgggcggcagagcgagactcggtctcaaaataaataaataaataaataaataaataaataaataaataaataaacaaactgctgctttggacatgaaacctgttgtgtcgctgactctggccctcattgctgtgtattctggtgggtgctgtgggctctggtggaagcaacagcagagcttagcttgtgaatgtgtcttacccttgctgtgctccaaagacattgccagtggatggggtgtggggaagggacatcacagtggtttcctctgtcaactctatgagagtcgtggttctagactttttggaggtgtcaggtgcaggttgaatcctggccttctacctaaacagggcaggtgctggagattctcagcttgttcctgtccccagatggtgctcaccacacttatctccaactgctggacagtgcctggcatgtgagagatgctcagtaagtatctgttgaattaatgatacgagccagcattcactgagctcttactatgtaggaggcactgttctgactgcttctcagctaatatcttattgaatccttagaaccactccttggggtaggtactgttgttattaccatgtctcgtaagaggaaactgagttacagagaagttcaagtcacagagctggtgagtctcaaattcaggattcctatgcaagtcactggctccagagtctaggctcttaaacactcactgtgtggtctttcgatgaacagacagacgaacagatggggcagacaagcaggaccattctcacttgttccggcctcctcactccacacgtggtctccccctgttttgggggagccccacaacagatcccaggcccctttgggccctgaggcttttttttttttttttttttttgagacagagtttcactcttgttgcccaggctggagtgcagtggcgcgatctcagctcaccgcaacctctgcctcccgggttca

SEQ ID NO: 91609 - DNA, 1187 bp, Homo sapiens
tcacatctgtaatcccagcactctgggaggccgaggcaggtggatcatttgaggccaggagttcgaggccagcctgggcaacatggtaaaaccccatctctactaaaaatgcaaaaattagccgggtgtggtggcacatacctgtggtcccagctattcgagaggctgaggcaggagaattgcttgaacctgggaggctctgagaggttgcagtgagccaagatcatgccactgcactccagcctgcgcaacagaatgagtgagactccgtctcaaaaaaaacaaaaaaccctagcaaggatcagaatccccagagggctaggtaaaacacagattgctgggccccatctgattctgtaagttcctgattctgtaagtctagcttgagaatttgcattttgtggtgacactggtgcccctggtccaggaagcacgttttgagaaccatgagctactgtaataggaagcccaaatgaaattggcctgaaataacgagatttatgatctcatataacaaagaagcctgtaggtaggcagcacagcagcacaggagttgactaagcagttccacaatgcctgcagggaccccatccctctccttcaagccactctgccatccatggtgtgtctcctgtgtccctaggctccctgcatggccacaagatgactgccaaggctccagttggcacacactgacagtgccacatccagcagcagaaagagggcatctctcacttgctgtgtatctctttaagagtgaggaaacctttcattgattccctgcctcccagatttccctcatatctcattggccagcatggtgatatgtgaccctgcccagagaaaccagccaagggccaattaggattgaccctctggggctggggctggggctggggctggagccggggccagccttacctgaagtaggtagcacagggaggagagtggctacaggaatgaaatcagagtaccatttaggaaaggactgggaaagggggagggatattgggtaggcagacaattggttttgctgcagaaataagtggaacacagggaaagcataatgcccatgcatttttgtcatcgtgcttaccagctttgttttgtaattacctgaatcaggacttagctttttgttctctaatcatgcccacctttgaaactgtgcacaaagtcccagtacc

SEQ ID NO: 91610 - DNA, 1077 bp, Homo sapiens
ccccaccccagcactttcttcctgtgtgacctccagcctatgacttattcgttgaacttctcatctgtaaaataagaatgctgatagttcctccttagagggtcgctgtgagggttaggagagagaattcatatgtagcacttagaacagcgccttgtgcagtgagcattccggttgtggttgttattattagccagccaaagccgttcagttgtgcttccaaagctggctggaagagtccagcgaccgtgtttaatcattaagctgcattgcctctgtgagctagtgcctcctctgcacgggccaaggagcccgcctttagattgtacggttctgaatgaagcatccaggcgcaagctcagggcaggggacggtgtgggcacaagtccagccctggctctgtcagtgaacaggtggcctgtgcctgaatccgaggtaataggcgagccgcctttgttacctttgagctttctttcaagcccattcagactcctcagaccacgtgtctgatgagtaaggaggccttttctttccctcccccaaagggaatgttggcaaaacagctttctttgggaacgcgcctgttcacgacgaccagccatctcctggggaactccggtggctggctggcgtgttcctgcggctgttgaataagtcgctgttaggagctggcacggcaggttcccgtttccgcattccaggcacccacagcgggctgggggcgggcaccactgaggtcggcctggagagccaaggcaggtggcctcgccctgggaggaccagggacaggaggagtccacctggggctcccctgacagccacctgcccactttgtgatcagagccgtgttcggggagtctttcaggtgagcgatattcattaaatttggcagtgacttgcagagaaagttcatcatgtttcttcctctccggagttagacagttagctttttttgttttctctttttttcccccctcttctccctgaaatgtttacctgtctgctcctaactgtgaagaaagagtgggccgggtgttgacggactgagaaaaatggaggacatttctcccaagagaa

SEQ ID NO: 91611 - DNA, 1053 bp, Homo sapiens
gatgatgccctccccacttttggttctttgattaattacacagatatttatggagcacctgttttgtacaggcactattctgggaactgggaagagagtaatggaaaagcaaacggggtctccacccttgcagagctcgtattttaaaagagcagctagatagtaagcaagtcagttacttagtgcgtcagagataaggggtgtgaagaaaaataaaggaggctgggcatagaggctctcaactgtactcccagcactttgggaggctgaggcaggaggattgcttgagcccaggaggtcaaggctgcagtgagccgagattgcaccgctgcgttccagcctgggtgacaggctaaaaaaaaaccctgcctaaaaacaaacaaacaaaaaaaaaaacaaaaaaaaagctttacctcttactaactcatgaccactctgttttcttctatatccaccaccacccaccctctactgtattattttaacgctaaatagttgagtatctgcaagataaggattctttaaagacataatgagaagaccattttaatcatgacaataattaacattaattgcttacatcatctggtatccgcacagtgttaacatctcagatcatctcataaatatctttctagaattggtttgttccaatcaggacccaacagggctcaccattggagttggttcatctgcgtgtgaagcctcatttaatctatggcttctccctccctccagctcactgcaacctccgtctcccgagttcaggcgattctccacctcagcctccttagtagctgggattataggcatgtaccaccacgcccagctaatttttttgtatttttagtagagacagggtttcaccatgttggccaggctggtctcaaacccctgacctcaaaggatcctcccacttcagcttcctaaagtgctgggattgcaggagtgagccaccacacctggcttgatttttctttgtttttctcttgcagtttatatgttcagaaaggccatgtcatttgtcctgtatatgatcaggcctggatctga

SEQ ID NO: 91612 - DNA, 1038 bp, Homo sapiens
attattggaactctgaacatctcacacacaaaaatcatttgtttgcttcttaagtttttcttgggacaaagtcctagagttgcaattcctgaaacagagtgtctatttttaaagacttgtggctgggcgtggtggctcacgcctgtaataccagcactttgggaggccaaggcgggaggatcacctgaggtcaggagttcaagaccagcctggccaacatggtgaaaccccgtctctactaaagatacaaaaattagcctggcgtggtggcaagcgcctgtaatcccagctactcaggaggctgaggcaggagaattgcttgaacgcgggaggcagaggttgcaatgaaccaagaatgcaccattgcactccaacctgggggacaacagcgagactttgtctcaaaaaaaaaaaataataataataataaagacttgtgatatttattgttgacttgtattccggaagggtccagtacaggagttctggtttcctggatcctcaccaacgctgggctcacactgcttctttccctccccacacttttttttgtgtgtgtgtgtggagatggggtcttgctctgttgcccaggctggtcttgaactcctggcctcaagcgatcctcccccatcggcctcccaaagtgttcggattacaggcatcagccaccatccatggcccagaatgctttttaatctttgctatttgggtaaccaaaagttaccaaagtaactaataatttacatttatttgatttctggtgaagtttattgtatatgtatctgtttattaatcatgtatttcctagttaattacctatttctctggggggtatttttatttcttgttaatttgtggaagatttctttacatgttgaagatatgaatcattttgttatgttgcaaatttatattcctaaattgtttatcttttagtttttttttgttaaacattcagaggcttcttaatttttgtgttgttagagctatttttcctttgtgttttttgttttgcttgttttatgtatgctttggctt

SEQ ID NO: 91613 - DNA, 1371 bp, Homo sapiens
aaaatacagaaattagctgggcatggtggcgggtgcctgtaatcccagctacttgggaggctgaggcatgagaattgcttcaacccgggaggtggaggttgcagtgagctgagattgtgccactgcactccagcctgggtgacagagttatactgtgtctaaaaaaaaaaataacacaaataaataaaaaacaaaaacaaaaatccttatcatggcttataaggtcccccgtgatgcagccgtgctggccttgcttactgcacaccagccagtctttcatattcatttctcaaatatgccacactttcctccggcctttgtgtgtgcccttccctatgcctgaaatgcttttcctgactgcttgtcttctagccttctcgttcttatccctcagatcttagcctaaatgtcaagtcctcaaagaggcccttctggactgtcctgaatgtaaactaggccgcttgttattcctgcttggcaaagcttcatagcagttatcataatatttaattacacgttatgtttgtctttacatgtttaatgcccgtcttcctcactgggctggctgtgagtcccaggaggtcaagcccagacctgttatttatttatttatttttgctttgcattgcatccccagtacatactaggtgtgcaaaacaaaacaaaaaacctttattaaatgaatgtggttgaaatagaattgttactcatttaaaattttggttagtttgtcattggactagagcagggaacaaagtctggccggaagtttttaaaaccctggcggtgaaatttcaaagtgaaaatgttactcgtaagttaaatgaattcatactgcagccatattttttcaggctggctggtattagtgatgcccaaagtgactttccttttggagtcttggggccagtggagatggtatatctcccaacaataaaaatttcaccacgttaagtggagtactacgattaacacacatttttaattagcctcttagtcatctcctatctgaagaggccaggacaggcattttaatacttggttattggactacctctaaggagctctcccatgctgcagataccgttctgaatctctgcagtttgtcaaggttcctgcagccggaagctgttttccaggccgctctcttctcactaaagccacagttctttcttcgcactaaagccatccgttcagcttctgtgcagagggaagaggtccctgaactggcatgactgcaaaggcggttgaaccctcctctcctgcaggatgtggagggcatggaggctgtgccgtggatgggtggtgcatctcagaagagttagcttcagcagtcattgggtaaagcaaacatgctagagagtcacaact

SEQ ID NO: 91614 - DNA, 1052 bp, Homo sapiens
gtgggctgggtgtggtggctcatgcctgtaatccctgtgctttgagaggctaaggtgggaggatcacttgaggccaggaatttgagaccagcttgggcagcatactgaagccccatctctacaaaaaatttaaaaacttagccgggcatggtggtgtgcacctgtagtcccagctacttgggagactgaggtgagaggatcccttgagcccaggattttgaggctgcagtgagctgtgattgtgccactgcattccagcctgagcaacatggggagaccctgcctcaacaaaataaaccaacaaaactgcaatgtgataatatacctgtggtttctgttggtgacaaatttgtaagcatgaaaactatagtttgcctatattcctaattgaagaaaatgctgaatttctgttagagattagtgaaaataaagaggtaattctgcccccttccccccaaattagtggagctcctgaattctatcctgcttcaaagagcatgacccagaagttgcacacatttccttcactccttccctgtgatcctgattagttacatggcgacagctagctgcaagggaggctgggaaatgtagtcctcattcaagtcaatcaggtgcctggctaaaatataggggttccgttattaaaggaaaggggggaggataggtattgggggacaagaagtcaatactgtactgcagtacacactgtgcagccactttctcacccaggtcagaacacgtgttcttctcataagcacctgccagaggagttagtttggctttggggaccatggtgtatgaaaaaaaagcgcatctttttttttttttttttttgagatagagtattgctctgtcacccaggctggagtgcagtggcgcaatcttggctcactgcaacctccgcttcctgggttcaggtgattctcctgcctcagtctcccaagtagcttgggttacaggcatctgccaccatgcccagctgattttttatattagtagagacggggtttcaccatattggccaggctggtctcgaactcccgacctca

SEQ ID NO: 91615 - DNA, 1355 bp, Homo sapiens
gccatgttagccaggctggtcttgaactcctgacctcaggtgatcctgaggtcctgccttggcctcccaaagtgctgggattacaggcatgggccacttcacccggcctcattattatttttattggcagcttgaaattgaaatccctgagcaagaggaagccattggcccagtttggatcaggtgggtgggcaggtcccatgattggcagtcccctccacgcccccccccacagaagtaggaggaacgagggagaaacagttgtccccaggaaaagtgggctgctgtcaccagaagttggggcagagactccaggctccaggcaggtccagagcgcccgtgtcctccatgctcagtaactggactcaacaaatgttggttacttccctgctttgtgccatggcctctgctgagcacagaagacacagaagggacagtgatttgcacggtctcctcctcacaggtcctgtagtccagaaattgagggtcctggttaaaactaaatgcctagaacagtgcctggcctttaggaggtccttcgtaaatgtttcctcaatgaataaacacacagggaagtgcaagagttttatggaacacacaacaaaagcatcccactagttattttaaagaaatccatgtttgtacctttagtctccaggatgaggttcagaggggtgtccatgcacacagtaggtgtttaataaatggggactaaattatctaataggtgcatggtcctgcagcctgtccggtgtgacagttgagggcagacccagagttggggagctggctgccttctctgttgaacaggatgtgcagacgtggctccaggatgcatctctgtggaatgcagtcgctaatacaaatgagcttcctcacgtcacaaggcatctattatgtggacagttgggcgatgggccgtgggactgggcgggctctctaggggagtttcagagccacagttatgtttagggccttcctttggagagggacttttccccatgaatgactcttaataacaaagataataatagccaccactttccaggtgcctgagctgtgcaaagggattaacccatggactcctcacaatggcccatgaagccagtatatgatccccattgtgctgaggctcagagagggaaaataacttgcctgttgtgtgcacagcaagtgagaaattgaggtgggattctggccatggtctcttgctccaaagcttgggtttgtccttctataccatgcacagcctgttttctctctctagtactaagtttaaaacaatattatttttattaatttgcatatagtacaatatttaaaaataaaaaggccaggcacggtggctcacacct

SEQ ID NO: 91616 - DNA, 1061 bp, Homo sapiens
gggagaccctgtctcaaaaaaaaaaaaaaaaaagagttttggtttgatcacctgagttctaatacctgctctgccacttcttgtccgtgttgagcaggttacttaacctctctgtacttgatttttgtcacttgcaaatgaaagtgataatacttgcctcttggtcccatagatgccggcaattattattattcctattatttcacagcctctgctgtacagtattgtcagatgacgcagtgccagtggtagcagcgtcgccatcatttcagcagcagtgcccttcgttagctgtaccacctcaccttttctgcaggacaccttcccgcaaatcctttcctgtcaaagggttagggtagagttgctccgtgagtatttaggaaaggaggccctggaagagaggattgtctctttagtccctttatgagtcattggccatagaaagttacatgaccacccataactgcagggaagggtgagagatggagaattttcctaatcgcctcccacacagaatataaatatcaccaccacagctgtgtgcagtacgtatttgtgagcacgttaatctatcttgccatcagagaggctggctccagcatcttacgcatgtccacgttgtggtcagtttgcaagaagtcacccgtgatatgtggcaaaacagccggactcccaacataaagtgctggaaggaagactgtgagggacacagttgtaaaggttctcgaattgtatctgtctgatcagagaaacaatttaatgtcccagatcaaagtcgagaggcaggctctgggaactgggctgtgagcagccagagaaaggcggcagaaccagtttcttcagggcaggtctcttttatctgcttgtctgattgcctggtggacactccattggctcccagaggccttcctggtcatctcctccctctggctgggtccttgatctttgcagatggctgcgtcccctggggccagggagcacctactgtgtgcctagtgctggccaaggtactggagataatcataggtaatgttcttccagcgttcaccatgtgcttggtg

SEQ ID NO: 91617 - DNA, 1035 bp, Homo sapiens
acataacacaaaattaaccatttaaaacttttattgtggcacaatatacataacaaattttttttatattttataattagctttagcttgattgtggtgattttgtcacaatgtatatgtatatacaagttgtccaccttaagtatgaacagtttttatttgtcagttatacctttaaggaaactgtaaaaaagaaaatatgcacaactcatttagtaacctagaagtcaagtgtttaattttctgaaattttattatgcccagttacattactgatagatatagttaccaaaaaaatgtaccttacgtgtgcagttcagtggcattcagtacatgcacatggttgtgcatccatcatcatccatccacagaacatttttcatcttgtaaactgaaactctgtctctgaaaaacaatattctccatccccaagaccccagtccctggaagccacctttctattttctgtctctatgagattgacgaatgtaagtgtctcctatgagtggaatcatccggtatttgtccttttgtggctggcatattttatttagtatcatgtctttaaggttcattcatgttgtatatatcagaatttccttcctttatgaggctaaataatattccaattcatatttaaggctaaataataatgatatgtatatatcacattttgtggccaggtgcggtggctcacacctgtaatcccagcactttgggagtctgaggcgggcggatcacaaggtcaacagattgagaccatcctggccaacatggtgaaaccctgtcggtactaaaaatacaaaaattagctgggagtggtggcgtgcgcctgtaatcccaggaggcaggagaatcgcttgaacctgggaggcggaggttgcagtgagctgagatcacgccactgcactccagcctggtgacagagcgagactccatctcaaaaaaaaaaaaaaaaaaaaaaaaaaatttatatgtatatatatatatctcacattttgcttatctatttatctgttgatggacacttgggat

SEQ ID NO: 91618 - DNA, 1134 bp, Homo sapiens
tgtataatccatggtcttttgtgaccggctttcactcaacatcatgttttcatggcccatccatgtcacgcatggattcttgcttcattccttttatggctgaatattccattgtatggaggtaccacattttgttaattcttcagctaatggacattctgggttatccttactcccacttttcacatagcttccttctgctttttctttagttctgggcttaaattcattctggttctcaccactgaacttatatatgtacctgtttgcttacttctttactctggtcccctagtctggacggtacattttgtgagggcaggtacattttgttcaccgtacctagcatcctaccccacacagtgtccagagtgaggtagtgcccattattgaatgaatgactcaacatctcatatatttctcactttacctctccctaaggcaaagtgatcgtaaccccactctgtatctgggaagttctagctttctccctggtgttgaggagagcaaggcatcctaaagcatgaggatactttaaatagtggcaggttactagaaggatttctttggtgtaaaatactgtcccatcactcatctgctatgcaagactaccggctcatttgaaaagcccatttggctgccagtaacagacaccagaaataacagtggtgtaaactcagtggaaggcagtttctgtcctgagtaagacatccagagataggcagtccgtgcctggtgtggcagcttcacagtcatcaagaaaagcagagtgctttgatgcagggtccttctgctcaccatccctagcacagggcctttgtccttaaggtggcttcatggcccagtgtgactgctggagtcaagctagtgagtctggagtccaggtgggaatagggtgagggagaggcacaaaagcatagtccagctttgcgtttctgctgaggaattttcctcaaagtcccacagcttgtatttaccttgcattggccaggctggctgcaagggaggttgggaaatgtagtcttagctgagcatcctgagaaggaagagaagaatggctgctgggtgggcacttagcaactggagttgatacatttcctgcccacagtacccaggtccatcatagccagcttc

SEQ ID NO: 91619 - DNA, 1064 bp, Homo sapiens
gatgatgatgagatgatggtggtggcggtggtggaggtggtgatgatgataatgaggaggaggaggatggtggcagcttgcattcattagcccttactgcatgttggaggttaggtggcttagtaacagcctataagataataagcgtgagctgctgctgttgtgattattcattcaccagacatgtgaggggtcgccctgcacccagccctgagctggcacaggcctaggtgtagcaggactgtgttctgggagcagagttcatacagcgaaagcctgggccaggaatttcatgggccaagttgggagtttctttggtgtgtgttggagacccatggctcctggcctcctggtcccctttcttgttcattcctgagacttttcagcactggcctcaagagtgtaggctgcccttgacctctgtggccagaacgcatggatgctctgctcagcccatcagccaagccccaaattagacctgacagtgtgatttattctctgggatggagccgggagggcacagccccagtgggtgattcggagggaaggttgtcagcccgaattagcccagacctttcatgcagccttgctggttcagcttcctctggctaagagggttttccagggtgttgctggcttcagcactgcctccttccccgtccccagggacggacacttggctgtgatccctaaggagcgtgtgtcccgagggctgcccaggcaggccctgtctgaaggcagtggaggctttgggtcatttcatctgccccctcaggagcacagagtcgcagctccgtggagtgcttggcccattccccgcttctgttctttcactgagttccgtgctgggtggctggtggccgtttccctgctccacaccttccggtcggtgatcacagtgtctctgctttctagctgccttcattcattcacaggaatgcctctgatgggcgagtttctgctgcagtaacaaattaaccctgaaatcctagaggttggacacaacagatgtccatttcttacttgtgacatgggcaggtcaggtgggagggcttaaccttgta

SEQ ID NO: 91620 - DNA, 1070 bp, Homo sapiens
ggttggtttgggatttttgagttttgtttttttttttcatggattcagaaaatactagtggaagattcaccctgttgatggccctgttttggatgctggagatagaccagtgaatggtggcttgctggcatttgggtgttggattgctgctccccacccctcaccccgatgagtgcactgtgagtgcaggtgctgttgaaaggatgtatcgcgtgcttgccatgtgccccttagtatgggagtgccctatggggatcatcttgctggatctaccagcagtctcacgaggtggcacttaccccctctggtacatattagggccagaatttgatcctaggcaatctggctccaaagcataagcctaatttctgccttaagtcacccaggagtggagtgcaggcatttattaagtgccccggtgttcatggctctatccccaatctttagagatgacagtggttttaatggccatagatttgacctgcctgggttcaagtccctcttctgctttccctcactgggtgctcttcaacaggaacatgctgctctgagcctccctgttcccttctgtaaagtggggagaacagtagggccttcctcctcaggatgctgtgtgggctcagtggagccaggtttgaggccagtcctgagtgggggctgccattgctatgtgcagcttagggagcttgaccacagggcaggatgcccacttgggctcatggttctgtaaatgccagtttttgctctcattttattattattattatttttttttttgagaaagagtctcactctgttgcccaggctgtagtgcagtggcactacagtgatctcagcgcactgtaactgctgcctcacgggctcaagcggttctcctgcctcagcctcctgagtagttaggattacaggcgtgcatcaccacacccggctaatttttgtatttttagtagagacagagtttcaccatgttggtcaggctggtcttgaactcctgacctcaggtgatccgcctgccgtggcctcccaaagtgctgggattacggcctgctctcatttttgacaacagatgt

SEQ ID NO: 91621 - DNA, 1015 bp, Homo sapiens
ctgaaggctgggtccacctttaactttacggctgaaaatgctatctagcgacttggctggggccagacatctattaaggggcagagcccaggtgtgaggaggctctctagaatctttcttaacagtttcacaagggctaatccgcagttaaaccaagtggaccatttgcaaacacgggattaatcgcagtgatgctgggttgatggcatgccatgcactgtactaagtgtttcatatttgtagcttcatttttgccttcacatccactctctgaattgtgggtggcatcaaggtcctgttttctcagatgagagcgctgaggctcagaaaagttctgtggcttggcaggtggtacagtaaggtgggcttttgcctcttacagtgtctccactgggggtgtctgtgaccaggcatgaggtttgcgtgaccagcatcccacagattgcacaggaccctgcctggtcgccctgtctgcaggcctgctgggcatcagggcccctccttcccagacagctgagcctgaactcgcctgctcttccttcttagaacatgccaattacttcggcgtggatgagaagctggggccagtggctgtgagcattaagcgggagaagctggaagaccacaaggagcacggacctcagtaccagtacaggatcatcttccggacccgcgaggtaggtcccatcactctcgttcttattaaagaaatcatagccactcacatctcgagccaggttctgggggcaaacgcttccccagcttcatctcatggaatcctcccaacaaccccgggagagcaatcctgttagtctctccatctcacagaggaagaaactaagacgcagaatttaaatgacttctggccaggcatggtggctcacgcctgtaatcccagcactttgggaagcttggcgggtggctcacttgagatcaagagttcaagaccagcctgaccaacatggcgaaaccccatctctaccaaaaatacaaattagccaggtgtggtagcacg

SEQ ID NO: 91622 - DNA, 1235 bp, Homo sapiens
gggacagaaaagcaaagatcagggagtgttgtggtggggtggatctgaataacgtagtcagcaaaggcctccctgggagggtgaggtttatgcaagaccagaagaggtgacgaaggaagccatgtggggactcaggaagaatgttcctagcagagggaacagcggtgcagaggcttcgaggaagtgtttctggccatggtgaggcctttgtcctttatcctgaatgagagggaaccacaggaaggtttgtcacctgactcgggcattccttgggctgtgtgtgagcagggagtgggaatgggggtgggtggggggagctgtggcagtggtccaggcaggacccgtcaggccgacctgtgacaggttcctgtccccctctgttgccctttcccagctgctacggaagaggcacataggaaatgacatcgtgacgatcatcttccaggagcctggcgcgctaccgttcacccccaagaacatccgctcccacttccagcacgtcttcatcattgtccgagtccacaacccctgcactgataacgtctgttacaggtatgccccccacacccggcccccagcagcgtatggagagaggggcaggcagctggcccaagtgggtcccagtacagggcccccccacacctcacgttgtgcttcaggagaagagctcggcgtatactccccacaccatctcagagagtggtttttagccagaaaggggcatggctccccacttttgctaaggaaaccatcagggatttgtatttgcttgtaatcttttgtttcaagtgacagaaaacccatgtcaatgtggcttaagacaaaaagacagttgtgtatataggctctcaaaagtggcacctttaggcctggctggatctgccaccgccctcctgggggtcacctttccagcaggtctgaggtgaacatcctaccagctgcaaatcccccaaaatgagagcttttctttcccaagagttgcatcagaagccccagaattggggctcactggcccagttggagtcgtgtgcctgtcctagagccaaaatcaccagccaggcctgggcactgggcttcaaggaccaagaggcacgagtgatggcccagaggaaagtcggagggaagcagggcctacctgtggaggtaggccccactttggaggtagaattgaggaggtttttgttgttttgggtttttttttttttttttaagacagggtctcactctgtcaccca

SEQ ID NO: 91623 - DNA, 1018 bp, Homo sapiens
actacgcccagggggtggaaatcgactgcattttgggaatttccaatgagtttgtggtgctcctggacttacgcaccaaggaggtggtgttcaactgctactgcggggatgtcattggctggactccagactcctccacactcaaaatcttctatggacgaggagaccacatcttcctacaggcgacagagggttctgtggaggacataagggagatagtgcagagactgaaggtaagggagagagcccggcgatagggcggcgatttgtatggtttcggcctcaggaaccactgaaatacttccctagcccagtcagttaggctaagacacgcactggcccggagagaatcacagttgtcacttacaaactagacatcttgtgggttctgtagctaggttcttcctctggaaggtttgtgccagagatctgtggatcttcatgctattaccttggaaagacaagagatacttattaaccttggacactgatagaaagtataaatttaagcttaggttaaaaatgtaggccaggcgccatggctcatacctgtaatctatctcagcactttaggaggctgaggtggtggatcgcttgagcccaggaatttccagaccaacctgggtaaccatagtgagactctgcctacaaaaaaaaaaaaaagaaaagaaaattagggaagcatggtggtacatgcctgtggtcccagctacttgggaggctgaggtgggaggattgtttgagcccaagaggttgaggccacagtgagctgagatgacgccactgcacttcagcctgggcaacagtatgagaccctgtctcaaaaacaaacaaaaaaaaagaagtgtaagagtactttctaaaataattaaaatagaatgaaaaatgtccaaaccattaatggatagggcagaggtgagaggaggaaaaaatacaagaaagcacaaaggaacataaaattacatggcaggaatgagttccatgttagtaatcacagtaaatgtgaatggtttaactt

SEQ ID NO: 91624 - DNA, 1095 bp, Homo sapiens
tcctgacctcaagtgatccacccgcttcggcttcccaaagtgctgagattacaggtgtgagccaccacacagggctagtatgtttaactttataagaaggtgccaaactgtttcccaaaatgacaaagcatcttatactctgtctatcaacatgtgagagttctagttgctgcatgccctcaccagcctctgtgtttcattcattccggtgggcaggtggtgctaccacattatggttttattttatttattattttttaaaaacattttttacagagacaacgtcttgccatgttgcccaggctggtctcaaactcctgggctcaggtgatcctcctacctcagcctcccaaagtgctgggattacaggcgcgagccaccgcacccggctggctttgtaatttgaattctttatgtctgtaatttgcatttttctgaagactgctaagatttgagcatcttctcaatgtgtcttccccattattaatcatgttgtgaactactcagatgaatattttaaacataattccatagaacaaacttgtagcccctttgaagtctgagaaccagcagatgaatgggcgagatggattcagaaggaagcaaacaaatgagcaatgttagaaagcagtgacgtcagagtgggaggggtggagatgtcctcttagggagtgtctgagaatttccaggcagctgggagagctgaccccatcagcacaccagctcccccagatgctgtggggtacggaagaggctgcatgccccaagattcgtggcctggagaattcctcaatatctcagcccatggttctcttaaaccagagacagtgtcacgcctataatcccagcattttgggaggccgaggcaggccgatctcctgagatcaggagttcgagaccagcctggccaacttggcgaaaccccttctctactaaaaatacaaaaattaaccaggcgtgatggtgcatgcctataatcccagctactcaggaggctgaggcaggagaatcgcttgaacacgggaggcagaagttgcagtaagctgagatcgcgccgttccactccagcctgggtaacgagagagaaactctgtc

SEQ ID NO: 91625 - DNA, 1014 bp, Homo sapiens
ctcacctctgccctcgttcccatccactctcccctccttgctctgttccagccacactggcctcttgctgttcctcacactctccacgtccaggcacaccccagggcctttgcactggctctcactgctgcctccagtgagctccctccagatcttcttgggtgcagctcatgaggactcgctctaatgccaccccctcaaacaggtcctcctggccttcagtagcccaggctgtcattctgtgtcactgtactctgttccacatcccgtgtcccccatgggaaacaggtgccaccgtcttagtcacaaggcacttgtaacgtgcctggcacacagggcatgctccatcctgaacataagacgtgtggatcttgtttgattctcacgtgaccccaataagtagatactataaggcccccacttttcagtgtggcccaagttgggccctgctgaaccctgttaccctcctcaacaatcacccgtacacactgcttcctctgcctggaacccaccccccaacccgcacccccactctaggcccactcctgcccacccatgttaatttgctggggcagccgcaacaaactaccacacactgagtggcttaaactgcagaaatgtatcatctcacagttgcggaggccagaagtccaagttccaggcgtcaacagggtggttccctccaagggcggtgagggagaacctgttcctggcctccctcttagcagccggtgggtgtcagcacgtagattcatcacccccgtctctacctcctcttcgcatgatgttctccctgcatctgtgcccacatttcctctttctgcaaggacgccaatctaacgggattaggggtctaccctaatgacctcattttcacttgattgcctctgtaaagactctgtctccaaatgaggtcacatttggagatgctggggcttaggacttcaatgtagctttttgtggggccccagttcaacccataacaccactccttgggtatcaacacagacacgc

SEQ ID NO: 91626 - DNA, 1058 bp, Homo sapiens
gattgcctctgcacgccatgtggatctgccatgcgtctctggagggtgtgattctgggtggtgggcctggccctttcctggctgggggctgctgtctgctccacagacaggaccctgggagtgtccgtgcacatgtggcactgtggactcatgtgagcctttctgaaggacgcgtttccagaagtaggactgctagtgcagagagcaagcacattttattcatgcttccaggaggtcttggcacgcccctctcgaggggagcctgtgggcagtgcactggctggggggcgtgctgaaggccaggcctgcttcctcactgccgggagatgggcaccatgagccctgcactgagtcacactcccctgtgcagggcattctgggaaatattgaaatcaaaaggggtgggggagtccccttttgatttgtgtctgtctctctgtctctctatttctctcttttgaatctaaagcttttaatttgcccaaagaatacacatccctgataactgacagacccagcattaccctagacctggaattccaatttggggaggaatatgacctgaccaggaaaaaacctggccttgctctcgcccttcctttgttaaaatcccaaggctggcagctgagaaacagaaaaaggaaatccagtctttaaaaccctcgggaacccaagacatcttatttcttccccaggttcaaagcctctttttctttcttgcattacagaatgaagaagtccaggcaaaagcttttattaagctagtttttattatttttattgttataaccatgattatggttaagtaaattcagacacttcagaagaatatcagttgaaaagtaaaagtcccatttttccacctcctaataagattcctacctcccagaggttatcatggttcataatttcttccagaaattgttatctgcagacagaagcatatttttaaatccaatgtggctgttccccacaccatacgtgtttcctgccatctctgatatacacgtgacagtcaagcttggcagtggcgtgggtaggcactgcagcctggcggc

SEQ ID NO: 91627 - DNA, 1043 bp, Homo sapiens
tcgccagccccgctggcctagagccagggctgcccagcgacgtgctcttcaccagcacctgcgccttcccgtccagcacgctgcctgcacgccgccagcaccagcacccccacccgcccgtcggccccggtgccacccctgccgccggcagcggctttcccgagaagaaatgtgagcctgggccccctgggactggcgcggtagttaccccaaggttgggaggtggggatgcccgagcaggggctcacctggaggtcaaaggctagaggtcatcagtgtcggggccatctcagggaggaatggggttcacaggaacttcggggggcctgatggtggggcactgggtgtcacccaaggagcaagggatcattggccaagcatcagagggtcacctaggagtcagaagcacccaaggattggagtcacctgagaccagagaagaagtccaccctcagggtacaggcctagggaatggggctgcccagctgttgccctagcaccccccaaccctcccacccattccagctctaagcggtttgcttcctgagcattttatttgctttcctgactgctcccatgtttgccacacttgggggtggtgcatggtatgacttgttcactgcttaatcacccagaaaatatttactgagcactccccgtaaacaggtactgcgcacaccacccgcatcaaaagccacgagccagctggagttggccgtgccccagatgcaccctgtaaccccccttacccacctcctaacccccccacaactgaaagacagtacgtaagtttgcaccatgctcactgggtggcgaaacctggcctggaggggcgtgaggctgtttagggtccatagtccccctacttagtgctagcaatgaggagcttggggcagagcgctggcgtgccactgcgcgtggggtgcccctgacctttttgagtttgttacataatacacagcatctgcacacttactctctcaaatccaagcacatctcaaattcagaggcatgttctaccccaagggtctcagctgaggggc

SEQ ID NO: 91628 - DNA, 1050 bp, Homo sapiens
accctgtctcaaaaaaaaaagaaaaaagacagcatggctgggcctcttccttcccgcatctgtctcagacgatctgtctggatgtcccctgcgggtgtccctgtgtctcctctgcgagtgtctggatctgtccatatttgtctgggtatgtttgagagtcgctgtgtcttccctgagtaggtctgggtgtgcctgatggcctaactgtgtctttttctgaggctttctggtgtatccaaagttctgaccgtgtctcctgctgtgcatcccagggcatctgagggcgtgactgggtctccccagagtctgggcctccctcctagggcatgtggttaaatccttgcctctgcagcctcttccctcctgcaaagagcatggtccccccacctgcatagtttgaggagtcctccggggtcaacttccccatctgacccccccatggccctgtccccagactgtgaagcacccctgaagaaggagggtggcctcccggaagggccggtcctcgaggctctactgtgtgcagagacgggggagaagaagattgagctgaaggaggaggagaccattatggactgtcaggtgggcccacctctgggggacccccgctgcatggcttcgtctcacccctgcctgccaccagcccgggccctcacgttcctgctctgaaacccccccggtttcttctggctgttgggcatcccagtcaccatcctcccagacttcatctctatttggaagaactcctgacttatactctcacccccaatctccacctttgcccagagcccctcaaaagcaggtcagtggcccccactttcttgacccgtctcctttctctattgcccagaaacagcagttgctggagtttccgcatgacctcgaggtggaagacttggaggatgacattcccaggaggaagaacagggccaaaggaaaggtatcaccccaagcttctcctcttccccgctcccctcaatgacaggtctcattcatggagcaggtgcagtggtccgcccctgccacagtctgacctcagtctgacctcat

SEQ ID NO: 91629 - DNA, 1217 bp, Homo sapiens
cagtccgggacagcactgccaagacgggacatctgggtgttgggggggaggggtgacagatgggctgagagagccccggggccctgtaccagcccgatgcctgggcccatgggccccgggagcctcggggctggcacgggtctctcgccttggctctagttcccacagaggaaaacaggcctagtggagtcctggaatgtcagattctgggattcgggagaggagctggcttctgccctttcaaggaaaagtcttagcactaggtgcaggggaggagaggctggcagccagcagccagctggggcggccccttcccccaggggacaggaagggaggggacaggaagggaggggacggcttgggccagcccccagagggccaaaatgcagcctggtgagaccgaagggaggaccaccgaggcccctcaaggtgggtgggtgggatgagtcatggctcaactcagctgctaagagcggggcgctgagtgtggcctctacaggcagtggcccaagcgcaggctggctcagtacccctgctgggaataggacccagctgtccccagctgtcgagggagcaagagagccttggggttatgaatcctttcctccccaacccaaagtccggctgtcggcttcaggcctggggcttcagggctggatggtcctggttcatgtgtggtgaaggggcttcagcaaggacacaggtgtgtgagtctctgccagggccacagcctgatgccaagggcctggggctggccgaggatgcagagggacctggcatcgtgcagtggcttcgtatagtggactgtggtcctgcaggtgtgaggtgtgtggctctggcttgggtgtgtgacacatcagcatgtgtccacagtcagctgtggggcccaccacctgagaatggcctcatagatgccacctgccactagcaaccagattggttcacctgtatgggcccaggtgtgagtctgagaacagagggactgcatgtcaccatgggagaagggccatgccttccaccattgtcgcaccatgaagaggaggactcgtgggtcctgtgtacactgtagcatacagaagtcacagaaggccaggcgcagtggctcacgcctgtaatcctgacattttgggaggccgacaagagagaattgcttgagcctaggagttcaagatcagcctgagcaacatagcgaggccccatctctttttcttttttct

SEQ ID NO: 91630 - DNA, 1044 bp, Homo sapiens
agtagaggatagccaacaaggtaatcaacataaatgcattattattgaaaacacttttagattatttctttttttttttttttttgagatggaagttttgctcttgttgcccaggctggagtgcaatggagtgatcttggctcactgcagccttgacctcctgggctcaagggatcctcccacctcagcctcccaagtagctgggactacagatgtgagccaccacatccagctaatttttaaattttttgtggagacaggggacttgctatgttgcccaggctggtctcaaactcctggcttcaagggatcctcctgtctcatccttccaaaagtgttgtattacaggcgtgaaccaccacacctggcctgaaaacactttgacagtgctatacagaaaaggaatcaggggctgggatggaaaataacaagagatcttttgaatggggtggcggaggaagggctttgtgaggggtggctttgataatgaactctgaaggatgataaaggccaagggacaaacattccaagaatcaggaatggcacatgcggaggccttcaggcaggaaagagaatagtgtgttcaggagccagggccactcccactcttcagcctccctcctagcataataatacatgaaaagccgtaactgagttatcaaaatggtatttaccttaaacaatggaagtctaaccttgcaatgagatcatgggactcaaggtggaatctgaatgtgaggccaaaggtctcccccagcacttgaatctcccactgccactcaggcctactaaacctaggcttgagcatgaaaacagagaagtatgtgctgagccgtcaaggcttggaagaaggtataggcctcttctttctttattttattttattttgagacagagtttcacctgttgcccaggctggagtgcaatgctgtgatctcagctcactgcaacctccacctcctggattcaagcaattctcctgcctcagcctcctgagtagctgggattacaggcaccacccgccaccacgcccagctaattttt

SEQ ID NO: 91631 - DNA, 1072 bp, Homo sapiens
ggcttccaagaaacgcgtgtctgccgccccctcctcccaccctgaggccagtcctagagcgaaggccctcctccgacgtcgtcaccaagcccaagggaagggtggcaggtgctcagcgggcagacgccccgccccgccccgccaggttctgttgggggcgaggcccgcgcaagccccgcctcttccccggcaccaggggcgggcccaggtgcgcccagggccggggagcggccgcgcaggtgcctgccctttgcgcctgcgcccagctcgccctgcctagccaggtgcgccccgccccctgcctgcccggccaccttcgggagccgcttccaataggcgttcgccattggctctggcgacctccgcgcgttgggaggtgtagcgcggctctgaacgcgctgagggccgttgagtgtcgcaggcggcgagggcgcgagtgaggagcagacccaggcatcgcgcgccgagaaggccgggcgtccccacactgaaggtccggaaaggcgacttccgggggctttggcacctggcggaccctcccggagcgtcggcacctgaacgcgaggcgctccattgcgcgtgcgcgttgaggggcttcccgcacctgatcgcgagaccccaacggctggtggcgtcgcctgcgcgtctcggctgagctggccatggcgcagctgtgcgggctgaggcggagccgggcgtttctcgccctgctgggatcgctgctcctctctggggtcctggcggccgaccgagaacgcagcatccacggtgagggccgggcgggtaggctggaggcggggcgcagggggcagaggctcgggggtcaacgggggtctgagcagggagaactggcgggggaggaaactgggggctacttgatggcgttcagcgggtgtggtggaaccagccctggaggattgagccttgaaatgaggtttgggagccttcgacagcgaagacgggcggaggagcgagggttaggagagtttccttcgggtggaggaagagtcaaggggtattgaccaagaaggcgtggcactgccccttcctgtggcaagaacggggtgaggag

SEQ ID NO: 91632 - DNA, 2753 bp, Homo sapiens
ttggacaagagcctcccctgaagtttttgtagttgagttgcagtaaagtaggtgcccgagaaggagggagcaagaaaggaaacaagctttggggaagaggaagctctgctaaggctcgagagagtattggcgttgagcagctggtgttggggtctttggattggcccttagaagtcggtggtgaataaggtgatttaaacttctacactcttaaggaagtgtggtctgaaaggtctctttgaacaagtgttgttataaccttaactgcttcagacaagcaccagcgtgttttgaaaagagctctcttgaaagcaagaattcattgattcagcaaaacttactgaggccctgctacgtgtcaggcactggcgctggttataacagttaactcagactagctgggttcctgcattcacagagctaatattccagtgggagaggcagagctagtgaaggtttaaaaagcacttgccatgagattaagttactgagaattaaatgaaccaggtgaagtacaccaacagggtgacgtaagatgttgggggcggctttagctcaggtggtcgggggacgtctccgtgaggagggtgacatctgagctctaacatgaagaatgaggcagtagccacacggagacctgggggaccagtgtccagttgcaggcaatagagtacaaaggccttgaagctggaacaagcttggttgggttcagggaaaagacagagccagcctggctggagcaggcgtgaaggaggggaggactggaggaggatgggaggtgggagaggttggctgcagccagatggcctagggctttatagacaggtgctggtgcttgaacccgggaggcggatgttgcagtgagccaagatcgcgccactgcattccagcttgggcaacaagagtgaaactcccatctcaaaaaaaaaaaaagaaggccgggtgatgtggctcatgcctgtaatcctagaactttgggaggccaaggcgggcagatcactggaggccaggagttcaacaccaccctaggcaacatgatgaaaccccgtctctaccaaaaatacaaaaattagctgggcatggtggtgcacacctgtagtcccggctactcgggaggctgaggcaggagaatcgcttgaagcccagaggcggaggctgtagtgagctgagatcaagccactgcacagcagcctgggcgacacagcaagactcagtctcaaaaaaaaaaaaaagagcaggctaggtgtgtaccaagtcatcacctgtggtaacttctggggactggttaatttctctgtgccctaggcaggagaaaaaagtgaattggtggggagaggctcagctgtaggtgactgggagtcaggaatgcagacgttgatcattcttgcaattcgaaccagaatttggcagctctgctggactttttcagtttaagtaattacgttaggatgtacctcccagttacctggcctcttgctacctctggtgcttactctgagctgggacatggcctcttgctacctctggtgcttactctgagctgggatgtgccatttaacctttgaaacagccgggtgcggtggtgaagttacttgccttgcccgaggtcactcggtagtagtaattgacaaagccaggtctcactgcagaggccttctctgttcagagtggcctacctgactgctgctgccgactggacctactgacctttcagaagtactagtgtctgactgggtgaactcatgccctcactcatcgtaagttctgtttgtttgaaagcttgaacagcttaatcggaggcagaaggcagttttgacttttttttcctcgctccttcctgattgcttctgttttctccggaagcgagtcatccactgggagtgtggtgttgctgaagctccatgcagtggctcaggtgctgctggatgagtgtggtggtgagggaggagtgaacagagaatgtgtgagggagggaggatgggggttggtcaaggaatttattctgtatgaaaacatgagggggcggagggccgaggtagatggtagggccagcagattgttggagttgaggttctgaagggaatgaaccagacagataggatgcagtgggtagtgagtgagatgcatgagagggaggttctgaagaggtggcagttactgagacaggtctaggtgtgaccctgagaggaagcgggggggcgagggtgggaggagatcaggtggaggtcttgggacctagaggtcagaggaccatctacctggatatagaaatctccaagaatgatcataagagcagcgggagaggtggcaggcccggagctaaagttgggaaggaagaagtagttgtctgggttggcagataacgtgccaggcggggtagtgaatgatttactctaataatggaagtctcccagctggggattttggggagggtggagggagaacagtccagaagcagctcccaggagcaaggagacctccccacttggaagggccccaggaggtgtgccctcaggggagattccaattaggtaagagggtggcaacaatgttcagaggagattgaggacatggaagatttgctcaagaccagtcctgagtaccagagggcccaggagttgggggaggggagatggggacaaagcaggccccaccgtgtgagagtgagggttaactcaggggtcggggcttcttgtgagaagcatcatgtggtctatgattgatgtgttggtgacgctctgagtagtgagggc

SEQ ID NO: 91633 - DNA, 1081 bp, Homo sapiens
tgcagtggcgcgttctcggctcactgcaagctccgcctcctgggttcacaccattctcctgcctcagcctcccgagtactgggactacaggcacctgccgccacgcccggctaattttttgtatttttagtagagacggggtttcaccgtgttagccaggatggtcttgatctcctgaccttgtgatctgcccgcctcggcctcccaaagtgctgggattacaggcgtgagccaccgcgcccggcctgagatgggatttcaacatgtgggccaggctggtctcgaactcccgacctcaggtgatctgcccacctcagcctctcaaagtgctgggattacaggctcgagccacgtggcccagccctctcctgcacttccaagggattttcgaaatgcatggacctctcaggttaattatagtgtctgtagaaccttaactgctgtaagctttccagcagactccacagacgtgttattagttgccaccctttctttactttcctcctcacccccatggatagtcgtgaccctggtggtcagagataagatgacagaagagctaaagtaaagctggtgttggcgatcagctgggaattctctaaaacagcttctcacattattcttatcctccatagaaggagtgcttgtcctacttgcaggcaaggcagtttggttccagggtagttcgaaatcttattcactgatatagtcagcaaatgtttattgagcacccaccaattgccaggcactgactcactcaaattagagcactgaacaaaatagaccccctcccccatccgtggcagacgtgtcataatgagaggaagacagtacaataaatgaacagatgaatgtatgtctggtgatgagtgtcagggttggtgtgcttagcactgaaaatgggggcttctgaggttcaaatggttgcagttcctaaagaaggttgagggccttgccttcaggtcaccgcgggagactggcccctttccactggaaacattgctttgcccagtcagtatttgagagctcagcctgcaatggagaaatcacacttctcctctttcaccctgctccccaccct

SEQ ID NO: 91634 - DNA, 1058 bp, Homo sapiens
agactgtagattgttgtcttagtcaccggctgattgtcttggttaaagctctagtgacttcagaaccagagaaacttgttttccaacacattcaaagaccagtttgctttgcaattttgcaatagctgacattcagaatgcctgcgaggattttgtaagtgaggttcatatttcggataatgtgtgacttttgccatttctgatgcttttccaaaagaaagttactcttccctaaaggcaggaattctacttttgcttagatattctgaagcttatgagttcatccaaatttggttcctttcagcattttcctgttggtccgtctccgttttgaaaacatacagaatgtacttaattttgccctaccatttgtgagcatacaaaatagcacttgagtcatatttttcatgattgcttcccaatactattctaagaccaacatagcattttgtcatttcataataatagaattcctcattaaggaataactttctaaaaatgtgtccagcccatttcccccccagccctggccgtttcctttggtatgttggtgtccgtgaccctgtcattgagtgtgactgaaaacagaggcctggcagagggcctggcctttgtgagccctcagattgtgataaagaccctgaggaatgttttggcttttaggcaacctcagttctgttttcctgctgcctgttgatgcagtggctttttcttcccatcagtctgaagggtcgtgttagtgcctgggctctcatcagaccacagggaactcatcctggcactgctggctgcctcactttaaccacctcaagtctcagcattctcgtttgtaaagcggagatattattacgtgattcacagttttattgtgaccattagaggtagggcacatgatatgccaggcatcatgcttggcgaaggcaataagtaatgcagccaggtgctgtggctcatgcctatgatcccagcactttcagaggcggaggcagcaggatcacttgagaccagcctgggcaacatggtgagaaccccatctttacaaaaaattaaagttagcc

SEQ ID NO: 91635 - DNA, 1055 bp, Homo sapiens
atcttggctcactgcaagctccgcctcccgggttcacgccattctcctgcttcagcctcctgagtagctgggactacgggcacccaccatcacgcccaactaattttttgtgtttttagtagagacatggtttcaccttgttagccaggatggtctcgatctcctgatcttgtgatctgcctgcctcagcctcccaaagtgctgggattacaggcatgagccactgcgcccagcccctgctttttttttagacagggtctcactgcagcctccacctcctgggctcaagcagaacctcccacctcagcctcctgagtagttgggactacaggcacatgccaccacaccttgctcattttgaaattttttatagaggcgggggtctccctatgttacccaggctggtcttggactcttggcctcaagtgatcctcccacctgggccttccaaagggctgagattacaggcgtgagccactgtgcccagccagattttgctctttagagacaatttattaactggaatgtggatactttcctctctttattagttcttgacagtggaatctgggtgacgttttaaaaagcagaagaaacaggcaccgtgtgaatgtcctggtggccgtacagtggtttcacagcagaccctcactcctcctcttcccagaaagggagcaaaacaacagggcagagctggggccagcgtgacccagcttcctttctcccactttactaagtgcaagtttcagagcagaccaaagaggaagtagccttgccttcttgagcagaggctttttgatccactccgacagggctgcccctcttgttccctgggtatttgggttattttattttattttgagacagagtcttgctctgtcgcccaagttggagtgcagtagagcaatctcggttcactgcaacctcagcctcctgagtagctgggattccaggtgtccaccactacgcctggctaatttttgtatttttagtagagatggggtttcgctatgttggccaagctggtcttgaacttctggcctcaggtgatctgc

SEQ ID NO: 91636 - DNA, 1924 bp, Homo sapiens
atgggttttcgcagtgtcggccaggatggtctcgatccctgacctcgcgatctgcccaccctggcctcccaaagtgctgggattacaggcgtaagccaccgcacccggccctaacttttgtatttttaataggttttgccatgttggccaggctggtctcaaactcctgacctcaggtgatccacctgccttggcctcccaaagtactggaattacagccatgagccaccacacccggccaagtcactgtctttttaaggtcactttgcacatctctgctctgattccctgcaagttaatcttaagtttcctcttcgggaggcaatcttggttccttatttccaagttgtggtctggcatgcacattgaaggtcccatgtaaaggagaagtggatgctgtggtgagaggcgcacagggccagctcattctttgtccctggcagtctctcgaaagctctttcactgtgctgtttctttgtccccttgcagagaatgccacgggtgacctggccaccagcaggaatgcagcggattcctctgtcccaagtggtaggttcttaaagagacccgcgatggagtgaggccaccggatgggtcattgtgaaaggacacttgtcatttgggaactgtcacaggcttccctctcatggttctgtttactcaaaattggcaaaccgggggctctgcctgggctgccggcttctggctccagcatccttatgggggagtttatactgtccagctgacacaggggccggggatcctgcagcacttcctggctggcccccatctcctcctggaggatgggatggaggtggctgctgcccatgaggctcaggcccctccttgctgtgcgggcctccagctgctctgctgaccccactccccacccaccctcctgtctgcctgttctgtctcctctgcttcctttgctccctgttgccatcgctgtcccctgccccgtgggcatcctctgtcctctgccacccccgcctccccgccactgcagcttgtgatctcaagatgtgtgttagcttgctttgtagtgctggcggctgctgccccattcctcctttatggtttaaggactctgcatcgggcgcctggggtgagtggtcccgatgcactaccaggtagcaaatgcaccctcggggcagacctcaggccatggactctgggaggctgctgtggagggggtactgcaccgcacccctgctggaggatgggactcccccggcagctgctacccaccgagtgcactgtagctcagcagctgttgggccggctggcttgcagagtgctggggcgttagggtggtcactttccagctttgctaggcctggagtcctgtgcctgtcctggctttgctctgcctggctccctgtttatcctctgctagcccccccacacaccagctctggtttccatcttgttggagaggaacatgtccccctcactgtattagaaagtgtgaacaagaccgtgttccctataatattaggagctgtggcaggcttggtttctataggaaccctgaggtggcggcagggccaccacatccagcactctcagtgtgtgcgtagagcccattagggctggggtgacgtggcagagccggccatggaaggggctacacaccccttcttaaaggcgtgtccacactcctcagtgggcccttccagacccagacccagctaggcctgtgtcctgtgtccggcccagcctccctaacacagatgtttgtgtttcagctcccagaaggcaggattctgaagaccactccagcgatatgttcaactatgaaggtaaaactccaaagaggccaggtgcggtggctcacacctgtaatcccagcgctttgggaggctgaggtgggcggatcacgaggtcaggatatcaagaccatcctaacatggtgaaaccc

SEQ ID NO: 91637 - DNA, 1043 bp, Homo sapiens
gtgacaggccccacgtggatgccgccagcagtgggaaggaggctgcgcctgtggagatgtgcgttagaggcgtagcctggcacgtggctctgcaatttacattgtccctgaacctctcgccagcggcttggctgtgggcaagtgactgttgccccgcctcagagttcccatgtataaaatgaagggtcccagataggtctcatagagactcagccactgcatgtaaaaggcctagaacagggcttggcagagagcagccttcaaagctccgaagccgtcacctggacccaaggagcagcgcgtcagagccgctgcactggtcttgggtgtaatttacaggcttctttaccagagagatgtttctccgtctgctggagccgcaagcctcctcaggcactttctggcttgcttcccctccttgcgggccctactaatttgtattccctgggctgtcttactcctagaatactgcaccgccaacgcagtcactgggccttgccgtgcatccttcccacgctggtactttgacgtggagaggaactcctgcaataacttcatctatggaggctgccggggcaataagaacagctaccgctctgaggaggcctgcatgctccgctgcttccgtaagtctgcagcccctcagcccaggaagccctgcccttgaggaccccggtccatctccccatccctaaaatatgaaggccttggaaatgctgttcttgggcccaccagggcagcaaggcctctaagccccagaaaagctggaagaaagcccctcagaaagagctccccatggaggccctggctgaggggatcccctgcggcagctctgtggaatgggggctgtgagctgacctcaggctgtgtgttctcttccaggccagcaggagaatcctcccctgccccttggctcaaagggtaagtggccccttaccctcctcctgccatcagcctgcctcctcccttccttgactgagctcagccctgcccagctgtggtttacattatccttcactgtgaacatcatcttggcagaaagt

SEQ ID NO: 91638 - DNA, 1286 bp, Homo sapiens
ttcatcccgcagtagctctcagccctcccagcccctgcagggccacgtctttctctattgccggtcagcgtgtgtgtgcacaaagcccctaaggtttcatgtgtacacaccggtgctaagtgttttttacacccttgtgcatctctcggcctggggctcctgtgcaggttgccctgagagttgggtttttagttcaaaaagaaggaacacagatgactactctgctggcgacacggccactctgctggcacgcacatagcatggcgcctccttttttgggggactctccttggtggcatctctggcaggctgtgtcctctccagctgcagttctggaccctgtctgggttggggaggggcatttggtcctcaggctgagcccacctggattccccaggcccttggtgagcgccactctggctgcaactccccttgcctggcccgtcctgaggcccctctctcgtcctcagtggtggttctggcggggctgttcgtgatggtgttgatcctcttcctgggagcctccatggtctacctgatccgggtggcacggaggaaccaggagcgtgccctgcgcaccgtctggagctccggagatgacaaggagcagctggtgaagaacacatatgtcctgtgaccgccctgtcgccaagaggactggggaagggaggggagactatgtgtgagctttttttaaatagagggattgactcggatttgagtgatcattagggctgaggtctgtttctctgggaggtaggacggctgcttcctggtctggcagggatgggtttgctttggaaatcctctaggaggctcctcctcgcatggcctgcagtctggcagcagccccgagttgtttcctcgctgatcgatttctttcctccaggtagagttttctttgcttatgttgaattccattgcctcttttctcatcacagaagtgatgttggaatcgtttcttttgtttgtctgatttatggtttttttaagtataaacaaaagttttttattagcattctgaaagaaggaaagtaaaatgtacaagtttaataaaaaggggccttcccctttagaataaatttcagcatgtgctttctttatgggagtcctaatttcaaccctaccaaaatgatcacaagacactatctgaggtgtcccattctagaaatagacccctcaaaatagcgtctttcagatctttttgaatgaatccacaagatgaaataaatgtcctattactgagtgcccgtgaactttcgccaaaccacacttagcctcaccac

SEQ ID NO: 91639 - DNA, 1029 bp, Homo sapiens
gggtggatggatggatgggtggatggatgaatggatggacagatgaatgcatcagtggatggatagttggctagatgggtgggtggatggatggctggatggatggatggatgaatggatggatggatggatggttagatggatagatggatggatgggtgggtgagtgggagggtgggtagatggataggtggatggatgggtgggtagatgaatggatgcatagatgaatgtatcagtggatggatagttggctagatgggtgggttggtggatgaatggcagagcttgcacctgccagtccatctgacatcaaagccagtgtctctaatggtgacaccaccctcctctgcagcaggaggcagagctgtgggatgaatgaggttcgccaggtctcccttacctatcctgggtccccagctccttctcactctcttcccttgcagcctcgaagcggaggatccctgtgtcccagccgggcatggccgacccccaccagcttttcgatgacacaagttcagcccagagccggggctatggggcccagcgggcacctggtggcctgagttatcctgcagcctctcccacgccccatgcagccttcctggctgacccggtgtccaacatggccatggcctatgggagcagcctggccgcgcagggcaaggagctggtggataagaacgtgagtgggcggggctggtgggagtggggggatgcacggggccacagggcttcagacttgagctctgcctccccagatcgaccgcttcatccccatcaccaagctcaagtattactttgctgtggacaccatgtatgtgggcagaaagctgggcctgctgttcttcccctacctacaccaggtcagcacccccaggggaatgtgggtctgcagtgggcctgtggggggctcaggggtgggggcaggtgcatggtggagccgggagattcgcctcgagggaggagggcctgtagcagggtgggaggggcctggctctgagggtcctgcccgtctccccatccccg

SEQ ID NO: 91640 - DNA, 1342 bp, Homo sapiens
cgggccctctacaaggtgctggtcacaggtgagctgggtggctagggcagggctttgaggaggacctagccctgtccctgggggagttaaaggctcacagtcccactctgggacttccaaaagggatccaaccccaccctgcagggtccagtagaactgcggccccgcctggaaaatctgagccccaggatgaccaacgccccttctccgcctttacagtctacctcttcctgggcctggtggccatggtgctggtgctgcagaccttccgccacgtgtccgacctccacggcctcacggagctcatcctgctgccccctccgtgccctgccagtttcaatgcggatgaggacgatcgggtggacatcctgggcccccagccggagtcgcaccagcaactctctgccagctcccacaccgactacgcttccatccccaggtagctggggcagcctctgccaggcttgggtgtgcctggcctgggactgaggggtccaggcgaccagagctggctgtacaggaatgtccacgagcacagcaggtgatcttgaggccttgccgtccaccgtctctcctttgtttcccagcatctggctgggatgtgaagggcagcactccctgtccccatgtcccgggctccactgggcaccaacataaccttgttctctgtcctttctctcatcctctttacactgtgtctctctggctctctggcattctcgctgcctctgtctttccctcttgctgtctctgtttctcattctctttcatgttccgtctgtgtctctcaattaaccactcgtcaactgctgattctactgggctgtgggctcagacctcatttcaggcaccagattggtcgctacaccctggacaagtgactgcccgtctctgagccttgatttcctcagctgccaaatgggaagaatagaagaatttgcccctaaacccctcctgtgtgctggccctgtgctagacagtgctggagacatagttgggggtggagaactgcccttatggagcttgcagtccagtgaggtggacagacctgtccccagacagtgatggcccaaaatggtcaggactttaatggaggaggtgaggtgttgaaagcacaggcagagtggtcagggctgaagtcggagaagcatagggactaggcccaatccagcctggaaagtcagggaggacttcctagaggaagggacatcgaactaagacctgaactatgagaaataggcaggaagaagttgtacctgactcatttttctcaggtgtctccagggagcaggacccatggagggacccctggtgtaggcctgggcgatagactcttcctcag

SEQ ID NO: 91641 - DNA, 1087 bp, Homo sapiens
caagaaggtgccggctaagaagctggtgccggcgtggaaggagaaggtgtggggcgaggaaacaacgaagggcgaggaaagatcccgaggcgaagagacagttttcatcgagaaggggcagggcgaggaggaggggcgttaccagagggcgggacggggcgacgggcccgcgcgggaagaaccaatcgccgagaacccggggaaggaacgggtccataaagaccaagtggaggagtaggggcgcggtcaggagcggaagcagagtgaggagcaagccccgggcgagaaacgggggcccggccgggagcaagagcaggggcggggccgggagcaagagcaggggcggggcccggagacgggcgagaccaggtacagtacccagcccctgggcagaccccgagcgaggagaaagcggcgataccaagagaagtgcgagggtggggcaagaggttggggcacagccgggtggaagtacacgggtgcgatcgcaggcagaagcagtacgggggaacttaagagggggactgtcaaagcgagaaatagaaaccaagaccaggtgaagagcaagagtggaatacagggagggggcggaataaggagcaaggtgaggataaagttaaaggaagagacgtggaggcggcggggcggaacgaggcggaggagcaggggtgtggccagaaacattagtagggctggggcccggagcaatagcagaggtgcgatacccacgagggtcgggggcagggccaggagcaagagcaggggcgggaccaggagcaagtgcagaggcggagccaggaacaagagcagaggcggggctaaaagtccgtgcgggggcagggccaggagcaagagcaggggcgggaccaagagcaagtgcaggggcggggccaggagcaagagccggggcgtggccaggagcaagtgctgtgagaggcgcagaagcgaggtggaatcttaaaagtgggctccagagagctgtccggcgcgtgggtgttgactcctgcgttctccaggttctagccacgttatgtgcggcccagccatgttccctgccggtcctccgtggcccagagtccgagtcgtg

SEQ ID NO: 91642 - DNA, 1034 bp, Homo sapiens
ttccaaggagagaattgcatggatactaagggaagagcagttcatcaggagaaacagcatttcatcaggagaaacagaggccctgaggtgggcatgttcctgggaggtctgagaagcagagaagaggccttgtggctgggagagagggaccgagggggagaatggtaaggaatgaggtcaaggaagtgagaaggacaaatcgcgtggggccttgtgggtccaggtcaggccttggacctaaatgagatggagtctcaggagagtggggagagtgttggcgtccctcctgtccctccttggcagctcttcaacctgatgccccagtactttgtgggtgtctcatcgaggcccttgtggcacactgtggaccagtcacctgtgcttatcctgggaggcattcccaatgagaagtacgtcctgatgactgacaccagcttcaaggacttctctctcgtggaggtgaacggtgtggggcagatggtgggcggggcgtcttggagggagctgggcctcagcccctgaaataaggtaggggcctggggctctagaagtccccaaagacatatctgtccccatgagaggcagatagcatgaagaaaaaacacaagattctacagccagagggcctaggttcaaaccctggttctgccacctcctggctgcctgaccctggacctggcagttcaacgacccggtcttcagattcccatttgtaacatgggagtaatatttatatttacttcataggattgttgtgaggatgatataagttaatagtttctggccgggtgcagaggctcatgcctataatcccagcactttgggaggctgaggtaggagaatcgcttgagagcaggagtttgagaccagcctggacaacatagtgagaccccatctctaccaaaaatacaaaacttagccaggggtggtggcatgagtctgtagtctcagctgctcagaaggctgaagcaggaggattgcttgagcctgggactttgaggctgcagtgagctatgatcacaccactgcacttc

SEQ ID NO: 91643 - DNA, 1029 bp, Homo sapiens
gacccacagtctcatgactgtgaccaaagacagacatgctctgataggccaggtgtgagtgacgaaaggccagagaatgagatcccaaggacggaggggctggtgggcataaggagggcaatcggagttggcttgatgggctgccagacaggagggagagggcctgaacatgaacccgaccttgctctgcagatggccaggtgtcctttgagatgctgcccaggcagtggtctgtgtgcgagcagataggaggtactcattaccccgatgggtctgcggtgggaggctgggggaactgaggatgcagaagagcaggggagggtggcaggggtcatgggaaagaatgggcagtgtcttagggaggggtgagttatggggaggggtacagctggcacaggaccaaggctattgagccctggggcggctctggactgcccctttccctctcagttaccacctgctccataatttggtctgaatacatcgcgggtgagtatactctactgctgctggtggagagtggatatggtaatgcaagtaaacgtttccaggtggtcagctacaacacaggtaatgagggtgatgcaaggggctgggcacaaaggggcaggatcccagactgtggactgcatgcccatcctgagggatctgtgcccagcagacagagggagggcaacattacctgtgtcactcctggttgaggagtagcagtggagaacaggatataggcttggtgatctgaaagggccctgtggctcacaataaagagattttattttacctgcagtgagaatagggcccctatgtagatttgtgcaggctgtgcagtgcacaaaacccccaaccgaggggtcagaggagacaggtcctgtgccttaacaggactgtttcctctcaggcagtgcctttttataattcacatgaagaaattctaaagggctaggcaaggggctcacacctgtaatcccagcactttgggaggccaaggccagaggatcccttgaggccaggagttcaagaccagcctgg

SEQ ID NO: 91644 - DNA, 1075 bp, Homo sapiens
gtgcagtcttggcctctacctccctggttcaagcgattctccagcctctgcctcccgagtagctgggattacaggcatgcaccaccacacacccagctaattttttgtatttttagtagagacagggttttactgtgctggccaggctagtctcgaactcctggactcaagtgatcagcccgcctcggcctcccgaagttctgggattacaggcatgagccactgcaccaggccgtgttaatgatattaatgaccatattgcccttgggggtgagggagagccaggcagctggtggtggtgtttgtgggagggggactgtccttcctgccccttacccctccaggggcctgaggagaccctggccacccctgtgagccttttttcctcccaccgagggcaacctgatggtgccagtgttcattggctgccccccaggcaagcgcctggccttcgacatcacctacacgctggaatacagccgcctgaagaacaaacactactttgactgcgttaacgtgaacccggagatgccctgctttctcttccgggacagtgtgtgtccagtcccttcccctgcacagttcactgccctcttgcccccactactttgtgctctccctccccattcctctccccgcagactacccaccctttttcctgcggcatctcactttcccccgtctcggtcctcagcttctcgggccaagctaatttcttcttctggtctcaatcccctccaaccccatagttttctaccccttcttcttgattcaagatttggtgacaggagactccggcagtttccagggcaggtaaaggcgtggccagcttgcagctagggcaggtggagggagtggaaggagatgggtgcaggactcgagacccggaggccagtctgtgtgcacttctgtccctggtagctatgttctgctggtggtgggtggcgggcccacactggacagcctcaaggactacagtgaggacgaaatctaccgcttcaacagccccctggacaagtaatccccgtggggtcccacgtgtaatccaccttgcttcccctggaggcctttccca

SEQ ID NO: 91645 - DNA, 1075 bp, Homo sapiens
acgacacccgctaccttttggcttggagacgctgccccgaaggcggaacctccaggacagctacgtagcgtcccgagcactcagactgaagccagggcagccatgttcattattggaaccgtgaggtgggtagggggggtggtgttgagacagctgtcattttcagttagggcaaaagccaacttccggtcaccatcttgagtgacgacagaggcggagctccaactgacatgttcattaagggcagggctccgagggcgccacctcgagagcgacggcgggctacccggggcgggctgaggcaggttgtagccccgccccgggccttgggctccacctctcggccccacttccgccgggcaagcgtttgtaggcggcgctgccgtaaatcaggcggtctgcttgccgcatcacgcaagatggcggccgcggcggtgaacggggcggcaggcttctcgagctccgggcccgcggcaacctcgggcgctgttctgcaggccgcgaccggcatgtacgagcaactcaagggcgagtggaaccgtaaaagccccaatcttagcaagtgcggggaagagctgggtcgactcaaggtaaagtcggcaggcccaggaaaccgagtgttgcgggcgtgggaggcgctacgaggtgtctggacccaaccaagtcccgggccgcggaagccacctcggtgccagcgagactgaggcgggctgggggatccgatggggtgaaagatttggaacagccaaagtgggggctcggagggcgtcaagaagcgagagagggacagggagcgttgatggtcacgcctgtaatcgcagcgctttgggaggccgaggcgggggagcgtcgcttgagcccaggagttcaagatcagcctgagcaacatagcgagactctgtctctacattttttttttaagtgagagatgactggaatggacccacgcgggggtggtgggggaatgattggaagacttatggcagaactgagtgaggggttagatttttggtgcgtggaggcttaactggtcggagtggcaggattgggattcgggcttttcctgatggtggat

SEQ ID NO: 91646 - DNA, 1610 bp, Homo sapiens
aggtgaagttacttgtcaagggtcgttgggcagagtacgattggtgagaaaagagagcataggacacgtgggcaagtgctggccccatagggtggggatggagcctttgtgatcactctactcgtctctaatccctcctttcctgcagcgagggtgggtcctgggccccaacaactactacagttttgccagccagcagcagaagccggaagacaccaccattccctccacagaactggccaaacaggtcatcgagtatgcccggcagctggagatgatcgtctgagccccccgggcactgggtggggcagggcacgagttatttaaaacagttacactgcagggtttcgcccaataaaggtggactgacattccctcttccaggcccttgtctccccagttgggacggcagagagacaagttcttatatctgaagaacttggaggttttggggcattcaggagttggagatagcctccaactgggtcagcctctgtctggtgggcattgctcagggtctcaaacatggacgcccactgtggggccccagcagcactgtggcctgcaggagggcatggccccaggtagggggactgttctagccagctgtggacacataggaatgctggaccagggtaccagattttttcaacaaagggggtgaagtgtcctactaaaaagaataaatgttggcagtgaattaaacaatttttcaaatgacatgtgaaatggaacccatctgtaggctgccagtttgggctctttgtggaacaaaaggtgtgggccctggtgtgggcttgtgggtcccaccctccctgagccagcatgtgattgaggacctccccgcacaccccccagcctaggtttcctgccttgaaattcttgggaaggtgttcaaggcgcagggtccaaatctggctgaatcccttgtgggatgtggaaatttcacaagtcttccagagttagttttcccaactgtgaaatgggaatgatcactcctttgcaaagtggtttgtgctgagcctgtgagcttggtaccaggttagctcagaattggggcttatggattaaggggaatcagatcccccccgccctggacccatcagtctgggtgctgggtgaatggaacctcagttactgctgctctggtccagcttcacgattgtttccaagatgtgctttaatggcgatcctgccctgctgcaccctacccactgccttggcgagtgattgacaggctgctggcatctggattggttattttattggcatggaggggaaggtggagggtgttgagccgactacactcagttggaatgggtggcctgcaagtcgtagtgctccagcttggccaccagagagccggacagcttgatggtggcaacccagggtggctcgcccaggtggttggtggatgtgctcagcctagtgggggagggtagagtcagcaaagcccagcaatgggaccaggcctctagcccttctagggcctccctgtccccatatgaatagggaagcttctgaaggctatattggaatatcccaaaggcagtttagggcagggctgtggccacttaataggaaagggagctgagggctggcgagtgtcc

SEQ ID NO: 91647 - DNA, 1099 bp, Homo sapiens
ctaagactgggatggattctgatctgtttgtcccttcgttccgcagagctaccctccgcttctaccgttcacggggattccggaaccctcagagcccctggcaggggcagggggcctggggtggggcggccgcggctacgaggattaccggcgctccgggccacccgcgcccctcgccctgtccacctgcgtcgtgcgcttcgccaagaccggcgcgttgaggggcgctgccctgggtcccccagcggcactacctgcccctttgaccgaggctgcgcccccagcgccccccgctcgcccaccccccggcccgggcccatcctctgcgcctgccaaggcctccccggaagcggaggaggcagcgcgctgcgtgcattgccgcgcgctcttccgtcgcagagcagacgggcgtggcggccgctgcgcagaggccccggacccgggtcgcctcctggtgcgccgtctaagctgcctgtggtgcgccgagagcttgctctaccactgcctgtcggacgccgagggcgacttctcggacccgtgcgcctgcgagccgggccacccgcgccccgccgcgcgctgggccgcgctggccgcgctctccctggcagtgccctgcctctgctgctacgcgcccctgcgcgcgtgccactgggtcgcagcgcgatgcggctgcgccggctgcgggggtcgccacgaggaggctgcgcggtgaggacggcctggtgggtcccctagccggcccgaggacccaaaattgagggtccaggaccccggactccgttcggacctaaaacccaaacctaggcacatccggaacttggagcttgagtttggattgagagatctcagacctggaacctggaacccaaacctaggactgagagaccccagccccagcttcattggggtgtctgtctaagaagtcccaggcgtcctgagttctggcgttcccccacccccacaccccacgaggaggctccaggcgtccccatactttgcatctcagaaaggccagggagcacatagatcccgaaaagggcaggtccctgttgaaatgaacaacctagaacccggtcacgcctggcaccatgtccctcag

SEQ ID NO: 91648 - DNA, 1039 bp, Homo sapiens
caccacgcctggccaagtgtaccccatctttaagagatacgagcagagtcaggcacagtggctcatgcctgttatcccagcactttgggaggccaaggcaagaggatcacttgagctcagaagtttgagaccaccttgggcaacatagcaagacccccgtctctactaaaaattaaaaaaaaaaaaattagctgggcatggtggcgcatgcttgtccatctcagttactcaggaggctaaggtaggaggatcacttgagcccaggagattgaggctgcagtgagccaccatcacgccaccacactccaggctgggtgacagcgagaccctgtctcaaaaaataaatatttatttgagctgtgggcagtgaggtcttgaatggtaaagtaatgcttccaagatgacaggtcccacgtggggaagggctccagggtaccttctcttacctcctccccactccaggcccaaggagaggccatgagggcagtgctgatcccaattcgagaggttctgaccccagaatcggacatctccattgcacacgttctggctgcccgagccgacctgtcttgtctcgtcccagccaccagcgtggctgtccgcagagggacctgctgtgccatcaacaaggtgggcatctggggtagggaagggccctggcatccttggccttcagattggcctttcagcctctgctccagtccaagtttcagacttaccacctctaatccacccactagacatggcagctagaaggacctcgctcacacaaaaactgactgtggactccccagctcagaatgcttccgtggctccctaatgatctgaaaacaaagtctagctatttactgagtccctggctacttctccagcttgggcttaaaatccttccctatcaccaaacactacctatttgttgttttttaacctttttttttttcaagacagagtcttgctctgtcacccaggctgcaatgcagtggcttgatcttggctcactgcaacctccacctcccgggttcaagcgattctcctgcct

SEQ ID NO: 91649 - DNA, 1051 bp, Homo sapiens
tcagctcactgcaacccccacctcctgggttcaagagattctcctgcctcagcttcccgagtagctaggattacaggcacatgccaccaggcccagctaatttttgtgtttttagtagaaacggtgtttcaccatgttggccagacttgtcccgaactcctggcctcatatgatccgcccgattcagcctcccaaagtgctgggattacaggtgtgagccactgtgcccggccagtctggtgctatttcaatcttcagcaagacttgccaggggtgatgctgccccatgcacaatacagataaggaaactgaggcacaggaggttaggttgcctgtccaaggtcatgctggggatcaccgttagagctggtctttgaaccaggtggtccggcaggatctggagctacgctctgcattgcttgagggccattctgtcacagagtacccctccttccaccccagattcagctggcagcctgtgccacgaggaccacatgctcaacatggtgctggccatgcacagctgggtgctgccgtccgccgacctggctgcccgcctgctgacctcatatcctccaggactgtgagctatgggtggagggcagagggcagagtcgtgagaacctgggcaatgggaatggggagcaggcaggtcatggatcctggaaaacagagccttgaccagaactcaaataccagaaggccacaggggacacccaggagctgagacggctgcagatctgtcacctggtcaggtagggctgggccgagatccccactctcaggacccacgacttccatcctgcttccccctcaaaaaacattcctcagagaatccccaggccagttcccacagacccaaccagccccacaggccaaaatcccacttctgagacacctgtagcttggttcctaagaccctcttagttccgttccttagaacccccacttcctagagacccccctcaccaaccagatcccatagaccctcctagctggtgcccagagacctccaactctgatccccaaaatctctacctcccacagaccc

SEQ ID NO: 91650 - DNA, 1029 bp, Homo sapiens
aggggaagtataaactcagtcctggtgttaataaggactgaattatcatagactgaatctcatattggggatagagtcagagaggacaagaatagatatggggagccaaggaggagaggagagcaatgggactgattgggaatatgaaaccaaaggggctgatttagatctgggaacacaccgtcactagttgttgaaggaatatgaattcgtgaatccaagaaagacaaggaagggagggcctgggtctcctattgtgatgcctcttattttcctcatcctaggggatgctctccatggtcctgaattgcatagaccgcctaaatgtctacaccactgctgcccactttgctgagtttgcaggggaggaggcagccgagtcctggaaagagattgtgaatcttctctatgaactcctaggtaggggtcccagtcctgactcccctgagaacaccccagatccccagtcctattggatctgacacctcttcccccctcagcttctctaatccgtggcaatcgtagcaactgtgccctcttctccacaaacttggactggctggtcagcaagctggatcggctggaggcctcgtctggtaggagaacccgggggagtgggacagaggcttgtgggaggggatgggcatggccgcttcacctctcattctgggcaccctggcaggcatcctggaggtcctgtactgtgtcctcattgagagtccagaggttctgaacatcatccaggagaatcacatcaagtccatcatctccctcctggacaagcatgggaggaaccacaaggtcggcccctcacccctgacctctcatcccctgaactctgaatgctggcctctccccagggctccagaactctgctcactccctcacttccctcctccatctcatctctcacctgtacgccactcccactggctttcatctccacacaggggtctcaaacaatgactcttaagttgattctgggccacagatgtgcttggttagatctctgaaatgtttttttttttt

SEQ ID NO: 91651 - DNA, 1029 bp, Homo sapiens
gggcagcagggagccccaaaatggcctatgtggagggtttggggcccaaaattgggggtccagagtgaaatccctcaattttggggggttcaaggaggagaaggttctgcaagtttggatctaggaggatctatgggttgaggcttcgatttggaggttatgaaagagggggtggacctctagtttgggagcttggagagggcaatatggggatgatttgagcatacaattgggactgacatttgggtttcaaggagagggaccataattcaggtttggggttcagggaggagggctgatgattgcagtgtgtgagtttgaggtcctgggggtcagtaaggcttatagcgacctcctacccctgcttcacccggttttcccagaaatacgacccggagctgtaccgcatggccatgccttgtctgtgcgccattgccggggctctgccccccgactatgtggatgcctcatactcatctaaggcagagaaaaaggccacagtggatgctgaaggcaactttgatccccggcctgtggagaccctcaagtgaggcctgggggctgggagacagagaggaagatttcaggggtggagggaaccccagctccaacatctgctgaccctgtgcccccaacagtgtgatcatcccggagaagctggactccttcattaacaagtttgcggagtacacacacgagaagtgggccttcgacaaggttggcctcagggtcctcctatccaagaaaccctcaagaccccagctttccccccgacctggttcttccctgaggccccagatctccctgagaccccccagccttccctaagacccttagcttgttctgggacccccccaggattctctgtcctcggctcctccagggtcgccccgtgtgtccccaactgctgcctccccctcaccctgcctcccctccatctctagatccagaacaactggtcctatggagagaacatagacgaggagctgaagacccaccccatgctgaggccctacaagaccttttcag

SEQ ID NO: 91652 - DNA, 1055 bp, Homo sapiens
agccagtacacaaacccttggctccccttcccacattcatgcctgcctcacgcacactgcataactgcaggcccctctcacactcatactcctcctgtccccccacagagtcccaggcccttgcacacctgccccgtgtgcccacgtccaccgtgcacactgagcctctcgtggttgcacacttttggcatcttcccatgccgccacgccctccttactcctgatccctccctggcccccggtgtctcctcacatactccgcaggaacccttgagatcttgcacactcatctgtgcccctcggggccccactgcatacacacccccatctggcacacaagtggttgcagcatcctggcacccaggatgtccacacatccctgcctctgcaggaagcccctgttcaccacggcccttcccactcattctttgcacgtgctgggggagctctgccctcctctcttcctctgaccctgcgtgctccccatacaaacactctttgccttagtgctattcctccaaacacccgcttccttctgctcaccccttcccattccactttcccctgcttctcaggcatccacgtatgcccatgtggccttggagcacctgtggggcagtataataataggtaacactacggtgttgttgttgtttgagacagagtttcgctcttgttgaccaggctggagtgcaatggcacgatctcagctcactcaacctccacctcctgggttcaagcggttttcctgtctcagcctcctgagtagctgagattacagccatgtgcaaccatgcccacctaatttttatattttcagtagaggcggggttttgccatgttggcaaggctggtcttgaactcctgacctcaggtgatccgcccgcctcggcctcccaaagtgttgggattacaggtgtgcgccaccgtggcctgcccactatacagcatttatcaggcaccgggcgctgttctaatcatgcagcatctattaactcatttaaccctcacaccaaccctataatgtaggtcctattatgcccattttacagagg

SEQ ID NO: 91653 - DNA, 1049 bp, Homo sapiens
cccacagctcccctgttctcacatcctggcccgatccctctgcctgtgccccacccccattccagccctgacccctatatgcccctacatcccagccctgacacccctgcctgtgcctctccactgccagccccgactgctctgcctgtgccccccaattccagccctgactcttctatctatgccccctatcccggccctgacccctctatctatgcaccacattccagccctgacccccctgcctgtgcctcccccatccctgccctgacccctctgcccatgttccccacatcccagccctaagccctctgcctgggcctcatttctacccttatcactgggaaagcacttctgatgtggggtcacacacagaccccagcaagatgtcatggcttctgctgagactatggtccagccaaggtgcctgacgcccacctttggcctcctcccactatccaggtgcccctggtaatctttaagcgggagaaggagctggcccggaagctggagtttgatggcctgtacatcacggagcagcctgaggacgatgacgtgaaggggcagtgggaccgactggtgctcaacacgccgtaaggacccagcccccacctcagggtggcagcaggaggggacctgggtttccacccagtccaggcctggaccccaaaaaactagggtttcggtccgggcacggtggctcacacctgtaatcccggcactttgggaggctaaggcgggcggatcacgaggtcaggagtttgagaccagcctggacaacatggtgaaatcccgtctctactaaaagtacaaaaattagctgggcgtggtggcgggcgcctgtaatcccagctactgggaaggctgaatcagaagaatcacttgaacctgggatgtggaggatgcagtgagccgagatcgcaccattacactccagcctgggcaacaagagtgaaattccacccccttccccccagacaaaaaaaaaaaaacctagggtttcagtccctgcaggccctgcctcattctccccaagtcttactctttct

SEQ ID NO: 91654 - DNA, 1815 bp, Homo sapiens
cacctccctcggaacttggccatggcctaaacgtaaggctgctgcgtgcattcccgcagagctccgtggcctcatggccgcgcgcaatacaacgcgcgcgcacgccgccagagctccgggtgcttcccggtgagttcgcgcgcgcacgctcccgcgctaccggcactggaactgggtctgtgaggcccgggaaaagcttagccccgccccctcgccacgagaggcgcctgcgcactgggatccagtaagatttttctcacgctgtctgtccagcttgagtggcgcgaatgcgcacgcgccaattgcgcctgcgaggaagaagtcacgtggcagccggaaagcgtggcggctgctgctagagcctttccctttaccgcacccaaggagctggagcgacaacaacgacgtcgtttccgtttccaccacctcttcctgttcccgtccttgaggacgccgtgccgggtcagtgttagcctccagccctggttgtggaaggcgacagaagtcatggcgatgtttgagcagatgagagccaacgtgggcaagttgctcaagggtatcgacaggtctgagcccggttggaggaagcgctctggccaagcggggcggaggagagggttttccggagacagcaaggggtgttcagggtcctgggcttgccgcggggtggggtttctctatcctcctggaggaggagatgcttaaagaaacggcactgagctgggggtagtggctcacgcctgtgatcctagcactttgggaggccgaggtaggtgggtcgcctgagcccaggagttagagaccagcctgggcaacagccaaaccccgtctctaaaagaaagaaacaaaagcactgcaaaggcctagaagcgagagaatcttggtaccactcagtctcttcgtaaattgccttaaggtttccttctctgctccgcctcctttgagtgcctcttaatctctcccttctctgctctataagtcattcattctccacacgtttactgaaataaactgtcagtgctaggcaatgctgggaaccacaggcgaatcagacagcggcagatcatgccttcacggtctgagttccctttccataagggagacaaacctgacagcagacagcgatagccgggagagattagaactgaaatgggggaagcaaaggccagagtgttcaggtggacatggaggaagtaggcagcgaggtaggcaggagaggatggggctggatcagggtggaggcctgaacaggggaggaaggggtgagtagcagagacattcaggaggccaggtgtacaagctgcagtgactgactggctcagaggttgaggaggcatcctagggaagagccagggctccagtggagtttagagcttaggcgagaggtctgggataagaataagttttactagagattatactggacataattcactacctggatagagcaagtggccagtgccagatttagaggggaagggcgggaggagcaggttacagtggccccttgctccataaggtggctggcctcagcttctgtctcctctgtgctcacctatcttgattctcctttaggtacaatcctgagaacctggccaccctggagcgctatgtagagacgcaggccaaggaaaatgcctatgatctggaagccaacctggctgtcctgaagctgtaagtgtctagctctctgtctacactcccattgcagcaactagcagggtgccactcccagtacagggcaagggggtggctggtagtatcctgaacaatgcagcatctcttggtgtgcaagactaggaagccaaggaagtt

SEQ ID NO: 91655 - DNA, 1049 bp, Homo sapiens
ctgagcaacaagagcaaaaactccgtctcaaaaaaaaaaaagtgtattgtttctggtaatggtcatgttataattttgcaaccgtttcatataggttgtgggaaaaggtagataaatacgctgctcttgttaggaaccaaaatttgcccagggagagaaaacagaggaatagaaattaaggcagaagccccacgatgaggctgaaagagctcacaggctccctctggcggccattcagagaatgacccgtggaagggcaggggcggaagcaaggagaccaggccagctgctgctgtccaggagatgtcagtgggcaaggggggctgccctggcttcctgagccatgactctgttgcctctcagtcccctggaactgtgggatcaggctgactgaagccccttgctgcccctgtcacctgcagacagccagctaaaggtgtggatgagcaaatacggctggagtgccgacgagtcggggcagatcttcatctgtagccaagaagagagcattaaacccaagaacattgtggagaagattgactttgacagtgagtggtgacccacggcctcgggctttggggctaagggggtgcccctcaagggaggccgaggcaggggcccagaggacctgggtagatctgctcgtgttctgggctgggaagtctgcacctgccagattccattcaccttgtgtcttggggctcccgcccaggaggaatagcggggagctgggtgatcttccctggaacttctaggccctgtgtcctgccccatagcactcagcaagacttcctggggcccagcggggcctcacagggggtctctgcacccttatttgtccctgaggcctgtctcgttggccatcttttattcttggggtgcccaagcctcatgtgcagacttggaatccggtgaacagtaggaatcttgattctctagtttgggtgattccacatttttgtgcctcagttttctcatctaaaaaatggggacgactgcaacagtaactatgataaacactgtgtaggtccttacacttacatcatttg

SEQ ID NO: 91656 - DNA, 1049 bp, Homo sapiens
gcaggagaatcacttgaacccggaaggtggaggttgcagtgagccaagatcgctccactgcactacagcctgggcaacagaatgagactgtgtctcaaaaaaaaacttaagagtatcctgcaaatagtacctagtaaatattatcatgtaggtaattacaaacaacacttccttggcactttgttctaagcacctcgtttggtcctacaatcctataaggtaggtgcttcttaaagataggaaggtaggtgatgctcagagatgttcagtaacttgtccaagtgacccagctgttaattggcagagctgggatttgaacctagccctccttgctccagagtccatctttttaaaatactgcaccaaactgcctttgtgatggtaactggggcctggaaggagtttatgatctccccctaaagaattgtgggtgctgtagcaggtggctggaggtttgtctcccgcccttctcaccttcagtctggtctctccttccccacaggtgtgtccagcatcatggcctcctcccagtaacttcaggtgtttaataaagatgtgttgactcagccctactgtctcctccctggcttcctgcctctgccccttgcccaccagagggagctcaggagcaggcctctgctctgggttggcccccgcaccgtacccccagcccccaccacaccacaccccatggcggggtttccgcctcctttttcccctgcttcgacttcctcccttgccccaccctaccttcctgaccttttaggtcttgggtggggagggcagcattgagtcagcaaggaggagggagtatgaatgggatgtggcagcccagccctgtggtggaggctgagcacctctgggaggagtgaaggtgaagtttccctctgtcttgatggtggctcttgctttgtgaccttggtcaagggactgtgcctcttttttttttagacgaagtctcgctctgtcgcccaggctggagtgcagtcgcgcgatctcggctcactgcacgctccacctcccgggtttatgccattctcctgcctcag

SEQ ID NO: 91657 - DNA, 2556 bp, Homo sapiens
tgtggcttcctttactagaaggtagtttcatgaaagttgggatttttttctgtttttagtgcctgcgtaaaacatagtctggcacagaataggtgttcaataaatatttgttgaatttgtgtcgctgaatgggaacccggtgcagtgcattccaagcctgagctggttcaggtccgatggcggggcctgcccttatgaatcattcatgatctggccccgcccatacgcgaacgacgcgcgcgttcacgccggagagggggcgcggctcgcccccgggctgagtcgggcggccaggaagcgggactctgcgcaggcgccaagctccggagcgcggccttggtgccttttctggtttggcaggcgcgcgcgcgcgggagggcggcaacctcggcgctgtgcgcaggcgcggcgggcagtgcgcaggcgcgggcggagggcgggctgaagcagctgaagcggcggtagcggcggcggctcgggcagaggggcgggagctgaggcgggagcggacaggctggtgggcgagcgagaggcggcggaatggtggactaccacgcggcgaaccagtcgtaccagtacggccccagcagcgcgggcaatggcgctggcggcgggggcagcatgggcgactacatggcccaggaggacgactgggaccgggacctgctgctggacccggcctgggagaagcagcagcgcaaggtgcgcggcccgcgggccggacgggctggaggggcttttctgagggggcccggggaggggtgggaggtcctgaaaggtaactggagcgtctgtgatgggaacgggggggtcccgagaaggaattggcgggtccgggaagggaattggagtcctgaggaggaatcgccgagctagaggaaggaattgggaatctgaaaagagaattggcggctgggtggggaatatgggagtcaaataaaaggaatcgggaaggctgatgaaggatttggagggtctgggcgtgccattaggggaaaccgaggagatgactgggcaggctgaaatggaactgggatccgaggcgggcttgaagggtcggagcatgggttgggggtgctgggaggagaatcaggggaggctgagaagggaatttctgggtctgggaagtgtgaggaggagcttgagtgtggaggggttggttatttggagagcagaaagatctgaaggagattggaattgggggagcctcaggttgggggagttataaaggggatgaagaatcaagtgtgaggatggagtggagattgtggggtctgaagacgggtgggaagactagggaggctgggaagatgaaaacaggggctaagggtagaattgagcatgaaaagacatgggcttagggtgtgaggagggtagaggtgccaggactgggggtctgaggagggtggggtgcggaaggaagaagttaaggggcccgtgaatcagacgtttttgaagggggtgagatttatttgtggtgccctgttccaaaggggagaagattaagagataggaggaataataagaggaattgatgagggatggagaagccgaagtagaggggatacggagagtggggataatttggggagggatttctaaagaattgatgggaagctgaaaagctaaagcgttggagagaatgaggaagtgtagagggagaaggtgagatcggtgggagggagggtgagctggaatggtggataatgggagagaggttcgtttaggaaaatgaaagtctcattagaaagggaatgcgtaatggatagactgagaaaggaatttgaggagggggtgctggctcctggaggtgcagtcccgggactggagagcgtgtgtgtgtcgtgcaggcagaatgagtttggggaggaagcgttgagagtgtccaggaagaattgtgtcttttttggagagaccggaggtaggtgaagggatcctgaagcagagactgtgttcaggtggcactgtttttttggggggcggggggggcaacttggtagggccccacagcagtgaaaaggtgatcagaagtggagtgggatccccgagcgaggtgtcagtgtctgtgggggggggataaatccagtgtggttgaggggggagctctgagtgtgtgcaggaagagctaaagaaaggagcgtggtgagtgggtgtgtgtggggggaaggggttgttcagaagttttgtgcgtgaaatgggtgggaggtacttgaagttggaagcatttcgtgggatctggagatctggattttctttccagatttgttactgattcgctctgtggccttggacaagacccttgaactctccgggcagttttgttatctgcaaaatgcaaagggatccgagggttccctgcggtgattctgttaataaagagggatgtgtgtagagttgggactttggacagggctctgaaggtttgggagagtgagtttggtggagatttttcaggaacaggctacagggctttgagtggtgacctggcagagtggggagtgactggaagcctctcgagggcgcgagttggtggccaggagcttggcacaggcagcc

SEQ ID NO: 91658 - DNA, 1326 bp, Homo sapiens
aaaaaaaatcagatgacagaggggagcggggacaagttttaagtctaagcctcctgggtggggagttctgctgtttcaacatatgctccagtcatggcagactttggccagacagcgccctttttcagagtgaactgagtgtagcacaagttatctgccagtgctagttagcaaacagaatggagccaaaaaagaattgatttgggaaggcccaaggaatttgaaaccgttgagatgaacactttccgtttttgctacactgatttatgttgtgctgggaattgtacaagcctttgaccagaccttagggttgttctttaaaaaaaaaaaaaaaagattcccttgctgctgcttttacttttttgaagggcagaagggaagggcaaatataattagtgaacagctgtttgctctagtatcacttgctcgttcaggttttctgaatagctgaaatatcaacatgtttatctcttcccttgccttagtatatcctagagcagtgttttccccggctttatctttattccttcatttaatgaactccgtgttttcatcactcacattttgttcccttccctcagtttccttcctttgccttcatttatgtatttagtttacagaataacaaaagcactcgtgttacttttaaacaaggtaaaacttaaacagttttttcctccgtttctttttttatggaaataagaggcaagtgatagcaagtgggtaattcaatggcagtggtaactgaagcactgacctgttacaagagagacggaagcttctacttgagcagatacaaatactgtcatccgtggagatttgaaagaagtctttctatcactgggtagtttgagagctcattagtcttctttagaatgggtttaaacttggaaacatcaaagcaagttacaaggaaacttagttttacagtgttggcagcctaggcgccagaatttgttataaagtgtctgaaagtggcccaggtatcacttaacttttcttcaagaaggtctatgagttacattttactcggtatcccaggcatcaaggagtgtaactttcaatgaatcaaagagaaacagaatcattttaaattccagcctctgtttaaagaaggatcttatgaaggggagaaattaaccacctgacccagggaaggatcccgcctcctccagaaagtgaaatcgccgggtgtggtggctcacgcctgtaatcccagcactttgggaggtcgaggtaggtggatcacgtgaggtcaggacttcaagaccagcctggcgaacatggtgaaaccccatctctactaaaatgcaaaaaattagccgg

SEQ ID NO: 91659 - DNA, 1265 bp, Homo sapiens
ggtgcacccctgtaatcccagctactggggaggctgaggcaggataatcactcaaacctggaaggtggaggttgcagtcagctgagatcacgccactgcactccagcctggacgacagagtaaggctccgtctcaaaaaaaaaaaaaaaagaaaaagaaaaggagttaaatctttgcatatatttaactggcaagagcatccttacatcagtgcatgggaagttttatccaagtagcagtttccctgggattataaaaatccccgaggcatttgtcttggtgttgtgcctttttttggttgtgttttttcacgtccctcccctcccctttctccataaacaagagaggcattaacttggaatgtccgtggaaagtcttagaagctgattggtgtaatttgcctgccttccctttagtttgaacagcgtttactctggaagaggtcagtggcctttttcttggttgtgatttatgcaagtgttatctgaaggcgagtggagtgagtttacgtgggatttgctgtttgccacctgttgttgtgctggctccttccttcctgggatgagttccattctctccccctcccccaggagtgaggctccccagccagagcagtccccctgtgcttatccccttccttcgtaaactgcagccatttgtgattttccataaccacttttatagacacataataatttcctttgaatcagtttgcattttaaattaagttttgaaaggaaaactgacaagagtatggcaactggaaaacccagctcccctggccataaatataatagaaggaaactgcaaaaataaacacattgaaaacaaaacagtgttgtttccaggtggttaccactcgggctgaaggccccccaggcttgaggcctgctccctttgttagaaagggattggcaagtgttggtgaggtgttaaagacccaccagcaccaagcagagactttctctttgaagtcatcaggtttacaagagaatcaaaggaaataactttctcaatgtgattcagggtgtaatgtaaggtgtagataacccttaaaattttccatgtgtgtatgtcacacttgggaaaaaaacttgatctcatctggtcgaggtgggcagggcagcaccttgtccaggagcacacagcccctcttggctctgtgtgtcatccggccatactagactcgaacatatggctcatgactggatgatgcttgattcatcttcagtttcaagtgttagtgcttttgaggttttgtaaga

SEQ ID NO: 91660 - DNA, 3052 bp, Homo sapiens
acatgcagaaatggatccatgggcctttaagccacttgcccctgtgacagtgccaggatttgaatgtagaagttgaggctttcaagtttatgctgttatttctacactacactgaagtctagtgattgggaatggctttgcgagcgggtggtgaggggaggagtgtgcagtgcaggtacttcagatggagaggaaggtctcaaagaggtggcatttcagctgttccttaacggatgagaaagagagaaccaagagagcaccagaggaacgcgcttccaacagagaaaaccaagcaagggggcccccgaggagcagaaaggcccgagtggtcagagcggagcccgtggaagagatgggcacagccagattgcttagagctgtgttgttagaagtgctgatgagtctacattcaacttgcgcctgcaaactcagtccctcttagatgccagtaggtcaggaacctcatgcttccaggactctggcgctcctaccctttcctcccaggcctcctggacaggccaaaccagaactgacttctaaagtgggaaccccaagacggcagaacatgaatcagccaaacaaaagctgcagttatctctgtgatgatttcggcagtcggcacgtgtatttgattaaagcgttggtaactttgaatctggagttttatggcactgtgtactactcataatggctttgtagtgtggctctcttagggagcttaacttttacaacatgaacaagttccagcctcctttggtcccatcaagaggccatttctacctggtgggatgccacttgctttacaaagcatcttttgtaaaatgttgagtctccttctttgaagttggaagccaggaagcctgattttttttccaataagtattgtagaagatggcagcctgatttatttttatttatttatttattttgagacggagtctcactctgttgcccaggctggagtgcagtggcacaatctcggctcactgcaagctccacctcccaggttcacgccattctcctgcctcagcctcccgagtagctgggactacaggcgcccgccaccatgcccggctaattttttgtattttttgtagagacggggtttcaccgtgttaaccaggatggtcttgatctcctgacctcgttatccgcccgcctcggcttcccaaagtgctgggattacaggcgtgagccaccgcgcccggcctggcagcctgatttttaaactggcttttctcctaggtcctttccttctctataaatccctctttcacttagtatttcctccttgtttcctttggtcagttggagtgagggtggttctagttcagagaaagagacaggcatacaggctgattcagtctgaggtgcttagctttctgtacctcactggaaaccagtccaggaatatgacaggtttcagtaggtttcattggacccacaactccccatttgaaggcagagcttgtcaaacgagttatgtggcttttactcaaggagggaggaacagcaacagggagctctgggctattgatagacactcctgcctctgaacacacagcacccagcaagaagttaccttcatgggttgtctagagtgaacatgggctgggattctctcagccttagcactgatgatttgacaacaaaaatcgccccgtgggtagagtataacggagcaaatgattatggtggcctgtgatggtgcagccagcccagctgcttcagctggaaagaagatggcgaggtttccattctcctggcagcatagccatgtgaacttgttaaatcttttaagtagctgtataggaggggagataagtgtgtgtgtgtttattcttatccccttaaatacaaaaacaaaacttccactttataaaatcaattcagagtgggaagaggtgcatggcacatggaaaatgtgtcggattaggttgagtcctaccccacgtttgggacacagctgtaagtttccatggtgggtggcttattatgcatttatgctgagctgaacctgctccaagctgctgcagataggaaagtctgtcttggagggggagctgcctctttctatcacactataaagacataaaaggtcctttgaaagactccagcagtcaccacttgggtaacagaattaggggctgctgagcaaagtgggtctgtttttttttttttttaaagacagagtttccctcttgttgttcaggagtggagtgcaatgtcacaatcttggctcactgcaacttccgcctcctgggttcaagtgattcttctgcttcagcctcccaagtagctgggattacaggtgccggccaccacgcctagctagttttttgtatttttagtagagacggggtttcatcatgttggccgggctggttgtgaactgctgacctcaggtgatccacccgcctcagcctcccaaagtgctgggattacgggtgtgagccactgcgcccggccacattttatagccaaccggcttcttgtgtaacatgagttggggcttcttgggccccagagtccagcactcaggtagaaatatgaccgccatggccagacagcagccctcgctgggcccctcttcagagcagagctctgtgccgagcctttaggggtatgagagaaaccggagacctggtccgtgctctcaaagagctcgcggtgtagctggggagagagcaaggccacatgagacctcagaaggacactaaacggcacaccgacaagctcacagcactctagctgtgtcccgggagaggaaaggggtgaatcagggcaggtggggtcagtcatggaaactttcataaaggaggtgagtgtgcaggaggggcgggcctttgcccccgctgcgggcaggttgccgagggcaagtattagggggtccggcgtgcaatcgaacatttcttagctgcctctttggagtagcgctaccagttcctgtccccatgagcatcgtcttcggggagctgctggtttgaaggatgaggtaccatgctcatcttggccatgtcttagaacctgtgatagccagacctgtcgttct

SEQ ID NO: 91661 - DNA, 1084 bp, Homo sapiens
aaatcacaaggggtggggggtgtctcagaaatattcttagctgggttcaactttcctcgtttttctaagtttaaaaaatcctctcttactatttttgctcatcaaaatgctgctgctttttcagagacagccttttttgagccattccctatttagtgttttgggtaattggctgttacagtatggaatttgtggcccaaaggcagcgtggtaagttagacactaggtgcacggtgccccattgttatgaagtgtggaaactgagacgctggactagtctgatgtatctgtttcttccaccaaaaaaaaaaaaaaaccattttggagaactacccaatgccagtgacttggcatctctgagtcgctaatcttcccatgtgcctccaggaaccgtctggagcgtccctgaaaaaaggacaaggtttgtatcttgtcatttttcctctggctggaagtctaagaggtataaacacagtcttaaaatgaaagcaacaaaaataaactcaaagcagccctgcgtgaaggcattaatgcaaaatatgcaagctggcttcctatttatacggcggaaggcagtcagaagagccaggcctggttaaggaaggagttatgtctctggaggtgcctgttccttagaattacaaataaaccctgggtgattactcagatgaggttgtaatgtggtgtctcatttcatgctttgcacagtccagtttcttgatggaaccaacggcctctgaaatgctaatgcaggatcaggatacagttagagtgccccccttcctgtgcccctcctaacatcctaacagctttagaaggaagtttgaagattaaacaggagagccatgtaagtttcctgtgatcctagatcctgtgatttgttaatattctttctcttcaatccacctgacatttacccagataccatattaggcttggagatacaacaagaaagaaaaccaacccaaccctgtccttaaagaaaagatggacgatgaagggccaggcgcagtggctcactcctgtaatcccagcactttgggaggccaaggcgcacagatcacgaggtcgggagtttgagacc

SEQ ID NO: 91662 - DNA, 1029 bp, Homo sapiens
gaagagctacccatttgtgacccctaaccttgcatggtcttgaccctgtctctgcctctcctctagtctcccctttcctcttgtctgaattgctgctgcttaatcctctcactaggagcgagaaaattgtactttgccccttagtgacagctctgataaaaggtggttgaagtggatggtagtaaaaagggtttgctttagctgtggttttccagcctccggactcctccccctttcccatcaccatagataattaagagttgactcctcaaaattcctcccaccatattgcatatttttaggcttcaggtttttgtgaaccaaaatagtggaaagtttttttgtttgtttgttttgggtagcccaaagcaacacttttctacagaggcagccattctgcacgcacaataacctggtgaacaatgccagctttctattaataaatgaactgccagttcagaatttgtacccatgtggcagatggacagaaatagtttctttaggattgatctcttaaatttgactttgggaagatactggcagtccaggttttgtgacagagatccatcctgagatctttgtaaatggaaaagcctgaatgcagcgtttcttattgataggagagttgatggatttcaggaaaatgggatatagtagatgtgcaatgaatttgttgacttggaaacaaatttggacacttatccctgaaaacttcaggccattttttcctaaactctaattgagtccctgtgattggagtactagccccacagtccttatcaaacttcgcatttggagcaggcagtctgtctgggaaaagccaggaagctcgccatgaaggcatcgccctctgcttttaacttttttaggctctgttacctctgcactggcttgagtatttcctggctcaattgtttctcaggctggccttgagtccttagatgttatttgtgtgcctagaaatagctggaagaaaaatggttgtaatgctttgcattgctcactgctctccatggatggaaattctgt

SEQ ID NO: 91663 - DNA, 1123 bp, Homo sapiens
tgctgggacagatccctaacacagctcattaaagcagatagcaccattccgtctctttcttcagcttcactttacgtcagtcccagcatttttatccctacccttacagatgagagaactaaagttcagagaggtgacgtgacttgccccaggcccctcagtcagtaaaagacagaactgagaatccaaccagactcttccctttttaggttatttctctaacattagggccgagtatcgattctctttacctctgacttcgtgtccctggtattaagactcagggcccacagtgcctcttggaattcaggcatatggtgacatcagtgtgcctaccattcaggtcttggagaatagggtatggcgaaaggagagaactcgtgatatcgctgattcagtagcccagagttgtacgagtccttgggtgtttcaccttcatccaggcatctgagattggagacaagcatgtggctgaatgacgtatctgggggaagctgtctaaacagccgtgtggagttggagagttgaattagctctgtggccaaacctctgggctcagtctgcctatatatggcttgatctcaaagaacaggtgatagcagtaggagttgttttctgtgttgctggtgggagatgcccaggcacattcctttgtagacaagcacaaactagatatttttgaaatcggaggtctgaaaccagccgaagaattaatcctggcctggaaagcatatgggagagtacagccaacctggcttgggtgttgctttcttggttttgttgcatttttgaggcagggtcttgctctgtcacccaagtgggatcacagtggtacaatcatggctcattgcagccttaacctcctgggctcaagtgattctcctgccttattttttgattttttttgtagaggtgaggtctcaccatgttgcccaggctggtcttgagctcctgggctcaagtgatcctccaccttggtctcccaaagtgttaggattacaggcgtgagccgctgcccctggtgactttgttgctttttaataagcccagaaatttctttcaagagggaggatctttgtgaacatcttgagccgcgttcttgatcgctggctgtggaagcctc

SEQ ID NO: 91664 - DNA, 1947 bp, Homo sapiens
acccctgccaggctcattgcatcccatctaaaagtgtgctctggaaggtcataagaagtcctcacctgggacacttctaggcccagtgttcagccagctgtcctgagttctgcatcagtccctgctagatatgaaacacaaacaggatgcgatgcttttcttttttttctttttcttttttgagacggagtctcgctgtgttgcccaggctggagtgcagtgggtgcaacccctacctcccgggttgaagtgattctcctgcctcagcctcccaagtagctgggattacaggtgcacaccaccatacccggctaatttttgtatttttggtagagacaatgtttcaccatgttggccaggctggtctcaaactcctggcctcaagtcatctgcctgtctcagcctcccaaagtgctgggattacaggtgtgagccaccgcgcctggccaaacaggatgctttgcaagtaggcagaagagggagacatcactgtcccatggagaggtgggaaaatcatcgttagcacaggataattcatcctattttgtgctcatgtttactgagctaggattgacctgtgtccgggcagcagggacacagaggtgagtaagacaaagagaaggcccttgcccttaaaaatgatacgtgtggctaaaacgctgtagacctttttgttttttcctttttgagacttcctttttatacagaaattgctacctgcaggtaaaattaacttacatcgtgaaagcgacagtaaagtgtttctagggatagctaaagacctaagaacacagccctgtggtttgactggctggccaccttcctgcagctgggtttactatggtgctgtgttctgggacagcccactcgtctccatttattgggctgagcctcgagacctgcaataccagggaaggaagggaagtctaggctgtctttggtggccattgttatttatggggcatcggcagagaagtcagtaccatggaaaatctagagaaagatagaggatacgcagtgtggttgagcagaatctgatagctccctggctctctccgggccatgggacccagggcgacacagccaccctttttctctctgctgtctggcttgggcttgggctttgtctcctgtgtccctccacaccttcttcgctgtcagtggtgaccaatcccgtggaatcagccactgtgtgttaccccaagtccttgcccctgggacctcgctctgttcggagacaaaacccgggactgtttctccttttaaatgcaaccttgttccacaggagaggagaaaagcaagaaagaggtggcttgtttatctgatggtagtggggtgtgctctgatatgcctttgaaaggggcccagctttgctttgcccagcggcctttgcaggataatgagagaaggaaaacacagggaacttagtgggaatttgaaactggagtgtgggagtgggaaagttcagcttttaccttggagcaatccagtctttctcctgtaggaaaacagaatggtgctgtatggcctccaagctgggttacatcctgggaaaaagacacgtgcttggctattggcctgggcgcagtttatgtgtaagcctttccttgtggattccattttcttatttcccgaatacttctcagccccacaagtccactgagtcttctgtctccagagactgcctggtttccatccccgagggcatctgcgcatcacttaccatggtgtaccatgcacctccagtgtgcccggcactgtgtcaggagctggggatacaggtgctggtccccacctcactcccctcaacctctgcaatatatgatacataacccacacacacagaccatatgcaaaagtggtgggactcctttgtacctgtcacctgcatcagtgattatcagcattttgccagacttgtttcatcagtgtctcccaacacactcc

SEQ ID NO: 91665 - DNA, 1099 bp, Homo sapiens
aggccttatgccccacccagtcataaaaatgcctcttgctgttgttggttcaggctcagccccttagtggctttcatggggcaggttgacatggtacccagagtcctcctcggtcctcttcccatggtgtagtgagagcactcaggaccacctaggcctttcctagaaaactgaacccacaccttcccagtgctgccccaccctggtcccccaccccctgcaggacaaaccactcctcccttgttttggggccaggagtcagatctgcccctgagagcagcaggggcccctttgtcctttgacgtcatacccacaccgctcctggagacagccaccccttcatgccagccccaggaaggcttgtaggtggggcgagccagggtgagagtgtagccctgttcctcggccagggcagatgtttcaccatttttaatggagcaattatgagtcagaggtttcagtctctactggttcctcccgatcctataattactctttggctatagaatcctattttgatctcttcttttcttttctcttctttctctctctgtggtcatggtcaggtttttctttttttaaatcctcccaagacactgctaatgttgtctgtctcatgcatccaaggaatctgagatggactgaatattgtcaagggaaaaaaaaagagacccccaaatccagagtgatttcttaacccacccaaatggctttttgtttgtttgtttgtttgtttgagacggaatctcgctctttagccagggtggaaggcagtggcgtgatctcagctcactgcaacctctgcctcctgggttcaagcgattctcctgcctcagactcccaagtagctgtgattacaggcacatgccaccaagcccagctaatttttgtatttttagtagagatagggtttcaccatgttgaccgggatggtctcgaactcctgacctcgtgatccacccaccttggcctcccaaagtgctaggattacaggtgtgagccaccgtgcttggccaacccacccaaattgtgtaccctacaccatcctagtgcttgggagccaacacccactcacaggaggctaagggcaagtttaggt

SEQ ID NO: 91666 - DNA, 1056 bp, Homo sapiens
gcaggcctggagaggagccctgtggcctcagcaaagggcaggcaggctggtgagcacccaacctctggatcgaggggactcaattatgcggataaaggcccctaatcctctcagtgctccaaactcactctgcttctgaaagggatcttcgtaccctgggttcagagagtaggaagcccgcagggaccgagtatgcatgaaacaagcccaagtctgtgggggctgtacatggtcaagatcacagatttccagaccaagccagctccaccctagctgggatgcccaccctgagacacccctctctgctttcactggaataggatggccctgacttggccgggtggactgttgaatcagagcctctcaaaacaggaaaaaggaaaaggatcaccaagcaggagtttcagttgtcaaagacaaaacccttaccacgattaaagattactccagggcctcgcatattcacccttccaccagcagggcccagtttacggatcatttgaatactagcaaaaaaacaagccatctgctggagagattgaacagagggagaaacaggagtgtttgccctgcttccagacacccctttcctgtggcagttcctgcacctggcaagatctactggggaattcccggggtcccactagctcaggacgggtgtgtagcacttgcctaaataacaatcccatcagtgccctgtctgaccttttctccccaaatgccaaaggcctcttgtctggatgaacaaatccctgggcggatttgtccagactaaaacgttaattctaaagactgggccccttaggcactcgctaagattccaggccacactgtctcaaggccagaattggcttacttggctatctttttgaaagatcaaagtttaaaccagatgatctgtagtcccccacccccaccctgaaacctgagcttagctgtaagcattgaaagtaaatggggtgtttgtagctcaccctccctgttctccaggtgaagggccccgtgtgcctgatcatttcatagcaaaatgctagatggggccagaggaggccccag

SEQ ID NO: 91667 - DNA, 2320 bp, Homo sapiens
agcctggtgctcagtcatgtttgtgtgactgagtgagccggcggcgggctgaggcgcttttgtctggtgtgcgtactggtctcccttgaggcagcttgggggtgtggaaaaagcacatgttgccaaaattgacagacctgggttcaaatccaagctctgccacttaccgcctggatggtcttgtgatgggtcattaaccaccccgagcctcagtttcctcacatctgcctcccggggtcactgtaaggatcagaaacaatgtgtgtatcggccatgtacggtgtgtgtcggcgagtgctccgtggcagctgcggttctcctgaggtcagagctgcggccctgcaggtgtgtggagagagccccgacagccaggctgactctgcgcactgtcctttgttctgcttccccagaccttcacggcatggtgcaactcccacctgcggaaggcaggcacacagatcgagaacattgatgaggacttccgagacgggctcaagctcatgctgctcctggaggtcatatcaggtgagactcccagccacgcagtgcggccgagccctggcacaggtgctctgccacagcggtccccagagaccctgcccacccagctgtcccattgctcctggggaggagagggcaccccttaatagctgcacggtggtctgatgggtggggccagagtggcctggtgggccagcagaggaacctgcttttggagaacagaggagactctaaagcctctctccctctcgccctctctccctttctctctctctgtctcgccccctcttttctctttgtgcacttctcaggggagcggttacctaagccggagcgggggaagatgagagtgcacaaaatcaacaatgtgaacaaagcgctggactttattgccagcaaaggcgtcaagctggtctccatcggggcagaaggtgagctggaggtggggcagcgagggtcctgctcggtttctgacctttaggctctgaagcacaacatctgcatcctgaagagaagttttgttggtggcagggcgcttggggcactcagagccccagtacatactcagcagtgatcacaacaactgctcttgatatgatgctgggcccacaagctcccccaaacccttggaaaaatccggtgggcgcagtccaaatctaggaagtgcaacccacccaaccacgggggcgacggcttctgcagggggaggaatggttttgactcggactcaggtcgccctcactggttctccttgtgccaggctcagcagacagtgacaaacatgtgccatggcctctctctgtaccaggaacacctttctcattatgccctgcccggtatcagagaaggactggaggccccatgtcaggcattgggacagggagtgcacggccaaaggtcagtgcctagactttgccctgtgtgcatgggcttggagaattttgcctctgaccaccccaggatcctcctgggccccacgtagataaccaggaccacagtccactacctgcaggccctcactagagcagcaggctctcagcaggggcccctgggttgagctcccaggcgcttttagagacaggcgaggcctgatggagccccagcagcatgagctcgcagtccactcattagtcagagtaagatttcttcaccctgacatccatgttgtcccagcttctagaaaaacaaagtaaactaattgccgttaatgacagggctctgagagtttggccaagactccgggccagaatgtgtgtgctgagttccaaggctctgccccggcccaggacctctgcgatgaggggtgccaagccttgcatgccacagtcgaggtggttggtgtttgtttaaaaaaatcacaacccaaaaattcagtcaggccctgagattttctgtccttgcatgggtctttcctccaggctctgttccagccttctgcttctcacagctgcatttattttgctcaaatgctagtctgtaaatacagaaggggttagaggagagacccatgtcagtcatcagttttcatttggagaaaaacttggtctaaaaatgttctctgttcatgcccaaattggttcactcccaatccctgtgactgtggggccttggaacaaagcctaatggaggcgttcctggggctcaaggcacctgagaaccccgccccaccctgtccccctgtccttccacatgattgggcattcgcgggagcattggcttcccgtgggggtgatgagaggggccggaggcacagctgcaggtcagagaagcagctggtggatgtgtcatgagaaacgccatcctcctctcctcaccggaa

SEQ ID NO: 91668 - DNA, 1139 bp, Homo sapiens
tcacaataaacaataatgtagtgcacatttgctgactgcgagatgaaaaagaccacctttgccctgagagtgggggcccggggtgcccccctgtagtcaggaggtacgcagattacggcagaaatgtacagagcactgagagttgagagaggtgtgaacagaggccacacgcctgggaccagcctcttggaggagcggttttttgagttgggtcaggagaaggagctggctgcggggccagggacccttgtggccagaagcctgcaggcgctcagcagcaggaggctctgggacagtgctgcctagagactgttccctgcattttctcctgagggaggtggaggaggacaggcctgggagatgcaaccagggggtggtttggagcctttctctagatggggctggaaggccaccttcaggttgggcggaggagcctcactctggttttaacgaccttctgccctctgcccccttccctgtgtgcagagattgtggacggcaacgcaaagatgaccctgggaatgatctggaccatcatccttaggttcgccatccaggacatctccgtggaaggtgacagccacctgtactgcccccgcttcccacctgagtcagggcgggttagaggagagctgaagtgtgatcttcatgcttcaagcctcttcctgtttccttggggtcactcacagggcctggcccttgcaggggtagtcagtgggtggcaggtgaagggaggctcctcccagctgcctgcctcttggctccagtgccttccgagtgcctttgctctcacagcctcatctcagtggaccctcacgccaccctcatgagatgggctaggatggctgggcccgttttacagtccaggaacccaagtcccagaacagactagtgagagagttgggcctgggcctggttctctgtctgcttgacatccccatccttgaaacttggcccccatggacccgttatgagctcaggccgtccaggaatggacaatttcgcttccctgcaagcacctgtgtgcacacaggatgggcagagccacctgggctagcgtgcaggggctcccaggtgccaggtcgcagtgatgactgggagagatgtgcttcctgccctcgaagggctcccggtctgtg

SEQ ID NO: 91669 - DNA, 1126 bp, Homo sapiens
atccacggggaacagaagggccccctaggcctctctacagctggtatttcaccttgttcaaaagaggccaaggccggtatcaagggcctgtctgcagtgtgttctggtggtgaaaggcacaggcttggtggccaggcacatggcacagattcaggccctgacaccaccacctcctggggcagccctggtcaagcgactctcctcggggccgtgaggattaagcagggccgtgtgtcctggcagttgggcctggcagcatccgtctgcatccggaatgggagtggctgtcccgctgctatcactgctgctgttgttaggacagatatcctctccccttgggtttcgtttgaccccaggcctgagccgaaagtcccatccaacttgggctgagttctgagggtttatttttgagccagtgctcactgtctttgtgtgttttgcagagacctcggccaaggaagggctccttctctggtgccagagaaagacagccccgtataagaacgtcaatgtgcagaacttccacatcaggtaagcgccagtcctggtcatcctctcctttcctctaggaacctgagatccttcctcccacctgccctgtttgctgtgtttttgtcgtggtctgtgagatgccagccctcagtcagcccctccctggccacgggccctacaagcccatgggaaggtcacctggtcctctctgaggaagaggaggcagtttcccagccatcctggctgaaggcagtaaggtcagccctctcgccggcctaatagaacgttcttcgtccccaggcaaggtgactctcagaagcaacaataaagcttttcatttttgagacagggtcttgtgctgtcacccagactggagggcagtggtgtgatcactcatccctgctgccttggcctaggctcaagtgatcctcctgtctcagcctcccaagtagctgggactgcaggtgcatgcagccacacctggctaatttttaatttttatttttagtaggaacagggtctccctatgttgcccaggctggacttgaactcctgagctcaagcagtcctcctaccccggcctcccaaagtgctgggactacagatgtgagccactgcctgcctctggcctctt

SEQ ID NO: 91670 - DNA, 1050 bp, Homo sapiens
ccttcctgtaagtcaggtccgccagggtgtggaggccacacagcacaaacaccagcatcctgcagtggccacctcccccgaagcggcctgtctggttcagggcggcctcccatggaaggtgctagcagttataaagcagttgtcaggagtcaggcactgatccaagcatttactcatttaatccgcacaacagccctatgtagcaggtatgtcactatccccatcatacagatgtggaaaccgagatagcctggcttacccgaggtcacactgtcagtaggcagaagagtcaggatttgatcacagactgcctggccccagaggtcatgcttgcagcctctctgccacactgtctccatgcagtgcctggcacaggccagactgcagtgaatgggaattagtcactgctgtgggtgcacagggccatacggcactctcatgacagtgagcgggccctcctataacctttgcctttccttccccagctggaaggatggtcttgccttcaatgccctgatccaccggcacagaccagagctgattgagtatgacaagctgaggaaggtgagtgtctccagctccccttgatggcccacagacgtgccctgtctgaccccctaactccgggtcaccatccccatgcccttccatcgccagcctccagatctgggttctgcacgcagatgggcagcctgggagagccttgtgcaggctctccgcaacccctggctcggtggctgactctcacctcccttattcccctcgtggactgtccagtctccctccatggcactgcaaccaacccggggttatttaagggcctggccagccatgctttataactccccttcctcaatcttctggattctagaacctcctctgcccaaaggggcagagggcaaggaattccaaaccatcaccacaagcccatgttgcccatgcagggtcctgctgtcatttgcctgtacaaagcctgtatggatccaggccctggccaccagaagctgccagcctcgtgggggaaggcaggacaaaaattgtgtccaaagc

SEQ ID NO: 91671 - DNA, 1620 bp, Homo sapiens
cggtttgctccccttacccagtccccagtgctctctcaggcctggcccacatcttccagtcaatgtgaaaaccaggttttagggcaaggggcttaagctagggtctgtgggtggctggaaattgtatgaaaagagtacacctgcatttttctggagaaaaagccctggtttgccccacaaagatttcacgaggcactcctgtgagtgggaattgaatttatccaggcggtgccctcccgctcacacatcacacgtggctgagaactgcctgaagaaacccccaaccctcgccctcccgggtctctccctctgggccagccctgcctccctcctgctcctgcaccctgccctgacggagttcttgttgtccccacttgcctccttctaggacgaccctgtcaccaacctgaacaatgccttcgaagtggctgagaaatacctcgacatccccaagatgctggatgcagagggtaagtcatctcttctgttcagccaccactgtgcttcctgatggccttttctgtccagggctggcctcgggcaaggggctgtgggcacatcagagctttgggtcaccttggggagctggcagagccagcaagaagggctgaatgattctgggtgaactggggacagccatgtcgccctgggagacagagcaagggtagcctgggctggccagatgccttcagggatgaagaagcgtatggggagggggagctgaaggatcaactctcctgagggtgcatctcctcagggcccaggaagggcaaggtggctgaggaggggtgcttcaggcttcctgcgagcaaccctggcctctccctccctacctgcagcaggcatggagtatggagcccgacaaagtggagtgttttgttttttccttttccggctttgctccatttcccagccatgcactgccccatttcctagccatgcactgccccagctgggacctgtgtctctggcctctggtggcccttggagttgactgtcctgctgctccttgaggccattctcagagagaggaagtggcctcattttaatccgcttcccacagccttgtcctttccagacccatgggagagggaggggctgagggtgtggctgagcccacccaagtcacgcgtcactctgcaggtccctctcccccaaggccgtggccttgggagcccgtggatcccagtgagtgacgcctccaccccccgccctactcgggcagtttaacccttgttgttcacttgcagacatcgtgaacacggcccggcccgacgagaaggccataatgacctatgtgtccagcttctaccatgccttttcaggagcgcagaaggtaccgagcagggccaggcaggccctcctcgccgccaccgcgcaatgccgccgctgcctctcgcctcccgtgctcacctcatttctcttgcagacggcagtggcctctctccaactggaagccacccccagctccctggcgttgctgccccctcagccttagctcacacacctattgggtacctcatctgtgccaggcttttccaggcattgaggatgccctggtgactgagtcagacaaggtccctgttctcagggcacttccatgctagtgggagaaacata

SEQ ID NO: 91672 - DNA, 1094 bp, Homo sapiens
tgaagtgagcaggtacttgcagcaggagctgctagatgcaggctggggcacaggtgttccaggcagagggtgaagcactacgaaggccctgagacaggaagaagcttggcgtattcagggaccagctagagaggagtgagtgacacgcagtgatgggtcaggcccaacaagacccttgtggtgtgggataagaaattcatgttccactctgagggccatgggagccccttagggtcttactccgtggtgggagctgctcactcacattttcagacagatcatttagcaactgactcctccaacccaaaacaaagctgcctttatagggcccacagctagtctgtctccagcccaggccggttagaaaaggaatgcaccctattcggactccacaaaaccccgcaaggcatgtccacgcaggcctggggctggcttccagtccagagcaagtgctcttcctcctgcatgagcctcaggccggcccggccgccctccctgcgtctttcactctctcctgcctctctctctctttctctctctctctgtgcagatattgtgggcactctgaggccagatgagaaggccatcatgacttacgtgtcctgcttctaccacgctttctcgggggctcagaaggtgagctgggccaggcacacctcgctgctggggctgcagacctgccttcaccaccgcccttgcatcaccgctggccatctgtggttggagccctggccaggccgtgggccgccacaccacacagactgaccctgccggcctctgactcggaaggtcccctggggcaggtttcccgcctggccggtgctgggcctgtgctgaggagtcacagacctctgtttgaacacagcccaccctgggaggtgggtggtggcatcctaggctctcaggcggggaaactgaagccctgcattacagtcaatggcagagctgggatttgactgcccggcgttcccactcgccctgtccatcatctgcaccagggctgcctgcctgcccctgccaagcccttcgtggggagcactgggctttacccgttttgcagctccttcctgccaggaaaggctcagcatgtgcag

SEQ ID NO: 91673 - DNA, 2941 bp, Homo sapiens
cctccaaggccttcacatgcacaggcttccagagggtccctgtgcacacccccaggagggctaggcgcagttagccccatttgagagaggaggaattgaagtttagggaaacagctattcctaaaactagaaggggggggccgtaccttctgtggacccctgctttgagcctcccaactagcaggtgcattacctaccgtcagtctggcctggccccactctgccacctcttggtactgtgaccttgggtgggtcacttgacctcagcttccccacctgtgaaatgggcatcgctgtagttcggtctcacaggattgttctgggcgtgaaacgagctcctgcaggcaaagggcttagcacagtgcctggcacggcagctgccatttaggcagctgccagggagccacagtggtggggagtgtggttcttcccagcctcgggccagaaaggcctcttcacctcctcagcatgcgattggagcttgtgtttggagtgttctgctagagggcacgggccaggagggtggagggaggacccctgacccacactcccgcgggagggtgggcagggaccagcagcaatggacgattcgtcaccacagaccccaactaacagcatgtttgccattggactcacccctacgggccccgaaccagccccctgcccaccacatggcctcaccagattgcttttctttctacccacactgctcccctgtgcttagggctgaactccagtctggaggctctgagggattttgggggagcagggactggcaggcaagcccaggacagtatgggtgggtgctgaggcactgggcctggaggcttgtcactggcccctctctgagggggtagtggaggcccggctgcagggcgctggctggtcagaaaggaaagtgctgggtccctgtgtgctcctcaggacagccccgtggtgctgctcctgctgcctcgtttccccagagacccagtccaagctcttgcaagagtgctctctggggttcatgttttataaacgcagagtgaaccccaggtctagcgccagtgtgcccattctgtcctgagatcatttatttctagtcaccgaagcgttcccgcctcgttcctttattcactcactcattcagcaaccctgaacaccgccagtgcactgagccccaagctggatgcgggaactcagcggtgaaacatgattcccttgccttgcggcagccccgtgctcacagagaggacttgagtttcgggtgccagttgtctctgccaagttaggagtcagggactgacctctgtgacccccacaagctgcagccctggctgtgttttccacactggcctggggcccatgttcattggctgaggaacctcttggacctcatctctgaggagcaccgcctggggccctgggtgtgtgtcccgcagcatggcgcggggtgtgcacgtgcgtgtgtgcgctcacacgagcaccggctgccgcctccccgcctgtctccaggtgccatgtgtggaggggagaggctgggcgtcgctgcctgcagcactggctctgagccgttggccaagcctctccattttccttccccatcactctgtagaccctcctcactctttctgttcctgttctgttgccgtttcaactcctcctcttggaccctttctgtgcttcctgaaaggtacctggtctctctctccccgtgtgcaccccctgcctcctctacactgttcactgccccctagcaggacagggcaggacgctctcctgtagttcaggcccagggactatgtccaccactctcaccctccaaagccccagcacttttctgccccacggatggtgacttctgtcctctggagctcctattaacattgcctccaaggcaggagagtggacaggcctgagtgtgctcctgtgcacggaccactaggctcctccgggacccgggcgcccctgctctgttgcccccagctctccagctctcggcttcccatcctttcaccttcccaccgggagagactcctccgcagtcttaggtccaacgcagccgacccgtccagcctcaccctcctctgtgtggggcactagagggtttgcgagcagcagtgggagggctccccaaccctcctcggtgcctccagggtctgggctttctggacccaggggcattttgcagtcagcagtgaggatgccaacaaggcctattgggacagggcaccatctcactggagctgtgcttcctctccttcccctctgtgaggagttccgtgggccatggaccagctgctttcaagggacgtgcccgtcaggagggagggtggccagcccccaggcagccctgactgtgtgctcccctccaggctgaaactgccgccaaccggatctgtaaggtgctggctgtcaaccaagagaacgagcacctgatggaggactacgagaagctggccagcgacgtgagtgttcccccagtgaaagtcagggccacctcattatcctcagccagaggtcactgtgactcttgcagggggaaagcaggtgtggcagcgagatgacctagaaaaggctgcgtggtcacagaccatggcatttagccagctggtgtgtacacgacctctccgtttgcttccacaaggctaagggtcagaccggcagccaccttgccagccagcccctgggctcccgagcttgggttcctacagagatgctcagggacagtgtttcctgggcacctcagtgctttagaatcacctggggagctttgtgaaagcccctcttcccgtgccctggccctggagagagtgattcagaaggatggagaggggcctgggaaccaataggatagcaggccctgtgcaggtgcttaacgagcagcccagcaagacgggaactcggattatcctcctttccaagtgaggaaactgaggcccagggagggtcaggcacgtgc

SEQ ID NO: 91674 - DNA, 1915 bp, Homo sapiens
ccagcctgggcagtatactgagacccccttctctataaaaacttaaaataaaaatcagccaggctcggaggtaggcacctgtagtcccaactacttgggagactgaggtggaaggatggcttcagcccgggaggttgctatgatcatgccacttcactccagcctgggtgacaaagcgtgaacctgtctttaaaaagaaaagcacaggcaggaacaggaagtaacaagagaacagtacagtgatgcagggacagggagggagcccacgctcccagagttccaggttgggggttctagcaggaatcgtggagaagttgggctggggagcaggggtaaccccctaaggtggggccctcaaagatccagatcccatgtgcccataagctggggggcagcccgtcagcactctgagggtcccccacaaaggccacgctggcttctgtggcccacagctcctggagtggatccggcgcaccatcccctggctggaggaccgtgtgccccaaaagactatccaggagatgcagcagaagctggaggacttccgcgactaccggcgtgtgcacaagccgcccaaggtgcaggagaagtgccagctggagatcaacttcaacacgctgcagaccaagctgcgcctcagcaaccggcccgccttcatgccctccgagggcaagatggtctcggtgagcaccaggattcacatgggagcagctgtgaggggcagaggcagccctagaactgcctgtgggcagtttggccagcgtaatctttcctaagttgttgatgtcctgtgggacatggcatggcctttcggatgcagtggtcggggaggggtgcacttcactcggcattgtgctcccctttggccctcactcactgtattttacacccagggttttatacgcatcccaaatccttgccacgggttgtgtgggtgtggagtggtgtgaatttggagccgtggtctgccatgatggcatgaccgccatgtgcttgaggcccttcatcagcggaggggcagtgcgccctggacggtaccacctccccatctatggtattcatccattcattcatgcactcacccgttcacgcattcattttgttaatccagaattgattgtacctgctgagtgctggggggccctgtgtaggcatccaggtataatagcaaagcatgacacagacatgaccccagccaagttctgccaccttcccatcagcatcccttggagacatccccctgggtgcctccacttccttgtgatagccctgcctgctcctgccctgccccaggacatcaacaatggctggcagcacttggagcaggctgagaagggctacgaggagtggctgctgaatgagatccgcaggctggagcggctcgaccacctggcagagaagttccggcagaaggcctccatccacgaggcctggactgacggtacggcccagctctgccccactctgcccagccccgctcccgtgctcccctcctgtctctcaggcatgcatgggtgtgcacacacagccccctgccacgttgggtctgtttctcaggtgccctttcttgctgcttgggagcatgtgtgtgtgtcagaaatgctgctttagagccaggttcagtggctcacacctgtaatcccagcactttggcaggccaaggcaggaggatcacttgagcccaagagtttgagaccagcctgggcaacatagcgagaccctgcctatacaaaaaaattttagaataataaaattagccaggcatagtggtgcacacctgtggtcccagctactttggaggctgaggtgggaggattgattgagccagggaggtcaaggctgcagtgagccgtgattgtaccactgcactccagcctgggtgacagagcaagaccctgtctcaaaaaaaaaggaa

SEQ ID NO: 91675 - DNA, 1673 bp, Homo sapiens
cctcccacttcttggccatcagtgccagagccgatcctgtggggagtctggtaggtgcctgacagttgagactgggagaggctgaggtgaggctggtactggctccatgcctgctgtgctcgaacaccacctcactgaaacttgagaatagttccatgccacacaggtactggggctggccccattttacagatgaaggcacaggcccagagaggcctcggtggctgcactgggcgggcagctgtcaggtgctgggacagagctgaggggatctccgctaccacttgggggaagcccaaggtggtgtgcctgaggcagggcccctgtaggagctggggtgcagccaccttcccaggctggcattttccctgcggttccctaaagaccttcacttgcttgcagggcttccttgagctttggttctgggatgtgtaattagccaggatcagggactaataacagcgttcctcctttcctttaaagggcctgatggtgggcccgccccaatgcacacaggacaccttaggacagcgtggggcacttagacgtggagaggaccaccacctgtgcgggtgcagggtcagggtcctagaagaagctggctctgatgcttccccttccccaagcctgctgggacatgggctttgaccccgggtgcttctccggatcaaagccctccagaaacaggtgctacctttctaagccgtgctaccacggcccgatttgtatggtttcctactaacaaaagttgctaagtttaggacacacaggttgagatggaatctctctctcaggctgagcaaccctgaagtgtccatccaggtccatccaggttacagttgggcttagagatccctggagggtacggaagaagattctggaagtttccatgccactgtcattggcatggaaggatgtggggtccacagtctctctttccctccctctgcttggacagcccctccagactcctgccccacagctgccgtgctgtggtctaagcgtctctctgctcctaccagggaaggaagccatgctgaagcaccgggactacgagacggccacactatcggacatcaaagccctcattcgcaagcacgaggccttcgagagcgacctggctgcgcaccaggaccgcgtggagcagatcgccgccattgcccaggagctcaagtacgtgcgggctcaggacactatcatcacctggctctcaccacagcctgcccagactggtggcggcagcacgccgaggcccagcctgcctcaaggcctggaatagggtccccagtgccccaactgcacctccttccagaagccagggaagggccttatgggatgaggccttttgcccatcctgtctcagccccaggtgggacacctgaaggatttggattctctagcaggagggaggtgtctggccccttgtcttgattcttcaggctttaggggtccctgggggtgtcacctctcctggccaccccaagtaggccctggtcccctgatgggatgggccccagcctccgttgctcccagccataggtccctgagggaaccaggctgcacagtgagcctattgttctgctcggccccttccctttcttgctcagaatacacttattgtaagagcttccaggcagccgggctccttcccctccccacccagtcagataaac

SEQ ID NO: 91676 - DNA, 1950 bp, Homo sapiens
aggtttgcccagggtcacacagcaagggagtggttgagatgggaatggagcccaggcccccagccctactgtggagcacagcctcagcccctgtccgctgtctgtggctggctcgcctgctccccatgtcctgttcctccccagagtcgttccctgccccctacccctcctcaggccccaaggcctggttgaagggccacactcttagctgatagtggcagaatgagtcagggatgggtgagcaggaggaagccgcttcccttctcacccctggttatcacctgttaaccagctctgttatcaccccttcccttctaccctgggggtcccatgggccagaaccaagctgtgatttgattgaccaattagtgattggttgctgatatcctggaatgttgactgccccaacaccctggcctgggaaccttgggggtagatgggtccaatccatctagccacttgcccttgccgagtctcattgctctctgcccggcccgcagcgagctggattactacgactcccacaatgtcaacacccggtgccagaagatctgtgaccagtgggacgccctcggctctctgacacatagtcgcagggaagccctggaggtgaggagggggtgacatcacccacggagctctgtgcccctgctgccccggggctggtggtgtggatagtgtccagacctgtgagctccccccacctcccacggagaggatgttctctgactcctcagggccctctggacccctccccacccctcctgctcacatactgacctgccttccctctgtccctgcccccttccctcccacacactagaaaacagagaagcagctggaggccatcgaccagctgcacctggaatacgccaagcgcgcggcccccttcaacaactggatggagagcgccatggaggacctccaggacatgttcatcgtccataccatcgaggagattgaggttcgcaccccccggccccccatcttcccaagagcctctgtggggctgggccgccccctcactccagctcctcccctagggcctgatctcagcccatgaccagttcaagtccaccctgccggacgccgatagggagcgcgaggccatcctggccatccacaaggaggcccagaggatcgctgagagcaaccacatcaagctgtcgggcagcaacccctacaccaccgtcaccccgcaaatcatcaactccaagtgggagaaggtgggccggggccatccgtaggggctggggcaggacggcggggctgggggccacctccctgaccgctcccacaccgcgtctcctctgccaggtgcagcagctggtgccaaaacgggaccatgccctcctggaggagcagagcaagcagcagtccaacgagcacctgcgccgccagttcgccagccaggccaatgttgtggggccctggatccagaccaagatggaggtgaggcacggctgagccccacagagctgagaaggttccaagagagctcccgtagtgagggggtccccggccagcccagggcctgcagactgaggcgcctggcagagcaggtcccaattctcaccacccaggggccgtgatcaccctgcggggttaggagagtccacagagcttgcgcctggaatcccggcacctggggaggctgaggcgggcggatcgcttgagcccaggagttcgagaccagcctgggcaacatagtgagaccccaactctacaaaaaatacaaaaattagctgggcatgatggtgcgcagcccaaggaggtcgaggctgccgtgagctacgatcatgccactgcacttcagcctgacagcgagaccctgtggtctctagtgggctacctatgggaggtgggtttgatccctgaatgccctggtctgatgattgtgagactcaggcactattgaacctctgatcctgtcctcccagctctaaaatg

SEQ ID NO: 91677 - DNA, 1009 bp, Homo sapiens
ggagctgcagccaggccagggttcagatcccaactctgcctctaacagcactgagctgtcctccgtgagcctcggtttctacctctgcagtcagggcctgccacagccctggcctcacagagaggtcaagggtaaaatgaagttgggcacagggagcgcttggcagagaaaacctccctgtcattgtcatagctgctttaacatgagagggcaggaccggaggggacagttgtgagcagtgggccttccctcccagggacccatgggccaaggccccaggccaaaggggccccggggaagatgcaggccagcagcgcgagtgggctcctccaggtggtcagtgggggcaggcccaccagcctcaccccaccgcctgcacccacccccgtaggagatcgggcgcatctccattgagatgaacgggaccctggaggaccagctgagccacctgaagcagtatgaacgcagcatcgtggactacaagcccaacctggacctgctggagcagcagcaccagctcatccaggaggccctcatcttcgacaacaagcacaccaactataccatggaggtgcgcggctgccccgcccgctggcctttccaccagcatggccggcttcctcactggaaatggttcgggccagtgagaagatagctgtctgctgtctgttgtttttcactctgtttaaaaattattgaagagaccagcactttgggaggccaagtgggaggatggcttgagcccaggagttcaagaccagcctgggcaacatagcaagaccctgtctctacaaaaaatgaaaatattagccaggcatggtggtgcatgcctatagtcccagctccccaggaggttgaggtgggcagattgcttgagccagggaggcagaggttgaggtgagccgaggtcatgccaccacacttcggtctgggtgacagagccagactctgtctcaaaaaaaaaaaaaaaaaagattgaaaagactagatcaaaatgtttagacatttt

SEQ ID NO: 91678 - DNA, 1735 bp, Homo sapiens
gcgggtgccgggtcagggcagcagctcccactggctaacactccggggacattacaagctggtcgccgtcatattggtagcttgagaaaccaaaagactggacactcttgatccaacccatacaggtccacagatgcttcaaaccagagttggcttttttgtttttttcccctgagagccagtggtgagacactgaccagagtttgtccaaacagtctccacagggatcccggcacaagattcatgggtccttgcccttctgctgcccctgtagctgggaaacacacttactgtggagacagacattggcagaggcagcagggaggcaccatggcccgtgtcccctgtgaggtgtacaggagagcaggggctttccccagggcgggaggacagttcacagtcctccacgtgtgaaccacggtgaggacagttcacagcacccggcccacgatcacgcccccgtctttccgcagcacatccgcgtgggctgggagcagctgctcaccaccattgcccgcaccatcaacgaggtggagaaccagatcctcacccgcgacgccaagggcatcagccaggagcagatgcaggagttccgggcgtccttcaaccacttcgacaaggtgagcagcctgccacctcctcggcctctcccctcccgccgttgccgtaccagcccacaccttcgtctctgcatctgttcgtccattcccatcacagttgctgagcgtcggccgccactcccagggccagcagggccctgccactgtcagggtgtaggtgtgcggcaccaagaccccagcctgggccacttcacacgcacaggcagggggccggaggtcccaagtcctgccttctggggtggcatcctcaccacccccagggcagatgaagtctcagcacacccaggctttgcgacccggtctgtgaacctggacacagacaccccgcacagtgcttttagaattcagatttggtccggcagcctcatcagaggggccctgagcgccagagtttgctgccatccccagcccacccctgccgggctgacggactgagaagtgtgcagcctcagctctgcacctggcgcccccaggacaggatacagtcccctctgtcccactccaaatcccaaaggcaaggagaaccccccccccgaccctccaccagtcctgggacttgtcctcagttctgtagcatccagctgccacccctgctgtgggcagagaggtcggggaggcctctgccttcctttgagcttccgaggttggggaaaggatgaaaggggcccgtgccgcccccgaccccacgtgtccctggccatctccttgtccatgttgcctctaactctgtgtttccctcccctacgtgtcccttccccctgccctctgcatgtgaccccgatccctcatcctggtctccacgccgcccctcccgcacacctgccttcggatggccccggcaggatcatggcggggcgctggggcccgaggagttcaaggcctgcctcatcagcctgggctacgacgtggagaacgaccggcaggtactgcaccctgggccccagcggaccatggcattaactgctctctctctctctctccttctctctttctcccctcgccatcccacccctgccatcctgtgtgccatctcatggctctcttgcctccctgcccacatctccctggaccccttcccttttacctggtctcttggggccgctgtctccctgctc

SEQ ID NO: 91679 - DNA, 2200 bp, Homo sapiens
agggcagtagaccccagttccctgctgtgggagaccacgagaggggagggtgcagagaggccctgcttcccggcctggggcactgggggcttggaggcctgggtcagctggagcagtggcaggctctgcccggggccaaggctgctggagcaggcggggaacagggcgcacgcacacgtgggttgggccctactctctcggctgtttccctggagaccccaccagtgtgggcctggctgcccctgccccactaaatgtcgggtgtcccccaccccaccctctccttgcagggtgaggccgagttcaaccgcatcatgagcctggtcgaccccaaccatagcggccttgtgaccttccaagccttcatcgacttcatgtcgcgggagaccaccgacacggacacggctgaccaggtcatcgcttccttcaaggtcttagcaggggacaaggtgagcgagacccctacgaggtgcatgggggctggcgagaggggtccctgcagtgggaggggctgagggggccagtgtgtgggtggggatggctcagagtcccatcctgcctgccccagaacttcatcacagctgaggagctgcggagagagctgccccccgaccaggccgagtactgcatcgcccgcatggcgccataccagggccctgacgccgtgcccggtgccctcgactacaagtccttctccacggccttgtatggcgagagcgacctgtgaggccccagagacctgacccaacacccccgacggcctccaggaggggcctgggcagccccacagtcccattcctccactctgtatctatgcaaagcactctctgcagtcctccggggtgggtgggtgggcagggaggggctggggcaggctctctcctctctctctttgtgggttggccaggaggttcccccgaccaggttggggagacttggggccagcgcttctggtctggtaaatatgtatgatgtgttgtgcttttttaaccaaggaggggccagtggattcccacagcacaaccggtcccttccatgccctgggatgcctcaccacacccaggtctcttcctttgctctgaggtcccttcaaggcctccccaatccaggccaaagccccatgtgccttgtccaggaactgcctgggccatgcgaggggccagcagagggcgccaccaccacctgacggctggggacccacccagcccctctcccctctctgctccagactcacttgccattgccaggagatggccccaacaagcaccccgcttttgcagcagaggagctgagttggcagaccgggcccccctgaaccgcaccccatcccaccagccccggccttgctttgtctggcctcacgtgtctcagattttctaagaaccaaaaaaaaaaaaggaaaaaaaacacaaaacaacaaaaaccaaaaaaaaaaaaaatcacaaaaacaaaaaaactataaaaaagaaagaattaaaaactttcagagaattactatttactttattaacttacggatttattatataaatatatattcacctagcaacatatctctgccgtctctcctgctctcataatgaagacatagccgattctctgcccgggccccttgctgatgctcctccgggtctgcgtcgggcgtgggtctctggggaccctccagaggtggaggtgggctgatggcctggctgcctggtggttgatggttttgctccccctaccttttttttttgagtttattctgattgattttttttcttggtttctggataaaccaccctctggggacaggataataaaacatgtaatatttttaagaaggattcctgcagcatcatctttttttatttctcctgtgtctgtcctccaccttctaggagagccagggcagagctagcactgtcttaagctgtcaacgtggactagctcgtgtcatctgctcgagaagggctgtcgctgttcttgtttctgagtgaggagtacgcaggccagagtggtcacccggccgtgagcagtgagggccagagactagccccagacaggtggatgccagagagagtggcacccatgccaggcaaggcctagggaggtggtcttgctcagcaaccctgccctgagcagcaggtgcgcccatccggagatcctaggagaaggtggccacctccatccactaaggaagagaaggaagacagtggct

SEQ ID NO: 91680 - DNA, 1147 bp, Homo sapiens
gttggatgaaaggatggttgaacaatcagctcaatggatggattgatgaggtctagatggttggatgtttgattgatggatggttggatggacttttggttggatacatggagagattgatggatgttgggatacacgagtggagagatggatgcatggatggatggaacgacaggctgtatagtggttaagtgtgcagatccttgggagccagatcagctggatttgaatcctccttctgccatttatgcaatgtataatttgggcaatttgttttattttcctttgtttcctcatctgttacagagggatgataataattgtttctacctcttggggttgctgtgagaagtgaatgagccctaaatcagtgcttggggcataaccagatttatgatgacaggaggatggatggtcagatgactggatggatgaaggatagatgaagtgcatgactgaaccaaggaagggaagagtagccggggagcagatggagacacacactcatgagacaccctcagacattttattaggggcttagaaaggagtcctaggggataattctgttttcccatgagttatggccccaggaatagattagatctggacataggacaaggtgacatcaccctggatttccaatgtgtccaccctctggaaggccgagaggcgatgggcaaagtcaaagaggtgctggccattggcgtaaaccttgaagcgatccaagccacagcgaatggacagctgcagggagaagggtgggcatgaggccagggccaggactgaggccctggaaggaagtgggaaaagagagctcagactcacatcaaagaactgtccgggaccaaatgggttgtgggtgatcttcttctcctcggatccccacgagccattcagaaggctgttccggaccacggtaccgttgcccatgcggggattaatgtgcagagctatgtcccctgaggagcccaccttgaagttgatagcaaagctggggacagagagggatgggggagtcagatggagtccagtgggaagaggccagtgggctggacctctgaatccctaaaggaggaggggacagagggtctagattgttgggtctgagggaggagggggctgggggttcccacctagtttacgttat

SEQ ID NO: 91681 - DNA, 1265 bp, Homo sapiens
gtgattgctgccgtccatgggggctgcattggcggaggtgagtctgcggctatcctcctgctcgggtgctccccaggtggggctgctgctccgatgccgcggccactggcatccagcctcagctctgtcatgggccagactgtgtcccaagaggcagccccacctcccgggagccagggttggttctggtggtcattcagcatccctggcctctacctcctaggtgtggaccttgtcaccgcctgtgacatccggtactgtgcccaggatgctttcttccaggtgaaggtgagtcatcctcccgagctcctgcttagagctgggcagtggggtgaggttggggggcctggagtgagcctcgagggcttcatggaagagtcggagttgaacccgacaaagtaagacttgcccatagaggaagtcaagaggtgaagttgtgagtgggtaaggtatgaggtggggttgaggctggcaggtgtcagaggcagagattgctcctggggccatactggtgagggtgggaggcaggatggagccgggggatgcagtaaaggggtctcaggtagggtgaggagggttcctctctcacagatggagctgccctgagggaatgggagggtgcatgagtgggaaggtgggctctattctaggttgaaggaacttgcctgagtcaagaagctgcctgggcaatggaatgggactttggaggaagtcactggggtgaaggtggggcgggactctccagtagacatgaaatttcatggacgttgacattgcgaggggcacagtattgggcagaaaccaaacactgacccgattcctcccccaggaggtggacgtgggtttggctgccgatgtaggaacactgcagcgcctgcccaaggtcatcgggaaccagaggtgggtgcagggggtgtgggggtgtgggcaggagaccccagagcatctcccagccccggggtggcagccgcctcctgatgcacgcttgcctttgcagcctggtcaacgagctggccttcaccgcccgcaagatgatggctgacgaggccctgggcagtgggctggtcaggtagggccatggccgtggtagctcagtgctgggggcagccaggcctggagggttggaggcctctccgggtccccttgtctcctcgctctagaattcctagtggcatcctttcttggtgagctcatttctttattgtggggtcagccccctgctctgattgggctgtttctctggggtcttgggccttcctctgtga

SEQ ID NO: 91682 - DNA, 3617 bp, Homo sapiens
agatggacaggggaagtggaggacggggcttaaataacgcgcccaggttcacatagcctttatgtgaagcaggactcagagccagactgcctggctccagagccggcactgctctgttgtaacccagctgaaggagtattttaccttgtgactgtagacacagccatccatagatcacacacgtctgtgtgtaacagacaaaatggtgaaaatggctgatttgatttctgattcctgtacagttttctgtcatgcttcactaaatgatttactggtgggttatgtcccacagttaaaaacatggcccaggctctgcttctcactatgggttgagcacttggtgtgggccaggcatgtttttctagtggtcccgattaactgtgaggacatgggaggccagagcaggggttattatcactaacttgggaggggcaggagaggggaccctggcagctggacagaggtgctgactgcagctactctccccaaggtgaaattcatgaaaagcaagccgggggccgccatggtggagatggctgatggctacgctgtagaccgggccattacccacctcaacaacaacttcatgtttgggcagaagctgaatgtctggtaggtgctcaggctcgggagggcagcagaggtacaggggagagaaaaggaggggaatggggcccagcagaggagcacagtgaggccgaggtgttgactcacacagaaatgggatgtggcaggtgtgttcccagacgtgtctctgacaccacaggagaaagtgagtcagccttgcctcaggtgtagagcaatgccccaaggcacacagggcaagctaagcctctggaggccacaggggaaagcttcagggacaactttgggtatgacaaaggctcccctttcttccttgctgcagtgtctccaagcagccagccatcatgcctggtcagtcatacgggttggaagacgggtcttgcagttacaaagacttcagtgaatcccggaacaatcggttctccaccccagagcaggcagccaagaaccgcatccagcaccccagcaacgtgctgcacttcttcaacgccccgctggaggtgaccgaggagaacttctttgaggtgtgtgccgtggagctgcgcaggcagtcgggtccttgccacggccgtctgagtaggccattcatttcagtcttttctgcaaatagctgttgaactcctgtcctgcctggccctgggttgagtgctagggacacagcagaggccaggacagataggaatctgtgctctcaaactggacagggtgagaatggcaccaagtttctagcaacaccatttgccgcgttccttccttttacatttttggcaagcagggcaactgctcgtttgctgggaaagctgcttcacaggcccagtgatgagggcccaatttcacaagaaccgcattggcgtaggcttcgggtgccatcaccctgataccatcagaaggtggggccctgtaaagctcagtcagggggaactgaggcagcggaagggaggaggaactcaagtggatctggctgtggtctgaaatgttgaccttgcattcagcaaacagtgttcagcaaacagccgggtgcagatatccacatagctgttgaagttgggaacgaaaaagcagcttcccagtctcaggcaacttaataattaaagagcattgttgctggcctttttatgacacagggatgccttagggtatgtgataaaatctacaagccttttctcctgaaaacttcaagtactgagtcatgcagggcctggtctgcttgaatcctgtgtggcggcccttttgtttcagagttcatttactacctgttttcttttgcagatctgcgatgagctgggagtgaagcggccatcttctgtgaaagtattctcaggcaaaagtgagtcgagtgtgcccacctccttgccctaattgcatggtggttggtgggcagctgcctagttcctattgggtgagtctaaaacctttacttttccccttggtttgcaatcaggtgagcgcagctcctctggactgctggagtgggaatccaagagcgatgccctggagactctgggcttcctgaaccattaccagatgaaaaacccaagtgagtatctgtgtgtcctgcaggcatcaacctggtgacctaatgggttggctggcttcaggccagggatgtccttcctgcccttgagataggaccccgggatcttcgcactgttggtgacacaggcaggtgggacctgctcatcaggagagcagcctgtgctcctcttgggagagccagcctgactgcctgctgccactcactctgccagcttgggagttgctcaggcttgtcctccagggaggtggcattctcttctttgcatcagagactggcttaggtaggaaagccactctgttacctaggaaagaggcaacactatccagcaggtaaaacttgcccacccagttgctgggagaggcccattgccttgggctggcgaaggagataggaatgggattctctatgggaatgaaggaagagaaggagaaacgccgtgcataattggtaattggctcatcttgaagcctcacgttgggcagtcactccttagacccctgccgttgacctgcagaaaatgggagatgggtacaaacttgaggggacctgggtttggggagcctccaaagacgggaaccaaccaaacttgtctctcctttgcagatggtccatacccttacactctgaagttgtgtttctccactgctcagcacgcctcctaattaggtgcctaggaagagtcccatctgagcaggaagacatttctctttcctttatgccattttttgtttttgttatttgcaaaagatcttgtattccttttttttttttttttttttttttttaaatgctaggtttgtagaggcttacttaaccttaatggaaacgctggaaatctgcagggggagggagaggggaactgttatctcccaagattaaccttcacttttaaaaaattattgtacatgtgatttttttttttcctgttcatacatttgtgctgcccatgtactcttggcacatttcaataaaattgtttggaaaataaacacagcacttgctgggattccaggatgtctgcttttctccctctctgtcctgaagacacaggcaggcctgagcacagtcacaggccctctggaggcatacagagacccaagaggagcagggtgggctgcagactgagaatggtgctagcaattgagtctttgaggaaaatccatcaggcttagtggcattcttactgggccctgcccgagcaagctctatcaggcccagtgggtcatcacacctataattccagcaatctggggaggccaaggtggggcacatactttgagctcaggagttgaagaccagcctgggcagcatggtgaaacgtcactacaaaaaggtgggtttggtggaacacctgtagtcccagctactcgggaggctgaggcaggtgggtcagttgagcctaggaggttaacagtgcagtgatcacatcactgcactccaacctgggtgacaatgagaccctatctcaaaaaaaaaaaggtttccagccttgcca

SEQ ID NO: 91683 - DNA, 5312 bp, Homo sapiens
gccaacgtggtgaaaccctgtcgctaataatacaaaaaatagccaggcatggtggtgaacgcctgtaatcccagctactctggaggctgaggcaggagaatcgcttgagcctgggaggcggagattgcagtgagccgagactgtgccactgtattccatcctgggcaacacagcgagactccatatccaaaaaaaaaaaaaaaaggtggggcatgtgtgaaggttgctgaggaggtgatgtcctatgagcaaataggagcttatactcaaggtggaggaaacagcctctgcaaaggttgtaaagtcagaaggagcttgtgttggatggagaaattgaaagacctgaggattgcaaagtggctggcaagcagacgggtttggaatagacattggaagaagcttttagggcatcctagacagcgttgcgatgcttggggcaggggcaggaaaaagccactgatggactttcagggcagagctgtaatcgagttgatgtttcagatttagtcgaagggtgtgagagggctgagacggagaaagtggtgtggcagaagaggttgctggtggccatgggtcggggtgcagattatgagagaactctggccagtgactgctcacccggggcagcgttgagtccatcaacaccgttttggtctcttaacctgaggctagtggctgggcagtgagctaatcccaaagcttccgtctgtaccacagtcttggggtgctaccttgtccttatcacactctggggtaacttgaagcccttctcaaagatctcctgtgatgggactttccttaacttgactcacatttgactcagttcaaagtgcccagcgggccaaggcctctctcaatggggctgatatctattctggctgttgcactctgaagatcgaatacgcaaaggtacatctgggaggtgactgactgccccttgtcagcttccaggtgagctggggcatggctgacctcaagtcttgtcttgtcctgtccttgcagcctacacgcttgaatgtgttcaagaatgatcaggatacttgggactacacaaaccccaatctcagtggacaaggtaatcttgacgaccactttgttctaaacatacccgccttgctttcactcgactagtgcacttaataggcctgggctcagggttatgtaatgccattgggccccccatggacatgggagggccttggggtcagcacttggacaccctagtgggatgggggagtgagaggcctccatgggtcttcactgctgcttggggccctccgatgctgctcaggatacagaggcaaggcagaagcctggatgggcggggagcagggcctcactgaggatgaggcgtgggggcggccttagaaaccagcagtggctcctttgagagtctggtgagggtcactcactccattcttgctggaccaggaattgtcctcttgttctgcgctgttgagagggtctgatttgggggagtgacagtgttggggggcgatgaggtctcctgggctcttgcagtgagccttgtgagcaagctgaccctgtggaggtgagacactctggattggaccagggcggacatgcctcacatcatttgtagaggggacgcaacatctctgcaggtggcccaaatggacaactcccttcctagtgtctgtcaagaatggtttgcctttggtagcagggagaggtggaggattgcctatgagaaacagcggcagccccccaacaagaccatccatctcggtgtctgtcttggtctgatacgtcggaccaggccatgggctgagggaggaggctcgatgctgacatcgcacaggccctgagaggccagagccccccattcctaggcaggcctgtcttgctcgcccttgcatctgggaagcagtgggcagggtgggctagactcttccccaggatcctcacagtgggccctgtgggcctggctgctccctccaaaggtcagaggcaaattggtgaccaagtgaatgtaccagagcgggcaatggcattacatgactgctaacagaaacatggcaacaaccatttcttctccaaggaacataaatagaagatgtgcagaccggcaggggctagtggcagggggctggctgtgcattggttttgatgcctctcagctttggcagccccaaggctggggcccaaaaaaaaacgagggctgatgaggtgacctggagtgagggcggtgcttcgccacccctcaggaaccatacttcagcggctctgcctctgcacattgctcaccaacacacagggtagaaaaccactagctcttcctggagagaacagaacatgcagcctccaccacgtccccagaaacagccgcagacttgagctcactacatcaagaacaccacaccgcgctccaaggaacagctacaagcacagagacagaggcatacagagacaaagagagaaagagacgcaacatggcagcagacactgctttttttattaaacattaaaaaaaaggtcaaaatccaagcaaacttgaacccgagaatgtacacagaagtaggaaacacagagaacagagctgtcccagccagccagcgagcgatgctcttttcggagaacgtttcatagacggaagtagattccatgggcctccaagacaataggatcctctctccattcctcgccatatgggttttgttttttaagtcatttggtttggggagggccttgttttttttctgttttgatatttttattttttctgcagtcaccggctgccaacataatctgcaccaactggagatcagaaaccaaaaaaaaaaaaaaaaattttaaccacaacaaaaaaaaaatcaaaaaaaccaaaacagacctaaaaccagacagccaaacagctcagaggcacacagttacctgctgccgggtaaccaggcgcgctcccaaggccaaaagcgcgagcgtagtggggccactggcacacctcataccaggagacacgcacacggagcgctacacagccagaagcaccgcaccaccgcactgcagcacatatgtgaggaggtgacaacatggagggacactacccacttcatacacctttatttccacttttctgatatcttctgaggacagaacatctgtgagccatttttgatttaatcaaaatattgacttttaaaacaattctttaaaaaaattgtagcggatgtgtaccgtgacttgtatttatgactgtaaaaccatgtgatgcagggtcgcagtgtatgtttgatgggacgccatctttcagaactgtgctaactcactgttgaagcgtccaatggtaagagaaaatacagatttgttttttgtgacaaatggacattgtactctgtacttctgctgtaagtagtccttttccattttgtaatgactggtaacaaaacccaggccgggtggcaggaaagggcagtggtttcgagccctgggttttggagtcagccagacctgggttcaaatatggctcagccactgtcttgctttgtgactttgggccaaagtgtcttttaactgctcagttaaaagttaacaactcagtcttcttatctgtaaaatggggctgaaatatcagaacctacctcatagggttgttgtgaggaatttcagaagctgtgatgtctgtaaagcgcttagcccagtgcctgccacttaagcgctaagttaaaggcagtgattacgaactgctggggtcggggtggatctgcgccattgctgggtgtgggaatgtcgatgccttgtacatgattgcttatttgaactgattctgctgttgccctgcttgtcagctacagtcagtccctcttgggctggcgggactgggagggaggggggactgggattaagaaagaagggatctaacagagacagtctggagctcctagaactttgggggctttgggggtcaaacttgcttgcttccctctggggttattttcctcttaatctactctcccttcattgggagtcactttagaaagctgcttttggcccgccataatatatcagcttctgtagcagctgcacattccccagagggcctgggagctgggctttctcccagggccagggtaggtgagagcacagaatctggccttgtccttcacagaacaaggccagccctttggtatgagcaggggaaggagagtgggcaccagctttgaggctcgggcttcatgcccgccgtaggtcagatcacaaaaggaggccccacagccctcgaggaagggagggcttgcagttggcaggagctgggggctcagatcagcctgtgcagtcaggagggagggagagaccccaatttctgagtgagactcctaactgttttctctctccacaggtgaccctggcagcaaccccaacaaacgccagaggcagccccctctcctgggagatcaccccgcagaatatggtgagggcagggggttcccctccgtggactcccgtggctcatgtgcccctgcccgccgcccgccgtgcaaattctcacccgtcctccctctctttccttcccaccccccaggagggccccacggtgggtaccacagccattaccatgatgagggctacgggccccccccacctcactacgaagggagaaggatgggtccaccagtggggggtcaccgtcggggcccaagtcgctacggcccccagtatgggcaccccccaccccctcccccaccacccgagtatggccctcacgccgacagccctgtgctcatggtctatggcttggatcaatctaagatgaactgtgaccgagtcttcaatgtcttctgcttatatggcaatgtggagaaggtgagctgctgccgggccccctgggttcctcgctgagcctcgtatcttgccagtcagcacgggaaagaaccaggggggagcctggtgtggcgctgggcgggcagacgccaatgagtgactcagtgagctcaggcagcctgcttgcagacgggttttgtttggtcctcactgtatgtgggtgttgtgtttttgaattaccaatgtttaaaaaaaagattttatcacataaaagtactaataccagtacatgaacatagagatttataaaacataaaaatgaatccattatagtgaaacaccatcgtttaaggatttcctcctgaaaacttaagacctggcaacaccgggccttctgccttcccatgggacagttgactggggctagcggtggctgagtgtctacctgagaccaggcggcattttgcttaacattaaacccgtctgggtcttgggggcctttgtgcagctcatgacttggcccattacttaga

SEQ ID NO: 91684 - DNA, 3599 bp, Homo sapiens
cagtcgttgcttttggagtggggcccagtccccactctttccaaaatcttgaagtcttacagggccgcctatttgcagggttttccagggtttaggggttacgagttgctagcgttttaatcttggccttgtcccacacattttaaagacatcttaattgaaaatccttaacgcttcctgaggttgggggagatactgggattcccgatttacaaaggaggaaatgggccaggagagagatgagatgaggtgaattactgtaggtggcacagctagtgaggggcagggctggagttagaactcccatttgtgggagctgctaacctggcgggagtgcctcaccctgtggttcgcgtggatcgctcctgaaatagaatccaattctacccaccttccacgcacttctgcccagtgattctcagacagggggccggccccagagcccaggagaggcggaagagagttaatctttctcctgatgaccagaggcttttgtcggtgggtgtaagatacttctcttaggaaggagcagtcggttcttaatggtatgggttggagtctctggtctttctaaaagactttccatccgggagtgggggctcatgcctataatcccagcactttgggaggctgaggcaggcagattacctgaggtcaggagttcgagaacagcctggtcaacatggcaaaactccgtctctactaaaaatacaaaaaaattagccaggtgtggtggcgagggcctgtaattccagctactcgggaggctgaggcaggagaatcgcttgaacctgggaggcggaggttgcagtggactaagatcacgccatagcactccagcctgggtgacagagtgagactccatctcaaaaaataaataaaagacttttcttgtctggtttttcttagtctgacctaggcagtaatttccaaagcagattttggtgggagggcgattcaagactagaaggggtcaagactggcctggctgccccagtttctggggcatgtgttgttttttgccctgactgaacctgggtgtgagtggtggggaacaggtgtgcttagctagatgatggtggctcagccagttaaagggcaaggaatttggggcacatgcaaaggggatgtcctcattcaaactgtagcagatagctgttagagcccttgctgccagtgtatctccttttccagctactcttttcccatgtttccttggtcgagtggaccagtgggaagagaggggggtccctggaagaacgtaagatttgggacttgtgtggccctccctccgttataccttcctcagaagctacagcaagagccagtgggcaagtgatcacccactcaggaccactgttctgctgacccagaatccttctgggctgattggcttcaattgctgcccctagtctttcctgtgcatccttcacggatgacctccaactgttttatctgactgggtctacaacagtacagaggccagtggggcgtcatcttgtacagcaagaaaataattcttgtttttgcttcctttctcaggagaactacgatgacccgcacaaaacccctgcctccccagttgtccacatcaggggcctgattgacggtgtggtggaagcagaccttgtggaggccttgcaggagtttggacccatcaggtactgggctcagaggccaggtgttgggcttccaaagttgactcctgggtgtccttgtgtgtccacgatttctggttggaaatagtgattttgttgccatcctggtctagattctgtggccgctctgcttttgggttggccattgtactttgtgtcagattacagcaagttccatgaccctttttccttccttcgtttttcctctgccttgtagtttctagtcagtgttctctttttcagacagagcaaggtctcgctttgtggcccaggctggagtgtagtggtgcagtctcacccaggctcaggcagtccttctgcctcggcctgctgagtagctgggactataggcatgcgccaccatgcccggctaatttttacatatatatattttttgtttgtttgtttgttttgagacagtctcttgctctgtcgcccaggctggagtgcagtgacaatctcagctcactgcaagctttgtctcgtgggttcacgccattctcctgcctcagcctcccgagtagctgggaccacaggcgctggccaccccacccggctaattttttgtatttttagtagagatggggtttcgctgtgttagccaggatggtctcaatctcctgacctcgtgatctgcccgcctcggcctcccaaagtgctaggattacaggcgtgagccactgcgcccggcctaatttttatattgttctgtagaggtgaggttttgccatgttggccaggctggtctcaaactcctaggcccaagcagtctgcccacctagccctcccaagttttagggttacaggcatgagctactactgctcctggccagtgttctttcattcagcaagtagttactgaatatttggtgcatgctatatactgcaaatacagtagtgagctgtatctggatgcttctcttagaaagttgccctcctagagtgatttgcactgtcatagtgtaagctcaagaagccgtctgtgggtggcatctgacagtctggtgaggagaggtcaggaaggcttcccagagggacatgatggctcagctagacctctttggcttttggtactacttgtggcacagggtgttcaggtcggggaaccatgatagggttgcagaggagttcagaggccatggaggagtcagttctcaaaaaatcaaatgataccctcctcctgtctacattttcctgagaggattgaaacctgtgttctctctgccagctatgtggtggtaatgcctaaaaagagacaagcactggtggagtttgaagatgtgttgggggcttgcaacgcagtgaactacgcagccgacaaccaaatatacattgctggtcacccagcttttgtcaactactctaccagccagaagatctcccgccctggggactcggatgactcccggagcgtgaacagtgtgcttctctttaccatcctgaaccccatttattcgatcaccacggtacgtgccagcaggcatttcttgtgaggtctcccttccttttctccccttattccctcccccaagccagactgatctgccagtgccccttcatcttgcctgtgtttgcttttgcaggatgttctttacactatctgtaatccttgtggccctgtccagagaattgtcattttcaggaagaatggagttcaggcgatggtggaatatcctttgctggaaaacaggtgttccttagggtagggactcttgcagggcttgacagtggccattctttgagccagcatgtgtctgctgaccacgggagtggctgccatgtgccagatgccttcacagagcccagtgactgagtagggaggcagttaaaggaccaggcatatcgtgtggacgtgcagatcttaggggagagagcagtgtgttgggagatacaaaggaatttatttttctttttgttttctttctgttatttacttattta

SEQ ID NO: 91685 - DNA, 1152 bp, Homo sapiens
gcttccttgtctccttgcgaagtggcgcgggaaggtcgtcattgtgactggtgctgacggattagcgaggagaccaatgaaagtgggagggaggcggagattcttgggaggtttagagcgccgttcctatcaggtgcttttagggaggccagcagcgccagaaatccgacctatcaaattggattttattttaaggcggcggggtcgacggaaagactggcagaaagcgaccacctataaggagtgtctcagacaaacaagggcgggccctcctgcagaacggcgtgggcaatgtccaataagcgcgcaaggcgtgtggcggcctaccctccccccgcggcgggaccagtggctccccctatcgggtgggggcggcgggtgacgggcgtgtccctcccccaatgagaggcggggggaggcgggttctgcgccgccatgtcgcggaggctgctgccccgggcggagaagcggcgtcggcggctggagcagaggcagcagccggacgagcagcggaggcggtcgggagcgatggtgaagatggcggcggcgggcggcggaggcggcggtggccgctactacggcggcggcagtgagggcggccgggcccctaagcggctcaagactgacaacgccggcgaccagcacggaggcggcggcggtggcggtggaggagccggggcggcgggcggcggcggcggtggggtgaggccagggccctaggcgctgggaaggccgggaactgggggacaatttcccagcttgagggcattttattttttgaggggggcctctgcgcacgcgcccaggccatcgcgtcgttgacggtgtgggggaggggcggccgttgggcaaacggcggggtttgcgcgaggacaggcgcctgcgcgtgcgcggggtccggagcggggtgtgggggagcgcagaggaagtagctcgtgaggcgaatggcccagtgcgcaggcgccgcgggctggcgtgtgggggccgggcacgcggcccggccggtttttttcccctttatcattttcttcgctggctccatgcgcaggcgcagtgttcccgcccggcctcgtgggcggttaggggagcgcctggtgagcgggaacgggtgggcggcggccttgttctctagagtggggaattccgtctgat

SEQ ID NO: 91686 - DNA, 1440 bp, Homo sapiens
ggctgctcagagacatgatccaggttagctgggcggggccctgggcctctgaaggggagggagctgctgcccctgttctaggcgaccgaatgccctcctcacttccagcccccaggaaccctgcgcctcacggggtctcctgggtgaaaggcccgctcagcccggaagtggaccatcctgggccggctctcgccagcctactggaagaggaggaggaagaccttgaaggaaaggaggaaggaagggaggacgaccctgaagaggaaggccctgaggacgtgctcaccattcacgtccagtctctggtcagggcccggagcagctacgtggccaggcagtaccgaagccttcgggtgcgcatcgcctcagattctgggggtccccacgggtctggggacccggccacggagctgcttcaggatgtgcggcacctccttactgacctccaggatcacctggcaaaggactcctacatcagggctgtctttggaagcaggggtcctgggctccccaagaaggacgaggatccaggtaatgggaggactggaagggagcccccacgggttcaagtgtgcaacttcgtcctctccatcggtgcgcacacgtttccttctgcacccacacgcccttcctacacatcccacgcgttctatcgcccacgtatgcgcgcaagttcacacccaggctaactcttccacacatgttcacaaccatgtctacactcacgggggaccagagctaggcaggggtggctgtgggccagggtgggttgttggagcgcgtgggtgggcgtgggacaacttggcggtcctgtgctcacccgtcccccacaccccgcaggccccgcgctggagacggcggtgtgccaggcggtgctggcgcccctgaagccggccctgtggacacgactccgcacactccgagcaccggagctgcggcggctgcggcggcgacagacagccctgcgggcgggggcggggcctccgggggcacaggggccgggaccggaagggcagagccccgcccccgccttgcggagccgcatccacgagcgccttgcgcacctccacgctgcctgcgccccgcgccgcaaggtggcgctcctcttggaggtgtgcagagatgtctatgcgggcctggctcgaggcgagaaccaaggtaagggaggggtcaacgtctagcgtggtggggagagccttgagagttggagccaggcgggagagggtagcactggtgggaggaatctatgcggtcctgaagattctggtaggaggcgctgtcatgcccgacaaggtggaggggcagccagccctcgtggtcctggggatcggatggaaggtgtctacgcgccttgagatggggatccatctcaagacctttcctctggttttcccagatcccctgggggccgacgccttcctgccggcgctgaccgaggaa

SEQ ID NO: 91687 - DNA, 1043 bp, Homo sapiens
aaggacgaggccaggacaacagagagggagaaaccccagtgacagctgcatctcccaggcgggatgccgagctcctcagggacagctgagccccaaccgggcctggccccctcttaaccagcagttcttgtctggggagctcagaacatcccccaatctcttacagctccctccccaaaactggggtcccagcaaccctggcccccaaccccagcaaatctctaacacctcctagaggccaaggcttaaacaggcatctctaccagccccactgtctctaaccactcctgggctaaggagtaacctccctcatctctaactgcccccacggggccagggctaccccagaacttttaactcttccaggacagggagcttcgggcccccactctgtctcctgcccccgggggcctgtggctaagtaaaccatacctaacctaccccagtgtgggtgtgggcctctgaatataacccacacccagcgtagggggagtctgagccgggagggctcccgagtctctgccttcagctcccaaagtgggtggtgggcccccttcacgtgggacccacttcccatgctggatgggcagaagacattgcttattggagacaaattaaaaacaaaaacaactaacaatccggtctggcctcctgtttctttctgtgggcacccagggaaatctctgaagggagggggttagatcttgggccactaaggaaccagaaagtctccgggatccagagtgaggggtaacaagagggtcctcacgggggccctcgtggctctgacccctggactcccagcctgccagtgtcccttcctctaagccccgtcactaaaggcctgaggccccagaaagagggaggaaagttgacttcagataccccagccccgcctcttccccctgcctgctcagcttcctctctccacttcctgctactgcaggcctctcctccgagaacaggtagggcccccaggaaccgagcatctggcatcttcagcccctgctgcctccctttggtatgaggcagctgccctgacc

SEQ ID NO: 91688 - DNA, 1039 bp, Homo sapiens
tgcctttttagtggagagggggttttgccatgttggccaggctggtctcaaactcctggcctcaagtgatccgcccacctcagcctcccaaagtgctgggattacatgggtgagccactgcgccagcccctgcctcagtttcgtctgaggaggaaggggctctgcagcaccccttcttcagggctgagcttggggtctggtaggggtcccagctctgctcactcatcctctcccctgaacagggcttcacccccatgacggtgccagaccttctccgcggagcagtgtttgtgagtgaggcctctccgcttccctcgcccacctgggtgtcaggccctgccgtgggtgcccgaggcagggaaacctgaggagaccgccctggggctgggttgagggggccaggccataccagggaggccagggcagctccagatgttttcaggggaggagctggggttgggactgtaaaacgagaggccagggttacctgtcccctgatccctgtggcctggcctcctcccccaggaaggctgtgggatgacaccaaatgccaacccatcccaaatttacaacatcgaccctgcccgcttcaaagatctcaacctggctggaacagcggaggtggggcttgcaggtgaggacctgtgtgggtggtggggaggagcaggagtgatgtggaaggacaactgggagcgtccagggagcactgggggggatcacctgccccgagcagctcagcagccccagggccaacatgtacggctgtgtaggttgtttactgtacagcagtacagtgataatccagccccgggccttgacctggggttgcatccaccagagggagtgcctcttaatcttccaaaggcttcctctgggcactggcagccctggctcaccctgtggtctctcctcccaggctacttcatggaccacaccgtggccttcagggacctgccagtcaggtgacacctggtttccttagaccttgaccccacctgtgacaatcagtcttccctccttgacccgactttccctgctc

SEQ ID NO: 91689 - DNA, 1048 bp, Homo sapiens
caacttttttaaattggaaaaaaaaaaaaagccaaagtcctcctgtggcccacaaggccatgatctgcccatgacctccctgacccctctcttacctctcccctcactcagctccaggcattctcccacctcagggcctttgcgcgggccgttcctgctgcctgggacaccctccagagcccctcccggctccctctcctccttcaggtgtcacctctgtggggcctttgctaactcactctactcacattcctgccaccttcctggcagaatgcccctggcccctcacccccacctatctccagtgtctgggccccctgctagaatggcactgacaccagggcggggtccttttccggttttattcactgctccgtccccagcaaactagcgcaggactggcacctcctcagtcctttgggcctatctgttgaagtggaggaagagaaggggcccgcaggccctcaccctctcactccccttccccctgcaggtctcccacgtcttcaccaactttggcaagggcatccgctacgtatcttttgagcagtacgggagagacgtgagttcctgggtggggcactatggcgcccttgtgacccactccagtgtgagggtcaggatccgtctgtcctagcgactggactactgcctgacgttgtcagtcaagaccagccttgcagccaggtgcagtggctcacacctgtggaatcccagcacttcaggaggccgaggtgggaggatcactggagctcgggagttcaagaccagcctgggcaacatagtgaaaccgtctccacaaataatttttaaaaaattagccaggcatggtggtgccgcctgtagtcccagctactcaggaggcttgggtgggaggattgcctgagaccaggaggttgaggctgcagtgagccgtgatttcaccaccactccagcctgggtgagaaagcaagaccctatatcaatgaaaaaaaaaaaaaaaaagaccagctttgcagccagaagccagaggatacccagggacagtagggctcccaggtggctggtt

SEQ ID NO: 91690 - DNA, 1040 bp, Homo sapiens
cactccagcctgggcagcaagattgaaactccatctcaaaaaaaaattaaaaaattaaattagccaggcgtggtggcatgcacctgtggtcctagctactctggaggctgatgtgggaggatcgcttgagcccaggagtttgaggctgcagtgagctatgatggagccactgcactccagcctgggcgacagagtgagaccctgtctctcacacacacaatgaagagcaggactgaaggagaaagagcaagtaagggtggctgaagagaagctgagtggatgggcaccgctgagagtcacagttgtggggtaggaccaggaatacagaataatgggaggaggagtcggtaggagaaaccagggaggattggagcacaagagggagaggctggtggacagcacaagctggctggttgcggggtctcttctgggcaggctggcaggtgaaccatatgttcaactcttgttttcccacagagggcttcagaggctgggaggtggagcatggcgggaacggctgggccatagaaaagaacctaacaccggtgcctggggctccttcgcagacctgcttcgtgacctctttcgagtgagtggcccaagtgagaggccccgatccctggggcaaaggccccaaagaaagggaccctaccccccacactgtcctcatcgtcaccttcaccctctccttcccccatttatttattcattgattcattccatcaatcaacaaatacttgttgagggtactgtttcatatgccagggatacaaggaaagatcaggaaggttagcaaccacaggcagcaatgctctgtgcatcatcgcctgcagtttgtgagacaacagcaagacagctttgatctaaagacagggttttgggccgggcacggtggctctcgcctgtaatcccagcactttgagagcccgaggtgggcagatcactttaggtcaggagtgcgagaccagcctggccaacagggggaaaccccgtctctactaaaaagacaaaaattagctggacgtggaggctgaggcagg

SEQ ID NO: 91691 - DNA, 1049 bp, Homo sapiens
ctgccggcggacccatccctggccctggacgcgctgcccccggagctgctggtgcaggtgctgagccacgtgccgccacgctccttggtcacgcgatgccgcccagtgtgccgcgcctggcgcgacatagtggacgggcccactgtgtggctgctgcagctggcccgcgaccgcagcgccgagggccgcgcactctacgcagtggctcaacgctgcctgcccagcaacgaagacaaggaggagttcccgctgtgcgccctggcgcgctactgtctgcgcgcgcccttcggccgcaatctcatcttcaactcctgcggagagcgtgggtgacgggggcggggcccaggaggctgaggggggccgcgcgagcgaggcgggggcggggccgggacagagtctgagagatgtagccaatgggcgagaccgctggaggagccagggggcggggctgagggacgcagtgcctgggcggtaggcccggtgggcggggctggagaaggtgaagccgggaatccgaacgagtgggcggggcaaggcaggaagaccctggctgggccgggggagaaagcaagtagtttggtatgcagaggggatgcagaacaggacaggggccaggcgcggtgggaatggcaacgctttgggaggccaaggcaggaggatcgcttaagcccaaggagttcaaggctgcagtgagctatgatcgtgccattgcactacagcctgcgtgacagagaccttgtctcaaaaaaaaaaaaaaatggtggggtgcagtagctcacgcctgtaatcccagcattttgggagtctatggtgggaggatcgcttgaggccaggagtttgagaccagcctgaacaacaaagtgagactctgtctctaaaaaatttaaaaattagtccaggcgcagtggctcacgcctgtaatcccagcactttgggaggcccgagggggcagatcacttgaggtcaggagttcaagaccagcctgaccaacatggtgaaaccccatctctactaaaatacaaaattagccaggtgtggtggtgcacgcc

SEQ ID NO: 91692 - DNA, 1051 bp, Homo sapiens
tccccaacgaacatccggggctttcccccctcaccgcccaccagtccccatagcaacgaggctgaccgggcagtgggcagggccagtgcgggggcggagtcgggcgcctctcagggcccgctccagcctccgattggtacagagcgtccaatcggagaccttcgggcagaaaatgccaagcggggattggaaattttggaaaaggtgcgggaaggctggctcccggcccactgaggtccttaaaggggaaatgactgttttcgtgtgataccgattttctaacttcccccccagaaggagttaggggctgggagaaagtaatgagttaatgggcagaaacagttcttaagcacttactaggaggcaggcaccgggataagtgttttacttgcattttctcgctgcatatacaaccctgtggtataatatcattaatacccattttacagataaagaaacagaggttcagagggtgaaatagctggcttagcatcatagaaagaaggtaatgagttttgaacgctggtctgtctgagcccgggaacctgagactgtttgctcttcaatttttaaataagtttttacgaagtaattggtcaaaatattgaaaacaaacagcagacatcttctttaaaaatttttttaaattttatttttacttatttatttgtcttgagatagagtttcgctcttgttgcccaggctggagtgcaatggcgcgatctcagctcactgcaacctccgcctcccgggttcaagagattctcctgcctcagcctcctgagtagctggaattacaggcgtccaccaccacacccagctaattttttgtatttttagtagagacagcgtttcaccatgttggccaggtcgaactcctgacctcaggtgatctatccgcctcggcctcccagagtgctgggattacacgtgtgagccaccaagctggcctttttcttttatttttaaagagagagttttgttgtgttggccaggctggtctcgaactcctgggctcaaactatactcctgcctcggcctcccaaagtgc

SEQ ID NO: 91693 - DNA, 1005 bp, Homo sapiens
gggcatccagcccattcttgactttttgtaattccctttaaatattagacaagcatgttgtcagtgtatgtacgtgtgctcgtgcgcacacacctgacactgagtctcccaatccatgaacgtggtatgtctctccatttgtttatgtcttctcgttcatacttttccagccgacgccttgcccacctcttgtggggtttttcccagggtagttcatgatgtggcagggagtctgtgccctccactcccacaagatgccgtgcaccctgggtttagccttgctggctgaggacctcatggcggtggcaggaggccacttctcccattctctgcttcttccctggtaccgcccctggaccctggcggagggcgggcagggtgcccagaaaggaggctgtaattttcctgaatgatttcaagggctaattaaaggtttgccttgactaatcagcttacggtttaattattagggaacaggctctgggatgcgggaagcagctcagctggggtctccccacagcgtggcaggaaggagccaggacccagccctactctggggggctggcaggatatggggataccccagcaccctccagtgggtcagtggggggttctccatcccccactgagctgtgacaggtggagggcagcaggtgtgatggagattacagccgattcctcccctgattcacatcatcccccacagcccatggctggctggggaggggctggccctgtccctccagcagctttggcagggcccgtccctccccactttcctgcagcaccccagcctcgctggcctttgtggagtgctcggacttcatttattctgtgggtcttggcttaaaggtcagcacctctgggaagcctcctcgggcctccctcctgtcagagctggtgatcagccgcacggccccttgccagttcttgggatcatggttgttcatctgctgcaactcctgcagacactgagaagtacactgagggggatgcctgagctgg

SEQ ID NO: 91694 - DNA, 1063 bp, Homo sapiens
cacgagcagaagttcacggggctgccccgccagtggcagagcctgatcgaggagtcggctcgccggcccaagcccctcgtcgaccccgcctgcatcacctccatccagcccggggcccccaaggtatgtggcacccaccaccacctcccccagcccaccccaacccccgagtggccctggccctcaaccccacactcgaccctgtgaccgacacctcctcactgacatggaaatggagacaaaccccagccttccacccctatcctgggtccagtgctggcctttcaccctccacccactggctccaagtcctaagaacccatgccaccccaacctgagcctcccccacggcccatctgacagcccccacaccagcctccaagctctgctgtctcccgcagactcatgtcccgggggccatgctgctgtaccccggaccacactcctgtctcacccaaccttgagcctttccagagctcctggcagtggaagacagacccattcccagagggtgacagccccaagtggtcagggcttgggtgggggagcccggaggaggcacctgacacagaccaggggtccaggcaagcttctgggaggaggggacaccgaggcagagcccagggctgaggaggaggaggagaaattccagcagatgctggggaagccgggctttagtggagaaaatcactcctgtgaaacgctgggggctttttggttttgggtttttttttttcttcctgccatctagagcaaaatggcaaggttgggatttgaaccaatgtctgtttccaaggcccgtgctcttaacccctctgctgcctccatgtgaaatcataagagttgtggagccggtgtctgggtgtggcctggcatgaggctggcctggcctgagcccgtgctgggcctctgaagccagccttggagcctggactctctcccatggtcagtggggaccaggaggggccgcaggccaaggggaactcggccaggtttgcatccagcgggtggagatgggtgtgcctggggactcaccctcccggtgcccagcccagcctggcgg

SEQ ID NO: 91695 - DNA, 1092 bp, Homo sapiens
cccggctcctgggacccccttgccctctactttgggaccaggcctttctgactctccctgtcccccactccttgttgttcatgggagcagagagtgtggttttggggctaaggaacactggcgcccacatgggaggaagtgccaggccaggccctggccccagcgccctgtcatttgcagccctcggggctgattatggggtgggtcaatttctgcccttcctcccccaaacccctcagggcaggactattccaccagtgtgaggaacaggagaaaaacaaggggggcctctccagggtcccaccgagcccagggggcagcagcctggccatggcgatcactcctctggcccctgcagctgtgtccccagggaggggaggggctgcactgcccatgccattgtcactccatggcatctcttcattgcgtctctgtcttgtctctgtgtgtgtcgtgctgtcctgtccctgcgtgtcggatgcacgtcctgtgtgccccactccttgctgggcccccacccaccattgcctgggaccccagaccatcgtgcggggcagcaaaggtgccaaagatggggccctcacgctgctgctggacgagtttgagaacatgtcggtgacacgctccaactccctgcggagagacagcccgccgccgcccgcccgtgcccgccaggaaaatgggatgccagaggagccggccaccacggccagagggggcccagggaaggcaggcagccgaggccggttcgccggtcacagcgaggcgggtggcggcagtggtgacaggcgacgggcggggccagagaagaggcccaagtcttccagggagggctcagggggtccccaggagtcctcccgggacaaacgccccctctccgggcctgatgtcggcaccccccagcctgctggtctggccagtggggcgaaactggcagctggccggccctttaacacctacccgagggctgacacggaccacccatcccggggtgcccaggtaacccatcccccgccccagggcccccactgtcccctgcccgttgctcctctgtccccaccttccagccccgccccaccaccgtgcatctca

SEQ ID NO: 91696 - DNA, 1050 bp, Homo sapiens
ctcccacctatgggctcctctttttccctgggtgttttgggtaaagtccccaggttggctctgattggctcagcctgggtcctgtgcctgtttctgaaccaatcactgtgtctccactgtggtgatgaggccgcatgggtcctgaacccaccagtggatgctacctgggctgagggagggaggacacctgggggcagttgacagaaagaagaggggtgggtgctgggggggcagctctcttgaggggctccctggaggactagtgctctgtggactgctggctgggtgcccaagagggagttctgggccaaggactccaggagccagaggcagagacagcgctggagcggtccctgcctgaggcctccccaggacccaccatcccccaacagctcagccctgctgtcccttctcccgccccaggtagacatctggtcgctggggataatggtgattgagatggtggacggagagcccccctacttcaacgagccacccctcaaagccatgaagatgattcgggacaacctgccaccccgactgaagaacctgcacaaggtaggcccctccctggctgggaaactgtgcgccagctggcgggtggcagggctccaggtggagcatggggtgtggatgggatggggacaatgatggcgcctgggatggcgcttactgtgtgctgggccccccacccccgggcctcatgtgtctgtgcagaccccctctgtggggcctgggcgacagaggcagcagagccacaggccctctgcaccctcaccattgccctgggccccacccagccctagagagatttgcacgtttagaagtggaggacagggccgggaccttcctagtggaggacttgccaggagggaaaggggcacctctgggccccagttgctttcagcttcttgctaaaccatggaaatagggagtacatgagcccccagggtttgtcacttcctctggggccacatagtaagcgccatcacaggtgccatcactgtccctgtcccgtctacaccccaagatctagacacccatgacctc

SEQ ID NO: 91697 - DNA, 1102 bp, Homo sapiens
attttcctgcctcagcctcccgagtagctaggattacaggtgcctgccaccacgcctggctaatttttgtatttttaatagagacagggttaccatgttggccaggccagtcttgaactcctaacctcaggtgatccacccttcttagccttccaaagtgttgggattacaggcgtgagccactgcagccggccaaagctagatgttttacccaaaggtgctgcatgcagataagggggagcgacctgcatcatggttttccctgaaaggcaggaatatgtataaaagaggaactagaagagcatccattgttccagtaggaatatgacaggcgctgtgagctgaccttagtgtccacctgagtgggggatggggcatgcagaaaaggggaggtggccagtagcgttggcccagttttggggtagaaatgcctagatgaaggaccttgaatggcagttgtcctagcaagagtgagacatagctagggagcatgtcccttgagggcagggcttaaaagccatagcacttctcccctgcaggggccgggatatgcagaggaggtaatacgaatgatagatatattgtcccagtgggtgatgggacacagccaggaggtgggtctgagggcggggcatacagatgaggggtgtgaaagggtgggaatatgttgatggaggcggggcttgaattgctgctgttgtctcagtagcggctgagacttcgatagcagggtttagtccccactgttcaccatgggcggggcataaagcgaaggggcgtggttcggggggactaaccccgccctgaacccgccccctcctacaggatgatcccgtccaccagtcagaccttcctggtgaatgacctggcggcgggccgtgcctacgacttgtgcgtgctggcggtctacgacgacggggccacagcgctgccggcaacgcgagtggtgggctgtgtacagttcaccaccgctggggatccggcgccctgccgcccgctgagggcccatttcttgggcggcaccatgatcatcgccatcgggggcgtcatcgtcgcctcggtcctcgtcttcatcgttctgctcatgatccgctataaggtg

SEQ ID NO: 91698 - DNA, 1731 bp, Homo sapiens
gatctcggctcactgcaacctccacctccctggttcaagcgattctcgtgcttcagcctcccaagtagctgggattacaggcgcccaccaccatgcccagctaatttttgtatttttagtagagacggggtttcaccatgttggccaggctggtcttgaactcctgacctcaggtgatccgcctgcctcggcctcccaaagtgctgggattacaggcgtgagccactgtgcccagcatggaagtgttgtaatctgttgttaatagctgatagtggcttcctctcaccatcctatggaacccagctgtaggcggtaggggagggatccaggcctgactcgtagcaggacatcccatggcggccaagtcccacgcctgggtaaccggctccttccccggcaggtctcacctcccacccctcctgccttcccactgcaccatggctccaggacccttctcctcggccctcctctcgccgccgcccgctgccctgccctttctgctgctgctctgggcgggggcatctcgtggccagccctgccccggccgctgcatctgccagaacgtggcgcccacactgacaatgctgtgcgccaagaccggcttgctctttgtgccgcccgccatcgaccggcgcgtggtggagctgcggctcaccgacaacttcatcgccgccgtgcgccgccgagacttcgccaacatgaccagcctggtgcacctcactctctcccggaacaccatcggccaggtggcagctggcgccttcgccgacctgcgtgccctccgggccctgcacctggacagcaaccgcctggcggaggtgcgcggcgaccagctccgcggcctgggcaacctccgccacctgatccttggaaacaaccagatccgccgggtggagtcggcggcctttgacgccttcctgtccaccgtggaggacctggatctgtcctacaacaacctggaggccctgccgtgggaggcggtgggccagatggtgaacctaaacaccctcacgctggaccacaacctcatcgaccacatcgcggaggggaccttcgtgcagcttcacaagctggtccgtctggacatgacctccaaccgcctgcataaactcccgcccgacgggctcttcctgaggtcgcagggcaccgggcccaagccgcccaccccgctgaccgtcagcttcggcggcaaccccctgcactgcaactgcgagctgctctggctgcggcggctgacccgcgaggacgacttagagacctgcgccacgcccgaacacctcaccgaccgctacttctggtccatccccgaggaggagttcctgtgtgagcccccgctgatcacacggcaggcggggggccgggccctggtggtggaaggccaggcggtgagcctgcgctgccgagcggtgggtgaccccgagccggtggtgcactgggtggcacctgatgggcggctgctggggaactccagccggacccgggtccggggggacgggacgctggatgtgaccatcaccaccttgagggacagtggcaccttcacttgtatcgcctccaatgctgctggggaagcgacggcgcccgtggaggtgtgcgtggtacctctgcctctgatggcacccccgccggctgccccgccgcctctcaccgagcccggctcctctgacatcgccacgccgggcagaccaggtgccaacgattctgcggctgagcgtcggctcgtggcagccg

SEQ ID NO: 91699 - DNA, 1107 bp, Homo sapiens
cttctcttcacccaaaagatagagatgaaagaagacagatttcctccatttgcattgtatttgccagctgcactttagtgacctacagagtaataataataatgaccactggtttttgaatgctttctaactgccaggcactgtttaagtgctttacatgtattcataggaggtaggagtttacctaccctatgaggtaagtaaactaccattatcctcattttgcatatgatgagattaagaacaggtaggactaatagagggtctgtgggcactgtccattccaagatggtagtgccttgggtcaaaaagtttgatttttagttaagataggtttggctgcaatggggcagtagttgttaggtatgcagaccctgggtctggacaggatttgtatcccacattaccactcaccagttttgtaccctaggacgagttacttccctggtcttttagtttccacagctaaaaatatgaaggaaataatgatactttacttcatagaattgttacgaggattaaataagttaatacatgtaaagtacttagaacaatgtcttgcccataattgcaatgttagaaaaacaataaaataaaaaaaaagctcatatcagccagaactctaaaaacataaagtgatagaaccttagctcaaagtggtttaatgaaaaaagtgggggattaattggcttttgttactggaaagtccagagctaggttggcttcagacctagctgcatccaggtgttcaaataattttctcagtcatctcctcccatttctccactgagttagcttcatcctcaacaagcttctgctttggatgacaaatatggtcctcagcagccccaggttttaaccctacctccttggaaagccttagtggaaagagaactctttcttgagagtcccagtttgaaaatagtttcttccttgaatagatgtgagattatgccagaagatccttagaaacatattttgggttctgtaccctgcaactcagtctctggcttgctgagccaaataggcctgtgattccatccgatgaactttctgagcagtgatggcaatctccctccccactgtcccccagccgcagtcattctc

SEQ ID NO: 91700 - DNA, 1036 bp, Homo sapiens
cccgggctcaagtgattctcccgcctcagtctcccaagtagctggggttacaggtgcacgccaccacgcctggctaatttttttgtaatttttgtagagacggggtttcactgtgttgcccaggctggtctcgagctcctgagctcaagcgatccacccgcccatgcctcccagagtgctgggattacaggcgtgagccactgcacccagccctcttagccattttgttaacctcatttcccacctctggaggtggtaggggcttcccaagaagatcacttggacctcttcaagtatggtggcaatattgctgggctgttggagagacttctgttatagaggctcccctcttgtgtttttcctcaaaggcaaggagtcatttttggtcacatgaggacaaagagaccagaccagtagtgcattctgttttgcatgggaattgtcaaggctctttcagttttaactgaaacccaactcaaactggcctaagtcaaaaacgaatttattcatctatgtaactgaaaagagtgggccacaagggggaggcttcaggctagctgcatctaggttttaaatcatgtgaacagatctccctttccccctcccccatctcttgactttgctgtcatctgttagtttcattctgaagcaggcttccaccgtgaaatagaagaggtggcaactggtgacatcatgagacgatgtgtaatctgagcaaccctaaccaagaacttattttccttagtagttccagcaaaaatccagagaggactatccttggccaggctttaccccatgtccacttctggagccaagaaagacagttccttctccaaggggaacccagggtgttgatactagaagatggaaatggatacagtaagatgctgccacagtgagatgcctcacccaggtctccctctgtcacttcagccaagcacatgggatagaaagtagcaggcggcctctggccctttaatggaagagggccatccagtcctctccagttaacatctagaccgaacacaaagcatcc

SEQ ID NO: 91701 - DNA, 1018 bp, Homo sapiens
ctatgctgcaaggcctaaacaacagcgattgagaatgtcagggtagggctggaggggcaggctgactcgactactggagaagagaggaaaacacccgtcactgagccacagactgaatgtttactatgagtacactctgtcagatgcttttcatgcatcatctccctacatcttctcagcagctttataatccttactttacagaggaggaagcatactgcccaggccactgtgtgtttttgactggggtgcatatccttgacttatttttatttttttttattttcattcttgactttctgtccctaatgggaatcactgtctttcttctttctcatcaagaactgaaaactacaggactaagttatcaaacagggtaccacagagttcttatcgtttgatccagtgccaggtggagttgggagggcaggaaagacaaaagttctgtgacttcagtgaggccttttctgccttggaaaatgatctttagatgtggagatggcctgaaggacagcttcataatcttggcagtcggttcaagtgaagacagacaagggaatgaggtttcctagctttgagtggcagatgctgaaggggatctggaaatccagggaagaagagagacttgggattggagagataaaaggttgtgggtaaaaagttcccccctggctgggcgcagtggctcacacctggaatcccagcactttgggaggctgaggcaagtggatcacgaggtcaggagatcgagaccatcctggctaacacggtgaaaccccatctctactaaaaatacaaaaaaaaataaattagccgggtgtggtggcgggcgtgtgtagtcccagctactcaggaggctgaggcaggagaatggtgtgaacccaggaggcagagcttgcagtgagccgagatcgtgccaccgcactccagcctgggtgacagagcgagactccgtaaaaaaaaaaaaaaaaaaaagttcctccctgccggacaccatggctcacacctgcaatcccag

SEQ ID NO: 91702 - DNA, 1029 bp, Homo sapiens
taaactcattttccttccacatctgattccgtttccttgccactgccttctgtttgtatttttccctgctcagtgtctaggtctgaatctctgattctatccttgttgggtccttgagactccaacattagactggcttttcgtgagttctgtgggacttcatcttaatgggaaagaggaaatgtgtacctatatgtttgtgggcttgcagtacccttacatgccttctctatgtgctggaacccagggtcctacccagccttctgcaagccctgtctgactctctgtgtagatactctctgtccctcattgtagggtctgcatgtgaccccagcctgtgtcctcccatccaggatgtgctggaaggcgggaacctacgaaacgctctgcaggagctgcagcagatcatcatcactcccatcaaggcctacagtgtcctccaggccaccgtggctgccgccaccaccacccctactgccaaggatggggccccgggggaaccaccgctgccaggtgctgagcctcccctagcccaccccggcacagacaaaggcaccgaggccaaggaccctccagctgtggagaactacccacctccaccagctccagctcccactgatggcagtgagcctgccccggctcccgtcgccgacggagacatccccagccagtttacacgggtgatgggcaaaggtgagaccagccacagcctagcaggaaatcctgaggcagaaagccaagtgaacccaagcaccagggatcaaatccaagttcgatggtgggagcagggctttgtaaagcctactggagactggaacactacagagagtagccaagacagggtgacaaggccccttgcccttgggcacgtctgggctgatggtggataacagcccttcccctcaaagcgtctccaggctgagcagaaatggggcagtgggtcagaagaaattccatgtagtaaagggtgagcagttgaggggagtccattgatttctctcagaggggaccaaagtccaggggatgggg

SEQ ID NO: 91703 - DNA, 1050 bp, Homo sapiens
gcacctgggggttgcgggaggtatgtgctgggctgaatgacatcataggggctgggaggggaagtaaagagaagttgactttattaacagcaaaggtttgggggtggggaacaaacaagtgaaaggctcacaaacagaccactagaaaagtgctttgctgctcacaataatggtgtctgaaccagccctgaatgccctgggactcagtcactgtcactatcagcttcactggaatcagaagctgcagcttcactgccatcctcctgggccgagtgctcgctgccactggggaagggactggcgctgcggctgtggctccggctccgctggccacccccattgctgccgctgtctgaatcattgtcactgccaccttgggcctgtcctctgtcctcatcatcagagtcggcatcgtcctcagaatcagcatcactgccaaagatctcctctttgtcacgggcagcccgggcctcatcctcgctgctctcgtcctcaccactgccactcttgtcactggcctcgtccctgtcaccttcctcccgttcactctcgctgcccgagtgctcatcttcactgccctccttctcactgctgctgcccttctcctgctcctcatctggaagggagtggagagagatgaaacccacttttccaccctcccagggctcccagagtctggcctgtccagatttacctgagcccccagcttctttctcttctgtctccatctcctcttcctcttcctcctccggttcgtggttttctagctgggccttccgtgcctcctggaagcagcaagattggaatgaggggaaggagggtgttctgctgggtttttgtccccctcctcacctacaaccaccaccctccctgccatgggtgccctgagccagtggtgcttgttacctgagcttccagttccttctcattcatgtcccgatgtttgaccacaagcagggcgttggtgcctgactgaaccccagccttggcccggcgcttactaaggcggaccctgcagggggtgaatttgggagagagaagtggaagatg

SEQ ID NO: 91704 - DNA, 1835 bp, Homo sapiens
ctaccgcatcgaccccaatggtgtgtggggagacagggagggtctgctctaggtcagcaaaggctcaggcctgggcctccctcatggtcctcctgccccccgctctcctctagttcttctagatccagctgatgagaaacttttggaagaggagattcaggcccccaccagctccaagaggtgagtgggtagcaaatgggtactggagactggctcaggtgggccctacaagcaggagggcagtggggtcctgagatacctgatttcccaccccagatcccagcagcacgcgaaggtggtgccatggatgcgaaagacagagtacatctccactgagttcaaccgttatggcatctccaatgagaagcctgaggtcaagtaagttactaacaggaagagagggaaggtggagatattaggtgtgtccagtggcccctaaggacctttttcttcattcctaggattggggtttctgtgaagcagcagtttaccgaggaagaaatatacaaagacagggatagccagatcacagccattgagaagacttttgaggatgcccagaaatcagtaattgagggactgggatggggagaggcaagggtgcggctgcagagctcctcctcaccttgtttttgttccaccagatctcacagcattacagcaaaccccgagtcacaccggtggaggtcatgcctgtcttcccagactttaaggtcaggcccaaggtgggaggtagaaagggacagcctatttgtgcctgttcccatctaaccccagtgcctccatctccctagatgtggatcaatccatgtgctcaggtgatctttgactcagacccagcccccaaggacacgagtggtgcagctgcgttggagatgatgtctcaggccatgattaggtaggtggtcctgctgtccaccttggcctgctccttgctgcctcttgtcctcacacttcattgctactccttttcccccaaccaggggcatgatggatgaggaagggaaccagtttgtggcctatttcctgcctgtagaagagacgttgaagaaacgaaagcgggaccaggaggaggagatggactatgcaccagatgatgtgtgcgtgggttgcggttaagttttggggattgggaagttttggggattgggatagggaagaaatggggctgaacctgtgccctcatcttcaggtatgactacaaaattgctcgggagtacaactggaacgtgaagaacaaagctagcaagggctatgaggaaaactacttcttcatcttccgagagggtgacggggtttactacaatgagttggaaaccaggtactcagcacactcctatctgattagcctggatctgtgcttcttaagaccctggggcatgcaagagccaccttggaggtcatttgtacctaagaatttgtcatatgcattggtaaacaagagcagcagatgtctggtcatgcacatgagctggacttggttctaacaggaggagccagaaaaaaaatctttttttttgagatggagtctcgctctgttgcccaggccagagtgcagtggtgtgatctcagcccactgcaacctccgcttcctgggttcaagtgattctcctgcctcagcctcctgagtagctggcatcacaggcgtgtgccagcatggccagctaattttttttgtatttttaatagagatggggtttcaccatgctggccaggctggtcttgaactcctgacctcaggtgatctgcctgcctcggcctcccaaagtgctgggattacaggtgtgagccaccacgcccagccagaatatcttaatgcaggagacatttagagc

SEQ ID NO: 91705 - DNA, 1330 bp, Homo sapiens
agaatatcctggtaaagggggctgcactcactgtccattgtcgatgttagtgttctgaatcaagttttgggccgcaaccttcatcaaggtctagtcaaaacaaaaacaaaacacgtgggaaatggaaaaacaaaagggaatacctctggcagatctacactctttcttgagatcactcagtctcaggttttcttttcaactggcaccttccctcctgactttccaaagtaatattcgtttccattcctatagctgtcaccactccatcctcccagaggcccgctctcacctgagcttctcgccaataacctaagggtcctccctcacctatcaatcaagggcagaatctccgtataagccagtactctcctcaggctttaacgaccagagcccagtttctcctttaaacaacccctcactcaagctccggccagtcccagcctcagcatcagcgctgatcccatctctgccgagcttcgcttaggtctcgcagaaaacaacagttttatttatttatttatttatttttttgacggagtctcgctctgttgcccaggctggagtgcaatggcacgatgtcggctcactgcaacctccgcctcctgggttcaagcgattctcctgcctcagcttcccgagtagctgtaattacaggcgcgcgccaccatgcccggctaatttttgtatttttagtagagacgaggtttcaccaggctggtcttgaactcctgacctcaagtgatccgcccgcctcggcctcccaaagtgctgggaacacaggcgtgcaccagccaggccaaaacagcaggttctattcctctttctgcttagcgctctctccgactaacctggccctcggcctgcccctctagactaccaaatccagtttgcttctcgctgcttaaggccaatcacctgtagactctccttcagctgcgggatgagcatcttataacgctgcacaggatcgaagtcctgttgctgttgctgcaggaggccgctctgggcagggcccaccagttgtgctggcggttgcggctgctgctggggacccgggccgccagccgaactaggacccgatacaccagcagctgaggaagccgctgaagcttgctgctgggatgcagccatcttcctcgcgtagaccgccggaagtgcgttacgactgcgtctctccccgttgcttttcagcatccctatttctagtccccgtttgctagttagtcccgccccctaggcaattaagccaatggaggggaaggaggtgccccaacgttacgtcactctcaaatctgcgtccagactgagatatctctccaccaatcacaga

SEQ ID NO: 91706 - DNA, 1035 bp, Homo sapiens
atgattcaccccggctggggccttttcacttctcctttggggctaaaaatactgggacccaggcatccagctgggccagccttgccacaaattgcacaacgcccctcactcaagttccgctgacgcaggcttgggtgggggcctgagttgctccctgctcagacctgtggagctcagagcctgggcccctccactgctcctctcctaggccaaggaccctggggtctgggctgacatgcgagccgctgggggactctgggcttggctgtggcccctggaaatgaagtcccttcccttagccccagataacccaggggtgctggccccctgcatagacacagagtcccagttaggagctggggatagaagacagctaaaggggactaagagagagaggtcagagtgagagaaataggaccatggggagaaacacattaacaggaacagagaaacaagggaaaaagagacaggatgagagagacacaactgtaatagagacacagaggagtggcacacagagaccacctcccagctggagacagtcaggaaggactgagggagaggggacagccagggctccacacccaggcaagaatgggggagggcctgtggaacagagaagtcatcaacacacacagttcaaagtctaccctaggctaggagggggagcaggaagaaggggcagggacgcaggggcccggcctgcgagctccctgttggcctctgctgccccctgctggctcccgctgcggtgctcaggcaggaagagaggaggctgctgtgtttaggcccaggacgctcttcattccctttgcacaccacccaccaaccactgcctgccccactccctgtcccccacttcacagagtgcccccagggccagcaggtggtgcgggtgtcttgcccgtgaccttgttggcacagtccagcagggcggtgtgaatgtccttggcacaggaaatctgggctttgatgaccgccaggtactgtgggtaggggaggctgtcaggctgcactgcgtcgggcttggtggct

SEQ ID NO: 91707 - DNA, 2101 bp, Homo sapiens
gagtgcgcgggcgagctggggatcgtgtacccgcggcacgtgtgctcgcgccgtgtgtgcgcctggcgcgattgcctgggcctgagcgggcgtggccaagggcggcgctggccgtgtgtaccctggcctgcgactgcgtgggcggcgggcctgggctagccgtcatgtgtacccggttgtgtgaacagtatgtgtgcttgcgggtgcaaaggtgtgcgccttggcatctggggctgcgagagcctgtgtgcctgggtatgcagtgggggaacgtgagggacacgagtgtgcccagtttcctgtgagaaggctgtgtgcatacaatcccgcatgacttggctgtgtgaatcaatgtgtgaaaccgcctgtgtgatcgactgtaccgtgtgtactttggccatctctgggtgtggggtggatgctctgttgtaactgtactgcaatttgtctctgaggcggcattcttaagaacatgagattttcatccccacctgcatatctgtgcgtagctctgagccactgtgggatctgcagtgactaagtgtgtgtaactccgcgcaggtgcctgggtgagggaatgactgccctcccctgtgactgaggctgtgtgcacacacaactttgtgtgtgtgtgttgctttgagacagggtctcgctctgttgcccaggctggagtgcagcctcgacctcccaggctgaatcgatccttccacttcagcctcccaggtagttgggactaaaggcacgtgccaccacacccggcacacacatttgaagctgtgtcagcatctgtgactctgcagctgtggccgtgtgcaaggcctttgtggctcagtgtgtgtagtccctgggtgtgtgaagtgttcacatatgtccacgtcctttgtcgtgggtgtctgagactgcatgtgcagaccacagcaggccggcgtctgaatgcagttcctgtggcccgagtcacaaggcagagaaaccgatgaactttggtttctgacgtctacagcctgcgtgatggggagagtagctggcgagctcccccctccatgtcactgttcttgtgtcggcctctgtgggcagagcagacgtgcagacatgagtacctgagaagctggggcagcgccgatgaggctgcttctgatagtgctgggctaaggacagggctgagtcagcctgtgatgggcaaagtctgcgatggggtgagagatagcttatctggtaaagtggtggttagagggttgtttgtgtattcatgtggctgggttgctccctgaaagtatgtttgtgggactgtcaatgggatggggtccctgggggcaccatgattgtaggatggtgggttagctctgcagtggggcagacatgctgtgtgctggagtccccacggtctgttttgtggtggctgtgcacctcacgtacaccccgtccctggagcatgcagtgtgcaccagactgtgtagtctccctctgggtttagttacctagcaaacccaagtcctcaccaaggccctctgtgacctgtctggatttcctctcctatccctgctccctcattgtgcccaagcctcctttttatgtgttccataaatcccagcacattcctgtcccaggtccctggcacttgcagttccctctgtctggagcactcttgcctggatgtgtggatgtccccaagctcattccctctccttcggggctgctctaatatcgccttctcagtgaggccttccttgacctctgtcaaggattaaaacaaaaattaaaaggcccactgcagtggctcgtgcctgtgcctgtaatcccagcactttgggagaccgaggcgggcagatcacttgaggtcagaagctcaagaccagcctggccaacatggtgaaaccccgtctctactaaaaatacaaaaattagccaggtgtggtgatgcacgcctgtaatcccagctagttgggaggctgaggcagcagaatcacgtgaacccaggaggcggaggttgcagtgagccgagatggcgtcactgcactccagcctgggcgacagagtgagactggtctcaaacatatataaacaagaataagaaaacccttgtcatctatttaataataaa

SEQ ID NO: 91708 - DNA, 1008 bp, Homo sapiens
aaagggcccattgatttatgggtggggtttggcaacggctttggctacttgcttttggagggtaatttgagcaccaggattccccctcaggagaggttccagttaccaggagacactggaacctcaggtctataaaaactggaggggcagtgaaggcctattattcacagcacataagattctaggagacagatttgggcagggaagaggtgggggagagggttcattgcctcccttaaatatgctacaattttttttcccccaagaacctcggaagacactccatcccccaccatcatgaatactgagcttgcacacttggggacctgccccagcgtgaggtcaggggagtgggttaatgcattctggaaaaggggattacttgattactgtcccccaagtccccacagccctggggtccatgcagagaccacagtgcaagagacgtggctccccgctgagatccagctgatctgaccgggcagtcactttgtcactcagaaacagagatgcgattgaagatggggagtcgccggggggctgccacgggctggggtggtgcaaaaactcccgcctcgaagacgggagagtcagagccccccaggctgctgccgctgctggcatattcatcagggtcggatcccagggactgtacagagggggtccgaaccaggccacccaagggcccccagacgctgataggagtggcccttcggcaggaggggcaacagactggggtggggtctcttcgagccaggggggtgccaggggcagcagagaaggcagagggtgacagtggaaggtccccaggtggtggtggggagctggagggcgagaaggagctggaggacagggaagggccggccaggcctggtggtggtggtgaggtccggcggccagagggcaggccggagaagctgatgctctggcgaagcacaggagggtggcccggggccgccaggtcttcgctagggttgtggatgaagtggcagcgagagccgtaggggc

SEQ ID NO: 91709 - DNA, 1056 bp, Homo sapiens
gtctcttgcactgtggtctctgcatggaccccagggctgtggggacttgggggacagtaatcaagtaatccccttttccagaatgcattaacccactcccctgacctcacgctggggcaggtccccaagtgtgcaagctcagtattcatgatggtgggggatggagtgtcttccgaggttcttgggggaaaaaaaattgtagcatatttaagggaggcaatgaaccctctcccccacctcttccctgcccaaatctgtctcctagaatcttatgtgctgtgaataataggccttcactgcccctccagtttttatagacctgaggttccagtgtctcctggtaactggaacctctcctgagggggaatcctggtgctcaaattaccctccaaaagcaagtagccaaagccgttgccaaaccccacccataaatcaatgggccctttatttatgacgactttatttattctaatatgattttatagtatttatatatattgggtcgtctgcttcccttgtatttttcttcctttttttgtaatattgaaaacgacgatataattattataagtagactataatatatttagtaatatatattattaccttaaaagtctatttttgtgttttgggcatttttaaataaacaatctgagtgtaagctgggatcctggcttcttcgcggtctagagacaggaatggagagggagggggtgactttttggaagctgggtgcagttaactcttcctctccgagccccgcggcgcttacctggcaggaagtgacgtcaccgggcctggccgttcacctgaaagggtgggaccaggtgaggtcaccagatgggaaccgggggagccagttcccgggcgtcgggggcgccgcgctcccgtcctgctgggctccttgacccagcttcgggcgggtgcggtcggggacgggatgtttccgtccccacggggccgcgggaggcgggaggggccgggtggggaggacggaatgtgctggggcgcgcgcccagagcgagcgggggcgggcgcggggcggggcagcctggg

SEQ ID NO: 91710 - DNA, 1057 bp, Homo sapiens
agaattaggggaactcagaaatccatcccccaccccacggccctacctagaagacttaggaatgtgggtccccagcgccgccatctgagactccagagtcgaggctcctagcatcccctacgtagaacactgagaaattccgactgcgggaccccagtctccgagagaccccagattctattcctggagcctgagagcccgaagttcacgcccctgagtctgggctccgcacctccctggggaccgcgtcggggtcgcgcaggagccgggctgcctcgagccggggctggaggctccccgggaggtgaggggggaggcgaggggcccaggcggactgggggagggggcggcgccactgctgaacaatgagggggcgtgccggcggggggcgagccgaggcgccggcgggagttgggggctggaggggtgtgggaaggcgctggggaggctgtggctgtggggacggcgatcggggttcggagagaccggccggagggggtgcgagggctcggggccagcgccccagcgcgcagccctcggcgggggagggagccgtctgcaggaccctggcatccggtcccccagcctccgccctcccctgggaccccgcggcctcccgcccacggcttttcccagccctgcccctcgccctccgctccagctggagcccaaacgttcccaggatccctaagcctccggccccagacaaacgggactcgcagcttctgcgcctcctgctccgctcactcttctttgtctcagcctttccatctttttcgccaggttctctctccttgtccccttctttctgtcactttgtgcctcccccattagttactcccaggggcccctccctggatttacaccacgctcctaattcccagcccccatctgtgagtctgggcggcggagaggcccatggggtcctgatatccaagaaggggctctttctgcaggactctgctgggccgctcagccatgcctgagggagcccaaggactgagcctctccaaacctagcccaagcctcgggtgtggccgaagaggtgaagtgtgtg

SEQ ID NO: 91711 - DNA, 1820 bp, Homo sapiens
aattgagccaggtacggtggctcacctgtaatcccagcactttgggaggccgaggtaggtggatcatctgagatcaggaatttgagaccaggctggccaacaaggagaaaccccgactctactaaaaatacaaaaattagctggacattgtggcaggcgcctgtaatcccagctactcaggaggctgaggcagcagaatcgcttgaacccgggaggcggagattgcagtgagcagagatggcgccattgcactgcaggctgggcgacagagcgagactccatctcaaaacaaacaaacgcaaaagaaggggattgggacttggggtcctctatgtgagggaggagtcttggctcttgccttccattgctttccctcctcacagcacgctggcagcgaaggggaactctaccctccagaatctcagccaccagtttcaggctctgcaccccctgaggacctggaggatgctggacccccaacactggacccctctgggacctcaatcactgaagaaatcctggaactgctgaatcagcgaggccttcgagatccaggggtgagctggctgtcccatcatggtgtccttgggcctctgggtgtgggcacacagaccagggaccagataggccagcccatgctgatacctttattttttttttatttgagatggagtcttgctctgttgccgaggctggagtgcagtggcgccatctcggctcactgcaagctctgcctcccaggttcaagcgattctcctgcctcagcctcctgagtagctgggactacaggcacccgccaacacacccggctaattttttttttttttttgtatttttagtagagacagggtttcactatgttggccaggctggtctcgaactcgtaacctcaagtgacccgcccacttcagcctcccaaagtgctgggattacaggcgtgagccaccacacccagctaccatgctgatatgtttggcttgttctcctgtgcccactatagccgtccacccatgacattcccaagttccccggagactcccaggtgcctggcgacagcgaaaccctcacattccaagccctgcccagccgggactcttcagaagaggaggaggaggaagaggaagggctggagatggatgaacgggggccttccccactccacgtcctggaagggctcgaaagttccattgcagctgaaatgcccagcattccctgccttaccaaaattcctgacgtgcccaaccttcctgaaattcccagccgctgtgaaattcccgaaggttctcgccttcctagtctctctgacatttccgatgtttttgagatgccctgccttccagccatacctagtgtccccaacacccccagtctgtctagcactcccaccctctcctgtgactcctggctccaagggcctctgcaggaaccagctgaggctccagccaccaggagagaactgttttctgggagcaatcctgggaaactgggagagccgccttcaggaggcaaggcagggccagaggaggatgaagaaggggtatcattcacagacttccagccccaggatgtcacccaacatcagggattcccagatgagctggcattccgctcttgctcagaaatccggagcgcctggcaggcattggaacagggacagctggcccggccaggcttcccagagccactgctgatcctggaggattcggatctgggtggagacagcgggagcgggaaggcaggagccccgagttcagaaaggacggcgtcccgagtgcgagagctggcccggctttacagcgagcggatccagcagatgcagc

SEQ ID NO: 91712 - DNA, 1201 bp, Homo sapiens
caaggagggggattctagggaggataggattctggaagtccttaatctgagaatccagccagatttcttgcagtagattccaaaggaagattctgatgcgggggattcggggaggagggagtccagaggggagaaagattacaggtgttgggagggtgggaactgatttaaagaaagggcgaagggagattattaaagagccagaatgcaaagaagagctgcggtagtcgactacagaggacgcgaagcacactcccgcagccttcccttcagtccgcacacgacactcccaggccccgccccttccgcccacagagcccgccacttccgcctcacagggcccgcccgctctgagcgcctaagggccttcccgccgctgaccagacgccccgcccgttagccgcaacagaagccgtaaagctctctcccgtcgcgacgcagtgctcaaggcgcctgcgcagaccctgaaaagcggccagggtggcccctagctttccttttccggttgcggcgccgcgcggtgaggttgtctagtccacgctcggagccatgccgtccaagggcccgctgcagtctgtgcaggtcttcggacgcaaggtgagccagacgccggatgggaaggggaggggaaggagaaggccagggtctgggagaggtcggtgggcaggaatctagggggtaacatgggagctggagccggagctcacggggcccctgtttctcttgtatcttacagaagacagcgacagctgtggcgcactgcaaacgcggcaatggtctcatcaaggtgaacgggcggcccctggagatgattgagccgcgcacgctacagtacaaggtgctgggatccggcaccggcgttgagtggatggaggactcttggagacagagatgttgtagctcttgaaagctgggggggctggcatcagcaacgggatgtttagaagttgtgttgggtgtagaacagtggggtatttggcaatagagctgggcttggggttcagaagatgtaaaagctgagatggggttgttgaagattaagggtttgctttgagaactgggatgttaggaagctcacctcactggggcggggggacccaaagggtgaagggacaccgactattttttattttatttatttgttttgagagggagtctcgctgtgtcgcccaggctggagtgtagtggcgcgatctcggat

SEQ ID NO: 91713 - DNA, 1026 bp, Homo sapiens
ccagggaaccagcggggaaactgaggctcggggtggagcgcaggattgtgggacgcgccaaggctgctgtctttcccagcagcagcggaagatgtcggacagcgaggacagcaacttttccgaggaggaggacagcgagcgcagcagtgacggcgaggaggccgaggtctgtggctggggcgctgggggagacattgcgtctggggacaggactccgggcagaaaggcccctgtgggaggctcgaggggttcacagcgggctctggcttctgggaactcccagattgtctcaagagatagagaattaggcaagtcgaagtcaagcaaagggacaggttctggaggccagaaatgggtcaggtccagtgagataacaggtgatgttttgaaagtttactctgtgtgcatatagtaagcacttagcattagtttttttttttagttatgtctagtcattccataactatatttgtagtgcctactatgtaccaggcgcaattctttgctcttagggtacaccagtaaacaaaaagattttaaaaatgtctgccttcgggaatgtaaataaatatagccaaggaataaactatatagtaagctggaaggtactctggagaaaagaacagaaaaggggaatggagagtcctggttgctcttgaaatagggtcatcagcatgagtctgaggggtgacatttgagcaaaaacttgttggaggtgagggagtgagtcgtggttagctggaagtgtagtgttccagtgagggggaccagcaggtgcagagatgggagtgtgtccgccgtgttcagggattaacgaggatttgagaggccaagctgggaggatcacttgagcccagaagtttgagagcaatctcggtaacacaacgggaccctgtctctacaaaaatataaaaaccattggctgaggccgggcttggtggctcacacctgtaatctcagcactgtgggaggccaagacagtggatcacctgaggtcaggagttcaagaccagcctggtcaacatg

SEQ ID NO: 91714 - DNA, 1009 bp, Homo sapiens
gtagggatggcaaataatgagctacttttgaggggagctgctggttcacccatcatggctccagtaacctgttcatttattcattcaacaaatgttctggctgggtgtggtggctcacgcctgtgatcccagcactttgggaggctgaggtgggtggatcacgaggtcaggagattgagaccatcctggctaacatggtgaaaccccgtctctactaaaaatacaaaaaattagcgtggtggtgggtgcctgtagtccctgctacttgggaggctgaggcaggagaatggcgtgaacgcaggagacagagcttgcagtgagcagagatcgcaccattgcactccagcctgggagacagagcgagactgcatctcaaaaaacaaaaaacaaaaaacaaatgttccttgacttggcatgttggggtcacagtctcccttacagagatctcagtctcaaggcagaggcagttttatagatacacagttactgcaggggatgttgaggacggtgagagcacatccaagccctgaggtgagcagagagtggtgggggcatcctccactgggagggaggagccaggtttggaaagaggcatctctgggacctgtcagaggggaactgatgacaaggttcctagaaatcagcctgtggtcctgtcatagtttgggttgttaaaatgtgcttcatcgtgggctagtcgagatttgtgttaagcaaatatttctgaagtcttctgtgcttggccttgggctgggtgatgttgggggacccagcagtgcctgagatggactgggccctactattgggaggctcacagtggtcagggctgtgatggagggagcccagagaattgtgagcatagaggatgtgcctgactctgcctgggggagagggggcggggatggctgcctggaggaggaaggttagtttggttttttttttttgtcttggtgtcttgctctgtcacccaggctggagtgcagtggcacgatctcagctcactgcagcc

SEQ ID NO: 91715 - DNA, 1070 bp, Homo sapiens
actgcacctgaccagatttcagatttttggattagggatgttcaacctgtattaggtaaatggattgtagtaatgacatggaagaagtcgtgaagttcatgagttaaagactgaagtttggtatgcatccattaatgttgtttctggtatggaaagagggattagaggccaggagagtagggaggaggctggggtaaggatccaggtgttagagggcagtgtcctggcctaggctcagatatatggggctgggggaaaaggatgggttggagaaatgatgtttacaggcagaaaggatgaggatttggtgcctgtcggtaattggaggaggccatcacaggtctaggggaagacactgaggtcagtttgggacacagtgagtatgaaagggctcagaggccatctaggggaggcatccaggatgctgctggtgcatggaggtcttgagttctggaaaaaagtgggactctatagacagatgaggacacgtgtcatctctagagacaggaactgaggtcatggaaagtaaaatggacagggagagagggcatggagggagaacaaagtggccctggactgagccctggtaattgatgtcagatttgaaggggttaacagtaagaggagcttgaagaggagctggtggagttttgagaaaaaccaggagagcatgatacggcagaagccaagagaggagcatttctccagggagggcatggttggggtgccagatgctgctgggatggtagggaatacagaatggccacagaattagcaacaggggtggccagtgatcttcgtgagcagtgtggactagaaacagagatgggagtcactgtcacagagatgtccaccaccgccaagggagaggacgagatggccttggggagttgtagaatgggaagagatgggccaggtgctgtggctcacacctgtaatcccagcattttcggaggcagaggcggatggatcacctgaggtcaagagttcgagaccagcctggccaacatggtgaagccacgtgtctactaaaaaaatacaaaaattagccaggtgtggtggcgcacacc

SEQ ID NO: 91716 - DNA, 2881 bp, Homo sapiens
cggggttgccaggaagatcagtgaggaacctgtgtcaggtactcagaacagggcagggtgtatagtatgctctcagcattagctgttataaatgtacaagaatcataaaaccaacagaccatgaaccatcttttaaaaaactatttattgatcattttctgatagttgggagggaacttttctttttgcttactttgatcttagttttttaaaagggatttgggagtggagtaaggagaggggatgacttttagagttagttggagctgtatgtccccctcgatcctgatgcgtgcaccagctctgtggcacggccccagacgagtgcctccctgttggagcctcagtgtcctgctctgtgcggtggggatttgtagtgcacatctcccagaggagatgcttcgtgtcctgggagctgttatgaggtcacctttgccacttaccacttggcctttccgttttagatgttgacgatgagtatgaggacgaggaccagtgggaggatggagcagaggacattctagagaaaggtgtgtgtgagccctgcctccacaagactactgggaagagggtggctgagagggtcttcagagcccattcccccgacccccgcatcccctgtacaccccaactcccaccgtcctcaccttgcttctttctgtccttcccagagagaccagctccctgctttttccttttaggcccatgagtggggggtggggccctggggtggggatgttgtggggagaggactctgggatcccagggcccagtgaatcccttctggggttgtagggtgggcgagctctgtcccaagataccccccacttcctgggccagtgcccccctttccccgttattttccgttctgtgcgcctcatacatttcggcttctccccaaccacctggtgcctggcctttacttttggttttcaacctttctgtgtccctcccttcccctcccccaacccattggttgattttgctgctataatttggctcatactttgtctgccctcgcccaccaccaccaccaccaccaccaccaccaccaccaccaccacctcctcttcctccaagtagaagagattgaaggtaagaatatgaaaagtgtgattccctgaccttcctcccatatcctgacatttcctccttcctgaggcacctgccctcaccggtagcctccccaccagccccggtctggccctgagggctctgacccatgtaggatccagagtcagggagttctggggccaggtataccccagttgttgacctgggaaagcacggatgtgtctgtctgggactgagcatttgtgggtggtagcgatgtgtggggtggggtgcagtccagggtgtgcctggactttgagatgggaacagctggaagccccccaacttgctgggccccatccccagtctttttgacaagaagcaggatgctgagtaggacagagtaggggatgaggggttgggatttcctctgtgagatgtcatcttcctgccccagggccaaaccctggccctcttagctgcacgctcctattttctccaggcccctgccctccacctgcccttgctcacgccctctgcccattatttttcagcctccaatatcgataatgttgtcctggatgaagatcgttctggggctcgccgcctgcaaaacctctggaggtgggcaaggaagggaaacgtggtgggattggctcctgtggggagatttgggagtaggtcagcccacctgctgtcctcaaccttcaattcgtgtttgcttccccactcgtgctccagggaccagcgagaagaagaactgggcgagtattacatgaagaaatacgccaagtcatctgtgggagagacgtaagggcatggtgggggcaggtgggggcagggagcaggtggtccctaagcgggaaggggcggggatctgacagagcttcaccccttcctgactgccctcctcccttcagggtgtatggaggatctgatgagctctcagacgacatcacccagcagcagctgctcccaggagtcaagtaagggggttgggatggtgggggccgtgctggggtgcgaatcttgtatggggtgatggtgcctagacaggtggctccctgaaataagtcagggcagagtcacacaggcagtgtggtggatggcaggggtagggagggcaaggtggcactttctctttcctcttgctcctgggtagaagcgtggggaagtcagtgagtgtgagggaacctggatgtgaaaccagaggaagggggtggccctgggggttcgtctgtttgttactgaagatccagcttcactgaaggccttccttttcctctgctgcttagggatcccaatctgtggactgtcaaatgtaaggtatgtgctctgatctcggggcttggaggaggtgggagaatgagggaggctgctttgtgggggagaagtgtctgtctgtcccgggtctccgtggcctgccagtcacttggtccttctgtctccatccctcactccacgttactgactggctatctcccacctccatcttcctggctgtccatccttctttctctctcctctcttggtcctactttatttttcttgctgctgtctccttccccctttcctgtgtcctttcctccatcctgtcatctctctcaaatctgcctctcatcttccagattggggaggaacgggccacggccatttccttgatgcgcaagttcattgcctaccagttcacagacacggtaagtcgggtagacaggcggcttggtggggagacatggcaacacccagagggaagaacattgtcaacttcaggggtaccaggtgcctctgttgtgagcagagctgcctgctgagtgagctgcttgagctg

SEQ ID NO: 91717 - DNA, 1035 bp, Homo sapiens
gggaatagcctggagggggccatgggcaagagcgtggagaccagggaggaggctgctgctgtagcacatcccacccagatggcagtgctggtgggataggaccaagaccctaatacacgttgagtgtctctaacctgaattcttgagaccacaggtgtttttcagatttcagattttttcagcttttggaatatttgcattatacttaccggttgagcatcccaaatctgaaaatccaagagtgagcatttccttcgagcatcatgttggtgctcacagggtttcctatttttgagcattttgggtttttggatttggaatgctgagactgcagtggaggaggggaagaggtcaggtattttgaaggcagagctgatggaatttgccaacgggtcgggtgtgggtgtaagagaaacaaaggagtcaagagtggctcccaggttgtgtgcctgagcagagggaagaatggagtgggaggcggcaggtttgggggaatcagcggtttggctgcggtcgtcctggatttgagggacctttagacatccaggtggagataccaagcaggcagtggctactcagtgccagagttgaggggacagacaagctagcgtgggacttttgggagtggtcagcagcctggtttcttccccaccatcctgcgtcccttctccttcctagcatctcctgacccttcttgtgtctggggtcagggaggagagtggggccctgctgaccttctgctcgccctgctcaggtggactacgtggagcccagccagaacaccatctccctgaagatgatcccacgcatcgactacgatcgcatcaaggcccgcatgagcttggtactcaggggaatctgtggcctgggggggagggagtgtgctcgatcccactggtggccaagccccctccctcacccttcccacccatgcccctttcctccatagaaagactggtttgccaaaaggaagaagtttaagcggcctccacagaggctgtttgatgctgagaagatcaggtgcgtgtccttggg

SEQ ID NO: 91718 - DNA, 1078 bp, Homo sapiens
accactggtttcgactcacctgaacctctctttgcaaagaacaaaccctagtgctcccttaccccccagcaagccagctgaccaagtaccccagcatgcccagcagagcatgctggcccctctcccagattcaccatgggagaaggcgattgcatgagcgcaggaggaacttgacctgctcctccatgaaggaggctccttccccaccccggagactcggaacaggcactaagcggccgccactccacatttggggccgggagctgcaggcttgggagtcccacctgcctgcttttgaatcctgtcaagactgtggcttggcacccttgggcatgtgatgtgaccttcctgagcctgcattccctcacctggaaatgatgagcagttactgatgccacagatttggggaagagcctgtgaggtcatgagtgtgcaggccaggctgagcgctctgcgaatattcactggtatcattgtctgaaactgttattttgttcagctaatgtttactgcatactttctgtgtactgggcactattcttggtgaaatttagtgaatgttacatccctgaccttctggagctgacatgctagttagggggacaggtcaaacactagattgtcagatggtgatcggtgctcaaagataaatcagggaatgggtggaggagtgcagggaggtgggaggcgggcctttggggtttgtgagaagtcactgctgccaagagggtgtgtgctgggatgggatgggtcagtctgcctgtggtcctctccttctgttgccagctgagaagactgaggtacagcaagattttcttcttgactctcccttctaatcttctctcccccatcaaattccaggtccctggggggtgatgttgcctctgatggtgacttcctcatctttgaggggaaccgttacagccggaagggctttctgttcaagagcttcgccatgtctgctgtggtgagggtcccagaggggtgttggtaatgggggtggtgtgagtgttctcctgcaggtgatgccctgggctgtgggttatctggttctgtcccactcctcaagttaggagtg

SEQ ID NO: 91719 - DNA, 1902 bp, Homo sapiens
acgagagcagcgtctactttgttcatagtgaatgattccctgaggttagatctgtaccctggtggctgttgctcgctcaaggatggagtgccacatgtgccctcctgcctttgctccttcctcatggatgtgggagtcatggagcacagtacttaggatcctggactccacatccacatcttggctttgttgctcctgtgctgtctgaccctgggctagtgactcaccctctctgagcctgagtttccctctgtaagatggaaatcatgacagaatccacctcagaggaagttttgaggcttcagtgaaatcttacggggcctgacacagaatgatggatgaacaatgttgctatcagccccttcttccatctctcaggtccctgttgcccaatcgggggtggagtctccttccaaagggtgttttagaatgactgggaacatttttggttgacccagtacctaaagggtggcactctgcctgcctgccccgcagccagggaattgagatgccttgtggagcttgggactgtctcccacaaggaaggattatcccactttagggaacccctgccccgtgtctccccttcccattctcacccccacagcctccctgctctccctctgtaggtgctgaacatgtacgggaaggtggtgactgtcagacatcaggctgtgacccggaagaaggacaaccgctttgctgtggccttggactcagagcagaacaacatccatgtgaaagacatcgttaaggtcattgatggcccccactcagtgagtacaagttcctgcttttgagctgcatctgaaagaatttggttggttgggggtgagggggacatggtcaagagagtgacccttctctccccggctagggccgagaaggggagattcgccatctcttccgaagcttcgccttcctacattgcaagaaactggtggagaacgggggcatgtttgtctgcaagacccgccacctggtgctggctgggggctcaaaggtgaggtgggcatggcaggaccctgtgcgttgggtacctggctcagctctccaagcctcctctggccccagaagtgataagattgggcttgtgagggattaggagagcagtgtcattgtcaggtccttggcaaagagtgagaaggtttatttgggattctgagctgttcaccaagttattttaagttatttattcatttcattttactgagcacctgttaggtgccagacactggagaaccagtggtgaacaagacaaaaatactctgctctcacagagctgatactctagaggtggacagacagataaacccatcgtacagcttgaggtgatagcaagcgctgtgaagaaaacagaatgggctcaggagacagggagtgaccagggctgctgttttagacagaggagggtaaaaaaggcctcagtgggaggcagtattggagcagagacctgaatgaagggatggagagtgagcattttgggggaacagcaagtgcaaaggccctgaggtggggcttgtaggaaagtgtgcaggaccagctgtcacagaggaattcaggcctggggtgtgggtggctgggtggtctcctcagggccctgcacgtgggatgatgagttcctgtggtttgtggttcccccatcccctgcctgccagttcactccttgcttctatcctagccccgtgatgtgaccaacttcaccgtgggtggctttgcgcctatgagtccccggatcagcagccccatgcaccccagtgctggaggtgagaggggttcagggtcaggggatgtggtgggtagaaggggctggaaggaacttggttgttcagcctacactcactgagtgcctgtgctgggctgggcactgctattaggggttcaccacccacaggagggtag

SEQ ID NO: 91720 - DNA, 1119 bp, Homo sapiens
cccaagtagggaggagtcaagcaagtgaaggggacgttctgatggtgcccttgctgtgggcacagccgtgggggaccagtgacattctccccaatccccaggtcagcgtggcggctttggtagcccaggtggcggcagtggtggcatgagcaggggccggggccggagggacaacgaactcatcggccagaccgtgcgcatctcccaggggccctacaaaggtgacctgcgaggcctgtggaggcctggggaggggcatggtgaaggagagcctgcccagcctgacctcctgtccccctgcaggctacatcggtgtggtgaaagatgccacagagtccacggcccgtgtggagctgcactccacctgccagaccatctctgtggaccgtcagcggctcaccacggtgtacgggcggggcctggggagggccagggtggggcttgctaggcagtgagaggggtctgctcaccccatttgttctctgcgtccccaggggctcacggcgcccgggcggcatgacctcgacctatgggaggacgcccatgtatggctcccagacgcccatgtatggctctggctcccgaacacccatgtacggctcacagacacccctccaggatggtgagtgcccgcaggggacagggaagaggggctagggggacctagagaagggacaggacagacacactcatttcccccattccaggtagccgcaccccacactacggctcacagacgcccctgcatgatggcagccgcactcctgcccagagtggggcctgggaccccaacaaccccaacacgccgtcacggtgagtccagggttccccaggttctggtgtgtgctggtgtgtgtgagggatgatgctgggtgtctggggcattggaggggtttgtggggcccacccagcattctctgctcctagcctcaggctggtccctttgaaggaggaggcatagcatggcggggcgggggcaaagcggcctcctctccatccccaacctcagtagtgattgtggttacccttgggcctggagaaagactgcctgggtggagtgaccttgggagggcaccctcatctctgtcaaccacagtgtcagctgtggaagggaaataa

SEQ ID NO: 91721 - DNA, 1112 bp, Homo sapiens
aacccacaatacaacccgcagacgccagggacgccggccatgtgagtccactggggcctgccctcgtctacccctgcccaaaccctcctactgccaccacctcttttcccctccctcctccaacaaatgcccccttctctcctgtctctgcaggtacaacacagaccagttctctccctatgctgccccctccccacaaggttcctaccagcccagccccagcccccagagctaccaccaggtggcgccaagcccagcaggctaccagaatacccactccccagccagctaccaccctacaccgtcgcccatggcctatcaggtaatggtctgcctgcctgccctgaagggtggtgggctagggtgactttgggcatatagggtcggccaggccagatgactattcccaatgacacttcctctttcccctgcaggctagccccagcccgagccccgttggctacagtcctatgacacctggagctccctcccctggtggctacaacccacacacgccaggctcaggcatcgagcagaactccagcgactgggtaaccactgacattcaggtgaaggtgcgggacacctacctggatacacaggtggtgggacagacaggtgtcatccgcagtgtcacggtacgtggggcccagggtggtgggtgagcaggcatcctctccttggtaccccctaaactggagacagacctgtccccagatggtgacagcccagagtgggcagagctgggattgaggaagcctagagggcaaggggagctatgtgaacccaaaggaggcatcttacctgatttagcggggaatcagggagggctgcctggggaaggagaaatctgagccaagacctgacaaatgaataggagtaagctaaggaaagtgactggggtgagtgagttccaaatggagggaactgcatgtgcagaggcctggaggtgaggggaacctgggcacattccaggagctgaagggtttgttgtggctggaacataaagagccaaagggggccaagcagtgcttcacacctgtaatcccagcactctgggaggccgaggtgggcagatcacctgaggtcaggagttcaagaccagcctggtc

SEQ ID NO: 91722 - DNA, 1577 bp, Homo sapiens
tgcagtggcgcgatcttggttcactgcaacctccccctcccaggttcaagcgattctctttcctcagcctcccgagtagctgggactacaagcacacaccaccacacccagctaattttttgtatttttagtagagacagagtttcgccatgttgcccaggctggttttgaactcctgagctcaggcaatctgcccaccttggcctcccaaaattctgggagtacggtcgtgagccaccgcacccggccattttttgtatttagtagatacggggtttcaccattttagccaggctggtcttgaactcctgacctcaggtgatccgcccgcctcggcctcccaaagtgctgggattacaggcgtgagccaccatgcctggccctctgtgggggtcgatgccatcatccaaagccggtctttgagaggccctgccattgtgatcccagtatgtgtgatgctgtgtatgtatgtatgttttgtgtgttttgggtcttcttgatggggggagagttgggcacagatgttgacctgatctgtcactcacttccaggatatttcatgtctgaatcgggacccagctcgagtagtagttgtggactgcaagaaggaagccttccgcctgcagccctataacggcgttgccctgcggccctgggacggcaactctgatgaccgggtcttgttggatctgtctgccttcctcaagagtaaggctgacccctgatcccttggcctctgaccccagagcccctgactctgaagaggaaggataaatgcatgattcatggctgggcgactgaggtgcaagaggtgcctgagcaccttggagtctttaggagcttcttaggatgttcatggaatgtttgggggatacttggggatgttcaggggagccctttcagagcgttcagaagcattccaggtagcactgactgcccccgtgccccagtgcgggacgttcccctcatgggccctgcctccctctggcctttagaagcctggctgaccaccccctgttgtgcccacagccattgcactgaatggtgtggaggacgtgcgaaccgtgctggagcactatgccctggaggatgacccgctggcggctttcaaacagcggcaaagccggctagagcaggttggtgctcagatgcccagagtggaggatcggctctgaggctcctgaaggaggagcctggggcagtccatctccacactcttggtttggctgtgtgaccctgagcagatacctcctctctgcctcagtctctgtaaccagggggatataacacagcctgtcctgtagggctgccagaatgaggggatgcattgattctgcagcctgctctgagaacaggaaacaggagaggatttgagattaggctgggagaggggttgcccttgatggtcttgagtaggtctgggggcaccttgtggaggtggattgtgggttttagatcaggcctggaaagaggctccctgggcacgtggcccaaggctgtggggagagatgtgatagtcttggtgggaccctggtaatttggaagtgggactgagagtatggattgcgtctgggtaa

SEQ ID NO: 91723 - DNA, 1173 bp, Homo sapiens
cagcctgggcgagagagtgagactttgtctaaaaaaaagagtatgaacagagagtttatggaaaagggaatatatatgactcttaaaagatatttaactggctgggtgcggttgctcacgcctataatcccaccactttgggaggccgaagtaggtggatcacctgaggtcaggagttcaaaaccagcctggccagcatagtgaaaccccatctctactaaaaatacaaattagccaggtgtgttggtgcatgcctgtaatcccagctcttgggaggctgaggcaggagaatcccttgagcctgggaggtggaggttgcagtgagccaagatcgcacaattgcactccagcctggacaacaagagtgaaactcccatctcaaaaaaaaaaaaaaatttaacttcgctcatcataaaagcgaattaaaactgatataccatttttcaactatcagattcgcaaaagccagatattattgatgatttagtgtgttggctgggctgtaacgaaacatctatgatcattaattgctggtgggagtgcaaagcaggacacatatagaatgctgcatagcaatattcataaaatctcaaaggagtaactttggcccagaattctcatttctggggcatcagcctacagatattacatgtaaaaaggaatctaggtagctattgatcatgagacacatcattagggctgggcgcggtggctcacacctgtaatcccagcactttgggaggccaaggtgggcagatcacaaggtcaagagatcaagaccatcctggccaacatggtgaaaccccgtctctactaaaaatacaaaaattgaccaggtgttgtggtgggcgcctgcagtcccagctactcaggaggctgaggcaggagaatcacttgaacctgggaggcggaggttgcagtgagccgagattgcgccactgcactccagcctggcgacagagtgagactccctcttaaaaaaaaaaaatcactagtttcgtgaaaacccaaggaaaaaatgatctattacagcatcaaatataagatgcacccacatttcagagatgttcaaatatgaagtgaattttgaattgaagcaatactatatttgtgcacatgccacatgatatacaagatgaactactctagcaattgtacaagatgaactactct

SEQ ID NO: 91724 - DNA, 1073 bp, Homo sapiens
agctgaggcgatgtgatctaccacggtaagagggttcctctggctcccatgtggctactagggtggaagcaggatgccagtgaggaggccactgtgcagtccagctgagatgatagtggcttggccagggtgctaacggggcggtggggagatgtggtcagattttgcatataatttgaagggagaatcaggtatgtagggtaagaaagaagagtcaaggaccacactatggcgtttagtctgcacagaggaaggagggagtgccattaactgtatggacaagactgagagagagtgtgggcgtgtttagcctctgactggacccactggccaaacaggagcttatacaagactggcattgaagggtgagatctgggctgggagtagttggcatatttatggtattaaagcccaggatgggatcactaagggagggtgtatagatggaagtgtgggctgagaatgagagcagggaggcccgtgaggaggttgctgcaataatctaggtgagatgacagtggcctgtaccagggcaggggcagaatgagtagtcattggagtctgggtgcattttgaaggcagaactcactgtgattggttgtgggtagtgatggaaagaacctgacaagggcttcatgagaacagaatagaagcagaagtgagacagtggtgtgacattcctcctttccactgggccctgtggtctctgcttctctttgcattggctgcttcctgttctcaggcagctgggttggtcctgggtggactcttgcccccactctatgtgatcttccagctcagttacccgcagcccctcagtcttcattccgaatttcccagataggaatgggatttccagggtcgggtatccaaccctgctcaactcactggagctggagggttcctatagtgatgactgtctgctcagaagggctgtggactgggcaggccccccaaacattcacagtcaccatgtgtttctgacacttggtgtacagggcggacatgtgggtgggcaggtgtggcaggggttggagatgatttgaccctcttttggctgatgggtgagacag

SEQ ID NO: 91725 - DNA, 1053 bp, Homo sapiens
gacccttacctctaggagactgttgacttcatcagggaaggggcttttgtctacttcctccgttatctccaacacatagaaaagtgcttggcacacagttagggctcagtaactacttatcaaataaactattgaagagcacatatctggatcccagcatggcggggactctgccgatcccctttctacagaactccaaggagctgccttaaagttttctgagggctcaagatattcaacaagtatttcaccttgcctcttctttctcctcagcattgggaacacagaagagaacaaaatattcccctacccctatagaacctacagtaatagggacagtaatttagactatcaaataatcacacgtgtgaaattaccaagaaaggtagagagtgttataagaatacttgataggaaatcaaatccggatcctaggaaatgaggtttgaggtgatgaaggagtaggcattaactcctttaagagataagagtttgggatggttggagcctagaggctgatgcagagcaagaggtcagaccttgtgtatgccataaggagtttgggtgtttaccccacatgtagtgggaagttgtagaattttaagctggggacaggagcgtggtcaggtgtttgtgtgtgtgtgtatgtgtgtgtgtgtgtttccttctaaaattcttcacactaaagtgtactttaaaagactcctctggcttctgtgtggggaattgactataaggcattaaggattaaagtagggagaccagtgacaaggctgttactgtggaattaaaatagctgtgattgaagacagccacacattctttgctgtttttcctatcaagaggtggagtctccttccttctccttatatctgagctggccctgagatttgttttgaccaatagaatacaatgaaagcaggctgggtgcggtggctcatgcctgtaatcccagcactttgggaggctgaggcaggtgaatcacttgaggaaaggagttcgagaccagcctgaccaacatggagaaaccctatctctactaaaaatacaaaa

SEQ ID NO: 91726 - DNA, 1073 bp, Homo sapiens
gggcgtccgcagacttagcacaagagtggctcctcatgccaagcaggcgtccagtagcagctgagtacacttaggaggctttgttggtgccatctggggaacaggcagacaataggtacagactctgtccccacgtgtactgtccagctctttggaatcatcgcgaaacaaagagttttgagattctgagacaaaaagattttcccggggttccaggtaagtggtcctgtttccacggtaatttggaaatgtacgtctcccaaccggccaatcaagagcccagttcaaagggtaccgtctgccaccactggggctcggcgctttgtgggaaatgaagttctacttagcaatcgctttctgcggtgttcgttggggaactacagcaaccagagttcttttctctcaggcttgggggcgggttttcaggcagccaatgagcagtctgaggtcccggggcctggatgttcatggtgtttaggagagggagagaaggctgtgactgggtggctttggcgcaggtgttgaggtctccgaggtgtgcagaaggtgggtgcggcgccgtcccgggagagagtgccggttgtcgctcacagttccagagcgggcagtagacgccgaggcctgaagaggccccagcacgcggacatcactggccgctgtgcctggcccggcttgcgggaagccccgctcagtgggagagacaggcaagaccccgttgcggacctatgtatgttcactaatggaggcggcatggaacgcggtgggaacccgaggagaccttggtaggaagatcatcccggaagactaggagctgtctgagctgagacctgaagacggaaggatgttttgggggtcgggggcggtgtggtggaatggtttgcgcaaaggcagagagaaacagcctgttgtgtgaacatggactgcaggcgatctggtgttggtgatcatactgaaaattctgtatgaatgagatgtggaagattttcttgatcatttagggaccttggattttgtcctgagagcaatgaagagccatgggaggatttttagtagggaaggggtacggcccagtt

SEQ ID NO: 91727 - DNA, 1182 bp, Homo sapiens
ttttgctgtagctgacaactctgggaggagagaaccctatgtgataacttggggatttgactttgaggccctctaggagtggacacagttgtggaatgaccctggtataaagaggggtgcctggagaaaggtctgtggtaggaatattagggtgtgtgtgtgtgtgtaggggggcaaggaagcagtgtaggggagaaaaggatgatcactctaaactgtgggaagagacacctcctccttctcccatcaggaggagtgggccttgattgggatgggatattggagtaatatggggaagaaccctgttgtggtagggggaattgggatatggtacagggagactacctggaaggctggttcctaatatggaggacctgaaatagggaagcggtcttggcatgatatggagagggtcccctaggaaaatcgtgccctggtggatgagaatgctgtagagataggactctgttctatagaggttctcagataactttggtgtggttgggaggtccccaaggacgctgatgtggttttagggctgcagaggactctgctgtggtttgggaggggaagactcatgtggtttgggaatcctagagttctctgggttgagggaatctactgagaaggatagatcttaaagtattggccctggctgtgctacgggctgagatcctgatgttcagggaagactacagaaagtggcatcttgtgttaggggccctggggagggccacgagtagtgagaaaagaatgaagcctactcctctgcatactgtctgtggtttcttttttcttttcctcctctgaattattggtgtcttcctgtcctcctttccctgtgatggctcatatcgacccctgcttggcccccaatcattgtcttttatgtgttctctttgtgctgccttaatcatttacttgatcattatttgtcgagggactgctgtgccatccccccccacctggctaccacttctctgccccttctcttcattgctatctgctgctccgttgtgcccttttcctcttctctctgtgccctgtctttctcatgtccactcttccccgcctggcactattcacatatccccttgttccatgttgttttcccacttcctgtctgctctcaggtctcagcggcggtggcagccgaggtgcaggatgcaagaaggcgccccc

SEQ ID NO: 91728 - DNA, 2213 bp, Homo sapiens
ggatcacctgaggtcaggagttcgagaccagcctgaccaatatggtaaaaccccatctctactaaaaatacaaaaattagctgggtgtggtgacgtgtgcctgtagtcccacctacttgggaggctgagacaggagaattgcttgaacccaggaggcggacgttgcactaagctgagatcgcacaactgcactccatcctgggcaacagagtgagactcaaaaaaaaaaaaaaaaaaaacctcaggctttaatcaggcaagttacctaacccatccaagcctcagtttacctgtctggaacatagacttgtgaagattaaatgagttaatttctgaaaggtgcttagagcagtggttggcccattgttacatcatctctgtgccttggcttcctggttttaagcctctgttgggaacctgggctctcaggcagatgggattgggtacttttgctacttgctgaataactcttggccagtgactttatgtctggacctcagtttattcatgtgaaaaatggacatgatagcaatagtcattagatggtagggttttgatttgggggttggaagagatgctgtgtatagtgtatgggcctaaagtaggcactccatgcatgagaactagcatcactgttcattaatttttaatttattttaggatggtctagtctatgcagtcgagttctcccaccgctctggccgtgacctcattaacttggccaagaagaggaccaacatcattcctgtgatcgaggatgctcgacacccacacaaataccgcatgctcatcggtgaggggtctgggggtggccccggtggggtaggacaggccaccgcaggcttctggaagaagccagtggatctctgattcggatggagttggagtggatgagcagacctcttgagtctgcaggaatagaaaggggtaaggggagctaggtgaggttgtggaggtggcagcttggcttcagagtcttggaagccacccttggagggccaacctcttctccttcagtctcctccccatctcctaggtctcctgtacttcctgcctcttgtatttattacactacccctccataaaaagcctccttttgggggtcctaatcattgtctggtgagagcatatcccagaaaactaagcatggcttgatctggaggggcccactgtgaatattaattactttgtttaaaaaaacattcaaagatataatataaaagttgaaaagccttataaaccaccgccagaagtaactgatgagaacaatttgatgtctgcttttcccaggttttaaataatcagttttcattataccaccttttcattttttgaaaagtcacactggcttaaaaacattatttttcattctgctcctttttctttctgtgttttatttttcccatgcactcataccatcccctttgttctgcaacttgttttcatttcacagtcctgcggacactcttgcctataagtgctcactcactcttacttgtctttttgatgacgtgtctgtctccccaccagacctgggagcgtctcgagggcagggtccgggtctgactcgtctctatgtcccccacgcccggcccagggctggccacagagtaggtggcaaccatggtttacaagaagagtggatgaatgatgtgactgtgggttttggactcatcttgggacactggagggagggggaccagtggaggtggggagtgaaactggaggcagggagaatctcccaggaacctgctggtgatgggcataggccccatgggaggatctggggtgatccctgtgactccaacttttaactgctgctcctttctccttagcaatggtggatgtgatctttgctgatgtggcccagccagaccagacccggattgtggccctgaatgcccacaccttcctgcgtaatggaggacactttgtgatttccattaaggtgcggggtttggaagagtctaagatggggtggcagtgttctagggaggtatcttctctatctgtatctgtcaaatagccacccaaaacagaggggccaagtctgcaaaactatagctttggatttaaagaggcaggagagtgcagcggtcaagtgcaaaattgagtctgaccatctgagtttaatcccagcctgctgtgtgactgagcaagttacttaacctatatgcctcagtttcctcacttatgaaatagaaatattgtct

SEQ ID NO: 91729 - DNA, 1100 bp, Homo sapiens
ttaatattgacatggaatgaattctgtgaatctgctatgcaaccaaggaaaccaggatattaacagtaacctacatctattcatgtactcctcccctatcccaaccccatattaatatctccttcccattcaccaatatcatgagttttacatttctcattcccttgctccttttcttgggcagtatgattgtggctgggtgtggtgcctgacacctgtaatcccagcacttcaggaggccaaggcaggaggatcacttgagccaggagctggagactagcctgggcaacatagtgagacccccatctctacactatgggagtagtggcacacacctgtaatctagctacttcagagaccgaggcaggagaattgcttgagcccaggagttcgaggctgcggtgagctgtgattgtgccattgctctccaacctgggcggcacagcaagaccctgtctcaaaaaaaaagcactaagcaaaaaaaattattatgattttaacatttattagtctgttgtgtataactgaaggtcattttcatgatcttgattgtgaatgtcttctattttatttgcccattctattgatggacatttgggttagtcttcacttttcttttgctgtggacattcttggaaatgtgtcctgctgtacacgggcacatgtatttcaggtttctcacctgagaggtattgctgggtacaaggtggtttaaccttttaagcttcattgccctgactcctgttttgtttcccccacaggattcagtccccgtgggggtggctttggcggccgagggggctttggtgaccgtggtggtcgtggaggccgagggggctttggcgggggccgaggtcgaggcggaggctttagaggtcgtggacgaggaggaggtggaggcggcggcggcggtggaggaggaggaagaggtggtaagattggctaggggttacagaggaggccttcctgaggtggggagtggggagggcggagattcaggatctttctctcctgttgtacctctcctttataggtggaggcttccattctggtggcaaccggggtcgtggtcggggaggaaaaagaggaaaccagtcggg

SEQ ID NO: 91730 - DNA, 1031 bp, Homo sapiens
ttagaatccttctcggtggtgcctgagcacttcctccatctggcctgcccaacccgcactcatctgtgtgagaacttgcttcattgagtttggagaatttccaccatggcccaaagggtctgttttcctagtacaggctttctttttcttttgtgtgtgtgtttgtgtggagagatgggggtcacctggcaggagatttgtggatctgtgcccttctcccaagttccctttctcttccgtgtttggggatctcttgatgaagtggggtgggggattgtaggccaggtatgctgagatcctggcttgcctgcaggcattctggtctgtgattccctcataaatggaggatacccgttcttccaaccttcctccatgtgtggtagaatgtgaagttgtaaaagttgtcaggtgttagctctttagtaaggattttagcctgagtgagaaaagaaccctttgggagatttttgagcaggggcgtggtgcagtctgacatttttaaaagggattctttttgcttcgatgtgtgaaagacctcagggtggcaaaagtggaagcaggcacattggtgggaagcttgttgctgtaatctaggagatggtgtggtggaccaggatgggagcagtggacatgctgacagttttacatgcttttgaagacagaaccaacagattgtatgtgggtgtgtgatcggagtcaaggataaccaagggtttgggggtgtgtaactggaaggatggaattgccatttttgagatggagaaggctgtggaaggagagcagattttaaatcagggggtttatggacccccctccccccaaaaaaagaacttactggaaaagtttgtgtgaacatgtgttttttctgaggactgggtacttttggtacattttcccccaaaagctccaggacctgaaacggattgagatgttttgagtatctgggattgaaagtttacactcatgcccactccgccccaagcacatgccagtacttcctttctgttaggcctgggttgagactttcataa

SEQ ID NO: 91731 - DNA, 1058 bp, Homo sapiens
aaaaagatgaactccaggagagtggagatttttatgtctcgtacaccgctgtattcccagctcctagaacagcacctggtacacacgaggtgcactgtaaatgtttttcggatgtttgaatggaagcccagagtcggtcactgttcttggggctggaaatgtattggggaagcctttttgggtgtacaggggccagagggatttagctaggaatacaaaagagggcacagcccgtgcgaaggctatgagccctgattattggggtgctcgcattggggaagaggaaaccggaagcgagtttagggcgaccgctgcacaggcaaaggctgggaaggcagagagcgagggcagcgggttgcgtgtcgacaggctcgagaatccaggctcactgcgcgtgcgccgagctccgggcggggaaggggcccgggggcgggactacggggtggcgtcacgcagcgcacgtcgccgcgcgcctgcgctcttttccacgtgcgaaagccccggactcgtggagttgtgaacgccgcggactccggagccgcacaaaccagggctcgccatgaagccaggtcaggctggggtgagggtccggggtcagggacggaggccgggcgggaatccgggtgccaggccagaatcggaggggtggggccttggcctgggggcaggggttctgagcacgggttccagtctcctgtgggaagggggattctgattccagcaggtctaggggtttgtgactggcttcagaggtcacggtcgtgagtcgaagaaggccgtgggcctggcattgggggtgttgacgtggggttcgtctcattgaggccgtctaatagggattttggatattgggcaggaggcggcactcaagggtcttgggctagagtttggattcaggcatctggagtcttggatcgctgggcgtgttttgggaatcaggcttgggtcggagatggagagttcctgaccttgggtcctggagctgtgtgtgggaagcccccatttgccttccctgtcgctgccaccaccaccatccccttatcccgcatcccagcttt

SEQ ID NO: 91732 - DNA, 1095 bp, Homo sapiens
cacaccattttctcaattcacccatccatctcttcatccatccatgcaatcatccatccatcctcccagcccccaataaatattcatcacgtgccagattccccaggcacctgatacctgctgtgcaggaggaaagtcagggatgagaaggcatgagacagacacaatgacatgcagcttagcttaagatatttattcaatgctctcacatttggcctctgtgacccagaaaagcggtagagcagggtaggagcacatgatgcatccttcagccactgcaacctccagagggaccaggtcttcttcaggaaatcttcgttcctggtggatgactgatcagccataactgcaagacacagacatttagcacctccgcttgcagactaaacacccaccctgactgccctcatcccatgaggatccaggtgcctttgccccaagaagcctggtttccatactacatccctcaccatggggagaagtcctgcgctctccatttctccatcgctggcttctcctgggagtcatgccaatcattggtctggtccccgtcaaagtttccacaggccccacacagtttcccagcatggtcattgctgacaatcacagccaccttcccattggctccaagccacacctggacccctgccttctggcggactagcagggagccatcaggtgtacgactcacggacacagatgctaacttctcagctgggagatccactcggagaccattcacctggtgggggatgcccagcaaacacagaggtgaggccacagccccagaatagctgggtgttaccaggatggaggatggagaccccaaacaagataagttcatggagctaaatcaaagaggcaggtgctgaaagagatgaagacctggatgtttgcactatttggagcaatggatacatgagaagatagctagagatctggatagacggataaaaggatggagagtggagggatggagagacgtacccatggatctacacaacaccccaaagtcggtgggggaagcattttgtaccagacagataagcaaacagacagacaaacaatcaaaccccagggtcatccttatggttc

SEQ ID NO: 91733 - DNA, 1046 bp, Homo sapiens
ttgcttatctgtctggtacaaaatgcttcccccaccgactttggggtgttgtgtagatccatgggtacgtctctccatccctccactctccatccttttatccgtctatccagatctctagctatcttctcatgtatccattgctccaaatagtgcaaacatccaggtcttcatctctttcagcacctgcctctttgatttagctccatgaacttatcttgtttggggtctccatcctccatcctggtaacacccagctattctggggctgtggcctcacctctgtgtttgctgggcatcccccaccaggtgaatggtctccgagtggatctcccagctgagaagttagcatctgtgtccgtgagtcgtacacctgatggctccctgctagtccgccagaaggcaggggtccaggtgtggcttggagccaatgggaaggtggctgtgattgtcagcaatgaccatgctgggaaactgtgtggggcctgtggaaactttgacggggaccagaccaatgattggcatgactcccaggagaagccagcgatggagaaatggagagcgcaggacttctccccatggtgagggatgtagtatggaaaccaggcttcttggggcaaaggcacctggatcctcatgggatgagggcagtcagggtgggtgtttagtctgcaagcggaggtgctaaatgtctgtgtcttgcagttatggctgatcagtcatccaccaggaacgaagatttcctgaagaagacctggtccctctggaggttgcagtggctgaaggatgcatcatgtgctcctaccctgctctaccgcttttctgggtcacagaggccaaatgtgagagcattgaataaatatcttaagctaagctgcatgtcattgtgtctgtctcatgccttctcatccctgactttcctcctgcacagcaggtatcaggtgcctggggaatctggcacgtgatgaatatttattgggggctgggaggatggatggatgattgcatggatggatgaagagatggatgggtgaattgagaaaatg

SEQ ID NO: 91734 - DNA, 1496 bp, Homo sapiens
ttgatttcgaaccctggccggtagtgcttagtgaggtcggtggcccggcgttgggattgggtcaggcggtgagtgatatatgggatcccgccgtgcggccgagtgatccccgggtctgggctgcggggctgactgatgttcagggctttgctgatgggggtaatggggcgggtagttaagtattatctgtggcttgcctgagtgatatttaggtctaaggtgagttaggagactgtgacataagggatctttgaggggaaactggggaatgttgggactcgttgaaggcgcagtcactttaacagcctatctaggagagccatgtgacattaggaacctcttgaaggggattgggtggcatttgggtctgataaggagttgatgtgacgtttagatcctagttgggggttgtgtgacactggggacatgttatgagtggtatatgataacataagatctgtttgaggggcaagttgacataaagagcttgtttaggtggccaaaaggtttccaggatctatttagagggtcttaagatatcaggggtctgttaggggctaagtgacatcagggtgaagtggggaggggaacaaacattagtgaagttgggaagctttcatgagaggactgtcttcttccaatgtgagttatcccctttcgtctaggatgagatcccagcactgtccgtgtcccggccccagaccggcctgtccttcctgggccctgagcctgaggacctggaggacctgtacagccgctacaaggtacattcgacccccaacccagaccttgcacaggacctgacatctcatactcttccccactttccaccactctctggatcagcaagtctggagccatccccttctgtcccctctctgctcgcagaagctgcagcaagagctggagttcctggaggtgcaggaggaatacatcaaagatgagcaaaagaacctgaaaaaggaatttctccatgcccaggaggaggtgaagcgaatccaaagcatcccgctggtcatcggacaatttctggaggctgtggatcagaatacagccatcgtgggctctaccacaggtgtgctaaggacacctcattcattcatctgtccacttaacaactatttcctaccatgtgctaggcagcagcaaacaaggcagggcagtgcagtgcaatgttcttcagagtattttgactgatcgaaaggtagaaatacatacatatatatatatatacacatatatatatgtatatctatgttttttttgtttgtttgttttttgttttgagacagagttttgctcttgtccaggctggagtgcaatggcatgatctcggctcactgcaacctccacctcccaggttcacacgattctcctgtctcagcctcccaagtagctgggattacaggcatggaccaccaagtctggctaatttttgtattattagtagagacagggtttcaccatgttggccagtctggtcttgaactcctgac

SEQ ID NO: 91735 - DNA, 1050 bp, Homo sapiens
tctcgttttcctctctcccttctcgcaggctccaactattatgtgcgcatcctgagcaccatcgatcgggagctgctcaagcccaacgcctcagtggccctccacaagcacagcaatgcactggtggacgtgctgccccccgaagccgacagcagcatcatgatgctcacctcaggtaaagggggagcctgcagctgggagggccccatggggaccttgaggacctggccaggagccccagctctgctctcccaccagaccagaagccagatgtgatgtacgcggacatcggaggcatggacatccagaagcaggaggtgcgggaggccgtggagctcccgctcacgcatttcgagctctacaagcaggtgaggcggtgcaggtggcagggaagggagaggccccattgggtctggggttggaggtggaacccctgactcccacttctcttccttcctctgggtttcagatcggcatcgatcccccccgaggcgtcctcatgtatggcccacctggctgtgggaagaccatgttggcaaaggcggtggcacatcacacaacaggtgagccctttcgcccctgccccgagctctcatcttctggcctcttcgccttgctccctgctcgctcactggcactgcacagtaattagaaacagactctggggtcatagcccacgtgtgcatgttactggctgtgctgacttcacctccttgggcctctcctagtagttgaagactcatttcacccggtgatagtgagcagttaatgaaataatgcagtgttttcctacaatgggttgtgacctattagtaattatgaatttcaatttgtgggttgcagccagtattttgaaacatgaaatagaacagaaagcgccagagaacatccacatggtatttataccatggtacaagtatatatggtgcaagttcatctgtttcgtgaaacttgtttcatacagatgtgcacactcatgtatacttgtggttcttcaaaaatatatatatatattttaattcttaaatttttttgtagagatagggtctc

SEQ ID NO: 91736 - DNA, 1050 bp, Homo sapiens
gctggaaggagagtcctgggggtatgcttcatacaacacaaagcatctgatccttaagaaacaagtgtaactttaagaaacaaggccagggtcaagcatggggtggctcatgtctataatcccagcactttggaaggctaagccaggaggatcgcttgaggccaggagtttgagaccagcctgagcaatatagcaagaccccatctcctcaaaaattttaaaaagctaggtgtggggacatgcctatagtcctagctactcgggaggctgaagagggaggattgcttgagcccaggagattgaggctgcagtaagctatgatgataccactgtactccaagtccaaagggagggcccagaacaaatctgtcttcaaccccattgccaattgtcagttatatcagaacatgcccgtggtccctgatctttttcaggaaattaaaaagctggtccttatagcaaacaggaactcagagctcttggcgaggcagtatgatgtcttagtgtatgggcagcatgcctgttttcttgctgattttgcaagtgctccagaaatgtagactggtttttttctttcttattttagtatttcatatcctgatttttaaatgttgggccaaaaaaatgacacatctggctggacatggtggctcatgcctgtaatcccagaactttgggaggctaaggcgggcagatcacttgaggtcaagagttcaagaccagcttggccaacatggtgaaacctcgtctctactaaaaatacaaaaattagcttggcatggcagtgcacgcctgtaattccagctactcgggaggctgaagcaggagaatcacttgaaccctgaaggcagaagttgtggtgagccgagattgtgctactgcactccagcctgggcgacagagcaagactctgtctccaaaaaaaaaaaaaaagtgacacatttgtaaggatgattcatgatttaggccactgggtcactgtggggtacaagtagatggctattcctcagggctggatgtggggctcacccttgggcatgagggaatgac

SEQ ID NO: 91737 - DNA, 1744 bp, Homo sapiens
aaagttgggggctggcacctaaggggtggttatcgtgacaggaaggaggtaggagtgcagagatctgagctggcctgccccccaatgtcaggtaatcatggccacaaacagagcagacaccctggatccggccctgctacggccaggacggctggaccgtaaaattgaatttccacttcctgaccgccgccagaagagattgattttctccactatcactagcaagatgaacctctctgaggaggttgacttggaagactgtatcctgctccagaagtcagggaggggccctagttgggaacggggattagatcttcagctcaacttctgccagcaccacagcccagactgtgcaggtgggaccaaggtccagggaggaggggaggtgacagagatggccaaagatgacttccagccccaggcatttaccccatcacacagggaatagtttccttaactcgctgcagatgtggcccggccagataagatttcaggagctgatattaactccatctgtcaggaggtaagtggtggtttctctctggatccaggcagcgggtgtgtgaggacccttcttctctgaaccactctgctgcagtcctgtcccctcatggctgccctgggtcgtgggcgccatctctctcttcctctaccatcactaggggtggatagtacaggggtagtgtttttgtgttttgctttgagacagggactcactctgtcgcccaggctggagtgcagtggggcaatcatgactcactgcagtgatcctcccacctcagcctcccaagtagctgggattacaggcgcccaccaccagtctggctaatttttgtattttttgtagagacagggtttcaccatgttgcccaggctggtctcgaactcttgggctcaagtgatctgtatacctcagcctcccaaagtgtcgggattacaggtgtgagccactgtgccctgccacaggaagtagattttaactctcatccttcaacagagtggaatgttggctgtccgtgaaaaccgctacattgtcctggccaaggacttcgagaaagcatacaagactgtcatcaagaaggacgagcaggagcatgagttttacaagtgacccttcccttccctccaccacaccactcaggggctggggcttctctcgcacccccagcacctctgtcccaaaacctcattcccttttttctttacccaggattggtttcttcaataaatagataagatcgaatccatttaatttcttcttagaagtttaactcctttggagaatgtgggccttgaataggatcctctgggtccctcttaatctgacagatgagcagacgaggtgcatggcctgggttgcagcttgagagaaccaaaatattcaaaccagatgacttccaaaatgtggggaaagggatggaaaatgaacctgagatggagtccttaatcacgggataaagccctgtgcatctccctcatttcctacaggtaaaagacagtaaagaaattcaggtcacaggccttgggagttcataggaaggagatgtccagtgctgtccagtagaactttgcacaatgatggatatgttctgtgttctccagtatggtagctgctcgccacatgtggctaataagtacctgaaatatggctagcatgactgagaaactgaactttttttttttttttttttttttttttttttgagatggagtcttgctctgtcacccaggctggagtgcagtg

SEQ ID NO: 91738 - DNA, 2973 bp, Homo sapiens
aacactttttgaaatttaaatttcagtgtccataagtcaagtgttattataacacagccacacttattatcatctgtggctacttttgtgctgtaataacagagctaagtaattgtgacagagaccatatgcctcccaaggcctaacaccttcactatctggtcttttaaagaagaagtttgttgaatcctgctctaaaccatttatttctaatgtatgttatttctgtttatcttttatttctactatgaggtacaacccccatccctgccccaacacagaaaaatagcattatagcatttgtttactctttgcttttttttttttttttttttgcagatttggaatacaagtatattaccaagaatttgctttcagaaaagaatgtttgcaaaatctatttatctcaattgcagacaggggaaaaaagtaaaaacaccatccatgaggacaccattttcagaaatggtttgcagtgtaaacatgaatttgagagacaagagagacatcagatgggatgcgttagtcaaatgctaatccaaaaacaaatatctcatcctctacatccaaaaattcatgctagagagaaatcatatgaatgtaaggaatgtagaaaggcctttagacaacagtcataccttattcaacatctgagaattcacactggtgagagaccctataaatgtatggaatgtggaaaggccttttgtcgagtgggagaccttagagtacatcacacaatccatgctggggagagaccctatgaatgtaaagaatgtgggaaggcctttagacttcattatcaccttactgaacatcagagaatacattctggtgtgaaaccctacgagtgtaaggaatgtgggaaagcctttagtcgtgttagagaccttagagtacatcagacaattcatgctggagagagaccttatgaatgtaaagaatgtgggaaggcctttagacttcattatcaactaactgaacatcaaagaattcatactggtgagaggccttatgaatgtaaggtttgtggcaagacctttagggtacaacgacatattagtcaacatcagaaaattcatactggtgtcaaaccctataaatgtaatgaatgtgggaaggcctttagtcatggctcataccttgttcaacatcagaaaattcatactggtgaaaaaccctacgaatgtaaagaatgtggtaagtcctttagttttcatgcagaacttgctcgacatcgtagaattcatactggtgagaaaccctatgaatgtagagaatgtggaaaagcctttcgtcttcaaacggaacttactcggcatcatagaactcatactggtgagaaaccctatgaatgtaaggaatgtgggaaggcctttatttgtggttatcaacttactttacatctgagaactcacaccggtgagattccctatgaatgtaaggaatgtggaaaaaccttcagtagtcgctatcatctcactcaacactacagaattcatactggtgagaaaccctacatatgtaacgaatgtggaaaagcctttcgtcttcaaggagaacttacccgacatcacagaattcatacatgtgagaaaccctatgaatgtaaggaatgtgggaaggcttttattcatagcaatcaatttatttcacaccagcgaattcacaccagtgagagcacctacatatgtaaagaatgtgggaagatttttagtcgtcgctataatcttactcaacattttaaaattcatactggtgaaaaaccctacatatgtaatgaatgtgggaaagcctttcgatttcaaacagaacttactcagcatcacagaattcatactggtgaaaaaccctataaatgtacagaatgtgggaaggcctttattcgtagcactcatctcacgcaacatcacagaattcatactggtgagaaaccctacgaatgtacggaatgtgggaagacgtttagtcggcactatcatcttactcaacatcacagaggccatactggtgagaagccctacatatgtaatgaatgtgggaatgcttttatttgcagttatcgacttacattacatcaaagaattcacactggtgagcttccatatgaatgtaaggaatgtggaaagacctttagtcgtcggtatcatcttactcaacattttagacttcatactggtgagaaaccttatagctgtaaagaatgtgggaatgcctttcgtcttcaagcagaacttactcgacatcacatagttcacacgggtgagaaaccctataaatgtaaagaatgtgggaaagccttcagtgttaattcagaacttactcgacatcacagaattcatactggtgaaaaaccctatcaatgtaaagaatgtggaaaagcctttattcgtagtgatcaacttactttacatcagagaaatcatattagtgaggaagtcctatgcataatgtaaagagaatacgatggcctttagaaaatgccctttagcagagaatttgtaatttaagaaattttctgtttgttacggaacatgtgggaatcccttttacttcatgctcacaatttatcagaaattatttcgtatgttaaagagtcgaaagactatagcatcactcagtccctgttagactttagaagattgatactgatgcactgcatcccaaaccatcaagggccttttcccctacaaactgttgttgaacagtgcttctctaaaatgcaataataatgggccaggtgaagtggctcacacctgtaatcccagcactgtggaaagacaggagttcgaaaccagcctgggcaacatagtgagaccctgcctcatggctttagtgagccatgattgtgccactgcactccagcttggtgacagagtgagatcctgtctctaaataaataaataaaatgcgggccaggcacagtggctcacacctgtaatcccagcactatgggaggcccaggtgagcaga

SEQ ID NO: 91739 - DNA, 1430 bp, Homo sapiens
attcatacttgggtgaaaacctttgaatgtaaggaatgtgggaaggcctttcaatatcattaccaatttcatggacattatagatttcatattcgtgagaacccttatgaatgtcaaggatgtgggaaatgctttaccagtggtagaaaccttagagtacatcagagaattcatactggtgagaaaccatatcaatgtgaagaatgtgggaaagcctttagtcatagttcaaacctgttaaacatgttaaaattcatactgatgagaaaccctatgaatgtaaggaatgtgaaaaggcctttagcagtaattatgatcttactgtacatctgagaatccgtactgctgagaaaccctgtgagtgtaaagaatgtggaaaacttttggatttagcttagtctttactgcacatcaaagaattcatactggtatgaaccgtatgaatgtaaagaatgtggaaagacctttacttgtagctcgagccttgttcaacatgttaaaattcatactggtgagcaaccctgtgaatgtaaaggatgtgggaagacctttagacttagttcagtcctttctgcacatcacagaattcatactggcatgaaaccctatgaatgtaaagaatgtgagcaaacccttactgtgaatgatctgcttacgcaacatcagaaaattcattatagttagaagttttatgaatataaggagtgtagacaagccttcactgtgtatgaaaaatttactcaacaccagagaattcatattgatgagaaatcctgtgaacataaaagaatgtgtgaagaactttcatcgtggcctgggatttgctcaacatcagagtattcatactgctgagaactcctttgagtgtaaagaatgtgggatattttatagccacactaaatgccttagagttcagagaagataattttggtgagaaagttactgatgtgaggaatgtagagtagctgccatgttcacagtttactgcccgtgaaatattttactggatacaggcgtaccttgcttaattgtgcattgcagttactgcattttatacacactgaaggtttgcagcaaccttgcagtgaataagtctatcagcaccattttccaaacagcatatgcacatttcatgtctttgtgtcacactttgctagttttcataatatttcaaactttttcattgttaaatctgttatggtgatctgtgaccagtgttttttgattactagtgtaattgttactagtgtaattgtttggggataccacaaatcctgcccataaaagatggtgaacctagttgataattgttgtgggttttgaaagaatagtaaaatatatacacatatcccccccacctagattcaaaattgttaacaatttgccacatttattttttgtatatttgttgtaccattgagaataagttt

SEQ ID NO: 91740 - DNA, 2330 bp, Homo sapiens
cacttgaacccaggaggtagagggtgcagtgagctgagattgtgccattgcactgcagcctgggcgacaagagtgaaacttcgtcttaaaaaaaaaaaaaaagctttcttcactaaaaattctgattctgtacatctgagttgcttgaatatcaatatatttaatcttaccaaatggttttgattcacacctaaatttgacaaagttaacctgttcccttatgcacaccaccatcttacataaattcattattggcacccttttcctttttcagatcccttccctgaaagtattatattttatacttaggccatttgtttaatggattttgtatgcatgtatgttataggaaaataaaataggtttgccttcttcatttctttcagatttggagtcaaaatatggacctgagaaaatatctccagaaaatgatatttttgaaataaatttacccaaacatgttataaagcaaataagtaaaacacttggcctcgaggccttttattttagaaatgactcagaatatagaagtagatttgagggacgacagggacatcaagaaggatatatcaaccagaagatcatcagctatgaagaaatgcctgcttatactcatgcttctcctattcataatacacataaaccatatgaatgtaaggaatgtgggaaatactttagttgtggttcaaatcttattcagcatcagagtattcatactggagagaaaccctataaatgcaaagaatgtgggaaagcctttcaacttcacatacaacttactcgacatcagaaatttcatactggtgagaaaacttttgaatgtaaggaatgtggaaaagcctttaatcttcccacccagcttaatcgccataagaacattcacacagttaagaaactgtttgaatgtaaggaatgtgggaagtcttttaatcgtagctcaaaccttactcagcatcaaagtattcatgctggtgtaaaaccatatcaatgtaaggagtgtgggaaagcctttaatcgtggttcaaatcttattcagcatcaaaaaattcattccaatgagaaaccctttgtatgtagggaatgtgagatggcctttcgatatcattaccaactcattgaacattgccgaattcatactggcgagaaaccctttgaatgtaaagaatgcagaaaggcctttactcttctgacaaagcttgttcgacatcagaagattcatatgggtgagaagccctttgaatgcagggaatgcgggaaggcctttagtctcctcaatcagcttaatcgccataagaatattcacacaggtgaaaaaccatttgaatgtaaagaatgtgggaagtcctttaatcgtagttcaaaccttattcaacaccagagtattcatgctgatgtaaaaccatatgaatgtaaggagtgtgggaaaggctttaatcgtggtgcaaatcttattcagcatcaaaaaattcattccaatgagaaaccctttgtatgtagggaatgtgagatggcctttcgatatcattaccaacttattcaacattgccaaattcatactggtgggaaaccctttgaatgtaaagaatgtggaaaggcctttagtcttctgacacagcttgctcgacataagaacattcatactggtgagaaaccatttgaatgtaaagactgtgggaaggccttcaatcgtggctcgaaccttgttcaacatcagagtattcacactggtgagaagccctatgaatgtaaggagtgtgggaaggcttttagacttcacctacaactttctcaacatgagaaaactcatacaggtgagaaaccctttgaatgtaaggaatgtgggaaattctttcgtcgtggttcaaatcttaatcaacatcgaagtattcataccggaaagaaaccctttgaatgtaaggaatgtgggaaagcctttcgacttcatatgcaccttattcgacatcagaaatttcatactggtgagaagccctttgaatgtaaggaatgtggcaaggccttcagtcttcacacccagcttaatcaccataagaacattcacacaggtgagaagccatttaaatgtaaagaatgtgggaagtcctttaatcgtgtctcaaaccttgttcaacatcagagtattcatgctggtgtaaaaccatatgaatgtaaggagtgtgggaaaggctttagtcgtgtttcaaaccttattcagcatcagaaaactcattccagtgcgaaaccctttgtatgtaaggagtgtaggaagacctttagatatcattaccagcttactgaacattaccgaattcatactggtgagaaaccctttg

SEQ ID NO: 91741 - DNA, 1048 bp, Homo sapiens
ggatgagagcgttattgttgcacacttaagtcaagggtgagtttgtgctttgtatttgttcaagaaatgcgtttttgattttagaatatagaggttcctgtaaatttttagtgaatttcaggagaatatgcaaattgattcttgccccctcccattgtgccgcctcccagcgagccgttccccaccccgcccgctccccaccttgccatttaatattcacagagccatttggcaaatcgttcacaccttcctgtacgctctcttcttctaagctggtataaaaatagtcctccagaggtttatattaaagctttattttagactctgctttgaaaagaagattagtttgtggaatcacacgccaggtttctgactctttacaggcctccttttccaagtagggaagaatggagatggttgggtgatttccattcgtctgtgaggctttcaggaatcggaaagtgattgcacagaaattggtatcaaccagagtcaggatttttcgggagagtccatgagatgataattgtaatacttgccagatctctgtgagattcggcagttccggttgcattttgggctatttgtgtgaactgtgagaggcagtacgctgttgcggttaagaataggggagtggatccagagtatctgggttggaatgtttgttctgtccgtttctggtcttctcaggcttgtaatgaacattagaatgaattaatactctaaaacctcttagagcagtgctaggcatataataataaatgtttaatgttttagcttttgttttcgtgtggtcattttaggtcatttcccttgactttctataggacaggagcattgggaatatgtgattcattgtgattgctgcttgcatagtaagaaaatgagtgagttgctcaaatgatctaggacagaagttctttttaaattgacagataaaattgtatgtatttatcgtgtgcaacatgatgttttatagtatatgtacattgtggaatgactaaatctagctaattagcaatgcattacctcacatagttatcatttt

SEQ ID NO: 91742 - DNA, 3067 bp, Homo sapiens
aaaatgatacctctgaagtaaatttacccaaacaggttataaagcaaataagtacaactcttggcattgaggccttttattttagaaatgactcagaatatagacaatttgagggactacagggatatcaagaaggaaatatcaatcaaaagatgatcagctatgaaaaactgcctactcatactcctcatgcttctcttatttgcaatacacataaaccgtatgaatgtaaggaatgtgggaaatactttagtcgtagtgcaaatcttattcagcatcagagtattcatactggagagaaaccctttgaatgtaaggagtgtgggaaagcctttcgacttcacatacaatttactcgacatcagaaatttcatactggtgagaaaccttttgaatgtaacgaatgtggaaaggcctttagtcttcttaccctgcttaatcgccataagaacattcacacaggtgagaaactgtttgaatgtaaggaatgtgggaagtcctttaatcgtagctcaaaccttgttcaacatcagagtattcattctggtgtaaaaccatatgaatgtaaggagtgtgggaaaggctttaatcgtggtgcacaccttattcagcatcagaaaattcattccaatgagaaaccctttgtatgtaaggaatgtgggatggcctttcgatatcattaccaacttattgaacattgccaaattcatactggtgagaaaccctttgaatgtaaagaatgtggaaaggcgtttactcttctgacaaagcttgttcgacatcagaagattcatactggtgagaaaccctttgaatgcagggaatgtgggaaggcctttagtcttctcaaccagcttaatcgccataagaacattcacacaggtgaaaaaccgtttgaatgtaaggaatgtgggaagtcctttaatcgtagctcaaaccttgttcaacatcagagtattcatgctggtataaaaccatatgaatgtaaggagtgtgggaaaggctttaatcgtggtgcacaccttattcagcatcagaaaattcattccaatgagaaaccttttgtatgtagggaatgtgagatggcctttagatatcattgccaacttattgaacattctcgaattcatactggtgacaagccatttgaatgtcaagactgtgggaaggccttcaatcgtggctcaagccttgttcaacatcagagtattcacactggtgagaagccctatgaatgtaaggagtgtgggaaggcttttagactttacctacaactttcccaacatcagaaaactcacacaggtgaaaaaccatttgaatgtaaggaatgtgggaaattctttcgtcgtggttcaaatcttaatcaacatcgaagtattcatactggaaagaaaccctttgaatgtaaggaatgtgggaaagcctttcgacttcatatgcaccttattcgacatcagaaattgcatactggtgagaaaccctttgaatgtaaggagtgtgggaaagcctttcgacttcatatgcaacttattcgacatcagaaattgcatactggtgagaaaccctttgaatgtaaggaatgtggaaaggtttttagtcttcccacccagcttaatcgccataagaacattcacacaggtgagaaggcatcttgaatgtaaggaatgtggaaagtcctttaatcgtgtctcaaaccatgttcaacatcagagtattcgtgctggtgtaaaaccatgtgaatgtaaggggtgtgggaaaggcttcatttgtggttcaaacgttattcagcatcagaaaattcattccagtgagaaactctttgtatgcaaggagtggaggacgacctttagatatcattaccacttatttaacattaccaaattcacactggtaaaaaaccctttgaatgtaaagaatgtggaaaggccttcagttttctgacacagcttgctggacttcaggtcattcatactggcgagaagccatttgaatttgagaaatgtgggaaggccttcaatagtggctcaaaccttgttcaacatcagagtattcatactggtgagaaactctatgaatgtaaggagtgtgggaaaactttcagatttagtttggtcctgactgcacatcaaagaattcatactggtatgaaaccctgtgaatgtacagaatgtgggaagacctttagttgtagctcaaacattgttcaacatgttaaaattcatactggtgagaaacgctataatgtaaggaatatgggaaagcatttgctgtggatgatcagctgtctcaacatcagaaaattcagaatagttagaaattttgtgacaataaggagtgtggacaagccttcactgtgtacgaaaaatttactcaacaccagagagctcatattgatgagaaatcttgtgaacataaaagaatgtgtgaagaactttcatcatggcctgggatttgctcaacttctgagtattcatacttctgagaaatctttgagtgtaaggaatgtggggcgttttatagccacactaaataccttagagttcggagaagataattcttgtgagaaagtctttgaatgaggaatatagggtagttgtcatgttcacaatgtactccctatgaaataatttaccagatacaggcatacctcgctgaattgtgcattgcagttattgtgttttatacaaactgaaggtttgtggcaaccctgtggtgagcaagacgatcaggtccattttcccaacgtcaggtgtgcatttcatgtctttatgtcacattttggtaattctcagaatatttcaaactatttcattgttatatatctatcatggtgatcaatgaccagtgatttttgatgttgctattgtaattgctttgggataccacaaattctgcccataaaagatggtaaacctagttgatacttgttgtgggttttgaaagaatagtcaaatatacaatcatataccccaacctagattcaaaattgttaacaatttgcacgtttattttttgtatatttgttgtaccattgagaataagttttagacatcatgacactttaccc

SEQ ID NO: 91743 - DNA, 1063 bp, Homo sapiens
caaaataaatgacaataataaacaataattcttgactttgtgctactgtacatcaggcaatgttagaagtattttgcatatatataacttattttgtcttagtatcaatcctataaaataggtattgtatcatccccattttagagttgggaaaactgaaggacagagtttaagtgacttacctgaggtcatactgctagtgagtagcagagataggatttgaacctggcagtctggattgaagtttcctgctctcaaccattcagttatacctcttttcaagggataagattctgagtttaaatgaaaggaagtccttttctaacatagttagaaaagagttctcttactcaacctctcactcttatctgaagtctcttttcaatattgttttgacttgtaatttattgtaagtttaagcaggtcacaaagatttgaaaaaaaaaaatctgtattaaaaaaattctacatgtgtcgtttcttttaagcaggaagttccatttctaaaccagatgtaattacgttactagagcaagagaaagagccctggatggttgtaaggaaagaaacaagcagacggtatccaggtaagtgagggtaaagcaggcggggggaagccatcattgtcctggacatgtgctcagaaaggagtcatacacttgagatgtggtttgaaaagctttcttcagtgacccaagtcctgttggataaaaatgcccaagacctgggaaggaaataaagattacagcagaagccatcaccaaggaacttcatcatttactaatcacctaatttctgttctcttatttccttccccttttagtggagtaagttccctctttttttcccagggtaaactttttttttttttttaaggtggaatcttgctctgtcctgcagtgtggagtgcagtaatctgatcttggctcactgcaacctctgtctgttgggttcaagcaattctcatgcctcagcttctcaagtagctgggatgacgggtgcccacctccacacctggctaatttttgtatttttagtagagatggggtttcaccatgttggc

SEQ ID NO: 91744 - DNA, 1042 bp, Homo sapiens
ttttcagtgaaactagggggatatgcaaattgattcgtgccccctccttcacctttccacttaatagtcacaaaacaatttggcaaatcgttcacaccttcctgtgcgctctctttttcgaagctggtatagaaatacacctccagtagttaatattaaagctccattttagacccatatttgggaaggaggagattagtgtttaggtggaatcacacactagacatcagttggtctttacagacctccttttcaaaacagggaagaatggagatggttggatgatctccattgcctgtgaggcattcggtagtggaaaagtgaccgcacagaaattggtatcaacaagagccaggatttttccagggagtccatgagatgatatttgtaatacttgccagatctctctgaggtttggcagctccagttgtgttttaggcgtgtgtgtgtgagtgtgtgtgtgtgtgtgtgtgtgtgtactgtgagaggcagtacactgttgtggttaagaataggggagtggatccagagtatctgggttggaatattggttctgtcattagaatgaattaatatcgtaaagccccttagagcagtgctaggcatataataatgtttaatatgttttaactgttgttttttgtgtagtcattttaagtcattccccttgactctctacagaacaggagcattgggaatatgtgattcattgcgactgctggttgtatattaagaaaatgagtgaggggctcaaatgatctaggacagaaattctttctttttaaatcgacagatataattgtatgtatttatcatgtgcaacatgaagttttatggtatgtatacattgtggaatgactaaatctagctaattaacaatgcattacctcacatagttatcatttttgtggtgagaacacttaatatccaccctcctagcatttttcaagactacagaatattgttattaattggagataccctgttgtgtaatagatctcctgaacttatttctcttatcttcctgaaattttgtatcctt

SEQ ID NO: 91745 - DNA, 1030 bp, Homo sapiens
acatggggatccttgctcatggcaacaacctgtgcaccccgcgggctggaactcccacgaatccactaggctcggctcccttaggggtcagcccccatagtatgctgggatcaacctgaacggatcacagctcaaggcttctgaggctttttctgttcgggactgtatttcccagcggccaccgcgccagtccacttccggtctccggggtcgacgacatagcggggtaaggtcttcacgtctgaggaagagatctgtggctgcgggagatctctgcggattggggctccagcctgactgacccgacagtgcgggtggcctagggggaggcgctcagagtaggaacccgggggtgcagacgggatctgccggatccccaggcgtgtgtgtgcgcgggtatcagaggagggggattgtgagatcatgagtgacggaggggactgtgagtgtgtgcgtgaggttctatgcacaggcccgggagggcgtgtggacgcagcgcactttgctgagtgacactgtgccggtgcccctaggctcctgctgcttcctccctctttccgcttcacagctgcggggactgcagcagaggaatggccccagtagggaggtcagatattgagccgagaatgaagctttacacaagaaagcgcagaagtgcccccgagtgttccccaggggggcagctacatgttgagaaccacagcgtcctcagagctctgtccccagaaaccagctccaaactggttgtactggttgaatcgattcctcttccttttacttccttcctatttcgtgtgaagtgagggaaattgtggctatggagggagggtgttttcaaacttagtctgcgctccaagaaatgcctggagtctcacgcttgccgtatccttctccagtcgtatttttatccaaaagaaggacctggaggaggatgagagcgttactgctgcacacctaaagtcaagggtgagtttgtgctttgtatttgttcaagacatgcgtttttgattttagaatattgagatttccc

SEQ ID NO: 91746 - DNA, 1011 bp, Homo sapiens
tcgcttgaacctgggatagagaggttgcagtgagccaagatcacaccattgccctccagcctgggcaacagagtgagactctgacttaaaaataaaataaaatgaaatgaaatgaaataatgaaatgaaatgaaatgaaatgaaatgaaatgaaatgaaataaactggcctgcttggagatttggctatcatctccctctctctctctctctctctctctctctctctctctctctctctctcgaattattggaagatcagataaataacctagtttcagcttggtggcatggaacttcagcaggagtaactccatttttgtttggtctgttgagcctcatgcaggggctcagcccaaaccaatggctaaaccattggctaaactgtaaagtttatttaacaaaggggagctttccatggtcctgaaacaaactaccctgagctcctcattgcagcaacctatgcaactacaactatcattggttctgtaattgtttctttgatgtctggattcccccacagactttaaggaagtagatacctttctgtttactactgaataggagtgacacagggaaggtacttcttcacagtatgagatgagtggatgaatgactagagtataaaacgctgtcagcaactgggtaggctctacaacttcctcagcaggaggaccagaggctggaaacatgggtgtcactttttaagagcaaaagggggctgatggttggaaaaccagatactagaagaatgctggttttcataagccacacctgtggattgtcaaaaagaaaaagcacacatttcaaaagcagaagagaaagaaaaaaataaggcaaaagtgctcacaagtatcagaatagattttgtggctctggtctctggggatatttgcgagcactgtttagtgccatgaatgtatcagacttgccacttgtaccggtgagggaaaaaatatcttggagccactggccccatgccatgattcccaagcaaaaaacatcaatacag

SEQ ID NO: 91747 - DNA, 1041 bp, Homo sapiens
ccggtggagctgcgcggggtgagcggcgcggggaacggggactgcctgccgccctcgccctcgtcccccaccggcggaccccggcgggcattcgagagccgcgcggccaggccctcttagccctctgccgtttggggggcacgggtgaacctgccgccccactcccaccccgccccgccccgcccgtacagccaaatcggaagggacgagcctgccctttgaaagggttttttttcttgctcctgcggagggcgccccagccatggccctcaggagctccctagaccccgcagggactgccctccatcccggccgccggggcccgccctctgcatcccgcgggcagcctgtgtgaagcggcctcccgcagcccccggcccctcccccatggaggaggaggagggggcggtggccaaggagtggggcacgacccccgcggggcccgtctggaccgcggtgttcgactacgaggcggcgggcgacgaggagctgaccctgcggaggggcgatcgcgtccaggtgctttcccaagactgtgcggtgtccggcgacgagggctggtggaccgggcagctccccagcggccgcgtgggcgtcttccccagcaactacgtggcccccggcgcccccgctgcacccgcgggcctccagctgccccaggagatccccttccacgagctgcagctagaggagatcatcggtgtggggggctttggcaaggtctatcgggccctgtggcgtggcgaggaggtggcagtcaaggccgcccggctggaccctgagaaggacccggcagtgacagcggagcaggtgtgccaggaagcccggctctttggagccctgcagcaccccaacataattgcccttaggggcgcctgcctcaaccccccacacctctgcctagtgatggagtatgcccggggtggtgcactgagcagggtgctggcaggtcgccgggtgccacctcacgtgctggtcaactgggctgtgcaggtggcccggggcatgaactacctacacaatgatgcccctgtgcccatc

SEQ ID NO: 91748 - DNA, 1023 bp, Homo sapiens
cttggaagggacagatgtccacagtcggggctatatggcagagacacggtcatcggagtttcctggtgggttgaagggtgaaaggctagctcccaagttccaacacctcattcaccccagcactgtccccacccacagcccccctgccctctgtctgggcacctgctttgtaccaggcccaggaggtcagtcctgcaggggacacagagacaaatacccataccatggcagcaaacactggcaccagataggtccagagcattgcaggtacagagatgaaggcagctgacccccagggaactaactacccagagctggagaccagaagcgcaggcagcccgccagaatgaatggtgaagggttaggctgtgaagaggaggggaggctggaggagttggcagggaaccgctcatggccttcagtgccaggcggaggagctggaaccttgtcctgacagcagtagggggctatggggagatatatagcagggagggtcatgactggagttcaaaagagcccttggactcccaggcggagggtgggcctgagctgggggcactggaggctgggagcccagtggggacagatcctccacccagtaaccaagtggcttctctggacccagtgactcccgtggactgtggtggcagcagcagtggcagcagcagtggaggaagtgggacatggagccgcggtgggcccccaaagaaggaagaactggtcgggggcaagaagaagggacgaacgtgggggcccagctccaccctgcagaaggagcgggtgggaggagaggagaggtgaggtgtggtgtggtcatgcccaccctgtgcccaagccccagctcccaggctccaggccacaggactgaggtctccatctctccctggaccccgcaggctgaaggggctgggggaaggaagcaaacagtggtcatcaagtgcccccaacctgggcaagtcccccaaacacacacccatcgcccctggctttgccagcctcaatgagatgggtaagagcctgggt

SEQ ID NO: 91749 - DNA, 1048 bp, Homo sapiens
agatttccccaagtctgctctcaggcccttttgctgttggtcctctttggacctggtgaggccaccaggagccattgactgcagcacgttctggagctcagtcggggggctcagggcaggaggcagcccggtccctgagcctggctgggttcactgctttacagctgtttgggttcttactctgaactcagcccagggctgggctatgctggggacacagcactgattgagccagccctgggccctgccctggaaagctcccagcccaggtagggtgggcggcctggagtggtcagggctagggcgtgggaggccagggactggggaatcccagaggaaatatccgacctggcctgcagttagggagggctttctagaggaggaagcaaacgtgtcagctggccggaggaatgacgtgtgggatgccagcaatgggagaagcatggcatagctaaggaccggcagcagccagggagatggtggtgagaagagagggcatggggctggagtgcaagggtctgggggccactgggaggggtggggactgcttgcatggcgggagccagccatggaagggtttcatacagagagggacagggttaaagcaggcctttagaaagcccccctggctgcccgtggagaatggatgggagggtgcgagaggcaggccaggacagggctctgggctggactctggcatggtggtgtgtggggcagagagaaggtgggaggctcagaaggccctgccagctgtggggcgcatgggcaagggcacaggaaactcccagaggaggccgcccggggctcaggtttggggagtgggtccgtggctgagggcctccattgcggagggatgggcctttcctgtcctgtcctgtgggcagcccccgccagctggggccgtttccccagggagtctgggcaggtgtcccaggccctctcctgactggtcctccccatccacctctgccgcccacagatgacagcctgggcttactggagctggaccagcggacccacttcccccagttctcctactcggccagca

SEQ ID NO: 91750 - DNA, 1005 bp, Homo sapiens
aagtgcctgggcacttcttgtgtccctggcctctgtcggtgggcagatgagcctctctgtgcttcggtcttgtcattttagcatgaagtgaatggcagtacctactacacagggttgctgggagggcgacaggagtcctccaccataacgcacagtggtaccagcctctgcaagtggaaggtgttcttgggactgctgttgagtggcaggggtgggggcccctctctgaaaagcgggtgcagatcatggcttacgaggagagttcttcctttgcttttcccgtgggctccctggctgggtgtcccatgagccttccctagagagggtccctgctttaccctcctgagtctcgtgtagctttcagcgcttcactgaggctcagggacaggcgggtggtgctaaggaggagtaggctgtgcacaggtgagtgccagctctgccacatccctgctgtgtgaccttcacaggtgactccacctccatgtgcctcagtccccacagcagaaatgctggctcttgagaattgcagtgctcttgagaatcaagcgaggtggtgtctggagctagccactcagtgctgttatttttacagtcgtggtttacccaggggctctcctctgggggctagaagatacttgaggcccagcttcatggggagctcccctttgccccagacgccatgttgcaaacccttgagaaggatcctggacagaggcccttgcttttcatctggaattctgagtgctgcaaccttgcaactttggtccagttagaattggatcggaagctagtcaggcagcaggcgagccccagttactcccagataacctcctgcattgctgtggtttctggagctttctgtagggtgggcagtgggagccagggtaggtggggtaggcccgcccctgcgagtgtcttcggcaccctcccttccaccccgccctgcgcgcggtgctctgcgccgacagcccgccaacctcttagccccaggcccaggccctggtg

SEQ ID NO: 91751 - DNA, 1023 bp, Homo sapiens
ggcgtgtgccaccatgcccggcttagtttttgtatttttagtagaaaaggggcttctccatattagccaggctggtctcaaactcctgacctcaggtgatccgcctgcctcggcctcccaaaatgctgggattacaggtgcaagccaccacacctgaccccctttttttttttttttgagacagagtcttgctctgttgcccaggctggagtgtagtggtgccatctcagtttactgcaacctccgcctcccgggttcaagtgattctcctgcctcagcctcccaagtagctgggattacaggcacgtgccaccacatctggctaatttttgtatttttagtagagacaggatttcgccatgttggccacactggtctcgaacttttggccttaggtgatctccctcggcctccaaagtgctgagattacaggtgtgagccaccctgcccggcaggacctacattcttaatgagcatctctattgattttgaggcaggtggtccagagagtcattttaaaaagatcaatttagtaatcagaagagatgataaagactcatctatttcaaaattgaaacagtataaggaggtgtctagtgggagcttcccctaccctgccctttccatccacctccctgccccccagttaatcactgttcttaggtgccctcaaagagcagagggagacctttgtgcctggctgcctttttttttttttttttaaatacaaaaggtagcattgtacatgcttctggacttgctttttcccttagtgtaccttggggaatttgccttgatatatggagagatgcagctgctttgtttcatgttttgcttttttttttggacagttggacatgcgtgtcccaagtgtgtttatttagccgttctttattgtgatgactggggttgtttccagcctttggctcattataaggaatgctgcagtgaaatagccgtgtctgtctcgtttgatgtgtgcacaggtagacctgtgtgacgagtgcttagatgcaggattgc

SEQ ID NO: 91752 - DNA, 1049 bp, Homo sapiens
cacagaagtgttttggcattggagctacctgcacagctgtattggtgaatcccagcccatgggatttggccttacagggccacagggcatgtgtgtttggaagcctgggcctcccctgggactaggccaggagctggcacagacagcttgctccttgccacacgctgaggcaactggtgccccagggcactgctgctggcaccttcctgccaggcatgacctgtggatcacccgggctcagcccagtgccccagcctgcgtcagcaggggccacctggagggctcctctgggagaggcattctcgtgtgtcccccgcacctccccgccccgtggtaccccttgtgagtcaccgtcacactgggcctcctgccgcctacctgggacatcactcaaccttgtcctaacctctctccctcccttcctgcctcatttcaggtgaatacatcaagacctggaggccacggtacttcctgctgaagagcgacggctccttcattgggtacaaggagaggcccgaggcccctgatcagactctaccccccttaaacaacttctccgtagcaggtgtgtcttgggatgagtgggtcagtgttctggtgctcacaggatggctggcacgtcttaggggcttgtgggacttggtcattgagccatgggcctgtcctgggcctgcttgcccttggatctgttttcacccttcccctgctctccctccttgttagctggccaggcggggctgtcctgcggggagatgcagagtgggagggagggagaagccagggcatttgcccacacccagccccatgcatcgcctccttgtggttccagcttctgtcagccaggccttggagtccccaactggtggcaggtgcctcccatcctgtgctttggtaacagcctccatcctctgtccctcggacgtagaggggtcacagcttcccactcagctggtcacagggctggcctcgcgtcctctgtccctctgtaatacccaaagggatgtcttccagccagaccctggcagtgaagtttcacaagccccaagctc

SEQ ID NO: 91753 - DNA, 1007 bp, Homo sapiens
tcccagtgcccatctttctgagtagcagctggcagaggtgggcaaggtgaggtgggccctgctgactactgctgttttgggacctgtaccaccccaccgacccccttggtggttaaaataatggcagtgctggtttactgagcacttactgtgtgccagacacctgtctctgctctaggcaagcctgattttgttgaatttttatagatgccctgtggagcacatgccaccttacagactggaaagctaaggttcagtaggaagagtgacttgcttgaggtttcagcaaggagtgggtagagctgaggttggactcaggccctctgactcctgaactagtgctctcaaggcctggcccacgtgctgcctctcacccagcaagctgtgcttaaggccaagggtgtagtaatagcacatctaatcagagtcactcatgccatgtgctggtcccacttctgacacagctgcagcacaccaccattagcagagcacctgccctctgccacgccccatgctgggctccatctgccggtttagaggcagacggtatagtagtcaagatgtgggctgtgctttccaattctggctctcccaggtaacagctgggaaggttgggcaaactaataggacctctctgtgactcagtttccccatccgcaaaataggaatacaattgtgaggatatttttccttctacctgttttttgtctttttttttttttcatagatatatggtcttgctatattgcccaggtgggtcttgaactcctagcctcaagtgagtctcctgtcttggcctcccaaagtgctgggattacagttgtgagccactgcgttcagcttttaggtttcttttcttagcttgttaccaaagtatgaaaggccacagataaatgcctggataataaactcgccccaatcccagtgtacagttcaagaaatagaataagacggtccccggaagctctcccaagtgctcctcccaagcagttaccgctctcctaacc

SEQ ID NO: 91754 - DNA, 1051 bp, Homo sapiens
atgggagcttccagccgcactgggatgatctggctcctcttgggcctgtgagagtcacatccctgcctcctgcctttaagctcccggtgcttaattagcaggaattctatagaattgcactccagaatggtagctactagccatgtatggacttttttttttttttttgagacggagtcttgctctgtcacccaggctggagtgcagtggtgtgatcttgtctcactacaaccgccgcctcccgggttcaagcgattctctgcctcagcctcccgagtagctgggattacaggcgcctaccaccacgcctggctaatttttgtatttttagtagagacagggtttcaccatcttggccaggctggtcttgaactcctgaccttgtgatcgccccccgcccaccccccccccccccagcctcccaaagtgctgggattacaggcgtgagtcatcgtgcccggactcacatatggctttttaagttttaattaattacaattaaagaaaagtaaaaagtcagttctttagttgcactagccatcattcaaacatttagtaaccacatttctgtcgttatggaaaggtctgtgggctagttctgctctggttgcggtccctctcctgcacctactcgctgtgactgtgtgcatgtggctctctccctgggcctcagttttcccatgtgaggaacggggatagtaacacaggctggctgtgaagatgaacattaatccatgcctggtgctttgtgagtgctcactgagtattagccttgatgcagacccactggtttctccttttgccactgggccctgccctggagctcccagggaggtggtggcgatgcagagcgacgtgggtcagggattccccatgcagtccaactggagggctcccgtgcatgcgtgcacatcaggggcggtaaggaagggctggccggggtgtgggaggaggcgacacaagatgggaggtggccctgtctcttgggagcaaaggcagaaggaggtggaggcagctcagggctcggaggagaggggtccgggctccttgg

SEQ ID NO: 91755 - DNA, 1013 bp, Homo sapiens
gtcgcccgggccggagtgcaatggcatgatctcggctcactgaaacctctgcctcccgggttcacgcgattctcctgcctcaagcctcccaagtagttgggattacaggcacacaccgacatgcccggcttttttttttttttttgtattttgagtagagacggggtttcactatgttggccaggctgtctcgaactcctgacctcatgatccgtctgccttggcctccccaagtgctaggattacaggagtgagccaccgcgcccggccgcagggtgattttaaggcctttatgggcccaagttgcattataaaatgttatatcccagattcactggaatatgtacgatgagagcaggtggcattaatatcttgcagtaatgaactaattggtaaaaaccgttttgtttacattaaaatggttcaaaagccagcgacacagcgatgattgtttccatttagcagatgtggatactgaggcacagaaaacggtcaagccttctgcccacagtcaccagaaaggaggaaattcaagtctggggttgtgtggcttcagagcctgagctcaaccatgacgagcacactgaaaaggaaacccctcctaactaactcccgctccggggtcctttaagagcgtcagaacccagaactgagtaaaacaagatcaaagcgtatgtaaatacggactaggggctgccgggaaataatcactacggctaggccctagggaaagcagacgtcggagtcctagtgcgcctgcgtagccccatctcgcctttccgccccacggcctagcgaggcccatctctaacccacacaggcccaaagttgtctaatgtgcgcaggcgccctgctgtgagcccgcctccttctctgccctgctcttgcgctctcgctctctcagagttcgtctctggctctttgtacgtcacttcctgtttgtggcgcgagagggcggtatttccgtccagagggtgggagggggcggtaagcgggggctggggggagggggc

SEQ ID NO: 91756 - DNA, 1832 bp, Homo sapiens
aacggctgctgccccgacactgcggcgcctggcgctttcctcacggtctgggcttgagaggaagccggagtccttgtctaaagtcagcatcatcaagagactgggcgcagctgcccttgtgcccgaggcccaggacagccaggtcaccagcaccaagagtaagtcctcagccgaggtcaaggtcaccattaagaggactctggtggggccccgggggagcagctccagcgagggccttggtgcccagatggaccacgcgggcactgtgagcgtgttcaaaagactgggccgcaggaccttctagcccacctgtgggcggggtgcaggcagcagagcctgcgggcatctgccctggccgccccaggctcctggcttcatcacgcctcccaccagctcctggatgacacagcttgtctccctcgggctctagagctaggcccgagcattcgggggatcaccccatttctcctagcctgggatggtcgtcgcagctggcctggcctgctccaggactccccttctctcatgtcctctgtgctttcttctctggctgtggccttggcagaacccacttttctacctctcccaagtgccagggggcttcttcctctcctacattccccttcttcccctgagcagggtctgctgcctcagaccccagctcatcagcctccctgtccccctcaactaagtgggtgtcacctggtgggcctcccttcccccactccccactgacctccctcactcctctgcgcctccccccactgctgtgacttctctctctccctgtcttcactttgttcatttctcttctgttttctgtccccgtggcaaggcccgactgtccgctgcgtcctgcccgaccctcctgtacctccggcctcccagcggccccctcgtcggcggtggcgtcgagcctgttgagactgttagccgccctctactcccaggctggagggacctctccagaccctgggctgcggctgaggcgcatccgttttcctgccctgggcatctgtctctgaaagtgtatggcgggtggtgggcaaggggcactgggaagggaggccagtgcctagagtgaagacagctgctgttttaatatatttttgtgactttcaaatcatttcccccactccttcagggtgagttgcaggactgtttcacactatgcgcagctgggctggggatggtggcagaggattgggctgtgtctctaaaggtcaggcttcctgcacacacatggtccatgtccctgctgcaagccctgagtcagggggagtaatggccacagtcaccattcagttaggccgccccctgcccccaataagccgtagtggttttgtcactctatcccctccccccatggatttcacctgcctgctggcacctttccaaatgatgggctccgtttgtgagaccatgagtttccactggtttggtcgcccacccctccctgctgcacagcgcccctgagccaggcctgtcctaggagctggtagcaggtagtgagcagggcctctccagggatggggtgtaggtaaagcggtggtgctggccaaggaatctgaggagtgggagaaagtggccagggccgcttcagtggttgtggataggaaggccttgcagaaggggtgacatggaggccaagttgggaatgtggcttcatgaagttcaggaggagagctttcagacagagggacagccaggggcagaggtgctgaggtgggacaaggaacaggaagaaggctggtggctgtgggtgagggtgggccctgcctccagcatgaggcagaggtgggtgggcaggggctaggtggctgggggtgttg

SEQ ID NO: 91757 - DNA, 1138 bp, Homo sapiens
gagttgccatcagagaggaggcctgaatgatgagacgcagcaattccgctgtgcttggggaactgcatgccaggcagaaggaacagcagggaccctgaggaagcgcctacttgctaggtgaggaagatcctggagaccagcatggctgaagcagctccgggaggggcgaagcgaactcagcacgaggctgggtgactgatgggtgaggtgtgatcagaactagtgtggtctagagcctcaggaaaggctcccaggatagggagggatgggctagttcctggggagatgcagcccaccctgcccccaagcatccccatcacgagtaccatgcagttacagggtgatacccgctgaccttctcattcagtctcaagcctcaccttctccatcctgaccctgagactgctggattgaggcctgtcttccaggaccccacccgaccggactctccttttctccccacagctgcctcccgaatgatcaccaacagcctgaaccatgactctccacccagcacaccccccaggcgcccggacaccagcacctccaagatctcggtcactgtgtccaacaagatggcagcaaagagtgccaaggccactggtgagggaacatgggcaggtggtaggaggagctggaggggaacgtgggttggtaggaggtgttgggggtcatgcttccaatattgtaaggtgctttgaaggccacaaggtatacaaaacatttgaacctgaatcacctctgtaaacttggtcaaggtgccatacgtctgtgggcctcactttcttcatctgtagcatggggggtggcgataccccacccaggaggatggacagaagcacctgagttggtgtgttgaggcatgtgtgcattgccttctcactcaggggttcacgctttgtgaacaggtcttcaccgagccccctacttgtgcacagctctgtgcttgatgcctggggtcataggttaagaacctcttgcctcctcttagcagccaagggatccatccttgaaaaccttcagtctgatcctgtaaccccctgggctgtaactctccggggctccccattattccagtaataaaggccatcttccccacatggtctgtagggccctgcatcatgtagattcatctctt

SEQ ID NO: 91758 - DNA, 1024 bp, Homo sapiens
ttgcccaggctggagtacagtggcacgatctcagctcactgcaacctccacctcccgggttcaagcgatcctcctgcctcagcctcctaagtagctgggattacaggcacctgtcaccacacccggctaatttttgtatttttagtagagacggggtttcaccatcttggccaggctggtctcgaactcctgacttcaagtgatctgcctgcttcggcctcccaaagtgctgggattataggcgtgagccactgctcccgtccagggggctattttaaacagcaaaatcaccaacaaaaatgtgaaaaatgttcacattcatgacatcaagtagactgggcaaaggatgcttgtttacagagcgggacctgaaataagagggtgagaatgccttctttgtcctcatttgggaacgtgtctggagcaactcaaaatgttctctgtgtgtgtctgtgaatgacagtgaaagcactgctgtattgattttggggttacaaatacatttgaatgagtaggcaagtttgcaaatatggaatctatgaatgatgagtattgactgtatttatattttttctttttcttttttttttttgagatggagtctccctctgttgcccaggctggagtacagtggcgcgaccttggctcagtgcaacctccgcctcccgggttcaagcagttctcctgcctcagcctcccgagtagctgggattacaggtgcctgccaccacgcctggctaatttttgtatttttagtagacagaatttcaccctgttggccaggctggttttgaacacctcaggtgatccacccgcctcagcctcccaaagtgctggggttataggcgtgagccaccactgcacctgacctttttttttttcccttgagatagtctcgctgtgttgcctacgttggagtgcgatggcacgcttagctaactgcaaactctgcctcccaggttaagtgattcttgtgcctcagtcacccaagtatctgggattacatgtgtgtgccaccatgccc

SEQ ID NO: 91759 - DNA, 1050 bp, Homo sapiens
gcccaggctagaatgcagtggtacaatcacagcttactgcagcctcaaactcctgggctcaagcaatcctaccacctcagcccctgaataattgggactacaggtgtgtgacaccatgcttggctagttttttaattttttctagagataagcgtcccactgtgttggccaggctggtctcaaactcctgacctcaggtgatccacccgcttcggcctcccgaagtgctgggattacaggcgtgaaccaccgcacctggcctattttttcaataggtgaggaggctgaacttcagatatatatatctgaatatactggtcagatattttatagagtgtccctcagtttggaggtatctgatgctttcttatggttaggagtgaaatgtgttagaatcttctctagcagtcaggtgttgatccttgtggtgttgcttagatctctaggttgatgcatgattcttctgtggtgacccaggtgcctgttcttttttcacaggacatgtgcaaagctgccactgagtcagtaccctgcagccctagcccccttgcaggcgaaattcgccgtggcaccagtggtgagtcctaactattcaggcctcttttccttgatttttataccctgtcagtgaaggggacacgtctggccatcccatccccgcctgtaattttcaaaggtagaaacaaagccattggaggaattcttactcttcttttaggggaaaaaataaactgggtagtgaatggctgtacacacagtcaattgtcatctgtggtcattaagttctgtaaagttaatatgtacacttagtgaattcttagctcctagaagaaatacagagcaatggagaatccgttgctcctatgggaaatactaggttaggttcctgcaagcctgtcgtcaaatatatagctttattttatgtgtgtctccttttaaaggcactgtagttaatacataatgttgatttcattaaccgggaactcatagccaacaacactgtaactcattcctgcacaatgcttatctcacacacacatttttttgatc

SEQ ID NO: 91760 - DNA, 1237 bp, Homo sapiens
gccacctgaggatcctatcatcctctgggcctaggctggctgatggggactagggcagagaacccagagtcccagttaccctaaatcagtcatgggcccagcatgtgtagtgatgcagagagcaagcactggggcggggtggagctgtaaggagaaaggctgtggtaaaggtttgggagctctgccccttgtttagcattgtggcttggggtgggttgcccaacctttccctatctcattttcctcatcggcaactcaggcgaatcttaatactgcttaactcacagggtcaggaaggctcagttccatcatgtgtgtgtggagcactccatgcagggcctggcatatgatgagcatttaatttgtgggagctgctgtgattgtggttttgctaatgctattctctaaagaggacagtgtgagtaatgagccctgtccaaccccacagccacttccgagtggatccagttctttaaggaagccggcattcctccaggacctgccgtcaattatgccgtgatgtttgtggataataggtgaggaggctgaacttggggatggggtggtggggagctggctggcccacccactctggcccacctggggcctcaccactgacctttccctgcaggattcagaagagcatgctgctggatctcaataaggagataatgaatgagctgggcgtgaccgtggtgggtgacatcatcgccattctcaagcatgccaaagtggtgcaccgtcaggtgggtgctgtgcccagcccctctgtctctgggtttggcatggaggtggagggtcagttgcagagccaatgggaggcctggcagcagaggcaggccgacccaggttccagggctggttcagccatttgctgtgtgacgctgggcacattgcccaacctctctgagctgtattttctgcatctgtgaaagagaggcaaacctggccgggtgcggtggctcacgcctgtaatctcagcactttgggaggccgaggtggtcggatcacgaagtcaggagattgagaccatcctggctaacacggtgaaaccccgtctgtactaaaaatacaaaaaattagccgagcgtggtggcgggcacctgtagtcccagctacttgggaggctgaggcaggagaatgacgtgaacgtgggtggcggagcttgcagtgagccgagatcgcaccactgcactccagcctgggcgacagagcgagactctctcaagaaaaaaaa

SEQ ID NO: 91761 - DNA, 1019 bp, Homo sapiens
gagtccagacacccggacgccacccgtccctaccgcaaccggcccagtcccaccacccccggcccgcgcctcacctggcccaccgggcccgcgcccactcgcgccgcccgccctccctcccggcggcgccaactgtcagacactcctcccccggcccgggctgcccgccccggaagcatcctctcaccgccggaagctgaactgactcgtccgcggccgctctaccccaacaggccgccaccagcgagagtgcggccataaccatcacgtgaccgcccaccgacaccagcgagagtgcagtcgtaaccgtcacgtgaccgcccaccgtcggcccggcgctcccctccgcccgaagctagcaagcggcgcggccaatgagaaaggcgcatgcctggcccccgccggcctgcagtctagccgtagtgcgcctgcgcgcggctaggaggggccgtcaggcggggatacagcctggaaggtgcgtgtggggctgggtctcggagtgggagacgtggagtgcaggtactgtgcgatctgggggcgcggcgcctcggctaccctcctcgtgttgtcttccacgctataatgcatggaatataatatatattatatggaatataatatatggaatataatatatataattatagcgttgtcttccacgctataatttatgtcgtcctcggtctctttatgtcaccattcctctccttctgtctcatcccacttaaatcctcacaactccttctgtcgccatcaccctctttaaatcctcacaactcctcttgttgtcatcaacgcccttaactcgctttcgttccctgtaagccctctttgccaccataggtcgtaatcgctccctttaaattcgtcatcgccatatgttacctgcatcctgcttttgttgccatttctcctttataaaatcctcatttctctttaaaccctcatcatacccccaagtcaccttcgcatggctactgtccccatcgctcttcttaaatcgcgctaatgcaactctt

SEQ ID NO: 91762 - DNA, 1024 bp, Homo sapiens
acgaggtttcaccatgttggccaggctggtctcgaactcctgacctcaggtgatccacccatcttggcctcccaaagtgctgggattacaggcatgagccaccgtgcccagccgcctagccaattttttaagtttttgtagagatggggtcacaccttgttgccccaactggtctcaaactcctgagctcaagccatcctcccgccttggcctcccaaagtgctgggattataggcataagccactgcgccctgccaatatggctaatactggtttatagatgaggccagcagggctcagaagtaaagccccatgctcagcatcactcagcaagaaagtggcagaggtgtgatctgaaccatgagctctccaatttaaagggctgctgtagaggaggaatcaaatctcccactgccaccctcccctgggggtggggtgttcagggatctgtgacccagtgggttttacttcctcctttttgcgggctatggtgtcatactccaaggggggcaggaccacaaggcaaggggactagggggtattctgtgggctgggagagagcacgcttcctggcagtgccctctcccagatgagacctgatctcttttttgttttttgttttttgttttgagacagagttttgctcttcttgcccaggctggagtacaatggcgcaatcttggctcactgcaacctccgcctcccaggttcaagcgattctcctgcctcagcctcctgagtagctgggattacaggcatgcgccaccacgcccggctaattttgtatttttagtagagacggggtttcaccatgttggtcaggctggtcttgaactcccgacctcaggtgatttgcccacctcagcctcccaaagtgctggattacaggtgtgagccactgcgcccgaccgagacctgatttcatctcatgtcataccagcaaggaggcagagcataagtaccaacctggatggggcgcgctgggagccccatggaggttctagggtcctgagaatacaggcat

SEQ ID NO: 91763 - DNA, 1074 bp, Homo sapiens
tggtggcacgtgcctgtagtcccagctgcttgggaggctgaggcaggaggattgcttgagcctgggaagttgaggccgcagtgagctatgatcatgctgctgcactccagcctagggaacagaactctggcactaaaaaaagaaaagaaaagaaaagaaaataggcttacaataaaaagcaatcttgacctaccccaaaatcccactcccttgaagacaaccacttctgccctgttgcttctctcagtaatactccttttctgcagttatctcttgacttcctgccatgtgtgtttgggggagcttgagggaagagggtgtccctgtctcattgagagaggtgccaccctgccgtgaaaagaggtgccaccctctgtcaattaggagaggagggatgagagaggaaaggggtctccagtgtatttctccagccggggccttaaatccctcttgggagatatgggatggggtggatcggaaaataaatttttttaaatccctaccaaaatatcagctggctttttttaaaaaatcaaataccaaaatctaaatagactccaacagaaaattcaccatctcctctgaccttttcttcccatctcatgctgtgaactgtcttctgttgactttatcgctacctttcttcattctgttattcaaccatgatctctccgtttcattttataagcgttttattaatttcatttatgtatttatttttgactaggtaatgcatgtccatggtacacaaattcacaaggtttgtaaatgagaaaagacgtgaggttccttttgttctttacctgtggcctccctgccctacacggggactctagggtggaatgtagcaaagcccatccaccagccatgtactaccccccaacccggccaggctggagcgaccgtgtctggggagccgagccccgcttctcgctgcggtgagcccggactggggcacgcactgcgcagactccccgctgcagtgggcggagctcccacaggccccgccccctcctcccaccctcgttcagcctgtccagacagaagctggggcccaccggaggtagctgcaga

SEQ ID NO: 91764 - DNA, 1050 bp, Homo sapiens
ctaatcactcttctgtgatgtctgtccctggaaagcgtagaacaccccacacagtgcccacttttgttctgccagtttggagaccctgacacacccaccttctcacctgggctctgcgtatcccccagccttgagggaagatgaagcctaaactgatgtaccaggaggtaggtggattggggggctcagcagggtggaactgggtacagtgggggtgggggttcccaagagccacctgtcacccccgttgttgtccccatccccagctgaaggtgcctgcagaggagcccgccaatgagctgcccatgaatgagattgaggcgtggaaggctgcggaaaaggtaggagccctccgccaccctcgctctgtctcagagacaggctgggctgcccccctcgggctggctgaccacctcctcctccccacagaaagcccgctgggtcctgctggtcctcattctggcggttgtgggcttcggagccctgatgactcagctgtttctatgggaatacggcgacttgcatctctttgggcccaaccagcgcccagccccctgctatgacccttgcgagtaagtggggggtgctgcagttggtgggggaggggcctgccagaccaggtacacttaagcacacactaaacagggcctgcactcagccctacccagcgcttgcgacaagtgaggaggttgcaggctcccaagtgctcgcccgccccctcctcctccacacacatagtttctatggcagccacagcgtcatcttctgtcaggcctgtgaacagacacagcatcttccacccacatctgtggacccacacacacatctcaatacacgaccttccttccacacctctagacagacacgcagaggatcatgagtccaggcacgcattcaaatacacacagttttaaaaaattttttttaaaagaaaagaaaaactcaaatacagtttagctgggcttggtggctcacgcctgtaattgcaacactttgcggggctgaggcgggaggattgcttgagcccaggagttccagaccagcctgggc

SEQ ID NO: 91765 - DNA, 1277 bp, Homo sapiens
agttcgctgagaagaggcctagaacagggcctggcacacagtaggttccagggcatccttgactgttgctgttgttggcatcatcgtgcctcacccgataccttccaggaccccctgcctgagcctcgcccccaccatactgggagatgcctggaggccctgccttgatgctgaattttgagaaagtccctggaggggcaggaggggtcaggaggacttggagggggatcacagggcaactaattattaaagcagataaagatgtttaaaacagataaggaagtcttttaatattttaatctgtaaagtctttaatctatgcaggctaatgtaaagtctgtttactcctaatcatgtctcaaaataactccaccgggcattaccttgtggggttggagagctggctggtccagcccctcagaagctctcccctccccgcagggtgaggaggtcctccggcagctgcagaccctggcaccaaagggcgtgaacgtccgcatcgctgtgagcaagcccagcgggccccagccacaggcggacctgcaggctctgctgcagagcggtgagctggggcccaactggggctggtctgggcctgggggtacccagcctggcccctgatctctgcccctgctggtcacaggtgcccaggtccgcatggtggacatgcagaagctgacccatggcgtcctgcataccaagttctgggtggtggaccagacccacttctacctgggcagtgccaacatggactggcgttcactgacccaggtctgtctgcaccctgtctaccttccttccaggccactccctgccccacagggcacccagcctccgactgcatccctcactcaatccagagtcctctccacccattctctgtaatggcttccttcttgcctcctaccaggcctccctaatccaagccatgcacggtggctcacacctataatctcaacactttgggaggccaaggtgggaggattgcttgagcccaggagttggagaccagcctgggcaacatagtgagaccccatctctaccaaaaaaaaaaaaataagcccggtgtggtggcacacacctctggtcccagctccttgggagactgaggtgggaggatcacttgagcccaggagtttgaggctacagtgggttgtattcatgccactgcactccagcctgagtgacagagtgagaccctgttacaaaacaaagaatccctaaatggagccctctactgccctccccctgctcctggaagcctggggctccctctg

SEQ ID NO: 91766 - DNA, 1050 bp, Homo sapiens
cctaacctttaatctcagcaattatgcagggagatgctgtagatatagctgtgactgagacatccctagtgcctgtcctcccagcccaatgggaagaccagtttgtcaccagaaagaatgaggagggaatcccaagggactgtgagagcccagaggaatgcctggtgcaggctgggtagtcatgggaggcttcctgaaggaggcaacatgtcagcctagacctaagaatgagtagaagctagctcagtggagggtagaagcaacagcagattgcaaacgttcaggaaacctggagctttggaataactgattttcatcaaaacttaagttgataatcattctaggactttagctattggagctggggtggagggggtactgtgggacagggggaaagacagagaccagactggggagtgtccctgtcatctgtgagcactaggccgctatcgctgagctcagcactgccctcctacaggtcaaggagctgggcgtggtcatgtacaactgcagctgcctggctcgagacctgaccaagatctttgaggcctactggttcctgggccaggcaggcagctccatcccatcaacttggccccggttctatgacacccgctacaaccaagagacaccaatggagatctgcctcaatggaacccctgctctggcctacctggcggtgagtctggggcaagtggggcctgtcatgtcccagccccatgccgtcactcacagcctccatctgtccctgtttggtgatgacagggagggcgtatcctgaccatcagttctcaccccagctcattctgcttggtcaggggcctggagtagttcccaacatccctcggcctctatttcagttagaaaatgggtattgtttccaacctgttagggctgctgggagaggtaccctgggttcatgcacaccaaacctttggtgctctatatcatccagtatagccacaggtggctctttcagtttaagttaattaaatgcaattaacaattcaggccaagtggggtggcttatgcctgtaatcccaatacttt

SEQ ID NO: 91767 - DNA, 1023 bp, Homo sapiens
agcgcatgcctgtaatcctagctacccgggaggctgaggcaggagaatcgcttgaacccaggaggcagaggttgcagtgagccgagattgtgccattgcactccagcgtgggcaacaagagcgaaattccacctcaaaaaaaaaaagaaagaataaaagaggatgacaacactgggttttggggagcaggaatgggagccacagccaggaagaggaaatagggatgtgggatttatggagacaggaacagggtctgggagccagcgatgaggaagtcctctcaatagctaaagcagggcccaggcttggttccccaaagctgagggcaaagcctgtggacacagccgccctctgcatcctgccccacctcctatacacccgtcctcaggttctggcctgccattgacgatgggctgcggcgggccacctacgagcgtggcgtcaaggtgcgcctgctcatcagctgctggggacactcggagccatccatgcgggccttcctgctctctctggctgccctgcgtgacaaccatacccactctgacatccaggtggtaagtactgccccaagccaccccttggcccctgtgtggggcagtcctagggacacagccctcatgggactcgtctgtcaatgacaagggcagcccagagtgagccctgtcactgtggggaaaccatgggtcagggccagggtcatggggcacagggagaggggccaggaccgggatgagggggcacaggcagaggggttgggaccgggatgggggtgcagagagaggtgttgggaccaggaatggggacatgggcaggtagaggggtcagggctgggattgggagcacaggcagaggggtcagggctgggatggggaggcacaggcagaagggtcggggccgggttggagggcacagagagaggggttagggccagggttgggggcacaggcagaggggtcggggccaggatggaggaggcccaggcagaggggtgagggctggggtggggggcacagagagagggtt

SEQ ID NO: 91768 - DNA, 1040 bp, Homo sapiens
aggcccaggctcgaatcccatatgcccgtgtcaaccacaacaagtacatggtgactgaacgcgccacctacatcggtgagtgtcttgagcaccacggggcgctgaagaagagggggttcagacaccaggggcggccccccgagggtgcccttatgctccacccattcctctctaggaacctccaactggtctggcaactacttcacggagacggcgggcacctcgctgctggtgacgcagaatgggaggggcggcctgcggagccagctggaggccattttcctgagggactgggactccccttacagccatgaccttgacacctcagctgacagcgtgggcaacgcctgccgcctgctctgaggcccgatccagtgggcaggccaaggcctgctgggcccccgcggacccaggtgctctgggtcacggtccctgtccccgcgcccccgcttctgtctgccccattgtggctcctcaggctctctcccctgctctcccacctctacctccacccccaccggcctgacgctgtggccccgggacccagcagagctgggggagggatcagcccccaaagaaatgggggtgcatgctgggcctggccccctggcccacccccactttccagggcaaaaagggcccagggttataataagtaaataacttgtctgtacagcctgtgcctgactgagtggtgtgagatggggtgcaggggtaggggacagctggcatgggcctctggtggggacatctttttgtgctgagccctcaacatgtcactggcatgtgctgagccctcagtgtgtgaccagtgtgggttagcatgtactgagccctcagcatgtgctggcatgggttggcatgtgctgagcccttaacatgtagtgtacatgggctgacctgtgctgagcatgcagcgtgccaccctgtggcccggcatggacttagcactcatgtagccagcatgggtatgtgctgcagagaagcatgttcccagattgatcagcagggaccaaaccattgccacatcccaagggtga

SEQ ID NO: 91769 - DNA, 1103 bp, Homo sapiens
tactaagcatcaactgtaggtatgccagcaaaaatgtttgaaggccacggcgcagtggctcatggggaggctgaggcaggcagatcacctgagcccaggagttcaagaccagcctgggcaacatggcaaaaccccttctctacaaaagattgcaaaattagctgggtgtggtggtgcacactgtggtcccagctacttggggtgctgagatgggaggatcagttgaaccccggaggttgaggctgcagtgagctgtgactgcaccattgcacagcagcctgggcaagtgagcaagaccctgtctcaaaaacaaaacaaacaaaaagaaaaaaccaaaaatgtttgaagaccacttccccagaacagaggaggggatggatttgagagttcatggtggcttctaggacccagctcctggagcccaagagtgccagcccactgaccaggctctctgctcctctttgcccacaggttacgaagtgacagtgctggtgcgggactcctccaggctgccatcagaggggccccggccggcccacgtggtagtgggagatgttctgcaggcagccgatgtggacaagaccgtggctgggcaggacgctgtcatcgtgctgctgggcacccgcaatgacctcagtactgagccccccctctgcccacggccctcccctacacctcggcccccagcgccacccccgcccccggccccgcccctgccacccctgccgccgccgccgcccaccagtgacagccactctctgtcccctctaaggtcccacgacagtgatgtccgagggcgcccggaacattgtggcagccatgaaggctcatggtgtggacaaggtcgtggcctgcacctcgggtgggtggtgggatcatggaggtggggctgaactggggggtactggggaggcagcccaggggcctctgaaaggtgacgctgaagccattccatgttactgtgcatttactgaacaccagctgtgtgcctgaaccttactgggtgatgctggggacacagtggtgacctgtacagccctgggccctgctcacacaaggctcacagagagaggtggtaaacagatccatgatcaaactgacat

SEQ ID NO: 91770 - DNA, 1035 bp, Homo sapiens
taactttctccccttgctggttctgggaggccctggggcttagagtgcgccccagatccgctccaggctccgggagagggggcgtgagctacgagaggccgtgggtgaggctcgcctggccccgcccctctccgggaggtggagcgcggaggcagggcgctgagtgacaagttatctcggctccgtccactctatttgttgctatgtggaggcgtggccttctgtggccccgccttccagtctaagtggcgcgcagagagggcggtgctggacggtgagcgaatgcaagctgacgcctgccccgcccatccgcgttaggccccgccccttgacctgagccgcgggcggagagtctgaggcgtggcccttcgagccagctccgccccgttgttcctggcttgagtagggcagagagcaccgcccagcagccagtgggttcccgcgcgtgccgagactctgaggccttgcacccccacgatcccgtacgatggccgtcaagaagatcgcgatcttcggcgccactggccagaccgggctcaccaccctggcgcaggcggtgcaagcaggcatgagccggggcgggcggggcatgtcacgggacagacgggcagaactttaggaaggggcaccatggggtcgggccgaggctgattggggccatgagcgccccagccaggtgtatgaggactcaggggccaaagcaagtggccacgggggcagaaatggggaaagatgtgagatccaagtttatgtgagtccaagccagagaggaattggccccgggagccccgggaggactccactggcacagtcgtgtgtaagtccagggctcttatgcaatgcggttgtcattattgtggttgtggtggtggttgttcgcactcccagagaggatttactaagccaagcttgctctgtcgtctcttcacatgagagctttcaaaatggggtgggaactagtatcaccctacttgacagatgagaaaactgagacccagagagtgacttgcccaatatcacacagctgttaactga

SEQ ID NO: 91771 - DNA, 1043 bp, Homo sapiens
aacaacggggcggagctggctcgaagggccacgcctcagactctccgcccgcggctcaggtcaaggggcggggcctaacgcggatgggcggggcaggcgtcagcttgcattcgctcaccgtccagcaccgccctctctgcgcgccacttagactggaaggcggggccacagaaggccacgcctccacatagcaacaaatagagtggacggagccgagataacttgtcactcagcgccctgcctccgcgctccacctcccggagaggggcggggccaggcgagcctcacccacggcctctcgtagctcacgccccctctcccggagcctggagcggatctggggcgcactctaagccccagggcctcccagaaccagcaaggggagaaagttaggaggacagagtgtgtgtgtgcacttggatgtaagacactgtgtcacggcgtacctatgcacttatatgaccctgtgtgactcagtgacccggagggcaagcaggactgtgggtgacaccttgtgtcatcctctgagtgtgatcccgtgttacagtgtgactacacgtgcgtgacaccacgtgtggcaggcattgattctgttcttttgtgaccttgtggtgacaccgtgggtgacactgcgtcagcctgtacgatagggtgtgggacgtgtgaggtgtgctacatggaagcgtgagactaattagactgtgacagtgtgtgacaccacatgtctcgtgtaaggatgtgtgacaccgggaccccattcgagtgtgtggctgtgggtgtctgtgttgagctgctcattgtgaccccctgtgactatgatgtgtgaggtgcggcggtgcagcatgtgcggggcgactgctatgaaggttcgagtgtgtagagtgtgtgacactgtggctgtgaagctgtgcgtgatgtgtgggcctatgacactgtttgtgactgccggggagtgtgcggctgtgtgtgacaggtgcatttgtgtgtgacgccgcgtgggcggtggttaccctattggatttgtgtggtggtgggtgacaccg

SEQ ID NO: 91772 - DNA, 1362 bp, Homo sapiens
agaggctgggcgtggtggctcacgcctgtaatcccagtactttgggaggccaaggcaggtggatcatataagatcaggagttggagaccagcctggctaacatggtgaaatcccgtttctactaaaaatagaaaagttagctgggcgtggtggcgcatgcttgtaatcccagctacatgggaggctgagacatgagaatcgcttgaatccgggaggcagaggttgcagtgagccacaatcgcgccactgcactccagcctgggtgacagagcgagactctgtctcaatacatacatacataaattaattaaattaaattaaataagttaaattaaattaaataaaataagcagcaagtagaagagaaggagcccacaaaggaggctgaaaagaagggtggattgagaattaggagtagaaccagtagaaggtatttcataaaaccaaggtccgcagggttcgggtgtctgagcatctccatcctcctgcagattcgagagcctggaccaagagatgaacagcctgatgggccgcgttctggacgtgaaccacacagtccaggagctggtggaaggaggccaccccagttcagatgaggtgcgttcctgccaggaccacctcaacagcaggtaggagggcctggggctgggagtccctcccatccttcccttccacactcacacagccatggacagcaagatgtgcaatctcaaacccctggaatcataatggccacccgataaatcaacaaaatgttgaccaaaaatcataatccctgatactggtgatgacgtggtaaaattaaaacaacatttcagttggctgttcatttatttgtccagaaagaatgtattggatatctacaatctgccaggagtattcccaagcactttatatacctttctaaagtatcccaacattcttccgggcacagtggctcatactgtaatcccagcacttcaggaggctgagatgggtggatcacttgagctcatgaattcaagaccagcctgggcaacatggtgaaaccccgtctctctctctacgtgcgcgcacacacacacacacacacacacacacaaaatatatatatacacacacatatatatacacacatatatacgtatatatacacatatatacgtatatatacacatatatacgtatatatacacatatatacgtatatatacacacatatacgtatatatacacatatatatgtatatatatatacacactatatatatgtatatatatatacaaaatttagccaagcatggtggtgcacatttgtagtcccagctacatgggaggctgagttgggaggatgccttgagcccaggaggtagagattgcagt

SEQ ID NO: 91773 - DNA, 1059 bp, Homo sapiens
tcattctctccctgcctctctggctccctctatctttctttcctgtctgtctatccctctatccttgtctttcttacggtcctctccccatgtttctgattttctgtgcctgtctctctgttgatcactctgtgactgtttgtctctccctgactccttcccatgtctctgtgtccatctgtctctccctgtatctttctgtctccctcccctcacttctgtctgtctgtctctctcttcttgtctctcttccttggttccttccatttctgggcctatctctgcatccacccctcatgtctctctctccctatgtgtctcccactccctgcctctgattctcttttcacatccttccctgtgtcctgtcactctcccacacttctctgattctccccaccatctatctatcttctccatctcctgccatccacccacttggggcaggagggccagcaactgatgcaggagaagcccgaactggcggcctccgtgcggaagaagctgggcgagatccgccagtgctgggcggagctggagagcaccacccaggccaaggcacggcagctctttgaggccagcaaagcagaccagctggtgcagagctttgctgagctggacaagaagctccttcacatggagagccagctgcaagacgtggaccctggaggagacctggccactgtcaacagtcagctcaagaagctgcaggtatggtcttcctggcccagatgagggctccctatgccacatgggggccaggtcagggtccaaccccactcaaggtatgtcaagtggaggggatttaatacagggatttatttcaaacttgtagaagatgagaaagggaatattgaagcaatccagctagtaataactgttggaagcagccaccactccctaaggtatggagtacaaagggaaaaggaaggatctagagccacaaagcagtaggtaaatgactagcatgctaaaggtttcacaggaccctgacactcatttcctggatggagaaaccaaggctcaggggtatgggaatggctttgcatggaataacaa

SEQ ID NO: 91774 - DNA, 1050 bp, Homo sapiens
ggcccatcttgggtcggcaagcggcttggctcagagcacagtctctggaaccagcctcctgtgttcaaatcctgtcactccttactggctgcttgttcttgggcgccgtacttcgcccctctgtgcctgttttcccacctgcagcaagcatagggttatgatgagtgagggagtatcagcaaaatgtttacatggtcttggcacgtggttagcgagctgggggtgcttgttaattgccccgtgggccgtgccagtagcagaggagcgtgtggtcttgcagggcctcggaacgccccctctccacccacatccccttacctcctgcccccagggcctgcggcgggagatccaggcgcatgggccgcgcctggaggaggtgctggagcgcgcgggcgcgctggcgtcgctgcgcagcccggaggcagaggcagtgcgccggggcctggagcagctgcagagcgcctgggccggactgcgggaggctgccgagcgacggcagcaggtgctggacgccgccttccaggtggagcagtactacttcgacgtggctgaggtggaggcgtggctgggcgagcaggagctgctcatgatgagtgaggacaagggcaaggtgcgcccgagctgggggtgcggagggcctgggggcgctggagccgggggccgccgctgccgcctcatcgtgggcgctttgtgcccccaggacgaacagagcaccctgcagctgctcaagaaacacctgcagctggagcaaggcgtggagaactacgaggaaagcatcgcgcagctgtcgcgccagtgccgggcgctgctggagatggggcacccggacaggtgggcgggcgcgtggccagttcacaggaatggtccagcaggacctgaagcttcgctgttgggagttggcgcagcgctggaattggacgttgggtgggagaggtcctccttgctgtgtgctggagccctcgaatttggcaagtgggcgggccggaatggggggacacggctcagggatggttgagagggtggggccaggagcacctggatttgagtgta

SEQ ID NO: 91775 - DNA, 1027 bp, Homo sapiens
cgagatcgccccactgcactccagcctgggccatagggtgagactttatctcaaaaaaaaaaagaaaagaaaagaaaagaaaagaaagtaagtgtcttgaggtggtatgggatgtcagcctcaaggatttggggtcaccaggagccacatgtatggggcaggctgaggaggctccctgtggctcagatccctgcctgccacccactgcagggacgtgtcatcagtggaggtgctcatgaactaccaccagggcctgaagactgagctggaggcgcgggtgcctgagctgaccacctgccaggagctggggcgatctctgctgctcaacaaaagtgccatggctgatgaggtggggagcagggagggggtccccctctgccacccgggcacattggggtggaagccattccacaccctgacttccctcccacccacctgccactcccagatccaggcacagctggacaagctgggaaccaggaaggaggaggtgtcggaaaagtgggaccgccattgggagtggctgcagcagagtgagtgggggcccaggcacacgtggttcaagggcacagggacatgctccagcctgtccagccaaggcccagagggtgacaggagcatgctttgcaccctacccatgggtctccagaagcaaacataagggcctggaagggtggacaagggggctgccttgccattgaatacccacccttgaaaaaaaagtcttaaagtcctgggtggggggacattaaggaaggaggaatgggagtcagaaaggaggaatgatgcccactgaaatagccccagcctctgccattcctgcagagcccaggatggtcagggctcgggtatggaaagccggaggggtgtggaaggccaggggaacagccattgcccccaggaagggccccagatgccccagaatccttaccctgcatgcccctcctcagtgctggaggtgcaccagtttgcccaggaggcggtggtggctgatgcctggctgacagcccaggagccgctcctgcag

SEQ ID NO: 91776 - DNA, 1068 bp, Homo sapiens
cttggcagagagcaaagcatcgcacaggcctggacaccttgctttttcaaggaactggtcaattgagtgatgaggcagaaaaacccaggccgcctccccggacctcccccttaccccgccccggccccacgcctccaacctaaccctggtccctccatcctcagatcgagaaaatcaaagcggaacagagcaagcagccgcctaccccactgctggggcgcaagttctttggggaccccacggaactggcggccaaggcggcgcccctgctgcggccagggggctatgaaaggggcttggagcccctggcccgccgagcctcggacacgctctcggccgaggtgcggactcgggtggggtatgtgcgccaggagctcaagcccgagcgcctccagccgcgcattgaccggctgccggagatcccggggagggtggagcccgcggccctgccggccgcaccagaggacgcggcggagacccccgcgacccccgcggcggcggagcaggtgcggccacgaccggagcgccaggagtcagctgatcgcgcggaggagctgcccaggaggcggcggcctgagcggcaagagtcagtcgatcaatccgaggaggctgcgcggaggcggcggccggagcggcaggagtcagcggagcacgaggcggcacacagccttaccctgggccgctatgagcagatggagcggcggcgcgagcggcgtgagcggcgcttggagcggcaggagtccagcgaacaggagatgcccatcagaggagacctggtcaaggggtgaggtgcccgccttatgaccagaaagtgaggggaggggaaagcggagagctcctagaacccctcaggcccagtgaaagggcttcagggctcagaacttcccaaagaaggagatatcgccgcggtacccattttgcagaggtgtaaactgaagctgcaagataatcgatgtgcccattgttacacagaaaggggagcccttcctgttgaaagaaaaggcagactgcctttctccagacgtaggttctcggcccctgggttgtgactcctgcatcaagtctccc

SEQ ID NO: 91777 - DNA, 1053 bp, Homo sapiens
aacctaacctcttagcaaccaacccaggagttgatcagctaaatagcaaagagggaggcatctagttgagaaggtttcaatggcttgtcgtggagcttggagaggtcactcaaccaatgagtggggtgggtctacccttgaagtttcaaattgggggagggtccgaaaacgggcagagcccaaactaatgagggtaggggttgggaagggggagtcatctcttacaggtttccaaatgagggtctagccatgatgtgcctgctcttggggagtccagctcctgcttgtccaccctctttttgtccaactgagaggcagaatctggggacaagtggagccaaaaaggggtatcaccggccagtaatggagtgagtcccaagatatgaagtgggcaggacagattcagattttgctagtggaatctgtaggtggtctttcttcctcgtacctaatgccaaggtaggaataaacaagggcacctagtatgttttgctttgggagggattcctccaggatcgaggctttggatgactggagagacaggaattctttattccagacagtagaccaatagactttccttgagaaagctccatgagtggggaggattgagtggagcaaaggcttatggaggagacagcttaagacttaccttcaggaaattcagtatgggaggggataaggaagggaaatctcagcctgggcaaaggcttgatactgagagacttaaatgctcccctcagggcagcaacagccttaaggaagagcattttaggtccaactagggcgcaactagggcgcaaaggtccagaggtaggaaggctcagacatattcagaccttgaggatgttaatgaagagttattaggcagagtgctgcggctctgccttgagccccatcttgtcgctccaggtcgtgggtgagcctgtactgtgtgcttagtaagggggaactgggcttctacaaggactccaagggcccggcatccgggagcacacacggtggggaaccgctgctcagcctgcacaaggccaccagcgaggtggctagtga

SEQ ID NO: 91778 - DNA, 1073 bp, Homo sapiens
gacatgaaagtgaataaacagcctgagggctggctgggctcacgcctgtaatcccagcactttgggagactgaggcagaaggattgcctgagcccaggagttcaagaccagcctggccaacatagtgagaccccgcctctaccaaatttttaaaaaacgtagcccgatgtggtgcacgcctgtcgtctcagctacttaggaggctcagatgggaggatcacttcagcttaggaggtcgaggctgcagagccataatcacgctactgcattccagcctgggcaatagagcgagatcctgccgacttagtgggtgggaccgtacctctgatggctgaacaactggactgggccaatgctgatgccagaattggggcggggccacatgacagctaagggcggagcgacttagaaatgaatgataccttgagggagtagggaccccaggagaacctgccaggaatggtggcgcccctgagtgtcctcgttctcctcccagtcctgtgtcccttgatctgtcacaatggcggtgtgtgcgtgaagcctgaccgctgcctctgtcccccggacttcgctggcaagttctgccagttgcactcctcgggcgcccggcccccggccccggctgtaccaggcctcacccgctccgtgtacactatgccactggccaaccaccgcgacgacgagcacggtgaggaaagggtggccagagtcccctccgacccctgtcaagcatttcactttgcccctgaccctcatatttcccgccttcccgagcacctttgcccagctcgccctccccgccttgtctagccccaccccgtaagaacccgtgtagacatccgtttgcccggccgtgcctcccctaggcgtggcatctatggtgagcgtccacgtggagcacccgcaggaggcgtcggtggtggtgcaccaggtggagcgtgtgtctggcccttgggaggaggcggacgctgaggcggtggcgcgggcggaagcggcggcgcgggcggaggcggcagcgccctacacggtgttggcacagagcgcgccgcgggaggacggctactcagatgcct

SEQ ID NO: 91779 - DNA, 2024 bp, Homo sapiens
gagcatcctggggcctttaattccctcggacccccccagactcccgggttcctctgtcagccttagagccccctcagaacttctcagattcttatacagcttcagcatccctggaccacctttagacctttcaagccttttggatccagatccctccagactcccagacttttttttttggagatggagtctcgctctgtcgcccaggctggagtgcagtggcgcgatctcggctcactgcaatctctgcctcctggtttcaagtgattctcctgcctcggcctcccgagtagctagaactacaggcgggcaccaccatgcccggctaaatttttttgtatttttggtagagacagggtttcgccacgttggccaggctggcctcaaacccctggcttcaagtgatctgcccacctcagcctcccaaagtgctgggattacaggcgtaagccactgcgcccagctctcccagactttctggaatccttctcagacccccaaatcctctcgtccccctcaacgactcgactatcttcagatcttgagatccttctcagagtctctcattcaccactgacaccccattgaggctccaagcccttctcagacctccagagcccactgctctccttcagaccctctcagacctctcccaaatgcccctcgcacccaccaaccccccacccccaaccccagaaccattcccctctctcccaaatccctcagtgctacagcattcccagccccgccctgaaggatttcctccctgctcctcgcagcccaacacgtgatctcagaggccaaagggccctgcttccgcgtgctccgcgacggcggctgttcgctgcccattctgcggaacatcactaaacagatctgctgctgcagccgcgtaggcaaggcctggggccggggctgccagctctgcccacccttcggctcaggtgagcccctgcggcagtgcctagccctacgcgcaacacatgtggcgctcattctacgccccaccctccaaccctgagttcactgccccaacctgactggctgggctccagccttggccacgcagcagcctctgagacccgcaggcctcagactggacagcatccatggctccacctccatctgtagccacagccacccctccattcgtagccacagctaccccggagctcccaagttagtttttgtctcctgagcgtcaacgcccagtcccaccctgtccctgaactttgaccaagtccttggcttctgagacactgccttcagcttagccccaccccaggcatgcccctccctgagacacctccctggcattctatcttctgcttaaaactaaatctcacaagggagctatttcctagcctccaactctgtccctgtagacccaaccggaccctgccctcaaccctgttcctaccaccatcccaaatgtgggaaaacgctcttggccccacctgtagcctctaagacattctactctttggccaggacaccaccccatcccagcctccagctcaaacccctgacactctccagccaagccctgcccctagccaaggccagagtctgggctggccatcgttttcttcccgctctcttgtcctctctctgtctctcttacctattcccagagggtttccgggagatctgcccggctggtcctggttaccactactcggcctccgacctccgctacaacaccagacccctgggccaggagccaccccgagtgtcactcagccagcctcgtaccctgccagccacctctcggccatctgcaggtgagctggctctggcagaagtgggtgccatcttcaaggggctgccccagccccatagtgaaaggaggcaagagaggatttgggctccactcgttgataccccttctttatcaggctttctgcccacccatcgcctggagccccggcctgaaccccggcccgatccccggcccggccctgagcttcccttgcccagcatccctgcctggactggtcctgagattcctgaatcaggtttgc

SEQ ID NO: 91780 - DNA, 1078 bp, Homo sapiens
atgtgactcctgagacccaacttgacagtaacatttgaccctaaccatcacccttgatgatagtccctgcccataccctgatagcaattgtgaccctcatgactctggccctgaatgtgacctataactcctgaatttgactgtgacatttgaccctaatcataaccactaaccatagcactgaccataaccttgactgtgtgactcttggtcctatctctttcacagcccctgcctcttctcagaatcccttctctggaacctggttgggttcataatccctgaccctggcccctgacttgaggcagaattctggaccctgactataacttctgatcctaactggattcagattccagtcactaactctgacccatggctcagccgaatcccatccaatgatcctagtttataatacttgactggtcccttgccctagttgatttctgatccctgtctgatccctctcctgactccaaaatcctggcacaggtagttcctagaaacctagacccacaggacttgcaaccatggtccccggaacccgagaaccttggtcagccctacccacctctgccatagagccctcccccagcctccaactcatgagacttcccaccacctcccccagacaccctactccaaggggattggtcgggtgtgtcccgagactggaccctttctgaacacccccaccccccacagatgtggacgaatgcagttcgggtgcccctccctgtggtccccacggccactgcactaacaccgaaggctccttccgctgcagctgcgcgccaggctaccgggcgccgtcgggtcggcccgggccctgcgcaggtgagcagcatagggacccgccagagagtctgggagtagggcctgggttccagggcaaagccggctggaaaggtggaggcgggaccaaggcgctgtgggaggagcttagaaacctggcattggtgggggcggggttactgcgatgtgggcggagcttgtctgggaggccgggtcccgtgactccgcccaatctcccgcgtaccctagacgtgaacgagtgcctggagggcgatttctgctt

SEQ ID NO: 91781 - DNA, 1418 bp, Homo sapiens
cgacccggaccccgcggagcctcttgcctcggttcgtacccgggctgatcctggccccggaaagggtgggcttagggcaggaaaaggcgggacggggagaagagggcgaaaaggggaaaacgagtttttagccggggtattccagcaggatcagggggcagctggtgggagtctcgaggcagtgagggggggcggggcgtggagatgaaagggccgagtctgggtatttggaccgtgattgtaaagaagctgttctaaacccgtcggggggcggtgtttgcagggagggaagtagcgtgaggcaggttggggaaggcgtgagaggcctaggagagccgaggggcggtggaggggtgtggcctagaatgttaggcggagcgggaggtgggccgggccttcggacgccctgtcccgcagacgttgacgagtgcagcgaggaggacctttgccagagcggcatctgtaccaacaccgacggctccttcgagtgcatctgtcctccgggacaccgcgctggcccggacctcgcctcctgcctcggtgagaggccccgccccggcctgatccctcctcccttcgactccccgactcgccgattggcctcccacctctgtctttcctcctccgcttctcccctccccttacctctttcccccgcctcctctcctagcctccccaactctcctctaccccaatcttctcctgccctctcctctgcttccccggcctcccccttctgactctcctctcccctctttgtatcccccatcttgcctccctgcttcccacatccgaccacccgacctctctcctcagacgtggacgaatgtcgcgagcgaggcccagccctgtgcgggtcgcagcgctgtgagaactctcccggctcctaccgctgtgtccgggactgcgatcctgggtaccacgcgggccccgagggcacctgtgacggtgagcctgcccccacccgccttcgctagcgcttgcaacgcggtgctggaggctgctcccttggggactgaggaggggcgccctgcttcccagacttaggcggagggaaagaacaccctctcaccgtatctctgtagtggaaataagccgccaccgtgtccatgtattttcttgtgtcaggatcacggccaagcctcccttccagccgcagtccattccccctctgcagctgaagcccggtccacattttaggctatgcccccagtaagacaccgccccaaaactgttaggccccgccccttccaatcggcctctggattaaaaccccctcttcaggccccttctcttcctaacagaagtttggacgtgccctttccgcgccctccaccagtcctacttccagccttccctccaaagaggcccaatcccggtggccctaggccccattctttcccaatgagaaattccca

SEQ ID NO: 91782 - DNA, 1028 bp, Homo sapiens
caaaaattagctgggcatggtggcatgcgcctgtagtcccagctactcaggagactgaggcaggatactcgcttgaacccgggaggcggaggtggcagttgagccgagatcgcgccactgcactgcagcctcggcgacagagtgagattgtctcaaaaaaaaaatttatacaacaaaaaactggggggcaccttactatatgttgggcactggagatgtagcaaggaacaaaatagacacaaatccctgctattgtagagtttgtattctagagaggcgacagttggcataccaataaatacatacgtataacatcaggtttaggaaggaaaacaaagcaagacaaatgggacagagatgacagagcagtggatggaggagtgctaggagggcttgacctagacaccagacagaagcgagggaggcagccatgcagagagctgaggggagactgttcctggcagagggaagagccagtgcaaaggctctgaggcaggaccatgcttttgagaaatggcagtgaggacttgagagttatcaactatgctaggtgtggtggcacaagcttgtaatcccagctactcaggaggctaaggtgggagaactgcctgaacccgggaggttgaagctccagtgagccatgatcctgtcactacactccagcctgagcaacagagcaagaccccatttaaaaaaaagaaaaaaaagctggatggggtggctcatgcctataatcccagcactttggaaggctgaggcagctagattgcctgaggtcagaagttcatcaccagcctggccaatatgatgaaaccccatctctactaaagaaaaaaaaaaaagatagtggctgggcgtggtggctcacacctgtaatcctaggacttgaggaggccgaggtggacagatcgcttgaggtcaggagttcgagaccattctggtcaacatggtgaaatctcatctctactaaaaatacaaaaattagctaggcatgatggtgcatgcctgtagtcccagctgctctagaa

SEQ ID NO: 91783 - DNA, 1069 bp, Homo sapiens
ttttcaggcagattatttttcacaatgatgaaggtggccctagaacctctgggctaacatctccagtgggccacccgagagctaaaaagggaggtttttttttcaatatttctagcaaaagcgccaggcctggctttgattgacccagcatgatcactgcctatgtctgaaccagagaaatgccgtcatctgtttggtcattcctggaacttgtgcccacctctcagagtagatatagccctactcaaagaacaggattgaaaatagaggagcacagggttcccaagggaaattcaaggtttctcactagaagaaaaacagatgatgggatctgggccattaaatatacacattatatttgaaagctgagactttcggacctttggaatcatagaagcttataaccactgagtccctctcccctgttgtctcctgcttacagatgtgaacgagtgtgaaacactacagggtgtatgtggagctgccctgtgtgaaaatgtcgaaggctccttcctctgtgtctgccccaacagcccggaagagtttgaccccatgactggacgctgtgttcccccacgaacttctgctggtgagactgatgtgtctatttaactgatggcggctggccccatgggaaaatcacgtggtctaatcattcctgatgtggacagctaccatcagctaaatactgttgttttaaacatcaacaaaagacacataagttaacatgggtagtgagactgtgtcaggagaattagaccctggtcctgactctaccagattctttcattcaacaaatgttcacagggtgtgcactgtgttcaggccatcttctgggcactgagaacatagtagtgaccagaagggatcactgtctgtcctcaaggggctcacaagccaatggggcagacagagatatcaccagatagtgacaacccagagaaatcaacaagactgtgacggggaaagcccaggggggttttggaggaggcgcctggcccagcatgagaagaggattagggagttcttcctgtaggagacgacatctgaactgagagctgtgggatga

SEQ ID NO: 91784 - DNA, 1477 bp, Homo sapiens
tccacctacagatgacaatctgggagtgtgctggcaggaagtgggggctgacctcgtgtgcagccaccctcggctggaccgtcaggccacctacacagagtgctgctgcctgtatggagaggcctggggcatggactgcgccctctgccctgcgcaggactcaggtgctggcactggcctaggctgaactcagaggccttgccccatgggctccaaatctaggccctcagatccccagtcgcagaacccccagactctatccaaactctgtcccctagaccaacccctatgtcgcagcccatcccaaaatcttggtccccgattcacactccaaagacttccaagtctcagccacagacatcccaaggcctgacccagcagatcccatagtaccagacccacaggcccctgaggtctggtctctcatatgctcagctcctggtctctagaaccaccagacacagcctatgagatgtcctcccctaaatcctgggcccttagacctgaaatgccagttgctcagacctcaccatcctggccccagaccccctggtcacagccccacagacctccaagtcccattgccttagacaccctccaagtcccattgccttacacaccacatccgggtgcctaagaccccaacacacagccccagagattcccaagtcttggtttctacaacctctgagtccctcagtcctcagcccttaggaacccagttccaaagccccagtcctgggtcctcagacctccaggtcccagtgcctcagactgtctcccatgcatcctgccccctcaggtccccagcagcaatccctgggattccccagtcctggtccacagaacacccccatctaatttcttcaggtccctagtcctagctcccatgggtcgctccaattccagcctctcagaccctgattcttagcaggcttcattacccttgatctcagcacgtccgaatcccagtctcagccttcagattctcagcgctggctccagaaaccccggggccacccaggaccctccccatccagtcctctgcctcctctcccaaggggggtatgtgagtggtgggtgtgggggccagcaggggctgattgtttgccttggctcctgttcccagatgacttcgaggccctgtgcaatgtgctacgcccccccgcatatagccccccgcgaccaggtggctttggactcccctacgagtacggcccagacttaggtccaccttaccagggcctcccatatgggcctgagttgtacccaccacctgcgctaccctacgacccctacccaccgccacctgggcccttcgcccgccgggaggctccttatggggcaccccgcttcgacatgccagactttgaggacgatggtggcccctatggcgaatctgaggctcctgcgccacctggcccgggcacccgctggccctatcggtcccgggacacccgccgctccttcccagagc

SEQ ID NO: 91785 - DNA, 1057 bp, Homo sapiens
ttattattttcttaacaaaatcctagtgcggtatgggccaccatatccatcttacagaacacgaaactgaagcacagtgaggttaagccacctggccgggctcacacagttagcagatggcagaggccagattggactccaaactgctcagcatctgtgctcctctgttccaagaacttaaggggccaaggaggcgagcttctggggccccagccttcagcagcgatcgttgtctcccctccgcagacatcaacgagtgtgatgaggccgaggctgcctccccgctgtgcgtcaacgcgcgttgcctcaacacggatggctccttccgctgcatctgccgcccgggattcgcacccacgcaccagccgcaccactgtgcgcccgcacggccccgggcctgagccctggcacccgctggccgcccacccgcgcccgccactcggggcccctgccgcgcatcctgcagcccgcttatgcgtatgtgcacggggccgcccgcctggacctggagaagggacctacggacgcctggaagctgcgacgccctgcactgctcccgcctccaccagcgcctcccactgatgtcgtggtcccgggcctggcccaggggcccctttacatgccctctcccttttataaaattttccattaaaaaccacctattttctatcttttgcctcctcctgtctatttctccaagtctaccccagtttgtgctttgagtcactaaatgacattcccttcccttctgacccctagtttcgtctgtctctctgcctctcttggtctctgtcttccttctctctctgtctctgtcgttctatctcatctctgtctctttctgatttgttttctctgcctaacctctacatcctgtcttttcatttctgtttctgcatgcgtctttctcttttcccttctctttgtttggttctttcatctcgagagcaatcttgcctctggattttttttttttttttttttttttttttgagatggagtctcactctgtcacccaggctggagtgcactggcgccatctccatccactgcaacc

SEQ ID NO: 91786 - DNA, 1006 bp, Homo sapiens
ttccccaccagcagccagtgaacccatgtggtctggcccactctcttgctcctggatgccaaatctgcatcgcctacccgttatgtcctcggggattgatgtgggagggtgttgagctgtatccaggaggctgggctgctccaaaaggtaaccggtgagcagatgccaacccttgttgagagtgacgcacgctccctccatgcctgcagcattcctgggccatcacacaccctcacatttgctgtccttaacgcagcctgacatcaggcacactccccaggctgtcacacgtgctcctgagaggtggcaggagctccaggctttatttggaagcctcacactcctgtggccagctgcacgcttatttggatgtgacttgccacacagaaatttcacatactcacatagacattgcacccccccacacacatgtcacacatgctcagaagtcacaaactcacagtcaggtatactctcaagtcacacacactccaaaatcacagagtcagaagtcacacatggccagacgtggtggctcacacctgtaatcccagcactttgggaggctgaggcaggaggatcacttgagctcaggagtttgagaccagcctgggcaccacagcaagatctcatctccacaaaaaaattttaaaaattaacctttattgttaaccaggtgcagtggcatgcacctgtagtcccagctactcaggaagattgcttgagcctgggaggcggaggttgcagtgaactaagattgtgccactacactccagcctgggcaacagagcgagaccctgtgtcaaaaataaataaataaatatttttaaaaaagaaacacactcagatttacacaccttcacagaccacacacccagatttatgcaaactccaaagccacatgtgcagatccatgcacacctgcaaacacactcatacatcacacggcagatgcactcacacctgggagtcacgcatcaggacgccacacacccggaccccagtc

SEQ ID NO: 91787 - DNA, 1029 bp, Homo sapiens
ctttcccctgggaaactcgaggcaacagtcatcccacctgcagatgagggagctggggctcaggtaccctaactcccttcagtcattgtggggactggcccaggctctttctagctgctttagggtaggcaaagcagctttgcatggcctgtggccagtcctcacgcacagagatgcaaatactagctctcgggaggaccacggtgccgggttagggcccaggggtatagctagactggaatcactactacgtgctgtgcttcagtttccccatctgcatgtctagaccaggaatggggtctccaccttgtagagttgagatgcagaataaatgattgcatacacatcatgtgcttaaaatattgtctactgcatggcagatgctcagtggacactgagaatgagtgattactgtgctgtttcatgtccccccccccattccctccaacccaagtacctgggtcacgtggaggtagaggagtcccggggaatgcacgtgtgtgaagatgcggtgaagaagctgaaggcggtgagtgagggggctgccatgagggagggggcaaggtcagacagggagaggcaccctgacccggctcctttgtccccttgcctccctccagatgggccgaaagtccgtgaagtctgtcctgtgggtgtcagccgatgggctccgagtggtggacgacaaaaccaaggtaggaggcctgtgggggtggacgccagggggcctgtctgctcaccctgctggaatcagggcggaggacaccttcccgcctcctctgcacatccctccctcagggaccttctagacgatgccgtgtgctccctctgtcgtcataactcaggaataaatgctgtgattatttgggaactggcataggctgtgggtgagagagactggagcagctgcctcagctccgatcccagcttagggaccctgggcatgagatttaacctctctgagtctcagttgtgtcatctgaaaaatgcagattataggccgggagtggtggctcacgcctgtaatcc

SEQ ID NO: 91788 - DNA, 1984 bp, Homo sapiens
ggcagaggttgctgtgagctgagatcatgccattgcactccagccttcattcgcaacaagagcaaaatttcgtctcaaaaaaaaaaaaaagagacacactcttgcacagtctgacaacacacacagacccacatttctacagacgacagccacactttcacagacagcacccgcgggcccaggctctcacagggagctacggttgtgtacaaacatgcacacagtctcacaaagaacacccagcactctctcaggcaacagtcacacccttacaaataaccctcatgaaaacactctcaaagacaacctcatgttcccacacaccctaacggatgcaccactgcacacagatacaccctctgtgcaatacccacacacccacactctaaggcaacagccacagtcacacaggctcaccgccaacagctgcactcttggacacagacagtcttgtagatccctcagatgcactctccgaggcaatgtcatcacagacaatagccacaccttcacacagagacatagctacatggataacagccatggacacaccctttgaaagacgacagcctcatctcaaacacagacacaccctcacaggcaacaggcactgagccacaagttctcatagacaacaacggcactctcggatatagacagcagacacacactcacaaccactctcagacatcgatgcccttcagcaacaaccttcagggcctcagactcacagacaacaaccacacttttggatgcatccctcacggacagcattcacagatgcacactatcctacaccattctcagacatgcgttcttccagacagccttcagaaacacactcacagacattacttgcctgctcagatatagagcccctcatagacagcgttccagaacataccattgcacacttgcttacacacacacacacacacacatccccctctgctgttggtgctcccagtcctgggactgtcaggatggctgatcagtgaagactgtcctagtggctggccacctccacacccactccacacacccacagccctgcctctgacagtcatcagtgcaaggccccagaagccttgcctggggactagacacagttgtcacagaatggctgtgtctcagagttccagagacaagccaccatcccccataccccatgcacctgactcctgcacccctgacccatgcaattcccaactcctctgctgccctctgatcaccccactgcctgactctcatacccctaaaacccctgaccgtgcggcccctgacttctatgccctctagcccccatgccctcctacgtctgatttcccaccctttgtgtcctcacggccctgggaatgaggaagcatccaccacatggacaagaagccctccaatgccctgaagcctgtgccccataccccccaccccagacctccagccccttagccccatggttctgaatccccagtgcccaactttcgcactcccctggcttctgttggctcctttcctcactgtcccctgacttgagctgctgatcccatgtgcgctgccaactgaccctgtaaccccgcttccagttatcttgttatctgaccccatgctccctgagcactggtccctccccgttgagctccataccttctgacccccacccttgacccacatcactgtcctgtgtcaccagacggggcgggcaccatgaacaagttacggcagagcctgcggcggaggaagccagcctacgtgcccgaggcgtcgcgcccgcaccagtggcaggcagacgaggacgcggtgcggaagggcacgtgcagcttcccggtcagggtgagtgggcgcggcagggtgcggcggggcgagggggacgggggccgctgtgctgtgctgtgcgggtgcgcggcctggctgggacaccagcccaagtcgtttgaagttggtgttaaaaagcgtgaggccggcagtcctggctatcacggtgaaaccc

SEQ ID NO: 91789 - DNA, 1038 bp, Homo sapiens
tgaccagatttgagcacctatgactgagtatgtgtgaccacgtgacagtgtgtggccaaaaacagtgtgttggtgtgactggtctggttgaggctgcatgtggtctccgtgggaccaaatgtgtgtctgtccgtgtgcatctgtgaccagatgtcagtgtgcagcagtggagatacgtgtaacaagtgtatatagctgcgattgtgtcgtgtgggactgggtcagcaaatgggtgaactctgggtgtgattctatctgggtgggcctgtgacgtcagtatcttgggcgggtgcctgaggaaacatagctgtcactgggtgtggccacgcatgtgcggctctagtgggttgtctgggccccgttctttgtatgtggctgagaatgtggaagtgaccaaatttcagtgggtggtgtgaccaggtgtctgcggtgggaactgagtgggccaggacatgctgcatgtatgtggacaaatgtctgtagtagagactgtgtgtgtccgaacatgaatatgcggccagatgtttacagtggcagctttctgggtttgggactgtttctgtgtatctgcgatctgaggtgtgtagctgtgattgcgtctatgtgtaaccaagtgtgtaaagctgtggccagatgctagggacacctgtagatatgagttggctgcgtatgtgtgtagccctgcacatgcatctggagggcaaggccactctcacagcatccccttgggcagtgaggctctcctgaggccagcacatccccaacatatgccccccaaacatacctactccttcctgggcccttggaaccaggtggctgatctccctggtaacagttgctaggacaactaggactctcatcagggagcccaagatggagggggctggccgaagtccaaagtcggggtgaagtatcagactgagccccaacccagacaaacttctcaccttctcctcccctactcgggcagggcggaccccggaggcctgagcggcacctgcccccagccccctgtggggccccggggcccccagaaac

SEQ ID NO: 91790 - DNA, 1593 bp, Homo sapiens
gtacggtctcgaggatggggtcactgggtacagcgttcccaccacgccaaggcctagggggactccaagcacagcctgcccccaggtctcagaggcaccctgggcacagcatccccccaatccttgggcggagtcccaggcacagccacttctcaaaacaaggtccctgtgcctgggactccaccccaccccagcctgaataaaataaggacaatttcaggcaacccccaatccctccaccccctggcttggtcatgggtcccagggcacaggatccctaggccaccccctttgtccccagggctgcccagctgtccaagagtggccccacccgcagacaatgcaccgcttccccctcctggacctggccctcaggctccaggatacaggctgggctgggggcggctccccagggaccgggtgcagccctgtctgtctgcagtgtctgcggtgacggtgacggcggctttgtgtgtggtacctggggggaaggggggaagcaagcgatggggaggtggctaggagtgtgccctgtgtttgtgtgactgtggctgtgtatgtgtgtgtgtgtgtgcacgcgtacgctgcagctggtgactgaggaatcctgtgtcgtgtgtgtgtgcttgtggtggtgtctatgattgtgtctgtgaccctagtatctgtgtgactgtgtatgtgtgtgtgacagctgctcactgtgcagaatcctgtactttttagtctgtctgtgtttggaggtgtgcatggttgtgactgtggttgtctgtgattgtgtcttttgtgaccctgtgtttgtatgcctcggtaactataactgggtatgtgacagtatgtgttgagtctgggggtgggcatgcgtgtgactgacaggacgtgggtggagttgtgactgtgtgtgagtggagttgtctatggctccatgtgcatgtgtgaccctcccagtgactgacaatgtttatagttgtgtctctacctgattttatatacgtgagtgacacacacctgtctgtgcaactctgcctgtgtgactgccattgtgtctgaagtcacattgtatctgtgtgactggggttgtgtgacagtattgtgtatgacagtggttgcgtatgcagaaccatgtctgagtgtgtgactgaggttgtattaatataaatgactgtatctagcagtgtgtgtgataacgagtgattgtgtgtatttctagccttgcatgtgtgatttgggttatgtatttgacttggtgtctgaaaccctggctatttagagggattatttgtgtgtgactaaagctgtggatgtgtctccgtgctggtgccaggaaattatgtttgtaggggtgtgtatatgattatggcttccatattattgtgtttgacctgcatgtctgaccctgggtgactatagatgtctgtgtctatgtcatcatctgtgagagtgtggggtctgtagctgtgtgcctgtttttgtctctgtgtgtatgtgctggactacctgtgttagaatgtgtgatttggtgatgagattggcccctgactgtgcacatggctccgtcaggacctgtgtcttctgtgtaaacccagctataaa

SEQ ID NO: 91791 - DNA, 1050 bp, Homo sapiens
tgggtcacaggcctagagtaggagctgtgagggacagcgcgggagacaggagagagagggttggcaggagaaggcatccaccagtgggcgctcggggcccttccctggctgacacacctcccccacaggcctgtttgccgagcagagcctgcaggccttgcagcaggagctggcttgggagtgtgactaccgtcgtgaggcggcttgtgcccagaatttcaggtgagctgagtgccctgagcttccctccttccctccctcccaggctgggtgggaagtagctgccccctcagcttctggcagctggagctgtggggtagggcaaactctctctttctttcaatcattgttcatccatccttccactcatccatcacttcgcttaccccctttgtcctctgtgagcttgggcaggtcacttcccaagcggcagtcttctcctgtgtcagatgggccgcatatccactgtggtccgacacaggcacttaattaattacacaatgacacactcttacctctgctggactgacggagagcaaggagcccacagcactgggaggtagagagagtgggctccacagcatcccttctgcactgcaggttgtgggagaaggtggtagaagcattttgagaacaggttggcatcatcacataagcccttatattcaagaactctgcaagccaacgattgccctccctgctgaacactctagggacccttttgccagtatccatcatcagactgttctagaacgcttgtctgcaacagccccaaactggaaacaacccatatccatcaagtttatccagcagggtggacaaataagcaacggtatattcatctgtggaatattacgtagcagtgaaaatgcatgaactatggctacgtggaacaatgtggttatatcttggaagcatcctgatgtgtagcaattaatggcacctcagtggggtcctccacagtgtggctcacacatttattgacagcctaaaacgtgccaagctctgtagacagagagtgaaagctcagtagaaggcagtggttagagg

SEQ ID NO: 91792 - DNA, 1491 bp, Homo sapiens
tgcctatactcccagctactcaggaagccgaggcaggaggaataacttgaccctgggaggtcgaggctgcagtgagctttgattgcatcattgcattccatcctgggcaacagagcaagaaaaagagttggagatagagataccactttgagaaatttcctcagataaacctggttgcaaagtgccaccctttgctcctcacccttcaataactgagagagcgagcagggagcaggcaggcagaaggaccattcccacaaaccagatgaggaaactgaagcttggggaggggaagtcagtgactgaaccaggagccgccttcagccttaggacagccaggcccatattcccttcatcatccctggatacgaccactcccagccagacctcagggtagggggtgcttcagagctggctccctggtgactgagcacggctctgcttcaggttccgaggtgacctgcggtggatcctcttctgtgcagacctgccgtccctcatccaagaaggccctcagtatgtgccctgatgcgggaaccccagcccatctgctgcctttactctgcccttgctgggcttcttaaggactgatctggagaagaggagtggattgtccctgctgggaggaggagggaaggaaagggggaactttccactcaggcttctgagtgcctgcatagtaaacatagttgggacatgcgaggaatgaacgaatgagcctggtccatctctctaactccaccttggttcctcctcccaggaagctcaggtgacctctcccccgccttccacccccagccctccagccctgggctctcccctgaaggggagtcaggtctccctcgctggcctgggagaggggagggggactcctccagggcagcaaacctgttccccaactccagcttccaggtaagggggctgtgacataggattgacaggctgggcctctctgtccccagatgcgggctggtggccttgtggatggcaggtactctcctgtcgccccccagtggcgtccccctggagagactcatacgggtggccacggaaagaggctacacggcccagggagagatgttctcaggtgagctgggtgactgcatgctccatcatctcttcatgaggctgggaccagagaggctgggtgggatgctggcagccgtgtgtcagggtgtctcattccattctttgggcccttcccactgcccagtagagcagagaggttacaagatggacttgagctggctgcctaggttgcaaacccagctctgccacctcttcgctggggccatggacaagccactcacgctctttgtgcctcattttctgcatttgtaccaaggggtggaaggtcatggtgagggttggaagcatcgcccactgtgagccctcagcacggtgctgggcacatgcagcaagccccctctgtgtgctctcaccctgcagtggccgatatgggcaggctggcccaggaggtgctgggctgcc

SEQ ID NO: 91793 - DNA, 1066 bp, Homo sapiens
aaacaggctgactacttaggtcccccacctagatctcttccatggtggtgtgcctccagcaatgaagaaagctgtcctcacaagtgcccagtccagtccgggtgctttggctcatgcatgtaatcccagcactttgggaggccgaggcgggtggatcacctgaggtcaggagttggagacctgcctgaccaatatggtgaaaccgcatctctattaaaaatacaaaaattagccaggtgtggtggcatgcaactgtagtcccagctactcgggaggctgaggcgggagaatcgcttgaaccctggaggcagaggttgcagtgagccaaaattgcgccactgcactccagcctggaagacagagcaagactctgtctcaaaaaaaaaaaaaaaaaaaaaaaagagcaaatgcccagtctagtgagagagacagatccctccacctttccagacagtgacaacccagagtggtcagggctgtcatgacaaagcccagaggggtgtctgacccaggctggggagtcagggggagcttcttggagaaggggaaccctgagtgctgttgagcaagtcgtgcaaatgctgtgtgatgagagtatacagcttgcgcaggggcctggagtgaaatgaggacatgttctattcaaggaactgcaaatatgtccttaacttgccgggggaagtggcaaacatggggctgtgaaagcggcagagccagcccacgcaggacagagcgggtcgtgcaaagggactgagactttcctgagggcacgggggagccctggagaggctctgtgcagaaaaggaggctgcctgtggaagtggtacttaggagccttgaggaaactgggacatccagggacccaggtgggaggggaaaggagagtgccagacctaggctggggccctgaggctgaggtttagtgattgcctggctgaagaaaagagggagaagcgacttgccaggactcacattgaaactccaagctttccagacactttttttttttaatggagtttccctctttcatccaggctggagtgaactggcgcccaccaccacgccc

SEQ ID NO: 91794 - DNA, 1024 bp, Homo sapiens
tcgtgaccttcactgattggtccgtagacccgggcgccacggaaggaggtgggctttcagggagtggggcggggtttttctacctaggcgggaacccaaatatcgttttgattggcaacagctgagcccagaaacgagacttgctctgattggtcaagctactgcgtttccgcgcggcgattggctggcagaaaggcagaggcggggccaggagagaaagctttgtggtttggtctcagggaagtagcaggcgccggttgagagaactacggccctgtcggaaggtaacctccggtgcaaacgaccatcggcggcaggcgagcggtacgcttggcgtccgggccttcctgggcccgtctgaggaaacttgctgctcgaggccaggctgcctaggacctgtcccttttttctatactggctcccacatccgggttttttctccgggacggcccttcggatgcttgggccaatgggaatcgccatttagggtgctccgcccaccgggtcgcgtagagcatcctggaagtcgtagtaaatctctcgagagttctctccgcacgcgggctggagaagcgggtcctacgcacgctttgttgtcgcgctttgcctccgtccttgcccctactcccgccttacctgacttccttttcggaggaagatccttgagcagccgacgttgggacaaaggatttggagaaacccagggctaaagtcacgtttttcctcctttaagacttacctcaacacttcactccatggcagttcccgagacccgccctaaccacactatttatatcaacaacctcaatgagaagatcaagaaggatggtgagttctcgggatagtccggagtccagactgtcccgcacgggctggcccctcttccgtcccctgcacccgcctctctttctaagtgtttgtccagccaaacttcgagttaactccttggcctttacacaaactacttcctgtcttcaacactccattagttcatcttacactctgccctttaacgtggtcactg

SEQ ID NO: 91795 - DNA, 1024 bp, Homo sapiens
ctcagcctcccaaagtgttgggcttacaggcctgaaccaccacgcccggccaaaaattgggttcctaagcagaattctatacgggtggcctcaaccactttacttgctatgtgaccctgggcaagtcacatcacccctgtctcagtttctttttcttttctttcttttttttttgagacggagtttcgctcttgttgcccaggctgtagttcaatggcgcaatctcggctcactgcaacctccgtctcctgggttcaagcaattctcctgcctcagcctcccgagtagctgggattataggcatgcgccaccatgcccggctaattttgtattttcagtagagaaagggtttctccatgtcggtcaggctggtctcgaactcccgacctcaggtgatccgcccgcctcggcctcccaaagtgctgggattgattacaggggtgagccaccgcgcccggccccagtttcttagttgacgaatgggaataacaatagccttcttcctacaagattgttgtgagaattaaatgttatcaagatttatatgaaagcacacagaccagcccatgatacagagcgttagccaccattatggtacatgttcattgtgggctgatcactgaaaaagccggtgaccaagaaagccccagtccttgccctcacggagttcaaaggccactgggaggagagagagccccacgacagctcagaggaatcagggcttgatgggagatggtctcagcgtacggcaagtcagcggcagccacgtgaagggacaaggcaaggcttcctggaggaagggtcctgtgacctcaaaccttgtaagatgagcagcagtgaccacgttaaagggcagagtgtaagatgaactaatggagtgttgaagacaggaagtagtttgtgtaaaggccaaggagttaactcgaagtttggctggacaaacacttagaaagagaggcgggtgcaggggacggaagaggggccagcccgtgcgggacagtctggactccggactatcccgaga

SEQ ID NO: 91796 - DNA, 1776 bp, Homo sapiens
ggattacaggcacgtgccaccatacctggctgatttttttatttttagtagagacggggtttcgccatgttgcccaggctggtctcaaactcctgagctcaagtgatctgcctgcctcagcctcccaaagtgctaggattacaggcgtgagctactgtgccacactaagaatctttaacataccttcccctactgaataagcaccatgaaagaggggtttttgtctattttgttcattgctttattcccagagccttgaatggcgcctggcatctggcaggttctccttaaacagctaagtgagtgagattgaacctggaagactgaagtattcttgtgtgacaggaaatccccctgcactgcactcctctcctagcattgtctcctcggtcctttggcctgatgtttattgctgttccagcttcccttaaaaataccaacagcctttctactgaacacttgcttactgtgtgtcaggtactgttccaagcactttaactcatttagtcctcacaacagtcctttgaagtgggaagtatcataatccccatttttcagacaaggaagttaaggccaagatatttctgtgtttctcagtaagctcctgataaggtctgaatttttttttgtttgtttgttttttgttttttgttttttgctctgttgcctgggctggagtgcagtggtgccatctcagctgactgcaaccttcgcctcctgggttcaagcgattcttctgcctcagcctcttgagtagctgggactacaggtgcgcaccaccatgcccagctaatttttgtatttttggtagaaatggggtttcctggccaggcgcagtggctcatgcctgtaatcccagcactttcggaggccgaggtgggtggatcacctgaggtcaggagttcgagaccagcctggccaacatggtgaaaccctgtctctactaaaagcacaaaaattagccaggcgtggtggtgggcgcctgtaatcccagctagtagggaggctgaggcagaattgcttgaacccgggaggcagaggttgcagtcagctgagatctcatcactgcactctagcctgggtgacagagcaagacaatgtctcaaaaaaaaaaaaaaaagaaaagaaacaaagaaatggggttttgccatgttggccaagctggtctccacctcctggcctcaagtgatctgctcgctttagcctcccaaagggctgggattacaggcatgagccgcagcacctggcccctgataaaggtccaattttgaatcttggcaattgggctctgaatccacgctcttaacccgttctgctctctgtttggtagcgtatccagtatgccaagaccgactcagatatcattgccaagatgaaaggcaccttcgtggagcgggaccgcaagcgggagaagaggaagcccaagagccaggagaccccggccaccaagaaggctgtgcaaggcgggggagccacccccgtggtgggggctgtccaggggcctgtcccggtaagccaggtcccggagaccaaccctcccactgccagaccttcctcagccacatggactggctttgggacagggtggggagagttctccccttggggcttcagacccctcctttccatttctttatagagatgtgtttctctctctcttttggggggtattgagcacctagatgatgctatctcctttcgaaactcttgttccctccttgtgactgtttctcaaggtctttcttcatggctatgacttggtttcgctctctccgt

SEQ ID NO: 91797 - DNA, 1035 bp, Homo sapiens
ggatggaggaagtggcagtactatgggtctcccactggactcagggctcttgtgctcaccgactcccctatacccccgcagctttctgagaatccaccgaatcacatcttgttcctcaccaacctgccagaggagaccaacgagctcatgctgtccatgcttttcaatcagtaagtggggcctgtggctgggtggtccctggagggtgatggccaggaggcatctccatggaaacaggcctcagaactctgccagcagagctctgagccaagtagggctttgcagaagggacagcgaccaaagatgtgaaaggaggaggctgtggctgggcccacggcctgtgggggacatgggggtgaggctggaaaggtctccatggccagggcttgccggcttttttcagccttgtttgagggctgagggagtccaggctctgggcctcattttcccagcccctaaaatgggggcatgcaaggcaaggtatgtgtaaaactgcattgagatgtccttgaacattggctaagactggcagaagtcagcgtgctcagaaacagcaagtgtgggagatggggatgcgtgaaactcttgtgcctggcgtcagggtggaggccggtgcagccgatgtgtagaggggctgttcaccattgttgagtgaagtcgtgggtgtgggtgagttcatctggtggttctgtttcaggggctgtgagtggggcattcgtcagtgtttgtggtggggagttggagggtgtctgggagaagggatggctacatgcagcatctcaccatgctgcactgcgtggcacttagaagaacagaaagcgcaactttataatagtgccgagagaagattgtgagaacctgaaaaatacagaaaaacaataccacatgtgcagcctgtccacaaagctgtatattttgtgagaatgccgatggaaaaaaggatacctagtaaacatgaggatggctgcttaatggagaaagaagtatggaatgagaagagggaaattagagaaacagcatatcagaaaagtgagg

SEQ ID NO: 91798 - DNA, 2367 bp, Homo sapiens
tccacctgcagccccaggccagcttcctgccctagaccttgaccctcccattcatagttctccagcgatttattgagcgcctgctgtgtgccaggccctgctcaaggcactggggatatggcagggagtacaacagactcccatcctcatggtgctgacattctctttgggggagacaggtgataaacaagagatgtaagtcgactgggcgcagtggctcacacctgtaatcccagcactttggcagggtgagatgggaagatcactttgagaccaggctgggcaacaaagcaaccttatctccacaaaaagttttttaaaattagcgaggcgtggtggtgtgcacctggagtcccagctacttgggaggctgaggtgggaggatggcttgagtccaggtgttcgaggctgcagtgagctgtgaccatgcgccactgcattccagcctgggtgacagagcgagactcttaaaaaaaaaaaaaaaaaaaaaagtaaagtatgtagtagtgagggaggtaagaactatggggaaaaataaaacaggcacagatgagtggatagggtggaggagtgtacttttttttttttctttgagatggggtattgctctgttacccaggatggagtgctgtggcgtgatctcggctcactgaaacctccgcctcctgggttcaagtgattctcctgcctcagcctcccgagtagctgagattacaggcgactaccaccatgcctggctaattttttttaatttttatagagacagggtttctttttttttttttttttttttttgagatggagtcttgctctgttgcccaggctagagtgcagtggcacgatcttggttcactgcaacttctgcctcctgagttcaagttgcctcagcctcctgagtagctggaactacaggcgcccgccaccacgcctggctaatttttatgtatttagtagagatggggttttaccatattggccaggctggtctcgatctcttgaccttgtgatctgcccgcctcggcctctcaaagtgccgggattacagtgtgagccaccgcacctggccgacacagggtttcatcatgttggccaggctggtatcaaactcctgacctcaagtgatccacccactcttggcctactaaaatgttgagattacaggcgtgagccactgcgcccggccaagaatgtacttttttttttttctgagatggagtttcactcttgttgcccaggctggagtgcaatggcgcgatctcagctcaccgcaacctctgcctcctaggttcaagcaattctcctgcctcagtctcctgagtagctgggattacaggcatgtgccaccacacccagctaattttgtatttttagtagagacggggtttctccgtgttggtcaggctggtctggaactcccgacctcaggtgatctgcccgcctcagcctcccaaagtgctgggattacaggcgggagccaccacgcccagcctttttttttttttttttttttgagacagagtctcactctgtcgccatgctagagtgcagtggcacgatctcggctcactgcaacctctgcctcctgggttcaagcaattctcctgcctcagtctcccgagtagctgggactataggtgcgtgccaccatgcccagctaatttttgtatttttagtagagacatttcaccatgttggccaggttggtctcgatctcttgacctcgtgatccgcccacctcagcctcccaaagtgctgggattacaggcgtcagccaccgcacctggccaagagtgtacatttaaacaagatgaggagggaagcctcgctgagaagatgacatttgagtgaaggaagggagatagggaggcctgtggggatctggggcaagagcactgctggagagcacagcaacgcttctagcgaggggtatgcctggtgtcggtgagggtgaccaaagcagccagtgtggtcatcatggaggacctgtgtgtgttttgtgggtacagcatgagatggggtcaggggttggaggaagcagatcagttagggcctgtgggccctggggaggcctctggcttataccctgtgtgggagccatgggaggcttctgaacagaggaaggacaggatcagattcaggggtgcagagagttcctctggctgcataaagggaaggggctgtgagggacagaggaggtcaccaggacaccagagaggaagctgctgcaaagtccagggaagatggtggaggacaggacaagggggcgggaagaggagtggctgagaagggaatagggttcatgtcctccctagactctctgtcttccagtcttggcctctctcttttttttttttttggttcctgtct

SEQ ID NO: 91799 - DNA, 2367 bp, Homo sapiens; identical to SEQ ID NO: 91798

SEQ ID NO: 91800 - DNA, 2367 bp, Homo sapiens; identical to SEQ ID NO: 91798

SEQ ID NO: 91801 - DNA, 1096 bp, Homo sapiens
cttccgtctgggcgtgtgtccgcccccggccggcttcctcccgtcgggctcgggtcgaccccaccgtcccgctccgccccgggtcctccctcccagcttccctccggtctatttttctgtctctgggcccctcgttctctttgtttttggactccccagtttcctctgtcttttgacccccccgcccccaccctgactctccctggaacccccacgtttctcgttgtctttctggaacgccgaggcaggtccctcctattttccaaaccccctcctttcccactcctccacaccacccttttctactccagccctccttcttctgtctttggttaccgcgtcccacaacctgcaccacagtcctctgtcttagggtcatctacccagcccctggcctccagcctctccctatcactgcctcttatctgtcagcggactcccgcacctccagattctcagggtcctctccccgacttggcctcaggttttggggggcctctatagtcaagtctgtcctggtcgtcttccccactcctgcccataccatcccggctttcccctgcctgcctgtctctagtttctctcacatccctttttttttttcctttctctagccaccctgaagggtcccttcccaagcccttagggaccgcagaggacttggggaccagcaagcaacccccagggcacgagaagagctcttgctgtctgccctgcctcaccctgccccacgccaggcccggtggcccccagctgcatcaagtggaggcggaggaggaggcggaggagggtggcaccatgggcccgggcggtgccctccatgcccgggggatgaagacactgctgccatggacagcccgtgccagccgcagcccctaagtcaggctctccctcagttaccagggtcttcgtcagagcccttggagcctgagcctggccgggccaggatgggagtggagagttacctgccctgtcccctgctcccctcctaccactgtccaggagtgcctagtgaggcctcggcagggagtgggacccccagagccacagccacctctaccactgccagccctcttcgggacggttttggcgggca

SEQ ID NO: 91802 - DNA, 1654 bp, Homo sapiens
tggccctggactgcattgtgccctgggtccccactgtggcatctgcatcgaggacagtctcctgggggtggtactgggtggctgcctgttggcccaggtggagctcatccccatgtctcccacccttcactgtcccagtccctgccctccattccccctgtcctgtgtgtcacttcctccctacccatgtctgtctcttcctctgcctttatgtgtttgttcttagtccctttttctttttgctttagaacaatagttcttaatggtattttggagcctgggtctttttgagaatctgtcagaggccacagatcctctcttaagacaaatgctcatttgcttggagtttccgggcagttgtcaaggcctcatggcctccagctgcctgttcaggaacctggggtcaggagcccagcacaggacagtggtccatagggcctttccgggctgctgacaggatcattgtcttcatgggtggtgtgggggcctggccttgagtccaaggcttggtgtcctttggacaaggccctgtggggagtgcccactgctcaacacagtgatgcctggctggctgatggcacgggcagtgttgtgccctgcaggcgtgaggctgagctcctgatgtcctctgcctcctcctgcagatcccatcttgggttctgcttctgtgtggctttcctctcaggctggagctggctcagggaccagggctcccccggggccaaggcctgtttcctccccaccccagctggaacttgttctacttccctctccctcccgttacttgatagctgagccagagccggcccctccctgggcttggctcctgtgcgggcgggatcagtggcctccctggctcagcatcttcaccccaggttggctgtcgtcctcgtcagggggagaccagaagggctgagtggcccagatgggacactgctctgagcctcaatttgctgatccacggaatacgaaaaccaggttacatccccagtgagtctggcagtttggggaggggagagtaggagaagatctcttgtgttttggtgcctctggtgcccactttctatgtggttggggacagggccccagcgaggattggggaaggggcgtgtttggacttttttagccctaggtgaccttgattgtcctagggaagtaaggacaggccaggctggactgagaacataggggaggagccctcccctccccagtgagacagcaactccaggctttcccgcttttagatgggccccatctggactctctcctgtactccagagtaaggctgtggggtgctcaggtgggctgcagcagttgccgtggggacatggatcaccagtgtggctagagccagtagaaacgtgcttcttagtcgttctgagtggagctcctgtgtcatccttccttcccccaactccctggttggggacaggtgctccgttgacctgtaggtgggagagagttgactcccactggcagcaagggctaccagaggggaccccagggagagtccagcttgcttggtttgctccttgaagagcagcttggaggtgggacagtcacaggcttctgactggggtgtgtgtgtagtgggggtggggctcttggcaggcagattgtcaccaatagcctttaagtctttggtctcctggcc

SEQ ID NO: 91803 - DNA, 1654 bp, Homo sapiens; identical to SEQ ID NO: 91802

SEQ ID NO: 91804 - DNA, 1654 bp, Homo sapiens; identical to SEQ ID NO: 91802

SEQ ID NO: 91805 - DNA, 1031 bp, Homo sapiens
ctgcagaagtggctgggccatttcctttacctctcagccacctttctgccagctccctgatgacaaacatcccggggccctggccacagcattgtagggctgggtcaggggagtggcaactgtcaggcagaggaaagaaccctgtagacagagaaaccaagccctgcaatgagtcctgttagatctccaggagttggggctccagaacctcccaagttatgttctcagagagattaattgctaccgctgtaaacagcagtgtttattacccctgctgtacacatcaggcagttgaggcccattcaggtgttggaactggctagggttacccagcaaattatccttggagttggaattaggtctttctattcagactgtagcttttggctcctgttcggaggtctatgggacagataatttagtggggattctttgtagtccagggcagcagttcttaacattgctgcatggtagaattacctgggaagctttaccaatttcaggcccttccttaggccaggtacttcagaacctcagagctccccagggggctccactccacagccaagggtaagaattcctggtctagggctgtgaggccacctccttgcacacctgaaaatgtttaaattggtattattctactgaaatggctgaggtggggtttggggtatcttgaaacaaatcaaactctgttactaattgagccctagctgggtgccaggccccaggtatgtgtgttgggagggagtgggctcttgaggcccaggagctgaggtttctgatagacttggggatgggattttggctgaaaaagaaagtcttttggggcaggagcttggaacccttgacccaaggagtcatggggaagatggggcaaggaggggtgggaaaataggtaattcatggctgcttctctaagatgtgcctgcctagccccagtaaacctacctccctccatccctgccaggccatggtggcgtgttacccaggcaacgggctcgggtacgtaaggcacgttgacaatcccc

SEQ ID NO: 91806 - DNA, 1021 bp, Homo sapiens
gggtgagggtgagggtgagggtggcgctggggctagggctggggcgggggtggcgtgcgtccactccattttccactctcagcccagattctggcattctcctgtttctcttctcaacacacagcgggcagtgcgatctgccggctcttcctgggaaatggcacctcctcctctctagcggactgtgtggtgggaactcccctctttccgggaatggtgctgtctgcccagccccacccggccttgtaatgaacactttcccccttttcctgtctttagtagcttcctgcccatctccatggtgatgcagtctctgggttgtcattcactttgagagcccgaggggtgggagggagtgatgcaggcagacgctgcgcctcctagtgggctcccggggcaccgtgggaggcagcggctcctggccgtaccagctagcctcatcctttggcctgcccccaggtgcatggcggcctgctgcagatcttccctgagggccggcccgtggtagccaacatcgagccactctttgaccggttgctcattttctggtctgaccggcggaacccccacgaggtgaagccagcctatgccaccaggtatgacctgtacttctggagacgcacccaggtgctccccctgtgacaatgtcctgtcagagcctcagagtgactagggagcgacgaagtattgagagggggcctaggtgggagcagaaccgggtggctcaaaaggatggccgcctagtgtgtgtggatatggtagctggaattgcagaaaactaatgtccaaccaccctggtctccaggtacgccatcactgtctggtattttgatgccaaggagcgggcagcagccaaagacaagtatcagctaggtacctgcttccctcccttcagtccttcctattctgtgggccctcttgggcctgatgccaccccatccccctcatcagcctcttgttaaatcccaccactcatttttcttcatctctgcccaccttccttagcccactctcctggtac

SEQ ID NO: 91807 - DNA, 1022 bp, Homo sapiens
aatcccagcactttgggaggctgaagcaggtggatcacttgaggtcaggagtttgagaccagcctggccaacatggcgaaaccctgtctctactgaaaaatgcaaaaattagcgggaagtgtaggcacacgcctgtggtcccagctacttgggaggctgaggcacgataatcacttgaacccgggagatggaggctacagtgagctgagatcgcatcactgcactccagcctgggtgacagagtgagatcctgttttcaaaaaaaagaatgagggcaagggggtgtgtggaatgaatggaaggcagaaggtagctgcccaaggcatgctcagcaaatgttagcacagagggcaggcagggcttgaggctgagatggtgcttgctcaactgctggttgagtagggggttccacatggtttttccctgccctcacctactccccctcccccccagagaagtgtttgaaccaacagtggaaagaggtgaactggtagtcaggtaccgcgtgcgcaagtcctacagtcgtcggaccactgaagctacctgtaagtgaaccctatgccccactgccctggcctggatctaaaggctgtagagaatctggcctgctgggcttctgtacatgtgtgagccaaaagtttctaaaggccttgggatactagaatgtcagaaccacagaccctagaaataacagatttgtggaaccacaaagaactttcaaggaatagaatcttagacacagtaaatcttagaaacaccaaggctgggtgtggtggctcatgcctgtaatcctagcgcttcggggggccgaggtgggaggatcacttgagcccaggagttcgagaacagcctgggcagcatggtgaaaccctgtctctacaaaaaaaaaaaattagccaggtatggtggtgtgcccctgtactccctgctactcgggaggctgaggtaggaggatcacctgagcccagggaggtcaaggctgcagtaagccgtgatcacaccactgcactccagcctgggtg

SEQ ID NO: 91808 - DNA, 1041 bp, Homo sapiens
gggtgcagtggctcacgcctgtaatctcaacactttgggaggcccaggcgggcagacacttgaggtcaggagttcgagaccagcctggccaacatggcgagaccctgtctctactaaaaatacaaaaattagccagatgtaatctgtaatcccagctacttgggaggctgaggcaggagaatctcttgaacctgggaggcggaggttgcagtgagccgagatcgtgccactgcacttcagcctgggtgatagagcaagacaccgtctcaaaaaaaaaaaaaaaaaaaaggaatctcatctttccagttagggaaactgaaatccagaaagaaaatggaagagctaggtctcttcctagcatacagcgagaaagccgccagggccccagggggatgtttggaaagggctgggaaagacatttatttaagaagagaaggaagaagcaacgatgtcccagtgatttaactgagtaacatacagcatccattctcagggtgtgagcctggtcccctgtggtccctgagacctttgcagggggcccataaggtcaaatctattttcatactattaccaagacattatttgcccttttgctttctcattctctcattagcattcagcgcagttttccagaggctccctgacgtgggatgatgtcatccaacactctgacagctgatggaccttgtgcttgtatattcttgttttaaaaatttatcaggctgggcatagtggcacatgcctgtaatcccaccactttgggaggccaaggtgggcaaattgcttgaggtcaggagtttgagaccagcctgaccaacatggtgaaaccccatttctactaaaatacaaaaattagctgggtgtggtggtgcatgcctgtaatcctagctacttgggaggctgaggaaagagaatcgcttgaacccgggaggcggatgttgcagcaagctgaggttgtaccactggacttcagcctgggcaacagagtgagactgtctcaaaaaaaaaaaaaattaaataaacctgataggttttcttttg

SEQ ID NO: 91809 - DNA, 1024 bp, Homo sapiens
ctggtacagcagggcactgacccatcagggtgcccactggagcaagagcgtggccaggctttaccccttgagttccctttgagggaaggttcagggggtccagaggaggagctggggtggaagtagaggggtgctcagggcagttgctaattttaaatcagtgcagaagtatgtcagtgtttcaacaatggatctatccctactggtgggtgaatgtcacctgaatgtcagccctgctccatgactctgtccaccccaaccttgcatgcagtgaacagcctgggcatcagtgaagagctgaaggagaagctgcgggatgtgatggtggaccggcacaaggtggccctggggaagactctgggagagggtgagtcccccggcagcatacacacatccttctgaacttctgagatcctgcacttccacactcccacccaactataggaaatacagtccccacgggccctctgaggtcagtgtctccctctggccccccacaggagagtttggagctgtgatggaaggccagctcaaccaggacgactccatcctcaaggtggctgtgaagacgatgaagagtgagttacgtgcacatgtgtaggacccccagctccttccctatgcccctgagacagaagagagcaagcaagttagccatagcttagaacttctggtgtttccagataggcaatggagcccctgccaggtacctcaatagaaggaattgaatatggggagattagtacaaaggtgggagacgggttgaaggaacaactgggggcagggagggaaaccagagatgagcagcagcaggaagtcacttcccccgctaggcctgaagggtagagggagcaagtggtgttaccagaatccacagctagggacaccaggcaggagctggtatcacagagttagaggctgctctgtgggagctaaaaacccagaatagcactttgggaggccgaggcagcagatcgcttgagtccaggagtttgagaccagcctaggcaatatggtgaaacca

SEQ ID NO: 91810 - DNA, 1006 bp, Homo sapiens
tttgggaggccgaggcgggcagatcgtgaggtcaggagatcgaaaccatcctggctaacaaggtgaaaccccgtctctactaaaaatacaaaaaattagccgggtgtggtggcacacgcctgtagtcccagctactcaggaggctgaggcaggagaattgcttgaacccgagaggcggaggttgcagtgacccgagatcaaaccactgcactccagcctggacaacagagtgagactccatctaaaaaaaaaaaaaaaaagaaaatatatattttatatatatatatatattatatacacacacacagacacacacacatacacatatcacatataaagtgctgagtatggtgcctggtacttactaatcatgtttgatgaagatgagtgatgatgatgatgatgatgatgatggagtggaggtggagggagagtcctccctctcctcccctcctcctcacgacctttctctctccctcaagttgccatctgcacgaggtcagagctggaggatttcctgagtgaagcggtctgcatgaaggaatttgaccatcccaacgtcatgaggctcatcggtgagagaggggcagattcaaggggtctacaagccccatgggggccatagcagagggaagagccctgcttctggccctgggaagatcaaacttccaggcttcctgctccccgctccttcagggtcagcaggcttccccctcctagtctccctcagcttggaatgtgacctctgatcattcccagaaatagctgaggtccccaggagggctccggaaacgtccctgggaactctgctggaaacagcttctctgcagcttggtccttgccactgccactacccccaaacaatatggtggccagattggatgggtagtgagaaggagaggctggaggctggctggtggggggcttggcttccccttctgcccagcaggagtgacagggctacctggggggctcaggtgtctgtttccagggttctgaacgagag

SEQ ID NO: 91811 - DNA, 1050 bp, Homo sapiens
ttcaccatgttggccaggctggtctaaaactcctgacctcaagtgatctgcccacctcagcctcccaaagtgctgagattacaggcatgagccactgcactcaaccttaagacctactgttctaaagctctgacattatgtggttttagattttctggttctaacatttttgataaagcctcaaggttttaggttctaaagttctaagattctgattttaggagctaaggctctatgagtctagatgtttattcttctagagttcagagtccttaaaatgtaagattatagattctaaagattctatagttctagacatggaggttctaaggcctaggattctaaaatgtgatgttctaaggctctgagagtctagattctctggctgtaaggctctagatcataaggcttcaaaatgttatcttctcaagttctaagattctaatgatgatcaattatagtttctgaggctttatgataatagattctcttgtataagatcctagatcctaagggtcgaaagctctagaatctgcaattcaaaagttccaagagtctaaagatggagtttctaaggtccggtgttctaagatgtgatattctaagacttactctaagatcttagattctctgtgtctaagattctagatcagatgctccaagattctagatgattaaataagattctaacggtctgttctgtttcaaggcactctagattccattggtccaagattccggatcctaagcatctaagttataagactctcacactcagttgtgactaactagacaccaaagttctaataatttctaatgttggacacctttaggttctttgctgcattctgcctctctaggaccatggttaagagtccaagaatccacatttctaaaatcttatagttctaggcactgtagttctaagactcaaatgttctaagtttctaagattctaaaggtccacaggtctagactattaggtgcaatttcaaggttctaaccctatactgtagtattctttggggtgcccctctccttcttagctat

SEQ ID NO: 91812 - DNA, 1058 bp, Homo sapiens
cgtgtgggctggggggtggggagccgtgtttccagggtggggaaggaatgtccaggtgtgcggggctgcgagagttctgaggaaggaggatcctggaatatgccgctggatgcgatcctgggcgttctcctatttgggtacgggggtgggtgggagaggtggaggcgctggtgtctgtggctggggagggtcctaatggactcagtgctttggagtttggctagtgagcatttaggggctgcgggagattgaactagggggcacccccatctctcttccggggctggaaggccacccttgaagcaggcacagcctggacattaggtgctgggagatctggggactttctggttggcttctagaagaggtatagggagccctggtgtccagaggctggcgggggagaggatgctttcctggacaaaggatctgggggtctagagctaagaaaactgagggcaaataactcttgaggctgctgctgactggtctggagctaactgtggggtttttggagaacagagggtagctgggggtgggatgggggcagatgagttggtaacattccaagtggatgaaatatgtggcgggagacagaggatcctgtgtccagcacaggagtacgtatctggcttagcgaatatggggaggggggaggccgtagggagcaaagagaaagaaacctgttgacttcactggaggcctcagagtggagtgtggggaatgtttctggacctgagcgtctccaggagaaatctcgacggttcccagaagcagttatttgtgtacccagggagtgggggccctcggggagcagcacggaactcttcatcagccaggagctgtgactctgggaatgggttcgggtagacctgcggttgtctgaggagaggaaaacctgatatgggacggcgtgaatcttcagttagaaaaaaagcagctttcgggccgagtgcagtggctcacgcctgttattccagcactttgggaggccgaggcgggcggatcacgaggtcaggagttcaagaccagtctggccagcatagtgaaaccctgtc

SEQ ID NO: 91813 - DNA, 2244 bp, Homo sapiens
gtgatctcacctcggcctcctgaagtgctgggattacaggcgtgaatcactgcaccaggcctcagggcagctttctagtaggactgggaaatggggggactggaaaggttaaggagtaagtagaagggattctggcgtaagagtttgtggagtttttctgaaaagagggcaccctgggacttggggctaaggggataaggagagaaatgaggtaacagaagagacaggatttggggttggaattggatacttgttcataagagaatttcccggagggaggagtgtggatttggggtaggcagtggcctagagattatcgaggacccaggtgctggaaagaggacttcccattgcagagacttgtgaagaaaggagtgggcctgtgtgtgtgtctagagcaggagggatcgtggcaggaatgcctagcaagaaagggtagtgggttagtagtgacctggtggtctgggcagagagtcatctctgagaggaaagcgaattaggtgctttggagcgtagactctagactaagacagacttcgtttcaaatctggcttaaagatattggcaagtcacttcacctctgtgggcctggtttccttaatgtgtaaaatggggttaatcaacaaatagtgtgttcacagcccctccaacccctgaggggtgttatgaatgagatcacatgtgaagggcttatcactgggcctgccttttatgagaagagggatgttttagagaatggagaaggaccctagaattatagcttctccaggaggggctgcctctgtgaacacaggagagagatgctggggaaaagaggctttgtgggaagaggagcattgtgcttggagcctggaagcagcagaatagtttgaaagggccccatattccaattaaggagataatgctatttcttcctctctcccttacttgctacaacaaagtcctttgagcccccttcatgcctcccttaagccctccttcaaccttggtaaacagaccggtagcaaaccacatgacctgtgactttcctccctttgggctgcacctggtttgtgcccagatgtatttatcctctgagaaggaatccgatcagttagcaagtggcagaatagtctctccttccctttggttctggctcacggctcctggcatagccactggtagggcccttggggccctaactgagagctagcccctggggaggagagcctgtatgctgcccatcctagctttctaaagttctctctgggtttggctgcaaggttcttgagggaatttctggttttagttccacctctgagctttcacacgtgttatcccaaccccagtaacattctccattctcatcactgagtcattacctgtgtatcctttgaatcaaggcttatctgttattttccaggtccctttcttcattcctggtactactttgtagccttcaacacaatcatattaaatttttgtgtgtctttaagatttgtctgtctcactaaactgaaggcttcagtggggcaagcttgtcttcagctgtatcccaggctctggagtatagtatgcatgccatgaatagttaatattattattcttaccactcttagttgagctcctggacctgcagatgccttctggatgctttggtccagggttcttcatgaaccgcccctctaattggccatttttaattttgttttaagatgccatggacaatattaccaggcagaaccaattctacgatacccaagtcatcaaacaagaaaacgagtcaggctacgagaggagaccactggaaatggagcagcagcaggcctatcgtccaggtaggaaaatacacatggttcatctctttggatggaaacaatctacatggagcctttaccccctgcttagagcgggtcttcccagagaaactgtgcatcttttttcttgggcagttcatctaaacattgtcactctggcaagaattgtttaaaggaaagatctcagtcctatttccaagtgttgggagaggggaggttccatggtatctgtaaaaaagtgatgttagtatcagccgggtgtggtggctccctcctgtaatcccagcactttgggaggccgaggcaggtggatcacctgaggtctggagttcgagaccagcctggccaatatggtgaaacccgtctctactaaaaatacaaaaattagccaggcatggtggcaggcacctgtaatcccagctacttgggaggctgaggcaggagaatc

SEQ ID NO: 91814 - DNA, 1020 bp, Homo sapiens
atacccgtaatgaaagaaatatctgtttcctaacactactcccaaatacacatcctcttcccattcatccactcattcagtcagttctcacagtgctgtcacgaagtgcccactcttgggctggacactagcaacatacagatggacagtgggttttgccttctgttgttccagtgtggggactcagacacatacactagtaagccacaacctctgaggtgagtagtcaggatgcaggtgagtttcaggagttcagaagagggagcagcctctgctttggtcatttcccttccctaacaagcccttccctcctttccctccagaccaagtccttcccttccctccttccttccttcagttcctgtctgaagccttttgcaattatgaaaactaggaatggccactgtactcatctggactagtcatctgacattctatttcctatctggcggagtccaccttctaactagcttgttactgtctgagacagggcctggatctcacaggctatgatttaagttaggacatggatcccacctcatatggggttcttccactgcctcccacagagcagaagcctggaagctacttactgatggagagcaaaggaagaacactcgctctgatcctgggctggcagggaaagtttcctagaatggacttaacatgtgatgagcacagctcatccatgttagccctggcctggcgaggccagaggggccctccaccagagggaagcctgctgctgggagagtcagcagccaaatgggcatgggctccccatctgtgcatgcagtgcactgcgaccacccagactgtccaggcaggaccctgagtgttagattctacctttctacccttcttcctcgttcctgtacagcagaaaccaacagtgttaagtcccttttttagcgttttggtaggaaaatgaatatcgtttataatttaggacactgaaaaaaatgggtcatctcaaattcttacagatgtaggattttaagaagcctggtacatggatag

SEQ ID NO: 91815 - DNA, 1613 bp, Homo sapiens
ggagagaggttgaggggtgtgctggttccttttgaaactgcccccatgatgtgttcactgtgtactcctggtcagcacttggggaagttccctctgcctgcttctttcttaggacttctaaaacatcagccaggccgggcgtggtggctcacgcctgtaatcccagcagtttgggaggccgaggcaggtggatcacctgaggtcgggagttcgagaccagcctggccaacatggagaaaccctatctctactaaaaaatacaaaattagtcaggtgtggtggtgcatgcctgtaatcccagctactcaggaagctgaggcaagagaatcacttgaacccgggaggcggaggttgcggtgagccaagatcgcaccattgcactccagcctgggcaaaaagagtgaaactccgtctcaagaaaacaaaacaaaataaaaacatcagccaactgtgggcattttccttcacagataactgcgacctccacttcaaggtggcccgagatcggagtagtggctatccgctcacaattgagggctttgcatacctgtggtcaggagcccgtgccagctatggggtcagaaggggccgtgtatgcttcgagatgaaggtgagtaggagcaagagaaggggaagggacagagaagtccatccattgtaatatcctgataccagccaccttggtcagagctgcaactgcaaaagagattggattgtgcaataccatgtccaagcagacaaaactgtgatgaactcaagacaactacatcattgctaaatatcatatcagaaaagcaggccaaccatgcattgcttcatcaagcagatatttccttggtgagatttgacccaggtattatgtagtcaaccagtgtagtgatgacatgtttgtagaactgagaaaagaagttgtttggaagaaaagtgatctagaaagaatagactcagatgtcacttattaaagggaggccagagggagaacagggcaaagaactgccagcttaggccagcctctgctgtcatctctccacagttccatgtcaagttatgtttatgaaaataatagatgctcatgtttaacaaaagttcagacagcacagaaaagtacaggataaaacaggttattctcgccaggtgtggtggcttttgcctgtaatcccagcacttttgggaggccaaggcaggtggatcacaaggtcaggagttcaataccaaactggccaagatggtgaaaccctgtctactaaaaatacaaaaaaattagccgggcatggtggcgggtgcctgcaatcctagctattcaggaggctgaggcagagaattgcttgaacccaagaggcagaggttgcagtgagccgagatcacgccactgcactccagcctgggtgacagagtgagactctgtctcaaaaaaaaaaaacaaaaaaacaaaaacaaaaaaaacaaaacaggttattctcatgtcctctcagttcccatcctaccatcctactccctggagggaacttctgtgttaacaatttcttacctgtggtttgtgtatccaaacttactgatgatagctaataagtatagagctctttgcatgcacaagatacagcaccaagctcttt

SEQ ID NO: 91816 - DNA, 1875 bp, Homo sapiens
ccaggggtcagtcctcatggtctccaggagcaaaatccagccccttcactgatttctaccacaagtagactggactgaatattgggtgtcacaaggaagggttgcatctcagcatacagccattctcctccatcccaactcctgtcttccttcctccctttcttttcaaattctcccctctgtgcagagttattcagttgagctcctactcccagactggacaatgaaacccatcaagccctccaagttctacatcattaagggcttcctttcacccttccccacccctattttaaaaaggcatctgattaataaaactagtaaagaaaatgatttttttcttcaaaaataaaagtatgtggcagccattgaggctgttatgaccatcgcaggtttaacctgcctttgcctatttcttccgtcaggcgaagagcctttctcctatggctatggaggcactgggaagaagtccaccaatagccggtttgaaaactacggagacaagtttgcagagaacgatgtgattggctgctttgcggtgagtgctagcagcctgtgggagttggcagaaccagatgttgggctacagacttctttttcaggatacctctatccattgtctgccccatatccagccactctcgccatacttctttgtctctgcttgacagactggaatgtttactgtcattttgtgggaaattctgtcattccatctcctctggtcttgtgtgcaaagttttcagatgacaccctgaagaggtttggggacttcaggtgtgcatagccttcctccgttcctaggtaccagagtaacattttctaaacaaacctaggaatttcttatctttcattgctaggaaatagcctgtctgctcctgaaggcagtggtattggctcttgccccatgttggcatcatcttatcccaaaacttctccctttcttcatctcacattggttgagccaggcttcctacaatgcactgccttctggaagagtagagatgatgcaaaacagaacagctgttgctgccatacttcagtctttgagaacagtgaccagcagtcaccttgctgtgcagtatggctgtcagctctgggctggactccctggacccagttatgttcttccattcaagccctgggcaatttacccttcttgtttttcagttccctctaaatgagaatctttgcacctacctcagaattttgtgtggagtcattaagttaatccattaaaagcacttataataatgcctgacacacagtaagtgctcagtaaataccacttaatactgttaacattaggagttataagagatgtttgtaaaatgtgccgtaaggccccagaggaagtgaccacctggatggattcatcctctgaagcttattcttttgccttccttcatatttgtacacatgtactcttccttcttcttttttatttatttatttatttttgagatgagttttttgctcttgttgcccaggctggagagcaatggtgcgatctcggctcaccacaatctccgcctcctgggttcaagcgattctcctgcctcagccccctgagtagctgggattgcaggcatgcaccactacacccaactaattttgtatttttagtagagacggggtttctccatgttggtcaggctggtctcgaactcccgacctcagatgatctgctcgcctcggccttgcaaagtactgggattacaggtgtgaaccaccacgcctggccccttcttctttttttaactttgagataaattcaaactcggaaaagcttgagaataaagaattctcacagggccttatccagattctaacatttgccacatttgctttaccattttcatgtttatggtgtac

SEQ ID NO: 91817 - DNA, 1045 bp, Homo sapiens
gccccacatatggatctcctgtgcaatttagccactcctacttccccattggagcacattttccgtgctggcatgagcattttgcacatagaattttgcattcttgtgggaatgtagttgtattccttcttgaaagttagattctaagtcaaaggtatatttttaaattttcatagctaccaccaagactacactccaaacaggttgcagtaatttaacttgtcactgtgtgacagtgtttgccaaagtctgttctttcagagtatgaggttcttttggtatgtggcagtatggaactctaggccttgactcttgcttcaaccagaacatctctgcatccagtcttaagattccttatatagttttctttgttcagaagataccacaactttaaaaaggctcagggtgaggagttggtgggggtgtaaaaatcattggtctcctggaacaagaggggaggacattggtgtcaaatatcaagtcctcaatttgcaaaacaaaaaggtaaaacagccttccaagtggagaacagaataacccatttcagcaaaccataaagagtatgatacttagagcctagggacaacagaaagaggtgtgagacaccaggctataaaaatggcaggctctgaattatgccaggcttcaggagtttgggtctttaggcctgggactgacacaggagtgtttcagcaggaacaacaacacaactccacttgccttttggacagatggctctgttggtggtagatgggttggttgagggcgccggtttctgtgcattatgggaagttcctatagtgaagctggtggccataaggaaggctaactaacaccaacagtcatacctgctctccatggtcttttttttttttttttttttgagaaggagtcttgctgttgcccggctggagtgctgtgacatgatctcggctcactgcaacctccaactccctagttcaagtgattctcctgcctcagcctcctgagtagctgggattacaggcactcgccaccatgaccagctaatttttgtatgtttagt

SEQ ID NO: 91818 - DNA, 1111 bp, Homo sapiens
cctgggattataggcgtgagctaccgtgcctggccagcacttgacttaatgctcaccctgtcccaggcactgtgctcagagtctgacaagcctgatctttttgaatcccgataccagtactgtgaggtagatggtattactgcttccgctttgtagaggcagccacagctcagaggtccagagtcacactcacagtcaccaccgagccaagtggtgccataccaccatgccgcaacaccttccctgtcttgttcttgtagattctgatgatggtgggcctgcctgctgctggcaagaccacatgggccatcaaacatgcagcctccaacccttccaagaagtacaacatcctgggtaccaatgccatcatggataagatgcgggtaaggccagccactggactctccttactcacctccaacctactgagtgctgccctgcaactaaaatcactcacccctcaccaattcctgcccgcaggtgatgggcctacgccggcagcggaactatgctggccgctgggatgtcctgatccagcaggccacccagtgcctcaaccgcctcatccagattgctgcccgcaagaaacgcaactatatcctagatcaggtacttaatgatgaccattgtgtcctcaggagaagggaggggaccccttgcatgcctgagaatctccctctggtccctttcttttttcccccgtaatgatgatggactgctgtgctagtcgggggggtcagaccttgtcatacatgatgacatggtactacacacagctgagcctggactgggatcatgatctaggcctacttactcagactcatcagcagccccaaagaacatcaggtaagaactgtttagcaaaatggaaggagtatggatttccaagcctgagagactggagcttgaatgccagctcggctactccctagctctgtgcctttgggcagctgactttattctctgaatctccatctcttggtttgtaaaacagggatctcaataccatctgcacccctaacgcaggacctggcacttagtagctggtgattattgttaaatactctacagaataggtagagtagctttcatgccaacagcagtgctgtaa

SEQ ID NO: 91819 - DNA, 2232 bp, Homo sapiens
cttccgtcattttctcttcacaaatacgtatgactggcaggtacatacctaagtcatattttctacctacacttcagttaatggtggagttcttaacatcagggaccttggaacctttgtatttgaacataaatattgtatgcagctgcaggtgtatcctttttatgaaaaagaagggaaaaaaaaacagttttttgtccctatctttcagcattctcaaaaggatgagtgacccaaaaatcattacagattcctgtctcagagtaatgagttccacatggttattgcctatgcaacgtcattgcctattgacatttgtcctgaaggctttcacaagtaacaaagggtgtctccttattttctatgtttggggatctgtgaatgagcctctgttcccttcagccttgcatttgtgctttcttaagaacctgtgagtgagcaaatatgtaaactaagtaacaccctgcccttgtagccttcctgaagtgccttccatacgtgtaggcctggatacttggtgaccatgagttcaaagggctcctgataagagtggaggtggggacagcgtttggctttgtcagaatggtagtttgcttgttagaaaggaatcgccagagaccgagttgccttcacataggaatgaggatcctacacaaaacagttgagcacaggatagtctaaaagccatccgtggttatccccccagctcatattgtgtacaatcagtgttctctccgctttgaagatttgtcttttaaacccttggcctcactttacctgatcctccttgtcggggcattcaagaatttttttagtctgtattgaccccagttggactcattgtcgtgaaagggagagcagtaataccattttaacactctgaggatacatacctcttttggataccctagccagtattcctccctgtctttttcttggtttgctggttaaatcagctgtgaaactcatttcaaatatgtggcctaggggagaatgattatagtctagagtggatcgtctaacatctctgtccaggatgctgaagtgggttttctctggaagccaggcccatgacagctttgcactctgaagacctactgtcagccttcttggctgctgctggcttgttcagggacagggtctagggctgtaccaggtatgcctgtggtcttcagggctaccagcctcctgcttaagggacatgtgggtcaggccaagagatcttggccaacaatgagacagagaacctaaactctgaaggctggggaggagggttctctggttaaccacagattggaggattgcctcggggcctgaagccataggctactcaggctgagggagggattgtaaagccagtggtttcacctgttttggcctaaaccccaaaagtgggttccagaaaactctgggtatgagaaagagggagggggaagttgtgtgtttgtgtatagagggttcagagcaggcccctggccaatcctggcacttccattccaccagctttggcggtgacaggtaagttgatgatgcatagctgtctcctgggctaggtggaatttccaaaggggaaacccatactacaggcaaaatccctgcagttcctggatctcagcccagaaccatcttttgcctttactggtttttcctgagtggtcagatctccccagatttggctcttccagcctcctgttatgtaggttggccttagaaatgctcatccttgagagggaaggagaggttgtctgcagaagccaggtgggcctttgtaagccaggattctgtgtttgtctggccaggactctaactcctaccctgggatgtatgtgattgggcacaaactctcaggtatatcggggctttgacctacattctgtgataacctgagtagccttttgagatgatgtgggcatcacagctgtggaacatcagaagaggaaaaagaggtagaccagagaggaagctgaagcctctgcagaggactataggactgctaagtcacgcactcagtgtactgatagatcacagctctgctgacttcccaaacagccatagtctagaatggttggggccatggtgggaatttggggaagctttctggaggtggaatgtctgagtcggggcacagaggatgattaaaagagttggggctttgtcctgaggagagtggggagtcatggttaggttttcatccggaggaatgtggataaatttgcctggctagtaaaaggc

SEQ ID NO: 91820 - DNA, 1399 bp, Homo sapiens
tcagaatacatttttttttttttggtccatttgtatatacccctttacagactgttttccccatctgtggcttctttcttgggtccctattagagccactaaaaaattgtttaaatgcagttaaaaactccttactccgtttctgctgagttcctgagtttccatagggagggtacctgtataggtgcctgggtcttacttctagaggttcaggctcaggaagtctcaaatgaagtttgagctgctcactttttaagtagtgtcctcgtgattcaagtatacaggctgagtctatggaaccctgaatccaacagaggtaggccccattcccaaagggcccgacatgaaggaggtgttcggtaaatggaagccgatgttgttactgctctcaaccacatatgtgctagagcaccgctctgccagcaccagcccaggacacacctgccatcacttagaggaagggaaggaaacattaggagcaaaactgcacttgcgaaaagcagagtctcctgatgtgtagagcttgctggttagaagcttgtgggtgaggctgatgtttcagagaaggactgagggaataaaagaaccaatgttaataagaacaaactacaaaactgtccaaaggagctggttaattagtagcatagctaatctataggtattacacagccattaaaaaagaatactgcacagaaaaacttcagagaaagtttcacgttacatgaaaaagcctcaggaggatgtgcataatacaattctttttgtgtaaaaaaatcacatagatatttctaaaagtgcacggaagaaattcattcttcattctctctgggaagtagggctggcactaagggaacacaggggtttttcctctaaactttatgccttatactgtgaatttttttaccaagagtatgtattagcttttagaatagggaaaagaaattgtaaggtccagtaccaagaacaaataggattaaaaagcaaagtcccaaccattaggaatcctttgccctgtgcctgtctgcagccacttacctaagtcaattcatttgctgagggtgactcaagaatcttctaagtaaagaagagctgtttcctgagtttctctgcttacaaggagcactgatatccttttctcagtccctggcctacataatacccctcagaggaaaaaaccaactcttaatgtaccatctcttgcctcttctgttaccttacccttagacaaatgtttatgggtcagcccagagacgaaaaatgagaccatttgaaggcttccagcgcaaagctattgtaatttgtcccactgacgaggacctaaaagaccgaacaataaagcgaaccgacgaggaagggaaggatgtcccagatcatgcggtcttagaaatgaaaggtagga

SEQ ID NO: 91821 - DNA, 3583 bp, Homo sapiens
ccagccccacaacatcctgtttctgtgagcttggacaaatagcttcccgtctctgggcctcattttcctcataaaggtgttagtagaagtcccttccaaggtttgttgtgaggaatgggtggcactatagctctgggactaggcagacctggggtcaagtcctttttccttggcccagaaatttcatcttgagcctcagtttctttctctttaaaatggggctagtgggacctacccctaggttctatatggagattatatgatgtaatgatccaacctgtacttgggaagcacttagtcaattgccactactgtttctcagcagatcttccagtaacaactaccaccacctgttgagtacccagtggtttatacacacaagcttattggatacccagggcaagctaaaggagttgttcttgttctattgtgattctcattttataaaaaagaaaactgagatttcaagaagtgccgtgtaccttgctccctgggggtctcagagctggggttagagtccacatcacagccctggggcttgcccttcatcctgccctaccatggcatggagctggctctcctccttctcagcccacaaacaatgtccactaggcaagggaagggcccctgtgggccaaccacttaaaaaggccctttttccatcccagcatttcacatctgcagatttcctctatttcacagagctttggcttttttccctccactttccagccgagttacagccagccaccctacaaccagggaggttacagccagggctacacagccccaccgcctccacctccaccaccacctgcctacaactatgggagctacggcggttacaacccggccccctataccccaccgccaccccccactgcacagacctaccctcagcccagctataaccagtatcagcaggtaggtgccagactgggggccaactggatggagagacttccatgggcccctcctgggtgtgtattcccagacttaagtccctgcttatccctaaaaagacagcctgctggcctcggcctggcgttcatctggtgcagccattccatttggtcaacacttctgcactggttgctaggtaattggtatcctagccccctccacagtctagcaagtgaaggggaagggctggcctaagtaccaggggcctcagagtcctctttcagcaccatagacagggggctccaaatcctgctgcaggttggtgcccaggcccccatacctgttactaaatcttttgactatgatatctagctatacccaaaaggcactgggttgacaagctgagacctgggcttcagtccctaactgcctacctgtgtggtgtcaggtctttccaaggtgccttgatttctctgtcaggggacctgtgttcaactgttgtcactgcagctgtctctgccctaggtgagggtggggctggtggggaggctaaatgtgtggtggatgcaggacaacttggtgttcttggtttctttccccagtatgcccagcagtggaaccagtactatcagaaccagggccagtggccgccatactacgggaactacgactacgggagctactccgggaacacacagggtggcacaagtacacagtagccagtgtgacccagaggctcccggaggcccctgccggcttcctccaccagcgcctgcctcggcccctcctctgcccccgccagatcccgtggtgctggggatggggtcatcccagggctgcctccctccagcccactgcctcccctctgaggggcttccttcccctccatagggccaggcatttttttctggattcaaacaggcaacaatgaccttttattttctgtttgtccccacctccccagccttccacctcctgttcttcctaccttcttcctttttgactaaataatccccacctcccttgatcatacagtgaggctacagtgactgaggggagaatcccctcctgttcactctcccaaccctgctccagcccctcagcttcccagaccctcatgcagttggttgtaaattctcccaggagctgttttactgtctacttttcaggattaaaaaaaaaatcaaaacttaaaaaaaaaaaagtttaaaaagcaaaatggggagggggaggaagcagtgacttttttttggtaattatgcgcttttttttaatttttagaatttgtctttttactgtgggtgggctgttgatatttcatcaagataagcatttctttcctgagttcaggtgactgaggaagagccacaaaacaaaacacaacaaaaccaaaccacagaatcatctttaacccaactttttatacgatgccccagttccccataactttgcacacaagcttctgtgttcagttgaattgtaactgctttttgtatttggagagagtgactattgaacttgaaaccttttattccgggcgtcttggtagtttctggtgggattcagtgggtgagagggaagaaggggaggttggggggctccttcccttcagaacttgaagtttctcccactgcctcctctccagtggtctcccaggtgccagacccaaaagcttttcctacagtgataccctttatttttacttccccttgactcatatgttttaacatgattttaacaaactgcacttattaagaaatgtgtttgccctgttttgtttggtttcgttttgttttctttgaataaatgacatggcacctcctagcaggaaggaagcagggttgaaaccctgaagtgttactgcagttggccgttaattggggtgggggcctctttaaagggaaattatttactcattcattaaacaacttaactgagggattcatgtgcctggccccgattttggtgctaaaaatgcacgcttaaacaagggtccctggtttaaaatccactagttcatttttaaagtgcttctcttgttctctacctctcacagtctaaaatccctccaggagtttttgagtaaaggacatggaacaggcctctaggtggagggatgggtgggactgatggggcagagaccagggctggtttgtttggcatcatcactgggcatccacagaccacctgcctcaggcctggcctgtgtgcagcacggaggacagttcctgcctgttctgtgtttggggctcatggggattccaggagcttcatgtttcagccagtgtgtgtgagccacctgctgtgttcttcagctgtcctggacagtgctggggacatagtatggccacggcagtcctggaccccgttctcacagagctcccactccagagagaacaaagacctgccagcaccaagtggtcagctgtgagagcctggggtggtgtgcagggagggcttcctggaggagtgagccagggtaaaagactccagattgcatccccatggcccatcttccccttccttagcaaccttatgtcttcgttccctcatacatgctgtgttcctggctccttgtgagagacaatgctgggccacaggagaagccaattcagccccaatcttccctggtgggagctcagagccttgtgaaggggagatgggcaacaaaaacaaggga

SEQ ID NO: 91822 - DNA, 1035 bp, Homo sapiens
agtaacacttcagggtttcaaccctgcttccttcctgctaggaggtgccatgtcatttattcaaagaaaacaaaacgaaaccaaacaaaacagggcaaacacatttcttaataagtgcagtttgttaaaatcatgttaaaacatatgagtcaaggggaagtaaaaataaagggtatcactgtaggaaaagcttttgggtctggcacctgggagaccactggagaggaggcagtgggagaaacttcaagttctgaagggaaggagccccccaacctccccttcttccctctcacccactgaatcccaccagaaactaccaagacgcccggaataaaaggtttcaagttcaatagtcactctctccaaatacaaaaagcagttacaattcaactgaacacagaagcttgtgtgcaaagttatggggaactggggcatcgtataaaaagttgggttaaagatgattctgtggtttggttttgttgtgttttgttttgtggctcttcctcagtcacctgaactcaggaaagaaatgcttatcttgatgaaatatcaacagcccacccacagtaaaaagacaaattctaaaaattaaaaaaaagcgcataattaccaaaaaaaagtcactgcttcctccccctccccattttgctttttaaacttttttttttttaagttttgattttttttttaatcctgaaaagtagacagtaaaacagctcctgggagaatttacaaccaactgcatgagggtctgggaagctgaggggctggagcagggttgggagagtgaacaggaggggattctcccctcagtcactgtagcctcactgtatgatcaagggaggtggggattatttagtcaaaaaggaagaaggtaggaagaacaggaggtggaaggctggggaggtggggacaaacagaaaataaaaggtcattgttgcctgtttgaatccagaaaaaaatgcctggccctatggaggggaaggaagcccctcagaggggaggcagtgggctggagggaggcagccctgggat

SEQ ID NO: 91823 - DNA, 1044 bp, Homo sapiens
ccgtgccccccatctcctctgtctcccacactctgggaagcccggctgggatatccaggttggagcctcactggcggccactggaaacccagaatgaggggtcatcgcctctcgcccacccagaaagggcgcaggagggggcagcaaggttgcggggcctgtctggccagaaggaaatgtctgtgctgtggcctggtcacccccgcccccaggacctgctgggctgctgccgcccccggccggggctgaggccgagtaaacacagcaaacacagccgccggcagcctgggatatttataccgaggctgggcgtgggtccagtgcccaccacagcccctgccctgccctgccttgcctgctgccacagccagctccgagccagcgtggcaccagccggcaaggggacgcgccgcagacacagcctgcgctgggtatggaggccaacaggcactggccgctcatgatgcaggcggctccatggacgcaccctgtccccctcccctgaaaacaccagcacacaatgtggacccacactcgcagctgctcacaaacacacatccacccctgctgagaacgcgaaatcccctcaacgatgatgcaaaacagacccacacaactccacacactgcagtcaccagcctacatgtgggaacacagcatgcagacaccaccttagcacctgctcacagcacccacaggctgggaacaccagtccctgagatggacacacagccccgaagtacagccctccctcacacagacaaacactgagaaccacaggaagcatgctggatgcacaccacgtagacaaacatgctcagaataccagcgacacatgcactgatcacagtgcaacccagaaacaactcaactcatctgcctcatatgtaagaaacacacacggccgggcgcggtggctcatgcctgtgtctcagcactttgggagaccaaggtgggtggattacaaggtcaggagttcgagaccagcctggccaacatggtgaaatcccatctctactaaaaatacaaaaattagacgggtgt

SEQ ID NO: 91824 - DNA, 1369 bp, Homo sapiens
ctaaagctgtggtctttgtctggctgctaggcctggagaagaaacacattaggaaactgaggcagagccagctgactcccaacctgtgctctctttccactgtgagcttcctgcaggcagcagcgaggtggctcttcctccattgccctgccagctctgtcaccggggagtggctgctacccaagtttcgggcctggctttgccagtgcctccccctcgtgtctttggaaggtttcttcccctctctgaccctatttgccaacaaatgtgtggtacgtacttcagtacatacctattgaatattattatattccccatctaacagatgaggagattgagactcaaggagtaagtcacttgttcaaggtcacacagctgagcaaaactaggtctggaacccagggctacttgatccccggaccacttttaaccactctgccatactgcccttctgtgaccgattagtgatgtctgccataggcatcagcctggtggagggaggcatggatctgctctgctggccaggcctacagtagaaacttcttaggctgggcgtggtggctcatgcctgtaatcccagcactttgggaggccgaggcaggtggatcacctgaggtcaggagttttcagaccagcctggccaacatagtgaaaccccatctctactaaaaatacaaagattagccgggtgtggtggtgggtgcctgtaatcccagctactcaggaggctgaggcaggagaattgcttgaacccaggaggtggaggttgcagtgagccgagatcacaccattgcactccagcctgggcaacaagagcgaaactccatctccaaaaaaaaaaaaaagaaacttaaccatttcctgtggtgctcagctcctggcctgttgtctgaatgccgcctgcatggcattggtggatgcaggtgtgcccatgcgggctctcttctgtggggtcgcctgcgccctggactctgatgggaccctcgtgctggatcctacatccaagcaagaaaaggtaggtgtgaagaccagggtggctgaagggcagaggccagacagctgcccgtcccttcctccaggcctcgcttctctacagacagtcggctcatgccacctcaatcccacttagcaagggctgctctaatcatcatggttcatttagcagcaagtgctggaaacccagctcagacttgcttaattaggaaggaaatgtggggccgggagcggtggctcacgcctgtaatcccagcactttgggaggctgaggtgggtggatcacctgaggtcgggagttcgagatcagtctgaccaacatggagaaaccccatctctactaaaaatacaaaattagccaggtgtggtggcgcac

SEQ ID NO: 91825 - DNA, 1005 bp, Homo sapiens
agattcaagcaattcccctggctcagcctcccgagtcgctgggattacaggcacgtgccaccatgcccactaattttttgtatttttttagtagagatggggtttcaccatgttggccaggatggtcttgatctcctgacctcaagtgatccgcccgcctcagccccccaaagtgttgggattacaggcgcgagccactgtgcctggaccattaacctgtttttccacccttttaccctcatatccctcagtccccactgactggacctgctagggtgggagtgggcgtgggtagcagcacagacatggaactcccaggtcttcttcccttggatggttcccttggtggatgctggaggtagcaggggtcagtggatggcagtcaggccttgccttcttcccactggaatcttccatcatccctgcaggtaactgcaccatcccaggctgagaccgtgagccctttctgggaatttgggtgaggcgtatggaggaaggtgagtcaaatgaaggggaagaccctgaacctctcttcaatttccccaggtgttgcagagaagagccgggagcggctgatcaggaacacgtgcgaggcggtggtgctgggcacgttgcacccccgcacctccatcaccgtggtgctgcaggttgtcagcgatgccggctctgtatcctttctgccaggcctcctcctccaggaagtctcctgattgcttccctcctggcggatacatataccctcactgctagccagaaagccttcaaacacttgacaggtaccagctcactgaagaaggagagcaaacagcctgggtgcttacttatgtgccaggcactgttctgtgtgccttatgcacattaactcatgtaatatagcacatgcccttatgatccccgtggaagtggcagagccaagacttagacccagaccgtctagttctagagcccacggaccctggcagatgagtgttcttatgttcgcatgtttcaggtgacaaaactgag

SEQ ID NO: 91826 - DNA, 1281 bp, Homo sapiens
agacagcgtctcacgatgtcacccaggttggtcttgaactcctgggctcaagcaatcctcctcccaaagtgctcatacaggtatgagccaccacgcccagccccaatacattttaacaaaatttggctgctgtgttgattgtggggagtatgggggaaaacagggaggtgatggtggctccagccagagcaggagtagtggaggtgatgagattctggatgtagtttgaaagtaatacggacaaaacttacgtatagtttggtttgagtgcgaggaaaaagattcaggcataactaaggtttctgcccagatctgtacaagtctggaaatcagaagagagacccaagctggacataggcaatttggaactctctggctatatagatggtatttcaggctattgcctgaacgaagtgagtgtagatggaaaagagaagaggtcccaggaccaagccctaggccttccaacttgagcagtcagagacatgtgacaagctagcaaaggagactcagaaggaacgcccagagagttagggggaaaccaggagatggtggtgacctggggccaagaaaagagcatgtctgagatgtgagggctgaccagctgtttcagccttactgacagccgggtcatgggagggttgatcatttggaggtcagtggtgacgatgttgagctgccgcaatggagtggtggggtcacagaaaaggaagaagaggcagctgttcaggagttctgctgtaagaggatcagataagtggggcaggagttgtagattgttgtggggtcaacaggggagagaattgctggagccacgtcttcaagaaggtgagaggggagagactcttgtgctcgggcaaaacacaggcagttcatctggagccagaggcaagttctgttttggtaacttctccagtcctcagggcagtttctcctggaactaagcataccttccgtgtaagggcaaattgggcttcccaggaaatacggccttaaccaaggaccttcccaggccctccctcaggcttagcgcttatgctgaattgagatacctaaagtttcttcgaacgtaagaattaagaagaggccgggtgcagttgctcacagcggtaatcccagcactttgggaggcctctgaggtcaggagttctttttttttttttctttttttttttttgagatggagtctcgccctgtcgcccaggctggagtgcagtgaagtgatcgtggctcactgcaccctccacctcccgggttcaagcaattcttctgcctcagcct

SEQ ID NO: 91827 - DNA, 1049 bp, Homo sapiens
tgtctgctcacaaacatagccaacgtgtgcaccaggttccactgtgccaatgcttcacgttcatcatctaataaggaccctcattgtggccatggggacagaggttattatttgctcttgttcctgttttcaagagcaggatgcccgtgttttgtgtgtgtgtgagagacagcaagtgaatgggaaaaaaaaaagtgcaggagcctggccaacatggcaaagccctgtccctactaaacatacaaaaattagcttggcatggtggtgcacacctgtaatcctagctactcaggaggctgaagcaggaggattgcttgaacctgggaggcagagtttgcagtgagctgagatcgtgccattgcactctagccaaagtgagatcctgtctcaaaaaaaaaaaaaaggaaattgaagtcaaagagggaagtcactcgctaacggtcatgtggcacagagggagaggagcagggactcaagtcattgactgtgtacctccagagcctgggttcttggccctgacctttgtctgcctcagtcctcagagtcaagtaagcttccccaaagcttaccgtaggtgccctgaagtcccttcccttataagagcttttttgggaagcaaacccactgggtgccaggcctgcaccctcatagtgtggagaacaaggaatcggagccccttcctgtcctccggggcctgtagcctgatctagggttggtctgggccctggcttctttgccctagggcagctgagatgcatgagtttgtgtctctccaggcctcagcactgtgcccagcacagcaggaggctccacaccccttagctcatagtgttcttttgttgaggaacaagaagcagtttgagcctcttaggtgggaggtgggcagggaagctttctcagaggagggggcatttagggggcatttgagctaaaggtaatagggtttccacaaggctggggcgtggccctaaccttccctctgggtccctgctaagtcacttcaaatacacgaagttcctgccatgtgccggtgccactccaagtgcagg

SEQ ID NO: 91828 - DNA, 1026 bp, Homo sapiens
gtaccattgcactccagcctgggcaacgagagcaagactccatctcaaaaaaaaaaattagccaggcgtggtggtgcgtgcctgtagtcccagctactcaggaaggtgaggcagaagaatcgcttgaacccgggaggtggaacttgcagtgattggagatggcgccactgcactccagcctgggcaacagagcaagactatctcttaaaaaaaaaaaaaagctggtttgaggattaggtggcaaaccgtggtggagtgtacatgccctgcccagagtcagtgtgccaccctccctggcccggtcattaggacccagggcccgtgcagcccagtggtgagggcagcacccggcatagggcagcaccgtgtgtcctgtccctgcccttctctgtgcctcagtttcctcattgcttagctgtctacctcttagggctgctgaaagccttaaatgattccacacacttggatagcacctgatccctgctgggatttgagggttttcattacacttctgctaggataatcatttccattgtcgaggtgggaacacaaaggcttggagtggttaattccttgccaaggccccgcaggaggaagcagggtcctgcatgggaggccggctagcctgcccactgccccatgtccccacaggtgatggaggcctttgagcaggccgagcggaagcccaaacccaaccccaacctactcttctcagacgtgtatcaggagatgcccgcccagctccgcaagcagcaggagtctctggcccgccacctgcagacctacggggagcactacccactggatcacttcgataagtgagacctgctcagcccacccccacccatcctcagctaccccgagaggtagccccactctaaggggagcagggggacctgacagcacaccactgtcttccccagtcagctccctctaaaatactcagcggccagggcggctgccactcttcacccctgctcctcccggctgttacattgtcaggggacagcatctgcagcagttgct

SEQ ID NO: 91829 - DNA, 1081 bp, Homo sapiens
cccgtttcagtgctgtccccactgggcagggaccccagccgccactgctgctggttccagtaagcaaagggcagcgggatagtctggcccaggcgggtggagaggttggcaggtagggtgggctcagggttggctggcgtggggcttggcggggtgccccgagggctggggtaggccttgctgagccgggactcggatgtccactcgatgtacactttgaggcccaggagtgtgagcagtgctgacaggcagagaaggcacttggggcagcgcatgacccggcccagggaaggggcggccgcgggagctacaagggagccacaggggagccacggaggccattggggtgtggggatgggcctccagagagggcccagccaggccccaggcagacagcttcacaatctcccatagtccccgccaacccccataacagattctctcggtcccagatcctaaacagctcccctgacccagggacctcgttggtccttattcctagacctaggagtcccccattccaatcccgtaccagcaccctgttcttcccactccgtccaaatgcttccaccttcctaaaagcccaagggtctacctcttccctgtctccatccaggacaagggaccttgccgtctatctcctccctctccctccatttattgccctcaccaggaaatcaggagcgggattcctagctccctggggttagaaacccagcctgcctcccgcaacaccccaaccccagggactggggaaccagggatcccatgcttttttacctctgggtctggctcccgccagctccgggtgccggcctcaggtcaggcctccctcagctccctctgatctgcctgccccagcccctgtgttgtcgaccggcggggcccagccctgcccagccagtccagaggggcggggaggggagtggagcgggagcagggagggccccaggggccggggcggggctgaggcaggagagagggagggagggagggagggaggagggcaggaggccgacctgagagatggggctctggcgtgttagggctggtttctggtgagacagctgggaagggtgca

SEQ ID NO: 91830 - DNA, 1039 bp, Homo sapiens
aggaaaatcgcttgaacccgggaggtggaggttgcagtgagccgagagatcacactactgcactccagcctgggtgacatagcaagactgtctcaaaaacaaacaaacaaaaaatctgggggctgtcatgaaagctgtctagttctcagactgtgacttgagctgagttagcggacccaagcttgtcactgtctgtgggcactcaagggcactctggagaatccatccaataccctggtcttcagaattggcacaactagcacagctgttgagcacagcagccacagggggtcccaaggcacgtgcttcagttggtccctcatctccgtcaaccacaggcacttgtgggattatgatgccattgcatgccatgggcctctggcatcctgtttcccatcagcaagagctcagcgcggcgcccaagcccaaaggcacaaccaaaccaatcctggaatcctatcttaagagtcatctcctgggacactccaggtatcaactctatatccatcaggatgcagtcaggagagaaaaaccacagagtaacttgaacagggaaagtttaatatagagaattactggctttaacagtgaactggaataatgagggcttcactggtaaaatgcttctgaattgactggaaatccatttggggtgctggggaacgttattcccagagaggtgcctcagtggaggcgctgtgtctcctacgcaacttctgagggctggagggtgccaagggcagctgctgaccgcctggtgcttcaggagctgggtgctggggaagccacatgcactgcggcgtccagaggcagaagcacaaccaacaagaaccacgaaggaggcgcctttcctcctataatgcctgtttggtgccctctactgacaaagcttatcccctttcaaaaaacagccaactgaaaaagctgaatttggaacataaagtcaataaatccataaccagcaatactatggggcctggggtgcgctggcctttagtgagtggagtggggcgaaggatgctgcatgtcctgcagtggg

SEQ ID NO: 91831 - DNA, 1085 bp, Homo sapiens
ggtgagattacaggcaggcgccaccacacctaatttttctatttttagtagagatggggtttcaccatgttggccaggctggtctcgaaatcctgacctcagatgatccacctgcctcggccttccaaagtgctgggattacaggcgtgagccaccacacctggcctgtcccatagttttttataatctacaaagcagctgaaggaatcttatcatcaccagctcaaaaccttcaaataagagccaatctccaaggcctaaaacatagctcctactgagctttgagaccccctatcaggactccactggccccttcagcatgacatccctatttcttatttattcaaccatcctaattcaagtctctgagcctttatactctgttccttctcaccactcaaatccctgctcaaatgtcacctcctccaattaacacccaaactcagttagcctccaccatccccactcctctgctccctagccctcacagtcagcctctctgctttgtttggtcatggaattgacattctctgcagtttgctgttatttcctgggttgttatctgtttctccctgtataatagcttggattactgcagtaatctccagactgggcagggatgttatctgccttggtcaccactttgcccccagtgcccagcacttaggaggtgggcaataaatattttcagcctgactgaatctgtctgtgtgcctggttctctggactctgcccctcttaacagcactggggcatcgtgagggctgtggtgctccccaggcctcacccttagctaccattttctctgcagatcttacacctggctggagaagcaacatggtccatacggcgcaggtgcctttttcatcctgaagcagggaggcgcagtcaagtatgaccgctaaggtgttagaacgggctggggcaggtggtggggtatctctctaacatccaggttctgcagtcacacaggcttcagagtcccctggtctctgccgcctcctggctgtgtggcttgggacttgttcctgagcttcagttttgtcacgtgtaaaatgggatggtggtcatttctaacccacaag

SEQ ID NO: 91832 - DNA, 1029 bp, Homo sapiens
cagtcccctcacggttttttagaaaaatatctacatttgtccttatggatgtcaaaatgttacaccatcatttgttaaaaaaagaaaaaaaagatgcacattcatactgtgaagttattaggaaaatactcttgcaaacaaactatataaagataaaacacgcttcaaaagtatgtggtttgttttcttgtttgtctgttttacaatattctataaagtgcagagtcctaagggaaaaaactactccctataacaatagttcaattacagcagcttttgcatagcaatacttagagaaagttggacactacagtttcttcaggaagagaaggatggaagagtatcttctgattcagattgttttttggccataagtctgctttcttcaggaatggttgctgatgccaaatctccattaagtgtattttttgaacagtgaacaggtctatctgggtcttcaagaggaatatcactacaagaatctgtatctgagtaggttcttcggcgtcgctgggagagtcggtgaagtgcagatactggttcttttatacagtggctactcctccctggtgcaagaaccagggtggctgacagaacgcttcctcatttgaacaggagaaggtgacacaggagaaactaagggatccggatggtgccgttgaaacatctcaggtttaaacctggcattggctatcttcacacattcctcaagcgttgtgatgaacgtgttacacgtggcactaagcagagaagaggcttcattgatgttctctgcactaggagatgaatgattctcatcgtggtgaacaaattcctgtatcgtatgaacttgctgcattaagaggtcacagtagaggcgaagttcagacattttggttttcagcgattcactggtttcacttctttctttttcgtttttagtccttgtatcagtcaaacatgctttggagctccccagagcgaccagccacctctgtctttcagctgcgttcactgccttcatgtagaaatgctgctctccaggaatga

SEQ ID NO: 91833 - DNA, 1048 bp, Homo sapiens
ttacatatcctacaattagactgttgccatccactctttcgcctttgtaccagctgtaaccaatacgattctggggcaggttgtgggcgagtagaagaacctccttcccctctgcgacattgaacggcgtggattcaatagtgagcttggcagtggtgggtgggttccagaaggttagaagtgaggctaggagagaggagagagcatcggtcaatattgggacctatgcattagggtggaaaaacagggccctgggtcctgagcaggtctcttcacccctccacgttggagcgtgtgtgtgtgtgtgtgtgtgtgtgtgtgtgtgtgtgtgtcctactgagtcaaagtcagcagtgtgacacccccattccttcagcacctttgaccttggcatttccctgtgtggaatgctcttccccaggggtctgcatggctccctccccactggcctcaggtcctgctcacatcagggcattcttgggagatcccttccctgacaccccctctacagaccctgggtcttttctttctgacctttccctgctctgttccttccagggctcttgtcaacacctgacctcacattctatatctctttgtgtgtgtgttttcctcttcatgacagcataagctctgtgatgactgagacttgtctgatgcttgttgtatgccattgactaaaattgattgcaaatgcttgtggatgagttaatgagtgtatctggtggttatttttcaacttctgattggtgagtaagggcagcatttagtttccttgttatatttttatttggagtgtcatcctaatgcagttctgatttctatcatttttcttttttttcaaatggtaatgacaaatgatgattaacttggaaaacatgatcaattgattttcctccctttttatcaatcccagtttagtgtgactttcctgttgtgacccctgtccctctctggtgttctgtttcctcaggcttcaacaaaagccctctgtctcctctcagagccttgtcctccccaggagaccctagccagtctctgtgctccc

SEQ ID NO: 91834 - DNA, 1030 bp, Homo sapiens
aaaaacaaaaaacaacaaaaaacaaaaaaacaaggggaaaagagtctgcagaggtgaattgggagggttcaggggagaatttgggatttgcgtgtgccccttggacacaggttgggaaagaaaatttcttcctggctcttctctgagagccagactccacctgaaaatgtgatgctagtgcttcatggatccacttaccagagactgtgatcatcgtgactgtggtcctattgaggccagtggctgagttatgggcttggcacatataggatccgctattattcacagtgatgttggggataaagagctcttgtgtggattgctggaacgtcccattgataaaccaagagtactgtgcaggtgggttagaggctgcgtggcaggagaggttcagattttcccctggacggtaattggcctttgagggggaaatggtggggccatctgggccatctggaggaaagagaataaagccacaggtgatgttgtcagagggaagcataagttcctggtctgtggaagggccacggtgtccccctgagccatgtcacaaccctgaagtctcaaccaaacccccgctatgtcccctgagccaaagtctgagacattcacctgtttctcccatcagaaaatgtgaaccctgagccttaaggacatcctggagatgagtgatgatgggaatgggtgtttgagcagaagtagcacaggagacagcccctcccctcccattcttggtcaaggcctggtctgcccaggtttgctcagggcaggaagtcatggccagcctgggtgagggtctgagtccttagacctgagagggactgagagacctggactctggctgtgtggatttgggctggcagcctgggccacagaggaacagaagatactcacagaggacattcagggtgactgggtcactgcggttggcactcgctgggttctgtatttcacattcataggatcctgcatcgttccttttgacgctgagtagagtgagggtcatgttgccattggacagctgcagcct

SEQ ID NO: 91835 - DNA, 1020 bp, Homo sapiens
gcgagtctaagacgctgttttaagaaaaggtcacaaatgagacgaaggtaaatgttattttccttctttctcctgtaaggtgacggagttcagatgactgtgaaatcattgcattttagaactggaagacacttcagaaaactgcttcacaatctttaatgtgctcacagatcccccaaagatcttgtttaaatacagattctgatccttctgatggggtctgagattctgcatttctaaggagcttttggacatgtcgttgcttttggttggtgggccacactttgagtagcaagggttgagggtcatttagacattaattctcattgcacctgattatagatgaagagagactgaactgcagagaaagaatataacttgcttcaccctgccatgcccttactgcatgactttttgtatttaaacccacagctttagcctctccgactagttcttgctccatgcatcacgtagtcctgtcactgttgttggcggcttctctctagcttaggaatccagactccccttttcaccaccttctttggtcttggctcaaggtttcactttggctggttctgccctctcaaaaccttcagtggcttttctgtaatcagatcaaatttgaacgtctgtctagtgttcatttccctgcaacatattatccctgtttagcaagcttacctaacttccctgttttaaaatggtttctttctgcttcagctctccctgctccttcctgttccctacacataccctgttcaggtctctcggtggtagtggtggtggcatgggttccggtgttagactcactgaggttctaatcccacatccaccaacaaccttggcaagttacttcccctttctgaggatcagtatcctccttgtgaaatatccccatatcgtgtgtgagaagagtaaataaaataacatctgcaaacccactcttactcctgggaccttcttcaaaactagcatctccggtggggcctgtgtgtgtctttgtgcatccagagtggtgca

SEQ ID NO: 91836 - DNA, 1080 bp, Homo sapiens
gagctggaggtggaggaggatttgggttggtggagggcagagaggagggccgtgcagagcaggggcgtgttgtaggagaggtgctccctggagctcattggatggggatcttagaggacaggagcttttatgttcatttttgtattgcctgaactcacacagggcctggcactttgggagtattctataaatgactgctgaatggaatgatggtttgtaacctattaacttgtcctgatgtgttagaaagtgggcaaaagtgaagcccattagcagaaagaaaatcttactgaaaaatggtcccatgtatgcatagagcctggtgcggccactttacttacttatgctgctgagttctgcatcagtccacaccgaggccaccgcaggggccgggagctcctcctcagaccttcctccaggtgcctcagtctctttatccctctgttctcccaggtcccgctacctgtcagttcactccatctggtttcccctccatgcacttggggtgggtgtcgcatcctgtgtctcatcggggggtcttcaggtccctcaggtccattgattaaaacacccccaagacaaatggactttcctcttgttaacatgataacttcttacaatgcatctcgagaacattatctgtgtcaagagtctgtctgatgcacagaggccctccctcccccaggaaggaggtcaggggaagttaggagaaaacaccaccctgcctgggttacttatttccctattctacagtgtatttggtagacgttcaaaaatatttgttgactttgtccatgatccacatggctctcatatagtcatttattcacacatacattcagtgagactttgagcccctagtgtgtgcctggtattcgctagatggtggatgctgagatcaggtgtgctgctgtctctgagaagttctcactatacagtggcacctagggtgaccgaatccacctgccccactttacagacatggaaattaaagtgcagggaagttataagattagttcaatgtcacaaagtcactagcctcaaagttacgggaataaatcaagtttcctgactttgtgg

SEQ ID NO: 91837 - DNA, 1047 bp, Homo sapiens
ttctgggaagagttgagcttctctctgagaatcctagggggacccctcaggccaggccctgatccagttctccagggtctttcttagggtcaggtccatggggagaccatggggttcttttctgacactgaccttgccctgctgagtccccccatcagactgtccttcctctgcagcgagtgtctgcagggtctggatgcaggaaaggaattctgatctgtggaagtttgtctcccccgtgtgtgtcctgcactaaatgtccaaaccctgatacagaatgtaatgcagagagggccacaggcacagcccaggcctgacaatcccatatgtgggaagtagaactgacccccaacacccagaggtcatgtggaaatactcacggtatacatggaactgtccagttgcttcttcattcacaagatctgactttatgacttgtagggtgtagaatcctatgtcattctgggtgacattctggatcagcagggatgcattggtgtatattgtctctcgaccgctgtatgcggcccctggggtagcttgttgagttcctattacatatcctacaattagactgttgccatccactctttcccctttgtaccagctgtagccaaaaagatgctggggcagattgtggacaagtagaagcacctccttcccctctgcgacactgagcggcatggattcaatagtgagcttggcagtggtgggcgggttccagaagtttagaagtgaggctaggagggagaaagcatcagtcaatattgggacccatgtattgggatggaaagatggggccctgggtcctgagagagtctcttcacccttcagccttggagagtgtatgtgtgtcccacttggtcaaggtcagtaacgtgacctttctttcttcagcacctctaaccttggcattttcctgtgtggaatccccttccccaggggtctgcatggctccctccccactgccctcagatcctgctcacatcagggcatccttgggagatccctcccctgacacctcctctagagaccctgggtcttccc

SEQ ID NO: 91838 - DNA, 1734 bp, Homo sapiens
tctctattacactccgggagaaggaaacgcgggaggaaacccaggcctccacgcgcgaccccttggccctcccctttacctctccacccctcactagacaccctcccctctaggcggggacgaactttcgccctgagagaggcggagcctcagcgtctaccctcgctctcgcgagctttcggaactctcgcgagaccctacgcccgacttgtgcgcccgggaaaccccgtcgttccctttcccctggctggcagcgcggaggccgcacggtaagcgggggctccgagctggaccgggcgcgaggtggcagggccggacgccgaagcctcagagcgcgtgcctgagggccccgaggcgcccggcgcgggcccgtcccgccccctagagccgcggccacgtgcgagcggcaggcccggacatgcccggtcagcgccgtccgggaaccgagcgtgggccccggggggcagcggcggggtgcgtggggcgtccggagtcccggggctggggagtggggtcgcgcaggatcctcacacgcaggggccgggctctgttagtgcgatccagagaggccgtgggcgtcggtgagctccttcagacccgcaggagccggagcccggcgttgaaggggccgtgggaagtaacggggggtaccacggtttaggatgcgctggagcgaaaggattggggtggggtccgtgctcttggcagtcgtctctgccaggcctgtgttcacatgcttgactttctccctcagatgcctggagttactgtaaaagacgtgaaccagcaggagttcgtcagagctctggcagccttcctcaaaaagtgagtttggggactgaggttcaaaacgggtggaggctgtcgccttggcctgcccatctgagccccagtgtttgccggtcctggcaggggaggcttgtttggggcctccgtggctcctttcagcgtgaggcctggcttgtgttccggttccagcctctctttgtactctgggcacagcatagttgtgttgaggggagggcatttgggatatggggtagtttgtggagatgactgaatcgtgcttttcccactgttttggtcttaggtccgggaagctgaaagtccccgaatgggtggataccgtcaagctggccaagcacaaagagcttgctccctacgatgagaactggttctacacgcgagctggtgaggaacttaggtctttggctggagagtggggagctgggtgacccctggcacaaaccatacttccctgtctcctctgagctctttcccgccccaagagggagagaaacccttggttgtgtcaccacttgctttgtgtgatgtgacattcgataacttggtactccaagtttttatgacattctaagagctttgtgagaggaggacctgtggctttgagcctcaggggaaaccagagacagatgaatgttcatattttgcttacaggtggtttaatcctttctatatacacggaggcagactccctgggtttggatccatcttttacatctggctgtgtgtcctctggcaagttggttaacctgcctgtgcactctctcatccccaaaatgggactaattattgtaccagtactagagtattgcaaggattgaatgaatttaaagcagagtgtttagaacgtgtctgttgcacagtagttattcaggaaaaagccagttgtctttactattgctcagatcatcaagttagccttctccatat

SEQ ID NO: 91839 - DNA, 1221 bp, Homo sapiens
catggagatggtcacagctaggctccacccctacataacctcaggttcaattcaacagcagtgctgctgggatagtaaccactaaagaagttggccctggagatggtgggagtgcccacccagggtgcagggctgtttgtcaaggaagagctagccgggggggtgggtgaggagagggggctgtcagtttctgggtgttagtgtgtgttttcagtttcccttcttataaaacagtgagaattagctgtttacacacaaggaattgtttacctgagaccttgatcaagacccttaaatctccctctcacactacccccagcttccacagcgcggcacctgtacctccggggtggcgctggggttggctccatgaccaagatctatgggggacgtcagagaaacggcgtcatgcccagccacttcagccgaggctccaagagtgtggcccgccgggtcctccaagccctggaggggctgaaaatggtggaaaaggaccaagatgggtaagcagggtagggggggctgcattgatggagtagccttgaggcccggtcatcaattccccaacgaatggtcctgcatagtctgcccagcccctcaggcccctcctatcagaggcaggcaggaggggattctgcagaaaagcaaacagcacggggcctcaccccgacctctctggctgactagcccaggctccaggagggtaatttagcgactatctgctttcattagcctgctcgttaacttttcccaattgatttttcggggcttttgatctaaatgcttgcacaaacaacaccccgtcagctcccaggggggctcccactactgcccccagctcgttagaatgcacctgactagggccctcagtgggacttggctggcggcaggtggcttcttgagaagcctggctcacagccaggagggaaggggctgagaacaggacctgtgctcactggggcctgcatgacccttccctccccacagcggccgcaaactgacacctcagggacaaagagatctggacagaatcgccggacaggtaaggcctgcgtttggggtggggctgggtcccttagtcgctgcccaagcatttccaaagcccatacttcgtcaggtagacttatttccttctctggagggcacagcccagggtgctggtggggtcagaggagggctgcccagagacaggagaaaggacagtcctgtctgacttttcct

SEQ ID NO: 91840 - DNA, 1047 bp, Homo sapiens
ctgttgggggaagtggggaggaggagggaggggctggggcgctgccggcagcggaggggcccccttcggaccccacggaaccagcggccgcccctccttgggcctcagttttcccatctgtcaaagggagcaaagaggggagaactcacacttgacgagtgccccataggtggggacgaacggtgcgaggccggggccaaggcctcccacctgctcagtggagaacggacgatcactaccattgtacgggtggggaaaccgaggcccggggagccaaaccgactcgtcccagggaacgcacatcgtgagaaagtgtggagttgggatttgaactcgcacgtgctttccgcaaagcgccatcctccaacccccgcatgctttagggccacctaaaaatgaaaaacaacgataacaacaacgacgagggtcgctgtgaagctgaaagttgcagagtgcatttgaaagagttttcggaaagctcttttctaggtcattaattataccgtgagagacaggtgtagggagagagctggaggccttctcccattgtacggatgggaagactgaggtctacagagaagtcattactttttgcagattacactgcatgtcagagggaaagttgtgctggaactcaagactattgcttttccggttccaaaggaaggggctgggggtgggagacggaggggattgatgtacgaggattggaaattcagcgggtcccctaagtggggagactaataggacggggagccccagtccgccgtccgagtgctcagcgctggggtgactaggagatctccgatcgaactcgggaggagttggacccatctgcacctccgggcgcggggcggggcccggggagtgacgggggcagtcgagatacggaaacgctggccctccaagacaggccagagcggccctatctggcctgcgtggcgcagtacagcgctagagcggccggcgggaggagtagagtcgtcggggccggagcccggcaggagccgggctagagcggctggcaggaggagtggagctgggcgc

SEQ ID NO: 91841 - DNA, 1091 bp, Homo sapiens
tgacacgggctccgtggcattagtcagactaattaaggacacagaagatgtcggtggaaagactcagagagaagtggagactcaaggagagacaaagatgggagagacagcaagagatgggggagaaaaagggatggagagatgagagacagcacatgagactgtgactcagagaggtgtgaggatggtggctgcagaaaccagatgtgggaggacagaggcacagagacagggacaggacagacggagctacagaagcaggaagggggtgtcaccgctgagagggagagatggagggaggagaggcagggatggtggggaaaatgagacagttctggaggaagggaaagagaaaaatcaggaaacagggtgaaaagagaccaagacatgagacagattcaagggacagacagccaaggagagctggctgcggacagaccaaggcgcacgtagggtggaggggacagacgcaccttggagatgggctgtctgaggccccatcacttggtttctgggactggaagcctgggaagagatgaggtccctgggggaaagaagaacttctgggtttggggactcccagtccctgagggaggagggttctgagttttgttttcttatgtggagagttgggggttgggggtttgccattgtgacttcctgtcacaggaagtggggctggtgggttccaaggcaacatcctgtcccaggcctgtcacagaccagaggagacccctgcaccccacttctctcccgcctctcctctaaccctcccatcccctcttgcctctgggctgtgccctcaggaattagcccccaggcccctggtccctccaacctgggagtccaggcccccagccccctcttccattagggcattagggaccccagattgcaggctgtcagactcagccttcccatggacccaggctcctgagcctccaacgcctgcccccgcaaggctcccgtccctgggctcccgccccctggcgggtctctgaagggctctttgtggccacacagaggccccattgagctgcggaggctgggatgggggaggctgtttactcaccttcacacctgggccagga

SEQ ID NO: 91842 - DNA, 1454 bp, Homo sapiens
tggaggcagcacagaatccagggccctcccgacctcagggggctgcagtctggttgggtgggagagatgtttgtgacctatttgctaggcctggggtccccatccacccaggacacacaggggcacccacttctgttgcatcttcatgctcctgcccctagtggccatgttctgagaggtcttaacatctgtccgtcccgtgctgaagtacagagcagccatgtggtgtctgccaggcactgggtagctttagcccccgcaattccaggcccccagagtgtgggtctcgtggccgcagaggccttccagccagccctgctccctccaccccacaggtgctgacgcccccctggagctgggggactcatccccgcagggcccaatgagcctggagtccttggcgcccccagagagtaccgacgagggggccgaaaccgagaggtgcccaggctggggtgcaggggcgggaggtgtggcttactgggcgctggtgggtgggtgcagggtcaccgctgccatctgtgcctgcctgtcccaggctcttgctccccatgctcctctgctgctctctgggtctggccattcctctcccttcttctttccttttctcatctccctcctgcttcctcattgcccccctttccttttatccttcctttttcctctgctccttcctctccttccttttttcactaatccttctcctcctcccttcctctccaccactccttccatctcctttatttccccctcctctctcacctcccctctcctctctcacctcccccctcctctctcacctcccccctcctctctcacctcccctctcctctctcacctcccctctcctctctcacctcccccatcctctctcacctcccccctcctctctcacctaccccctcctctcacctccccgctcctctctcacctcccctctcttctctcacctccctcttcctctctcacctcccccctcctctctcaccttccccctcctctctttcctccccactcctctctcacctgggttttctttccccaccttccatccccctccgatctccctgccacttttcattttttcagcccttcctccccttctctttcaagcccccctgccccctgccccccaccccccgcctcgctcctgcctcctggtgcccgtccctcaaccccccacccctctgctctgtgccctgggggccctgtcccccttacagctggggggcaggctctgcctcctgcccgtccttgtgccgctgctttggggaccctttggtgggtgcggggaggtgggtcaggttccatctgggcccacctctgaccctgtgcccctctctccccagaaggtggaagaggtgggtgcctgggccctgggtgggggaagggctagcccctcccccatttctcccagcccctcccctctccccatggccactccctccccttca

SEQ ID NO: 91843 - DNA, 1085 bp, Homo sapiens
ctcctcccagctagacacatggaattcaggcccgggacgggtcctgagcccaccctactccagtcccagggtctgggcttccagcctgtcgtactttagtccctgttcttgcccatccccactgagacacctgcctggcctgaatctcgctgtagtttgatggtgctgagggctcctggttccagaaaatctcctcccgcttctgcagccgccagtcatttgccttagagcagctcaaagccaagcaacgcaaggaccctcggttctgtgccttcgtgcaggtgaggtggggtctggactccagcttcccagggaggaggggcctggagacccagactcctaggtgcctgcgccctggggtgagcccaaagcctgggccatcgcaacaccagcatgtttcccgcaggaagctgagagccgcccgcggtgccgccgcctgcagctgaaggacatgatccccacggagatgcagcggctgaccaagtaccccctgctcctgcagagcatcgggcagaacacaggtaccgcgggcctggatctctgggcctcggctctcctcttttttttttacattttttttctcactcattttcatcagtgataccatcacagctcactgcagcctcaacctcccaggatctaccatcctcccacctcagctccccaagtagctgggaccccaagggcacaccaccatgcccagctaatttttttagtttttttttttagagacggggtctcgccatgttgcccaggctggctttgaactcctggtctcaagctatcctcccgcctcagcctcccaaagtgcttggattacaggcgtgagccaccatgcccggccagctgtcctttgtctaaccttggctgcccaatctggagcctccagggcaggggttcaccagagctgctctctcccttgcctgcagaagagcccacagaacgggagaaagtggagctggcagccgagtgctgccgggaaattctacaccacgtcaaccaagccgtgcgtgacatggaggacctgctggtgagcctgggctggccccacacccgggacagtggatggtgtgagagcagggggt

SEQ ID NO: 91844 - DNA, 1050 bp, Homo sapiens
cactggaagcggctggagggtgggagtggctggaggggtttcgttaggtaagccagggtacatgcccgattccataaggaggtgtgagaggtggggctcaggaggacacatcgggccctggatattagcagacagtgagtggtgagttgagccatgggagccctgagagcgccaccactgtgggtgacttctccagcttgtgcttagggaggggcaggcactggggggacctgggctctgagccccatctccccctctccctgcagatcacaaagccttctacgtcctttttacctgggaccaggaggcccagatatacgagctggtggcacagactgtgtcggagcggaaaaagtgagggggggtctgagttctgagtgtgggtggaggacgcccaggtttctgggttcccagggacaggagggctgtggggaggccctggcatagggtctgggggctctgactgcccagggatttggcctttctccccagctggtgtgctctcatcactgagactgccggatccctgaaagtccctgcccctgcctctcgccctaagccccggcccagcccgagcaggtgaggggggccatggagagagctggaggttcagggagtggggccggaaggcggggcaggcttccctccacaactccagaaccgtctctgtgtgagcatgcacatgtgtgaatgcatgtgtgtgcatacatgtgtgtctgtacgcaagtatgtgactgtgcgtgcatatatagtgtgtgtatgcatgcatgtgtgcgtgtgcatgtgtgtgcgtgtatggtgtgtgtgtatgcatatgtgtgcatgcgtgtgacagcatgtgcatgcatgtgtgtgtgtgtgcgcatgtgccgaccccaccactgccccgtctgtctcctgtctccaggcctctgtgtcttccattgtctgggcctctctgtctccctgtctcccggcctcgacctctgtctctgtctccggacctccctgcctccccacctccagctctctgtctccctgcccctgcggccccccagggccaggggtgtg

SEQ ID NO: 91845 - DNA, 1049 bp, Homo sapiens
tgaggagtttggattcgatcccgagaacctggagcttgtacggattgttggggggcagcaggggttactctgggagagggcatggagagtcggaacagcaccccaatgccatctgcccccaggccgagaggtgagcccagcgcatcagtatgctctggctggaggcatctccttccccttcttctggctggctggtgcgggctcggccgtcttctgggtgctgggtgagtacagggtctgagcagctggggtggatggtgggagccaggtgcaggagtgtggccctgagctgccggctttcctgcaggagccaccctggtggtcatcggctcccacgctgccttccaccagattgaggctgtggacggggaggagctgcagatggaacccgtgtgaggtgtcttctgggacctgccggcctcccgggccagctgccccacccctgcccatgcctgtcctgcacggctctgctgctcgggcccacagcgccgtcccatcacaagcccggggagggatcccgcctttgaaaataaagctgttatgggtgtcattcaggaaatattcccccagcatcttctgtgggtctctatgggtggagctgggaatactgcacagagcagggttggggtggaacctggggtgtgggcaagacgatgacaaggtaaacaggtaaaatattatgggatgcccaatggtggtgagtgttcaggaggagaaaagagttgagaaggacagtgtgccgggggtccccgagaccacccccaggtttgatggttctttaggactcaggaatcagagagcaccccaggtttgatggttctctgggactggggactcagtatgcaattgcactcacagctctgatttactctcatcaaagggtatggagccaagtcagccaaaaggaaaggtgcatggagtgaactcgggaaaccaggcatgcacttccagaggccacacctaattcctccagcagtggatcatggtgacgtgtgaaatgtcagccagggacactctgatcctagcctcagcgcccttggtttcatggg

SEQ ID NO: 91846 - DNA, 2042 bp, Homo sapiens
caggggcatcagcatcacctgggaactcagaaatggaaattatgggctccaccccagacttgctgaatgaaaacatctgggctagggcccaggaatctgttttagcaagccctccaggtgtttttttatgccctctagagtcagaaggacagctctgcacggtccccattgtgccttccctgggagagtacacaacgcccgcttctgccgttagagttcccataacgccctcgctcctgacagcccacatgcaccctcctgaaactacaactcctataatacccagaggcgcgcgccgtcactttctgggattatatctcccaaggtgttttgcgagtcagaccgccatcatagcgcccatcctcttagtcaccgtcaggactacaactcccacaatactcggcggcagaactacagtccccagctgctccggggctgcgccacgtcgactccgctgggtggggccggcgtcgggcggggccggcggggtcttcagggtaccgggctggttacagcagctctacccctcacgacgcagacatggcagcgcagaaggaccagcagaaagatgccgaggcggaagggctgagcggcacgtgagcgagctggctctaggccctcggaccagagacccgggagtccgggcccccggccccctcctccctcctccctcgagagcctggagtcccagccccgagccgcagaagtgttggccccggtctcctctaatgggaccctggagtctgggcccctagtcccctccctgcctgctgtacaggaatctggggtcccgggagggagtccaggcacccttagtccccttcttttgcgggggtctggggctccatcccggtccaccactgacccggccccaccccccgcaggaccctgctgccgaagctgattccctccggtgcaggccgggagtggctggagcggcgccgcgcgaccatccggccctggagcaccttcgtggaccagcagcgcttctcacggccccgcaacctgggagagctgtgccagcgcctcgtacgcaacgtggagtactaccagagcaactatgtgttcgtgttcctgggcctcatcctgtactgtgtgtgagtgcctcccgggccccgcacccgcactagccccgaccggctggacccctcctctcgccgctcaggccccgcccttcaccgcccggtccctcctctcaccgcccagggccctcttctcaccgcccaggccccgcccccaaggattggctctgctagactaccttgtcaccaaagggccaggtcccctaccccaccatcaccctggccaggatgcagtgtgactaaatgtcacctggccctccctggtctccaggatgtagcttgccgcccgccggtggagaaggccagggccgtcgggctggcccagccccagctgtctaaccgctgcctccctgcactcctcctccagggtgacgtcccctatgttgctggtggctctggctgtctttttcggcgcctgttacattctctatctgcgcaccttggagtccaagcttgtgctctttggtgagaaaccccctgcccagatgaatccttggtccctcaaatcttggtcttttggaatgcagacagacctcagaccccaaatccaagtccttcaaaacccaagtccgcccaagcctagatgtacactagatcccccaaacctgatcccttaaaatctcagacacaaccgatccttccatcgagtctcagccccctcaaattgctattcctcaaacccaggatccacctggctgctgtgccttaaacctactccttttcaaaccacatgactcctcccctctctctcctccccttgccgctctctgcggccaacatcagctgcaggtgcccacactggacaccaggtggccaccttacactggcctagatctgttcccgtttcttttcctgctttctggggtgtgaccagaaagaacttggaacttagagagggaagccgaggagtatgtttcatgtggttcccagactagtagtaccaaggaccactgggaaaac

SEQ ID NO: 91847 - DNA, 1439 bp, Homo sapiens
caccagcgcctgccatggagccttcccttagactcagcctgaacctcaggccccacctcccctggtgtccccactgcagtccccattctgatgcccccgagcctcccccataggctgctcccaccacggattactccgaagaccccaggccccagccccgcccagggcaccctccacctgtgagcacgaaggatcctgggagactgcccctctgcgtcccctccagtcccctgaaactctgcctctcgttagggccccgcactcaagccctcctgctctcccctctgcaggcccagctggtggttctgtgccttcccctacagtttcctcatcttcgtctacgacgaaatccgcaaactcatcctgcgcaggaacccagggggtgagggagctcggcaaggcagccgaggggggcggggggcagcagggtctcaggcagctggtcccaggctcccctcgccctgctggatggctctgccacctggttcccactcttctctctcttcccatctctccgggcacccactctgtcttctcacgggtctctgtctgtgtggtttccttgtctctctccctctctgtccctctctctgctgggcggctcgccttgcctgtctctctccatctcttactctgtctctttctttccttctttgtctctccaggttgggtggagaaggaaacctactactgacctcagccccaccacatcgcccatctcttccccgtcccccaggcccaggaccgcccctgtcagtccccccaattttgtattctggggggaggagccctctcttcctgtggccccaccttggcccccaccccctccactatctcctgccgcccccactctggctggcttctctcccctgccccaaacctctctcctctctcttttctgtgtcagtttctctccctctcctcacccctctatccattcctcccgccccagccacctccctgggctcttttttactccccttcagccccccggctgatgccatctctggttctggacaattatcaaatatatcagtggggagagagaagcggtgtgtgtgttgtgcctgctttccagacggggactgcggctgggacagcatcccctctgttggggcgcgctgccaggcgactctcgaaactgcaggaacttagcctggcactggcttggaagtcacggaatctcagagccatctaatcacggagttttcaactccacgaaagtcagagcagcttgaattcaccaggcgatggcattgtggaatcagaacaggggagagggagggaagcagacgtgggatggtgactgggagcctctcctataggagtaggacccaggggacacaatgacgatgatgatggtgatgacagtgattcactgagtgcctgctatgtgctctgcccacttctaagtgtgcattaaatgtgcacagagagaa

SEQ ID NO: 91848 - DNA, 1042 bp, Homo sapiens
gccgtgatcatgccactgcactgcagcctgggcaacagagtgagaccctgtcccaaaaagaaaataatggtgggtgggctggggggtagaaaaggacgctggacaggccgggcgcggtggctcacgcctgtaatcccagcacttcaggaggccgaggagggcagatcacgaggtcaggagattgagaccatgcaggctaacacagtgaaaccccgtctctaataaaaatacaaaaaaattagccgggcgtggtggcaggtgcctgtagtgccagctactcgggaggctgaggcaggagaatggcgtgaacccgggaggcggagcctgcagtgagccgagatcgcaccactgcactccagcctgggcaacacagcgagactctgtctcaaaaaaaaaaaaaaaaaaaaaaaggacgttggatgagggcagaggaggggcagagggagtggggctccctggcatgggcgcctgctctgagcctgcctgtgccacaggccgcctgatcttcgacaacctaaagaagtccattgcctacaccctgaccagcaatatcccggagatcacgcccttcctgctgttcatcatggccaacatcccgctgcccctgggcaccatcaccatcctctgcatcgatctgggcactgacatggtgagccctggcagccacccttggggcccaggagggtggagtcctcccctctccggctcacccggcctcctccgcctaggtccctgccatctcactggcgtacgaggctgccgaaagcgacatcatgaagagacagcccaggaacccgcggacggacaaattggtcaatgagagactcatcagcatggcctacgggcagattggtgaggcaccggggactccatctccttaccacccagtgccgggcctagagcagtgcctggcccaccgtgggtgcttgggaccctggcattgactcaggggagcagacgtgggcaggaccaaccagtgagctatctgtggggggggtctgcaccccatccttctccacctcctcctctctgctgttgatgt

SEQ ID NO: 91849 - DNA, 1727 bp, Homo sapiens
ccccatctgcactaaaaattaaaaaaaaattagccaggcgtggtggtgggcacctgtaatcctatctactagggaggctgagacaggaaaatcacttgaacccaagaagcaaaggttgcagtgagccgagattgcgccactgcactccagcttgggtgacagagcgagactccatctcaaaaataaataaataaataataaataaataaataaataaatccactgccccaaagtccttcctcaggtctgcccgcacgccctgctgcagtagcccccttctcccctgcttctcccagaggcctcttcccccagcccctggtcctctggctctcctggttgtggggctggcccctctgtttctctgtctttcagggatcactttgccactcctcacacaccctgacctcagccatcgctctctctgctcttcccagggatgccaaggcctgcgtgatccacggcaccgacctcaaggacttcacctccgagcaaatcgacgagatcctgcagaatcacaccgagatcgtcttcgcccgcacatccccccagcagaagctcatcattgtggagggctgtcagagacaggtgggctgcgctcccgcagaggaggggacggggccttgactcctgggtcctcactgaggccggggcctggtttcctgggtctgagggaggaggggctgggggtctggacccctgggtctgagagaggagggtctgggggcctggactcctgggtctgagggaggagggggctggggacctggacccttgggtctgagggagggggcctggacttctgggtatgagggaagaggggataggggcctgaactcctgggtctgagggaggagggggtgggggcctggacccttgggtctgagggaggaggggctgggggcctggacccctgggtctgagggaggagggtctgggggcctggactgctgagtctgagggagaaggaggctgggggcctggacctctgggtctgagggaggagggtctgggggtctggacccctgggtctgagggaggaaggtctggaggcctgaactcctaggtctgaggggaagaggaggttggggacctgaacttctaggtctgaaggaggagggggctggggtcctgggcttctggatctgagggaggggactctggggactggcctctgggtgtcatccttaccctctctccctccagggtgcaattgtggctgtgaccggggatggtgtgaacgactcccccgctctgaagaaggccgacattggggtggccatgggcatcgctggctctgacgtctccaagcaggcagctgacatgatcctgctggacgacaactttgcctccatcgtcacaggggtggaggagggtgagttggccaggggtggccctggagaccagggtcactaccggaggcctgagaccagcaaggggaactggccagggctgcagggggatgtgtggcagagaccacaggccccctggccctggaggagcctgagcctgtccttttctgtcttcctcccctgtggggtcgggagctcccctgggcaggactgagctgacacacttcagggtccctgcgtcatccagcccaggccccatctggtgggtgaagctgacttggaggctttttaaagatattctcagccaggggcggcagccacgcctgtaatcccagcactttggaaggctgaagcaggcagatcatgaggtcagaagat

SEQ ID NO: 91850 - DNA, 1034 bp, Homo sapiens
gaccgaggaccccaacgacaaccgatacctgctggtgatgaagggtgcccccgagcgcatcctggaccgctgctccaccatcctgctacagggcaaggagcagcctctggacgaggaaatgaaggaggccttccagaatgcctaccttgagctcggtggcctgggcgagcgcgtgcttggtgcgaggctgccgggcgggctctggggtccctggagggcaaggagggttgtgatgctgcccaaagcctgtctcagcccagggcctcccagaatatactgtaaatgaatgaatgaatgaatgaatggatggatgagaggggaaggtatcctaggaaatgaatgctgactggccgtcttgctgatggggagatggaatgcgggcgatgcagacatctaggggcatggggcggaggttccgaggctgggaccctcacaccccaacccttccctgccactaggtttctgccattattacctgcccgaggagcagttccccaagggctttgccttcgactgtgatgacgtgaacttcaccacggacaacctctgctttgtgggcctcatgtccatgatcgacccaccccgggcagccgtccctgacgcggtgggcaagtgtcgcagcgcaggcatcaaggtgtggcttggggtggctgggggaggcaaagccaggcgtggggcgggagaggccatccctaaaaaacaatgcctgcaggtcatcatggtcaccggcgatcaccccatcacggccaaggccattgccaagggtgtgggcatcatctctgagggcaacgagactgtggaggacatcgccgcccggctcaacattcccgtcagccaggttaacccccggtgagccacccatcccagccagggccctggacatccctctagggtgttgacacagggggaccgcttccccccaacctccctctgcactgcctgtcccattctttctgggactcctccatggaccaggccctgggtctggccctccctccggtgtggggacattgcagccacagaggtagccaggc

SEQ ID NO: 91851 - DNA, 1082 bp, Homo sapiens
tcactgcaacctccacctcctgggttcaaggggttctcgtgcctcagcttcccaagtagctgggatgacaggagtgtaccatcatgccctgctaatttctgtatttttagtagggatggggtttcaccatgttagccaggctggtctcgaactcctgatctcaagtgatgcgcctacctcggcctcccaaagtgctgggattacaggcgtgagccactgcacctggctgttttgcactattatgcatgtggctgctatgagcattctagtccctgtctttgggtgtctctgccctgtttctattggtctgaattgggggtggcattgctgggtgctgcctcattcttttccaggccctcaggattctctgggggctgggcagctgggctgtggccctcgtgtcgctcatccaaccctgctgccgggcttgtccctgtaacttgcctgcccttgctcgtcctccaggtgtgtctgacgctgaccgccaagcgcatggcccggaagaactgcctggtgaagaacctggaggctgtagaaaccctgggctccacgtccaccatctgctcagataagacagggaccctcactcagaaccgcatgacagtcgcccacatgtggtttgacaaccagatccacgaggctgacaccactgaggaccagtcaggtgagcgcaggccccgggtgaggaccatgggggcctggctccaggagtccctggccctcacacatgcctcccccagggacctcatttgacaagagttcgcacacctgggtggccctgtctcacatcgctgggctctgcaatcgcgctgtcttcaagggtggtcaggacaacatccctgtgctcaaggtgggttcagctactggcctcacctcggccctgcctgtgtcctcccctcagctgtccctgttctgacaaccctttctccttgcagagggatgtggctggggatgcgtctgagtctgccctgctcaagtgcatcgagctgtcctctggctccgtgaagctgatgcgtgaacgcaacaagaaagtggctgagattcccttcaattccaccaacaaataccaggtactctgggct

SEQ ID NO: 91852 - DNA, 1825 bp, Homo sapiens
ctcacacctgtaatcccagcactttgggaggccaaggtgatagatcacaaggtcaggagatcaagaccatcctagccaacatggtgaagccccatctctactaaaaatacacaaaattagccaggtgtggtggcatgcacctgtagtcccagctactcaggaggctgaggcaggaggatcgcttgaaccaggaggcggagattgcagtgagccaagatcatgccattgcactccagcctgggcgacagagtgagactctgtctcaaaaaaaaaatcgacagacccttagattcaaacacaaccattacagaaagagggactcaagcacaaacaggggagactcagacacaccaaccctcataaccaacctagggtcagacacacaaatacagacccccactgacacaaagctcccttcccagactccaggcgagcagggactggtggagagtggcttgggcggcccctgatcaacatccccacatctccccacagctgtacctgggcatcgtgctggcggccgtggtgatcatcactggctgcttctcctactaccaggaggccaagagctccaagatcatggagtccttcaagaacatggtgccccaggtgaagggtgcccagcaaggggccagacgggggtgttagtgtatgggctgggggccgggcccagtgacccccaggcagagggagtctgggaggtgacattactccatcccacctcagcaagccctggtgatccgggaaggtgagaagatgcaggtgaacgctgaggaggtggtggtcggggacctggtggagatcaagggtggagaccgagtgccagctgacctgcggatcatctcagcccacggctgcaaggtgggcctgggcctagggcccggctttaccctccctcgggctgcccaggagctcaggcccagcccctcctccctcacactcaggagtccaggtcccaacccctcctccctcagacccaggagtccaggcccccaggccctcctccctcagacccaggagtttaggccctgggccacctcctcacccaacagtcaggagtccaggcccagccctcacctttcggagatccttagggaccctagaccttggccagcagcactgtgccttccccaccttcaagatcccagcctctggcctcccacacaccactcacccactgggcacccaggcttctagctgtgatctccaggcacacaggcttcagccccaagccctgtacacaaataccctcctgtcccaggccctggactgaaccctctctctgctgcacctacccccaggtggacaactcctccctgactggcgaatccgagccccagactcgctctcccgactgcactcacgacaaccccttggagactcggaacatcaccttcttttccaccaactgtgtggaaggtgaggcgggtgcagagaagacacacagctggggcagacacagggatgtgtcccagggggtcaggcctccagaacctccctgagccaccccacctcagcctaacccctctggcctgcaggcacggctcggggcgtggtggtggccacgggcgaccgcactgtcatgggccgtatcgccaccctggcatcagggctggaggtgggcaagacgcccatcgccatcgagattgagcacttcatccagctcatcaccggcgtggctgtcttcctgggtgtctccttcttcatcctctccctcattctcggatacacctggcttgaggctgtcatcttcctcatcggcatcatcgtggccaatgtcccagagggtctgctggccactgtcactgtaaggccaggctcctgg

SEQ ID NO: 91853 - DNA, 1121 bp, Homo sapiens
aaaaaaaaaaaaaaaaaaaagacagatatgtaggaaggttggacagggccagggagagggaagaagagacagaagcagagttaaaatgtcacatagaggtggggcacggtggcttattcctataatcccaacagtttgggaggctaaagcaggaggatcgcttgagtccaggagttagagaccagcctgggcagtgtagtgagaccccatttctagaaaaaaattaaaaattagccgggcgtggtggcacacacctgtagtcccagctacacaggaggcggaggcgggaggatcacctgagcctcagaagtcgaggctgcagtgagctgtgattgctgcactccagcctgggcatcagagtgagacattgtttcaaaaaacgaaaacaaagtcacatagacacagaacacaaaaggggagagccccgcaaagatgggcacagaaacagagagagactgaaacacaggcagaagccagacagggaccttcggggacagagactcagagacacacagaaccagagacagggaagctgattgcagcagatgagactcacgaggcctgagagtcaccagaggcagaagggaggtgaagtcacccagaggctccgggagacacagggagaccccgagaggcagacagagaccccccacccagagatgcaggggcaccggccaggaggatagctggggcatggagggccggtgtcctcctggaaccccttctcgcccgcagtctggtggctctgacagctatcgtatcgccacctcgcaggacaagaaagatgacaaggactcacccaagaagaacaagggcaaggagcgccgggacctggatgacctcaagaaggaggtggctatggtaagcctcgccctctgcccgcacaccctcccagagaacctcgccagttcttggctggcctaggcactcaccgtctcccccaaactcctgttcctcagacagagcacaagatgtcagtggaagaggtctgccggaaatacaacacagactgtgtgcaggtgtggccaggctgtgggctgggaccctgggaactagggaggaggagctgggggctaggacccctgggtctgagggaggaggggctgtggctggtgtcttaa

SEQ ID NO: 91854 - DNA, 1084 bp, Homo sapiens
ttgcttggacttctcaacttgatttgggtggtgcaggtctcttttctccagatcatataggaataagctgaggataagctgaggtctttctggaggtggtagtgcaggactggctgggatttccgggacaggttgaatttagaggggatggtggttggtttttgttttttgttttttttttggagatggagtctcgctttgtctcccatgctggagtgcagtggcatgatcatggctcacagcaacctctgcctcctaggttcaagcaattcttgtgcctcagcctcccaagtagctgggactaaaggagtgtgccaccgggcctggctaatttttgtatttttagtagtgacggggttttgccatgttggccaggctggtcttgaactcccaacctcaggtggtccacctgccccggccttccaaagtgctggggttacaggaatgagccaccgccctggtcgaaaggatggtgttctgtgttgaggtccttcataagcaaagtcccagaggcaggtgtgaatctgggcttttaggcctgactggagttaagtgtggatgtttgagggggcggtgtagatgttgaccaagtggggtaaggaggtgtgtgcaaagttggtggtccttcagcgtcagatatatgtgtcagatgtgtgtccaggatgccccacatgccagcttgcagagggcttcctgtgctgggctggcatgtggtccaggagttgccatgtgccagctgtgtgttcgaggcatgcggtcacatatgctgtgggccgcacgtgagtgtgtcagtgtctcctccccatcacgagcatcgggggtggtggtgagtcacgggctcagccttcggcgccaactgtcatgtttcttccccccaaatttcaccccccacccagccatgcaccacccacccccactccaagatctgtgtcgcttctctcttccatccccctgtcctgctcagctccttctgagaggctgcagggtgttccctgggaaggagtctcccacttctggctctgccctccagcttcctctccttgtcccatccacctttcccactgcctctctgctcctgtgacta

SEQ ID NO: 91855 - DNA, 1797 bp, Homo sapiens
gcgcagggcccggaggaacaacagtggagaagcaggcggggcagccacacaggagctcttctgctcagcctgtgaccagctctttctctcaccccaccagctacagcagcacctgcggagtcaccgggagggcgtctttaagtgccccctgtgcagtcgtgtcttccctagcccttccagtctggaccagcaccttggagaccatagcagcgagtcacacttcctgtgtgtagactgtggcctggccttcggcacagaggccctcctcctggcccaccggcgagcccacaccccgaatcctctgcattcatgtccatgtgggaagacctttgtcaaccttaccaagttcctttatcaccggcgtactcatggggtagggggtgtccctctgcccacaacaccagtcccaccagaggaacctgtcattggtttccctgagccagccccagcagagactggagagccagaggcccctgagccccctgtgtctgaggagacctcagcagggcccgctgccccaggcacctaccgctgcctcctgtgcagccgtgaatttggaaaggccttgcagctgacccggcaccaacgttttgtgcatcggctggagcggcgccataaatgcagcatttgtggcaagatgttcaagaagaagtctcacgtgcgtaaccacctgcgcacacacacaggggagcggcccttcccctgccctgactgctccaagcccttcaactcacctgccaacctggcccgccaccggctcacacacacaggagagcggccctaccggtgtggggactgtggcaaggctttcacgcaaagctccacactgaggcagcaccgcttggtgcatgcccagcacttcccctaccgctgccaggaatgtggggtgcgttttcaccgtccttaccgcctgctcatgcaccgctaccatcacacaggtgaatacccctacaagtgtcgcgagtgcccccgctccttcttgctgcgtcggctgctggaggtgcaccagctcgtggtccatgccgggcgccagccccaccgctgcccatcctgtggggctgccttcccctcctcactgcggctccgggagcaccgctgtgcagccgctgctgcccaggccccacggcgctttgagtgtggcacctgtggcaagaaagtgggctcagctgctcgactgcaggcacacgaggcggcccatgcagctgctgggcctggagaggtcctggctaaggagccccctgcccctcgagccccacgggccactcgtgcaccagttgcctctccagcagcccttggaagcactgctacagcatcccctgcggcccctgcccgccgccggggtctagagtgcagcgagtgcaagaagctgttcagcacagagacgtcactgcaggtgcaccggcgcatccacacaggtgagcggccatacccatgtccagactgtggcaaagcgttccgtcagagtacccacctgaaagaccaccggcgcctgcacacaggtgagcggccctttgcctgtgaagtgtgtggcaaggcctttgccatctccatgcgcctggcagaacatcgccgcatccacacaggcgaacgaccctactcctgccctgactgtggcaagagctaccgctccttctccaacctctggaagcaccgcaagacccatcagcagcagcatcaggcagctgtgcggcagcagctggcagaggcggaggctgccgttggcctggccgtcatggagactgctgtggaggcgctacccctggtggaagccattgagatctaccctctggccgaggc

SEQ ID NO: 91856 - DNA, 1044 bp, Homo sapiens
tggtttcccctgaaaagcgagctactccaagggtgtttacggcctcccctgtggattatgttgccttgaaagcccagggtcctctgtctcctagggagggagttgagggcaggatcttcaggctggggaacatggtcgcccctcctctctccttctcatggtggcttgggaaggtgaagctgcagacgtgggcaggtctagggtgccaagatttttcctctcggtctgggtgggagcgaggcccaaccagggtcatgctttaaggaacatggggcgtggattcaagacgcctgggtccatgtccattgtcagctccccagagcaggggccgtgacatcactggtgtctggttcattgcttgccacacagacaggattcaagggacatttgtggagcaagtgaggaagaacccgtgcaacagtagaggctggggtggggtggggtggggaggagcaagtcctgagtgggaggcacagccggaggagcagagggattcagacatctttgggttgaattgaggggaagttgacagatgggggcatttggaggatgaggaggatctcaggatgaccctgggtgtcctttccaagcctctctccttcacctaggaccagtcacctccacccaacaccaacaaggtctacattagtgcagctttcacagttccccacctctggcctcacagctacctggtttgcggaggggagtgaggatctctgtgttagagagatccctctgatgtgggaagacggcatttgtgtttcaaaggcgtgtacagacccacgtatttacccacatgctatatgcttgcttatgcctgaaacagtgcttacttttcactagttatgaattttttggcattaccgtcaaacaaaagttttccaattagtacaaggccttcctaatagaagacagaaaggtccctctgggccatgtgggaaaggccaggatgtgagcacaagaaccaggtgtcagctggggcagggctgggtgggtcttggggtggagatgaggttggcaggatcagctgaggagtatgagatt

SEQ ID NO: 91857 - DNA, 1035 bp, Homo sapiens
gcaggggacaatgagaaagaaaaaacagtgcggggcagctgcagctgaggcaggtgggcaggactgtggggcaggaaggaaggacctcacacctggccccccaccccccaggctggccatgcctggcagagtacgaggaaattggccaaggccctggtgtgtgtggactgtgtgtggagggtgaggtggcggtgtgtggtaaggagggatgtactgctctccctacccatgtgatcaggtcccagtcggctctggctggtccctgaagctacctgagatcatccctgtccattcaccctgtcccctccccaccgtggctcacaggggcccagaggaacgtggaaaaaggcttgagcatccctgacttctggcctggggaatggggagaaaggtgtgtgtgtgtgtgtgtgtgagagacatcactttggacgtgatcccctttcagtttctctctagctttgccatctcagagtctctagtgggttaccaactcccctccaccactatctgccgtctgccttttatctctctggtctcctttctctctcactctcactcagcctttctgttcctctctgtgcattgccccctttctagttctccctgcctctggcccccgttctctctttatctgcgtcttctctctgtgtggctccatcactgggttttctgctctgttgtgtgctctttctctgtttctctctccgtctctccagtcactgtctctgcgtctctctctgtcgtgctctctgcatttgcccttcctctgctctttttctctgcctttgcctcctggttttggtgtctgtgtcccttccagtctctttcatcttctgtctctgcttctctgtgcatctctctgcgtgtgcctctgtctctcactctgccgttctctttctcttgtcgtctctcggggtctctggctgtccatccctgcctctgtttgtgtctctctcgctccccctccctgtccccccctttttttcctgtttctaacacccacactcacatcctacctctggagtaattgctttt

SEQ ID NO: 91858 - DNA, 1607 bp, Homo sapiens
cttccttctgtctcctcaacttgcctgtgagccccgtaatagagcagagaccttgtctaattcatctctgtcccctgccacacttgattcagagccagagaaatctcaatatttgttgatgaactaaatgcacaaatgaatggacaaatgtacaagtcagaaatatcattatgacttttatttttaatctccccagagcacataggaacttaataatgagtaaccttttcaaatttctttctcatttgttcctcgtagcagtcctttgagatacaccatttaatcagttaattcctccatccacccatccattcactccgtcgtccgttatgcactaattgagcatctcaaatttgccaggccctctgccaaacacaaaagcttcaagacacagttacagtccctgcactttaagaagcttccagtctgatgggaaaaacagatgttccacagtggcaggcactagtatgcccatttatgagttggggacacagaggctcagaggccagaagtgactactgaaggcaacaagtggctgactggacctgagttccaggcacctgactccacagttagccaactgcagctcctgatgatgtgacaggaggagggttcctccactggaggagtgcatcatcctgcatgaggatggggaattctccgggatgttgactgcattctcctctctctccaggttctcgactggaccgggttggtggcctgaatgtattagcttcgctgcgtctgcccaagaggtaaggaccacggccttagagttttgcttattgatgcaccttctggtttctcacagaagtctctgctttcccatcctcgtctctggcctcaccctgggtgtgttgctgcccttctccactctgcccacccagaggttagaatctgactgctttgttctcaccctccatgcatcctgtggctttcgggccaaaccagtggttcttggtgttgatgactgtgggtgtttctgctgatcagtgttacggctcagtaggagagagatgggggtaactcggtggctcagatcacagctttgggttcaagcacacctatgttcgaatctcttttcctgacttcgagggacttgggaaagtttgagcttccatttccttgtctgtaaatgggaatactaatagaacccaccttaagtgccatcctgagagcaaaaggagatagaggaagaagagccaggtggctgagtgatcctgggcatggctcagtttccccatctgtcaaaggagggtaattaatagcatttaccacatggaggtggcgtgaagatgaaagtacttattccttgaaatcgtgtggctgcaggaagtgggagctcaaaatatggctggaagcgttcccctgaacaaagaaggttttatgaagcccctccctgaagcccactgagactcccaggtagaagccatagttctcctgctgctcacctctgtgggaagcaggggctctggccatttgccctggtgtttgctccagcttgcttggtgaggccctggcaatgagcatctagggaggagggtggacagggcttctggggtgggacagccctctactgccacccctattcccaccagagaagctta

SEQ ID NO: 91859 - DNA, 1070 bp, Homo sapiens
gagggcagggagactcaagtgtgggccctgctggagggaagcccaaggtgggggcactgcctgggggaagaccccagccctaaggcgctgtctgactctggcccccccgaggcctggggattccctcgcccaccccatcacttacaccaatattgacggttaatgccgtgtcgccaccgtgttcaacactcagcgcggctaattgttttgactgggaatcggcaaggcgattaaacgccatcgattttgccctgcgcgctgcatcgatttttaaatttcctattgatcccggccctaaatctccttaaccaagacctcactgtggagatgacagccgctgattagctccagggcgggggctggggggaagcagcccctgagcggggagcaaccccagctcctccctcccctcagggaccaggggttctggtccccttctgcccctgaagatgaaggcccagggagagacaggacagatggaggaggaagtggggagacccttggccctttttaccccccttttgcttcttgtttgggcttttccctggtctctttgcccccgctcccttcattcctctctgtctatttctccccatctcttctctttctctctccccctccttctcagtccatctttttctttctcctcctcctccttttgaactctggtgcctcccttaattcctcactcctccttcctacagggctgtggagaggctcagcaaaccctctttggggatgggcctcctgacctcttgcctacttctctgttctctccatcttgtacacaggaggtagaaggacctttccaaaggcaaactggattgtatccctctccctctctgacgaagccctggctgcttggaccaggcacttgacgccctgcagggagcagcccctgcaatctggaagcctcgtctttccccatttttcttactgaaccctggacaggcaaagtcctggcattctctcgttccttgcacctggttctttctctgattaaaatttgtcttccaggtttggcttgggtgttgtttcctccctaagtcttctgtgatctcacccaggat

SEQ ID NO: 91860 - DNA, 1022 bp, Homo sapiens
aagaagttatgtcatgaaggggcttgcagagaacgtagctgggaagtgtgggagccaggattcaaacctagccaacttgtccccagagttgatgcccttaatccttgtgaaggaagtgctcctggaggatagcagccttcacatgagaagctgggaggggttcaggctgccggtagccgtgtgcatgaatagaccaagcctttgtctgggttactaaaggggcagtggctagtttggggaggggggattatggccttccctgacccagagtaagcccacaggatttagataagcaggagaaggacagctctagggaagagctgacagcatttttggatatctatgtctgaagatcacgctctagaagagaagatttggggagcctgcacagaggcctgcttactccttggggagagctgggggcagttgatgccagggcaaagggccattacagggacccttaccatgactatcaacagaataaccttgacagtttgagctgccgtagacgtgggttagattgccccaagtcgtgataagttctctctcttaggaggcatctgagcaacctctgcaggaggtgtttgagaatgagtgggtatttgggctctgactactggggaacttaggcacctcgtggtgcaggcattcttccaggggtgggaattagggccaggaggctgaatgcttcttcctgttcttctcttcctccagtgtctccagaacgctatagctatggcacctccagctcttcaaagaggacagagggtagctgccgtcgccgtcggcagtcaagcagttctgcaaattctcagcagggtcagtgggagacaggtgagcccagctgggtgggtgtaatggcagcatccctcttttccttatgaattgtgcccatcaaggaaggggcctgaggggttattctgtctcattttcactgtgtgtgtgtgtgtgtgtgtgtgtgtgtgtttattgctacagatactctgttctgaagcaacatacagaattgttgcacatagttt

SEQ ID NO: 91861 - DNA, 1033 bp, Homo sapiens
acagactatcatgtgcacagagctgggggagaccatcgccatcattgagacatcccagccactggcgcttgaggacaccctgcagctgtgccaggctgcactgggggccagtgaagcaggcgggctcttgcagttggacacggccttcgtgtgacgcagctgaaaagcaacaacaaaagggtttggttgcaacagccagtgtgggtacctctggggagagaggacctcctctgacaaactggtctggtacccaccatgtgccaggatccaccctggcctctttttacccactgactccccagaacaacccttccaggcttctcttgtcatctttctctgcctgaggggaaactgaagctctgaaatgcgatgtgatctgtaccaggtcacccagctatgctgcaaagtgggttggccaaggccctttgcactgcatcaccctggtgcccagcaacatcaggtaaccttcactgagcaccaagcttatgccaggtctgtgctggccactctcatatacctcttcagatcctctgcttgtacccccagcccttgccttccctggattttgggcacccaggactttgctctgcctggtggagggtacttgatttctctgggcttccttcatctcaattctgacagtgtggaaggaaatctgtaggtacccaggtcctcagctccagactgggtgatgctggagacccaggagcaagtcagcacaggctctgcccacaggaggcatgcacaatctggtaggagaaacgcacaagtacagatagcttgctctctgagtgtgtctcattgattcattcagcctgtgtgtcctaaagcctcccttctcccatactgggtgatgctgggggcagagatgagtcaggcctaaggcttctctgggctgtgatggggatgtgcagggacagtgggatcccaggaaacagacctccatggtgggagatcaggagttaaggacttcctagagaaggtagtccctgaaggaaaagtaggaatctggcagtgaaagaggaaaagaaca

SEQ ID NO: 91862 - DNA, 1158 bp, Homo sapiens
aaacaggcagccggacagaaagcaggttttcatgccaataatttattgaacggaggtctgtacacaggcaaaccttactgtggaaactaagacatcaggagctctctccactcccctggccctccagggtggggtgaggagggagtagaccttgggggcagaggacaggaggggagttacagctgtaggaggggcggggccaggttggacggtgcgaatcgacgttttctttaagaaaaaaattataacaatctatttacacccgggggccagggaagggaagaggagacgggctgggctggttctatttacaagggacacaggaggggagggggtctggaggaggtggaggtctgggggaggggagggggccaagggggtaggaggtcctcatccccccaacaccctgtccttctcttccctccccacaaccagttaaaatcctcttaaaaagcccaccacaggggtgaggctggtgagggagggactggaggtggggacagggactcatttacctctgccctctagtctaggggcccagccagggcaggagcttgatgggctatggccccccttcccagcccctcttggggctcccagatggaagtggaagggtgcttggtggggccctcaggaggagttagtgagggtaggtgtggcatcggtcgactgccagtctgagctggtcggagtctcagttaaagctggagggaggcagggaaggagcagagttagcctttgcctttcagacaccccttcgcccaacccaaaagtaggaattctcttgtcatagatgctacattaaaagttacaagctgttactttaggtgaagggttgcaaactcaagtgctaaagggccacgatagtaactgagtgacacaccagagtgccaggctccatataaggcggtggctgggctgggcacagtggctcacgcctgtaatcccagcactttgggaggctgaggtgggcagatcacaaggtcagcagttcgagaccagcctggccaacatggtgaaactccatgtctactcaaaatacaaaaataagccaggcatggtggtatgagcgtgtaatcccaggtacttaggaggctgaggcaggagaatcacttgaacccaggaggcagaagttggagtgagccgggattgtgccac

SEQ ID NO: 91863 - DNA, 1136 bp, Homo sapiens
tcaagattccaatttttatggagggtcagcagggctcatatagtcccagacctgggctgcctgcttacccgatacaaactgacctctccttagtggttgggccttagtttcttcatttggaaggtgggggtgtgggaagcaaccagtcataacttgccgcaggcactgtggcagtgagataacaggagtatgccagtgtccagggcatctcaccctcatgagccctgcacccatccctcaggtgttcaaatctcgaacgccgccagaggccatcgcgctctgctctagcctgctggagtacaccccatcctcaaggctctccccactagaggcctgtgcgcacagcttctttgatgaactgcgatgtctgggaacccagctgcctaacaaccgcccacttccccctctcttcaacttcagtgctggtggtgagggcatagcctgggatctggggagtggggcggggtaggggggcagccaaagattgtgaggagcttggtgttgaagcaggagtggggagctaagggcagggtacaaggcaggcctggggctcaggaaagatgactcccagattcagggggaatcgaacctgcttcagttgtgctttactgtgatctgccttgtgctaagctttttctggtttttcattgagagaggtctgtggctgaaggtgtccacaaacaactggccttcccaatagctgggttcccatttggtgcccatcataaccctgctgtagtctaccctgactagcatgtcaattcctgtttctagaactctccatccaaccgtctctcaacgccattcttatccctcctcacttgaggtccccagcgggcactaccaccctcaccccgtcctcacaaggtaagtggggaccatctgctgggggttaaagtatctctcagcctggagagggtggggctgttcgctcagtgactgggtttcctgaatgtatttttaaatcatcgacattttgatggcataggaaacacatcttacaacatgtgaatgaccacctttagagggtattcttgcgtacaaatgtttaaatgtgtttaatgccaatgggaaagccagagaaataacgtctggcctgaacacaaacaaaaagttgaattcgttgcccaagtttg

SEQ ID NO: 91864 - DNA, 1266 bp, Homo sapiens
ctgctgtggaaggtgccctttcaaactctcatgcccattccctcaattcagacttcccctcatgcctggaaaatggcagttgtccccacaaacagggaaggacacagaggccctgggagcaagttgcaccttcatggtggcaaagccttgcttcccggttcccccaaggtctccagcagcccttccccctagctgagaacagagggctgacagggaggttccagagctggtatggactctggagtcaggtcagctttcaaatcccagtcctgcccagtcctagtggtgccagtgcgggcaggcggcctcacagctctaagctcatctgtaaaattagcattcaacagcatcagcctcctaagtttgtgaggactggatacaagaacagaagttaagctttcatcaccaagcttggcatacagcacacagaaaactccaaaacttcccagattgccactccccccgccaccctcccataactctgaccgatggatgaggtgtaatcagtggctccaaagatgagctctggggcccggtagtagcgagaacagatgtaggagacattgggctcccctcggaccaactgctttgcactgtgggaagagatgggcaggggtacacgtgaggcaagggttggggtcccccctgcctcttcagccacccaacatgccccaggcccacctgccaaaatcgcagagcttgaggacagcagtgtcagggtccaccagcaggttctggggcttgatgtcgcggtgacacacgccctgggagtggatgtaggccaagctgcggaagagctggtacatgtacacctgcggcgggcacaggatagcagaactttagcccagctttccccatacagcaccactaccccaccagcttggcctgaagagcccttccaggcccactctccctgctgcccccacagctttggggaaacccatttgaaaccttggttctcttaatgtgcaccacaatcacttgaaggacttgttaaaacagggactactggctgggcgtggcgggtcacgcctgtaatcccggtattttgggaggccaagaccagcctcgccaacatgttgagatcccgtctctactaaaaatacaaaaattagccgggcgtggtggtgcacacctgtaatcccagctactcgggaggctgaggcagaagaatcacttgaactcaggaggcggaggttgcagtgagccgagatcgcaccactgcactccagcgtgggtgacagagaccctgtctcaaaaaaaaca

SEQ ID NO: 91865 - DNA, 1211 bp, Homo sapiens
tcacaaggtcaggagatcgagaccatcctggctaacgtggtgaaaccccatctctactaaaaatacaaaaattagctgggcgtggtggtgcatgcctgtaatcccagctacttggaaggctgaggcaggagaattgcttgacccagggaggcagaggttgcagtgagccgatattgagccactgcatgccagcctggcaacagagcaagactctgtctcaaaaaaaaaaaaaaatggggtgaagaaaacacatctgtggcctgggtttaacctgtgggcttccagctcctgtgggaggggaatagtctggagacaaggaattgggggatactccaggggaccttggagctgggacacagggagtagctgcctggctgttgttgggagtgagtgtgagtagggaggagcagccgagagagttggttgtattctgagactctccctttgccctcaagaaccgagagctgcagatcatgcgtaagctggaccactgcaatattgtgaggctgagatactttttctactccagtggcgagaaggtgagatctcgaggtggtggtggtgggttgctccagccattttcctgcctgcctgcctttcccccactgctccctgcataccttccttccccctcctcactcttctcacagtgcctcacacctctcctttgctccctgcagaaagacgagctttacctaaatctggtgctggaatatgtgcccgagacagtgtaccgggtggcccgccacttcaccaaggccaagttgaccatccctatcctctatgtcaaggtaggccagcaggtgggctgctgggacccaggcccacaaagccaggggctctggagcctcctgccttttatgggatccctcatccgccaagtttatgttggtttttggaggccccatgtcccctgctgttgttcccataaccccccgagatggagctcgcctaacacaggggagggccaaggcaggcaaggcctgactgaatcaggaaggcagcctgacacctggggttgcagaagctgccaggtagttgctcaggtccatacagggagtccagtggcaccagagatgttggagttagctcaggataagggggtggtggggaccaggactgcacagagacagctgctgaggccagagttcgggcctttagagccttggctgggggtaggtgggaaggagttagggctggaggaaggttag

SEQ ID NO: 91866 - DNA, 1016 bp, Homo sapiens
gaaacaaactcaggtaagaggattgcctgaggtcatagagcaagtgccccagtcaaggctggaatctgattcccaaaccctctaccttaaccatttggttacacttcttcccaggagagaaagggacctggcagggctagcgcgggtggttctgaaggtcgcgctcttcccaggtgtttggccagcgcagaatggaatggaggtgccctgtgagctaggagaggctcagggaactagaaggagatggaggaagtggaagttgaggaataattggtgtttaagggcctggcatttggagcttagactagtctggatgtaggagaactgagcctagactggaaaggaaccagaccagggcctcggtcttggcagggagggcccttgggcaggaggagctccagggtgtcagaatttgattggagttgagttccagaagtaagagggatgtaggggcagggagttcctaggcctcactgaggaatagagaatggggaagaatgctgagaccgcattctgggaaaagtccaatgcctggagtctgggactcaggatcctagatagagttcgaggacccagatgcttccacgggaccagagtgagctggatggccactacctgtctgttgttgcttgtgccaggtaggggggcaagcctcatgtgcccatgcctgattttttttttttgagatggagtcttactctgtcacccaggctggagtgcagtggcacgatcttggcccgctacaacctctgcctcccaggttcaagcgattcttgtgcctcaaccacctgagtagctgggattgcaggcatgggccactatgcctggctaattttttttttttgtatttttagtagagacagggttttgccatgttggccaggctggtctcgaactcctgacctcaagtaatccgcccccacctcgacctcccaaagtgctggtattacaggcatgagccagcatacctagccctgatttttcaagacaaactgaaaactggatttagatgtgaa

SEQ ID NO: 91867 - DNA, 1028 bp, Homo sapiens
ctattacaatcgcttaggaagtaaagccttgtctccctccctgttctctgcctcttgtacccctctgacccacccgctctgccccactcccagccctcctcagccccagccctgcctgccctgcccctccagggggccatgagtgcctaggtttctcataccccacaaggtcacagcaggggagggagggacaattttataatgaaccaaaaattccatgtgttggggggtggggggcggaggagggtgaggggtgccgcccatgggccacaaatctctacaagtgcctgctatccctctcccactccccaccccagcaccggtccaaccccttcatccccagctgctcctaggactggcccatgggcaggcgggtggggggatgggaagggggtgccctgaaaccaaactggaagccccctctgcctcccagctggggcctctggggtggggtggggggctgtggtcaagccttattctgtattggggactgagggtggggggagtagaggggccgctggagaatgtattcaaaacaataaaactttggacctttggatgcagtgatcaatgtcctaggtgctcggtgcagccccctgagggccacagcttttgcttgattctgaaggaggggccccaccctggctgctagtgggtctgtggccagatcagtatagagggcctaaccctaatcagaatgggccaaatccaggcctgggaaaccgtctcctgacctcagaggcacatgagccccagagcttgatgatagtggtctcaggcatgcgccggcttcatcagactgctcctctgttccatggggaccttgtccttgaaagctcttcccactgtttttcaccacaaccccactgcccttgctcttctgattgcctggatgccttcccacttgtggctaggaattcttcccacaccccaggtccccagtgaagaccaggagctcccttttgcactgcccctcgcaccctgcccacacccctctcttgttgctctgagttcagctgggagtcctt

SEQ ID NO: 91868 - DNA, 1050 bp, Homo sapiens
aacggtacctgcaggcccacacccaaagcgtctacaactaccacctcagcccccgcgccttcctgcactaccctgggctggtggtgccccagccccagcgccctgacaagtgcccgctgccgcccatggcacccgagaccccaccggtcccctcctcggcctcgtcatcctcttcttcttcttcctccccattcaagtttaagctccagccgcccccactcggacgccggcagcgggcagctggggagaaggccgtagccggtgctgacaagagcggtggcagtgcaggcgggctggctgagggggcaggggcgctagccccaccgcccccgccaccacagatcaaggtggagcccatctcggaaggcgagtcggaggaggtagaggtgactgacatcagtgatgaggatgaggaagacggggaggtgttcaagacgccccgtgccccacctgcaccccctaagcctgagcccggcgaggcacccggggcatcccagtgcatgcccctcaagctacgctttaagcggcgctggagtgaagactgtcgcctcgaagggggtgggggccccgctgggggctttgaggatgagggtgaggacaagaaggtgcgtggggaggggcctggggaggctggggggcccctcaccccaaggcgggtgagctctgacctccagcatgccacggcccagctctccctggagcaccgagactcctgagggctgtgggcaggggacctgtgtgccccgcaccccccatgcttcttttgctgccttaagccccctatgccctggaggtgagggcagctctcttgtctcttccctgcctcctcccttttccctccccacattttgtataaaactttaatttcttttttttaaaaatggtgggggtgggtgggtgcccagggctaggggctattccctgtctctgtgggtttctaagctctgggcaaagtggtggtagggggagggagggggaagttaagggggtcacctccattctggggaatttatatttgaattgaggctttggccttaacacccaggaact

SEQ ID NO: 91869 - DNA, 1029 bp, Homo sapiens
gggccccccaggaggccggcgtgttcttcctctgccaccactcctcccttccgaccctcatagtcccttaaaaaaagtttgggccgtcacgtgaggttggggggtgcccaggagttttgtccccccaggcttgcatagtctgtctgggagaatccctaccccgcctctgtgggacccaggtgtgcttctgggacctcgccatcccagcccttgctgtctgactgctgccacttctgcactctgtctcgcagtctcctgaacccctctctccatgtgcctgctctctccctgcctcactggcccccatgttcccgaggtcccgcacccccaagcttcctccgtgcaggtctggtgtttccctgttttaagcacgtggacgcatacacagcacactcacacatgctccccttgcccgtgcctggctcctggctccaaggcctggggaacagagccccattgagacaccctgacgtcaccccctcttcattctcccccccccaaagccgggaacaggccttcatgtatgctgtgtccgatgaggaaagccgccgttgtggtgggcttgggagtggggaagggtccctgccagaagtgggagccagggtccaggccctggaggaggggttgctcagggaaggggtttaacaagggggcctgggacagctcccagaatgcggcttgaggcctttccagagcccccccacctcctttccgagttccctttgtgttgcatgtagtctctctcactccctctcttctgcaaagtttatttttagcctcctgctcccccgctcccaggactgtcgctgcacacacgttgcctggttaccgggacacggaggctggggcgggtgggctgggaagggtggctttaattttggggggagggtggaagtcagtacatcccccacccccagattgatgtctcaggggctttggccccccttctaggtctagagccagattggggctgaggtggaagtaacatggagcttggttccctgagaggggctgggagctttttggagg

SEQ ID NO: 91870 - DNA, 1893 bp, Homo sapiens
ctggcgccggtcagtggggttgtgatcgctgattggctggctgctccagctgttgcaggtccattcaccattttgtgtgttggagtaaaaaaaaaagggagaatcgagagggagagccggagggggggcggggagggaccggaccggaccgagccggggccacggccccccgccccgaaaccccgccgagcccaaggtgaggggcggggccagggctgacacaggaaaggggggtccggggggctgggggccgagaggggacaggtggcagggacggggagggggtacagggggaaaggggtgggcggaatggtgggaagggaggagggagtggaggaagtggtgggggtttgacagaaaaagggtaactgggggagggggtggtgggcaaagaagggtaacaggaatggaggggtgacaggactagatcagggtgacagggagagggaggggacagagttggagagtgtgacaaggagaggtgatggggagagaaggtgacaggtccggagatggctgacaggacagtgactgggaggaataggtgacagagataaatgggggtgacaaggagggggtgacaggagggggcctagggcattttaaccgagaggtagagatagaggtagtgacaggatgagagagagagtgtcagagaagctggtgccaggagggctaatgggaacagagggtatgagaccccaaagagccagggcctgggctggcctgggctccgggagttactactcagatctgaggaaggtgagggcccccggggcttgggtgggagttattcagacagggtggacaggaagagagtaggccctaggggaaagaaagcagctctggggcgaagagaggctgggccaggcagcaaggtctaggggtccaggcggcatagttgtaggccctgggtggggtatgcaaaggtttgtgcttggaaaaaactggagccagatctcagtccccaacatggtagtctagtgggtcagcgggtattaggtggtgatggctgcccaacttctgggcatttgggtgccagccccgggacgccctccaggctctgcctgtgaggaccccaggattggcccaagaaagggcaggcctgggactccagggtccacaggaggagcaggcccctagtgagagagcatgaggtcaagggtcccccagtagctggaagactgagtcggggttgcctctcattgtgtttggcttatggttctgggtcccccaaccctcctagaggcctctgttttggcctctcaggttctcttagtcacttcagagtaaagttttttccccttttcttttctcagggcagctcgaaagggggcgggcagtaatgactgttcaggaagtgggtgaggttggcctgttgggcttgtcctgctttctttgaccttatcccacctatccccacttggagttggagggcatatttgggggcctgcggggggctagccgactcagccaccctgccagagccagcccagccagggcggggatgcatgcaggcaagaagaggggggctgggcttgcgggtatcacgctgggtgctgtggggggaggagcaggctcccatccagtgggacagagaaaccctggggtgtagctctgtgtcccactgtgtgatgacgtgtgcgtgcttctgtgcgtgtgtgtgtgtttgtgcgcgtgcgtgtgctcatgcacggccccgtggcagtgctgggtatgagctcttgccccagacatgcccctgcctgctccctgccaggatctggggagatggctgtacctggcagccctagggtgcagagcagagtgggcagccgtccctcgggactctcagctgcccacttcttcccacagtgcctggccatgccaggctgcccagaggggcagagggag

SEQ ID NO: 91871 - DNA, 1044 bp, Homo sapiens
caggctggtctcgaattcctgggctcaagcagtcttcctgtcttggcctcccaaaatgctgggattacaggtgtgagccactgcacctggccttatttatttttatttatttattaatctactgttgattcagggcctggccctgtgctgtgcctggccctgtgctggatggtgctgaggacacagccctacttacacagggctcacagcctctggaaaagacagacccctccctagacagtaacagtctggggtggtcagggatggggtggaggaagccaggaggccgtgggagcccagagaagatgcctgtccagcctgagaagtcagagaaggcttcttggaagaagggccagatgcctatgaactgaaacctgaagggtgtgcagatgtgagcccggcagggtaggcaggaaggatcttcaggcagaggaaagagtttgtgcaaaggccttaaggcaaaagcagatatttgtaagatgttgaatctggaaagtcaaagactctaaatggcaggtgagtgttggggatgtgtggctggattggtgagcaagggtcagatcagagaggacccttaagtaagatcattatgaactgtatcctgagggtactagggagtcatggaaggttttgagcagattcaaccactgctgcaccatagagggtgtgtttgagtctctgaggccagaagcagggagaccagggaggaaggaggctgggtgtggatgtgggtaggagccgctgtggcttgggcttggggcaagagccctttcaggaaggagcactggcctggcccttcccttttggggctccagcccaggccagtcccgagggacagggcacagggacacgggttatgcctgcccctgatgttcatatacagaactgaggctgtgagctgtgtgtttcaccctgacaccaacattttttacatttgttgttataggtggtacaagcaaaatttcacagcagggatttctgtccttaggtaatgaagaaactaaatcagagggtctctaaccactcccctacccttcacccccc

SEQ ID NO: 91872 - DNA, 1028 bp, Homo sapiens
gtggctagttgaggctggagctgacaccagagtccaggcttagcagaagggtgccgtggacgacaggcccagcttgaatgccaggctgagaagctggggctctacgcgggccagtaaagagtcaagaaggcatttagagcaggggagggaaaatgttggatctaggtgtcagagacccctggagaccgccctggaaaggcaggagttgggaagaagatggcttggggaagaggaggagaggaggaagagcttgtgaaggtgcaggagtgagtcttggtaactgtagaagagaccccagctcccccagcttagcagcccccagcaccaggagctgcgaggcgtcaggctgcctcctggcggcaggcggcggcgggacagcaggcgcgcgcatgcgcggcagagggggttggggggtacgtcccggagcccccggtgcccgggtattaatggctccattagtggccgggagggaggcgcattagcggcggcgacggcgtctggctcccattaccaccggcggcagcggctgcaccgcaggcggctggaccctagcccgccgcgccgcctcctccacccccaccctatcccctgttcccgctccccacgagggcccgggcagggaactcccgtccccctatttcagcggaaaagctgattgtgaagccagatagatttgggttcaaatcccggccgtgccacctcgcggctgcaagatgctatcccccctctgagcctgtttcttgcgaagtagtcggggaaaccgggtgctccgggggctgtgtagaagcggactggcacccagcgagggccgcgcccagcccccgctggcacctaggggtgtgggttcccgcgcgcccctgggtgcagacctcctgtgtcgggcctccgtccttctcattggctgccgtctcgcccgctgaccgctgattggccgagacctgcttctccgcccctgagcgattaacccctgcgctgccgcgtcctcgggctgggtggggtaccctccctcccaccgcagacagctcggg

SEQ ID NO: 91873 - DNA, 1321 bp, Homo sapiens
tgagtaatggaaacagcacttgagttagagctctgggctggtacatcttgactgcatgatcttgccacagtttattcaatctctgaggctcattttttcacctgaacaatgggtgtaataaagcatacctccctaggtggctgtgaggattcaatgaaccagataatacatacaagctcccagcacacagcagccccagtaagtgttagtttcctttcttcctggccctttttttctgggagggggggcggggttagtgggtggctggcagagcagtgtggtggggccagccatggtgtgctctgtggttccctgccttatactgctagacagagggtccagagtggccaatgagtgtcagggtgggtggctgaatgatggcggtggccactgagctctgtatacctgatgggcctgggtactgaagcaggtagcacccattagggtaggattatatagagggtggggtcggtatgatggtgtctgtgagagctgagtgtgcactggggataggaggcgctttgtgagtgctaggaaggctgtgtgtgtgacggaggagtgtgtggttgtgtgggaggggtgtggagtgtgtgtagtggacaagcagggctatgctgagttcctcctgtttgacatgttgtctgtttgcatgattcatgtgggctggtgggggtgtgatgaggatgcgggttggcgaagcatgtgtgacagggcatggatgagatgggtgatgtgaacaggatgggtgaatgcacgatggtgggtggggagcgatggaccgtgagcgtgtgaggttgtacatctgtgtgagcaggtatgtgaggtgtgacagcgtgggtgtaagacagagggcatatgtgcccgtggggtgtgtaggagataatgggtgtggcacgaaagtgtgtctgtatgtctgtgaggagtgtgagtgtgagtaggtgagggctcaggatgcctcgcccagccctacgcgcagtttgtctgcccagcggggccaggcgcgcccaggcgggtgtgcgggaggcgggccgagccgcgcgtgagcgtgttcctcgcgcggactggacacacaacagcaccacgcacaacccagagacctccgcagcgcggcgccccgaaccgcccccctggctcggtgcctttactgcagtgcgccctccctgccaccctcctaccgcggccccgcccccggccggctcggggccaaccggagcccgccccgccctgcccttatttgcatatgactgacgttcccccggggcggccaatgggggcgggcgcggcggggcctgacccgcgcgcggcggcggcagccaatggg

SEQ ID NO: 91874 - DNA, 1050 bp, Homo sapiens
tgcgggcggagcggcgtcggccgctgaggaggtgcgagcccctgccgggtcccccctgcgccggaccatgtattcggcccacaggcccctgatgcccgcgtccagcgcggcctcccgtggcctcggcatgttcggtcagtagcgcctgggccctgggactgcaggggtcaaggtgtcggggtgctaagtgcggagtaacggtggtgggggtatagtaggggagagaacagtagaggcagagtaaagggatgacggggaaagttacggagctcggccgggccgagtggttagtgatggcaggtgggagtgtagcggagtggggcgtatctggggacagctgtgatgttaaagtgatgggatggcacaggtccgctgtaatagaaaggtgaggggtgcagagtaactggctctggagcatggggtagaataggaacagcacgagacctgctggtcctaggggaggaggcttggattgggtagtggggctaaggacagggctcaggaagcgagtgaggcactgttagctgagatcagagtgacaggctgcagtgtgtggtgtagtttgcagagagcgcgacacctaagaacctggagggttgtgcactggggaggggttcaggagggagcaggaccaaaggactgccctccattgtctgctgggtcccttttccccaccccccagaaaagaggaggccttgatgggaaagatctttgcaaagagaggcacaggtctaagtccctggaggcttttatatggggttggagggcccagcgggttttcaggggtaagggacagggtcatcgtagtcttgagtgctcttcagtgctgtcttcgtgatcccagtcccttgtttcctgaggtctactttttcctttgtcagcccctctcagaatcaggtctcgaggccagtgcctcgcacagagctcccccctgtccaggcttctgaaggcatggggaggtcacctcaggtcaggttgatccggatcaagggaaggcctggaatgatggagagcagggctagggcggttccctcctcccttcttcatctt

SEQ ID NO: 91875 - DNA, 1064 bp, Homo sapiens
gagtttaccacaccctcccctgttttgggcaagggggctggaccctggactacagataagccgaggggctgatggggaagggaggctgggaggccgatttctggatggtgcattgtctttgtgggggcaaaggagagagctgctggagccacctgtgcccagccaggaagggcaggtctggcactctgtgtttgtggtgggggaggaaggcaaggagcaggacctctcccacaccacagttgtaagagaccccacagcctgtgcatagtgaacggagagttggaggggaggggacgtggggccgtatgcctcaggaaagggaaagagagcatgaggccaaggtgagacgctgtgttgggcggcgactgggctgctgggaatgtggcatgacgggggtgggggtcccagcccgtagaggtctggggccttgggagtgtgggatggcagccaagcatgacctggtttgtggcaggagcaaatcgttcctctggcctggtccctggtggcagggctggtggagattggtggggggaggagtggggcgtgagtactatttcccttccctgcttctgttttcttttttataaatctagaaacctttcagggaggagtttttcctgagtgacgttgcatggacgagtccaagaggctctggtgttgggggtggggggtagacaaaaggggtggggctacctcatctagggtggggaagagcttgagttggggttggggccaggctctcctgctgcacagctcacctggctcctttccacagtgtggacgaatgtggaacctcgctctgtggctgtgttcccttggcactccttagtccccttcctggcacccagccagcctgacccctccgtgcagccgagcgaggcccagcaacctgccagccacccagtggcctccaaccagagcaaaggtgagggctggtggggactggggggaggcaagggtgtggggtccaggtggcctaggagccctctgatctacctctgtgtccccagaacctgctgagtcggcagctgttgctcatgaacggccaccaggtgggacaggga

SEQ ID NO: 91876 - DNA, 1001 bp, Homo sapiens
gaacgggactcatcttctgagaaggatggacgcagccccaacaaggtactttatccctgcctgtcctgtgctcaccccgtggccacccacacctgtctgccaggtcctaactgtcccgctctgggctgtgtttaatgcagcgggagaaggaccacatccggcggcccatgaatgccttcatgatcttcagcaagcggcaccgggccctggtccaccagcgtcatcccaaccaggacaaccggaccgtcagcaagatcctgggcgagtggtggtatgccctggggcccaaggagaagcagaagtaccacgacctggccttccaggtaacgctgttgcctcttggctcctcccagcttcttctggtggggtgggtgagtgaagggttgccctgccctctcctgccaggtgaaggaggcccacttcaaggcccacccagattggaagtggtgcaacaaggaccgaaagaagtccagctcagaggccaagcccacgagcctggggctggcaggagggcacaaggagacgcgggagcggagcatgtcggagacgggcactgctgctgcccctgggggttagtcagccccttggctctcccaccctgccacctccctccccgagagccaccagctacccccttgcttgctcctcccctgccccagcagctcctctctgctctatcgctttaatttggcgacccttatccgtaaaggaaccggcagttgattcatgtgacggagccagggagatccacacagatactaagattcccaaacagcaatctcgttatcaactgttgtttaacgagtgtttactatgtgcctggcactacagggaatataagctgtagtctgcaaaaccccattctatttctagaagaagaaactgaggttcagagaggcaaaatcacttgcttaaagtcataaacaagcaaatgacagagccagaatgtaaaccccagttcggcgggcccccagcaccatagttggggccactgcagctcg

SEQ ID NO: 91877 - DNA, 1103 bp, Homo sapiens
ttgcagctgagcccatactcagaggccagggaaggggtggggcggggccggcttacctcactcctccccatttcctctcctgcggcagaatcacctatgtgcagtcagcgggcgggcacgcgctgcccctgggtaccagccctgcgtccagccaggctggaacagtcacctcgtacgggcccacgagctctgtagctctaggcttcacctcgctggggcccagcggccccgccttcgtgcagcccctgctctcaggtgaggggcggcctggcaggcagtgctggggacccagggtggggctgaggcagtccgggccctaacttggtctcctgcttcttcttctctgtctttcagcaggccaagccccactgctggctcccggtcaggtgggcgtgtcacctgtgcccagtccccagctgccgcctgcctgtgcagcccccggaggtcctgtcataacagcattttactctggcagccctgcacccacctcctcagcacccctggcccagccatcccaggcccccccaagcctggtctacactgtggccaccagcacaaccccacctgcagccaccattctgcccaagggcccgccagcccctgccactgccaccccagccccgactagccctttccccagcgccacaggtaggtgtcagatcaacccagagcagagtgagttgggggacccaggggatgggctccagtcaggcctggctcagcaaacaattttctccccactagcaggttccatgacctacagcttagtggcccccaaggcccagcggcccagcccgaaggccccccagaaagtgaaggcagccatcgccagcattcccgtggggtcctttgaggcaggtgcctctgggcggcctggccctgcaccccggcagcctctggagcctggcccagtccgagagccaactgccccagagtctgagcttgaggggcagcccacaccaccagcccctccacccctgccagagacctggactcccacggcccggagcagccccccactgcccccacctgctgaggagcggaccagcgccaagggccctgagaccatggtgagcgcctgcaggccgtggggctcccactgc

SEQ ID NO: 91878 - DNA, 1029 bp, Homo sapiens
tctgcttctgtttggccagacctggattcagcacccgaggaccccacctcgcccaagcgcaagatgagaagacgctccagctgcagctcggagcccaacacccccaagagtgccaagtgcgagggggacatcttcacctttgaccgtacaggtgccgtggtgggcagaactttgggggcctggggacctgcaagaggagtgggtctctggaaggcggttagagagtgagagaggtagggtgggtccatccaggctgggaggaagcacagcctgtcagtggtgggttctggagtctggcaggcccctaggttgccctgtgactgtgggcaggacccctctctgactcccctgtgaaatagaatgcagtgagggcttgggtgggcactcagacggtggcaggaaggccctgccgctgctgcagccttgccatgctgcctgtgccctgcacaggtacagaagccgaggacgtgcttggggagctagagtatgacaaggtgccatactcctccctgcggcgcaccctggaccagcgccgggccctggtcatgcagctctttcaggaccatggcttcttcccgtcaggtgagcctgtctcggagtcttggggtcactcgggtgggacttatctgtacatctcatcctgtgctccccaccgtttttctatctccagcccaggccacagccgccttccaggcccgctatgcagacatctttccctccaaggtttgtctgcagttgaagatccgtgaggtgcgccagaagatcatgcaggctgccactcccacggagcagccccctggagctgaggctcctctccctgtaccgccccccactggcaccgctgctgcccctgcccccactcccagccccgcagggggccctgaccccacctcacccagctcggactctggcacggcccaggctgccccgccactgcctccacccccagagtcggggcctggacagcctggctgggagggggctccccagccctcccccccacccccaggtccctccacagctgccaca

SEQ ID NO: 91879 - DNA, 1461 bp, Homo sapiens
cgtcgtgggggaagcgaaggttcctgattccacctacctcctaagtgaaggcttccgtccctggagaggaggcggcgccctgtatcggccttcgtcctccgcgggtgtgctagcgttgggacggtcctttgttgccgcgaggggtaggagtgggcgtggcggagccagctccgttcggaacactcccgggccgacccgactcgctcatcctgcaggagctgcggcgccaagatgagtggagaggagaacccagccagcaagcccacgccggtgcaggacgtacagggcgacgggcgctggatgtccctggtgagcgttcccacctgggatattgaggagtccgggggcgcggggggtggctcaggagaacggctggttcgtgccactctcactacctgattgggaaactgagggcagttgaggaggcgctgcctaagggagcagggcggggcgggccctggagcgtgcatgccattgactccctctcgcgcgctcccgcagcaccatcggttcgtggctgacagcaaagataaggaacccgaagtcgtcttcatcggggactccttggtccagctcatgcaccagtgcgaggtgagggcagtccctctccccctgccccatccagccctgtgtccatgctgacacatctggaccagaacccaggccaggtgaggtattatgagagtacccagattggcctcaggcagcccgaggctctgagaatcttggtgtaaggtgcaacattctattgagaaagaaatgtatgccttggttttatcagattggatttgtgtataatgtactaagacctaaaatgaggctttcctgccataggcttgcctaaagtgaggctctttcttgtttgctttaagtagtgcgcagccctgttgggtttacacaaagctatagtcactttacaggaagcgaagggcaactctaatggcactccacaaagaggactcaatcataataatatctttccacaaagcatgtccaactgtaatgggtttcatcaaaataagtttcaactgtaatgccattgattcaatgcatggctcaagcagactggattttcatgaagtgagtcttgcttctatggggcttggtttgttttgttggttggttggttggttggttggtttttgagacagggtcttgctctgtcacccaggctggcgtgcagtggtatgatctctgttcactgcaacctctgcctcctgggctcaagtgatcctcccaccttagtctccgagtagctgggactacaggtgcacatcaccatgcacctggctaatttttgtaatttttgtagagatggggttttgccctgttgcgcaggttggtcttgaactcctgggctcaagcagtccgcccacctcagcatgagcaacagagcctggggcttggtttaaagtgagagactctaggcagggtgtggtggcttacgcctgtaatcccagc

SEQ ID NO: 91880 - DNA, 1109 bp, Homo sapiens
ttcatactttatctagtcctagactttttttttccgagagagaatcttgctctgttgcccaggctggagtgcagtggcttgatctcggctcactgcagcttctgcttcccaggttcaagtgattcttgttccttggtttcctgagtagctgggattacaggcatgtgccaccatgccgggctaatttttgtatttttagtagagatggtgtttctctatgttggccaggctggtctcaaactcctggcctcaaatgatctgccctgggattacagacgtgagccaccacgcccagcccagtcctagtccttataacatcctcatggataagaggcatcctgcttttgagcaggagggagtttgggatcagatttctgtctggagtggtatgggggttgggtggaaacagaagaccttcaacttagggaagaacttggggaggcagatggtgagctggcctccagcaggcacttaacaaagatgtacttgtgattccagaaacagagctttatagtttggttgaggctggtaagattctgggaggtctggttgtgtggccgtgctgaatggttcttctgcattccccaaagcatgggtggggtctgtgtctgatgtcttgggggctctggttagagcctgagggagagcttccagctttagtattctgtcttttatgtatttcttcatttcatcatccagcatttcctgagcctttgccaagcccgggtctgggcaatgctgcagagggaattaggtccacatccaggccctgctctatgggccttgtaggctgcagggagacagacctggacatagatgttcctggcccagaggaatgaaggttataatgggatgtgagaaccctggagagggggcatctaacccagctagggggcatcaggaagaggcctggtggtgggaagggataatatgttgcagacagagggagaagcttgtacaaaggcccagctcccattagagctgtaagcagtggggtgatttgagacaaagcgagggtctgaacagcaggttagggacctggactttctcctagggtggtagggagccatgcagggctttggggcaggggagggacggggccagatgtt

SEQ ID NO: 91881 - DNA, 1658 bp, Homo sapiens
ccctgtttcccctggggccctgatctgtgagcgcagcctccacgcccatctcctaggtctgaccttgctcctgcatgaaactccccccaccaccccaccctcctccgtgacacccacttccctctccttccagagcttgcccctcacctgttactccaaccccaccccaccttcacctgcagggcctcccctgctgaggatatcccactctcatctataccccactctcatctgtgaacaccaccctccttcctccagccaggcccaaatctgtcctcccatccagccactctgtgtggccttggacccctgccatgacttccagcctcgcaccactgaccttacgccgaagctgtgtacatccagctttcaatctggattgcgctttgagccctccccgccttgacctccccagatctgagctctttcagtccaggctgaatgtcaactacgctgtctgtattctcccagcctgccgtctttctgtcttttctcctttttctctgtgcatcttttcctttttctgttggtcttcttttttccgtctgtctgcttccttctgattgtttctctttgtctcttgtttctgtctgacagtttgcctttcccctcttcctgtctctctctgtctccctttctctctctctctttccttttccatcctctcccttcctgtctgtctctttctctctccctttgtgccctgtctgtctcattctgcctcttttcctctctgtgtctcctttgtctctctgtccttgtctctccctctcttatctctgcctttatgtctcctttcccgcagcccctgggaccatgccgctgtgagcctggcttcttgggacgtgcctgtgacctgcacctgtgggagaaccagggggctgggtggtggcacaacgtgagtgccagggaccctgccttctctgcccgtattggggcagctggcgccttcctgtccccaccagggctgctggcagttttcggaggtgagcagatggggcgagtatctgggatctggaggcccggcagcctatggccagggcatgagactatccacccctccacaggccaggacctcaacaatgccctgggtgacctcgtcctatacaacttctccgccaacacctgggagtcttgggacctgagtcctgccccggtatggacccctcctctgccctggaggagcctttccactcaatcagacccagccggggacccccggaatgatcccctatcacctagtgctcccacagttcctgcagcttgatataggaacctacttctccctgtttctgccttttctctccggttttcttttttcttcttcctcttcctttatctgcctttgtgcatcttatttttccatgtgtctcctgttgctcaatctgtctctgttttcgtctgtctgacttttgggcttctgtgttctctgtttctgtgtctccatctctctggatctgtttctctctgccatttgtccctttaactctgtctccttgccttttctctctcttattgtatttctctgtttctatgagtctgtctcttcttttctctctctgccggtctctgcctttctctttgtctctgtctttatctcgccttctctccatgtttctctggctctgcatctctctgtctaagcctggctctggctc

SEQ ID NO: 91882 - DNA, 2265 bp, Homo sapiens
agaacatggtgaggccgcctgggacattcagggggttgtttatggtaaatagggagttaggggtgtggtatagagcatctgtggtgatttgaaggttctggggaagggctggggagaaattagaggcaggagatggattttttgtgtgtgtgtaagacagagtctcactctgttgtccaggctggagtgcagtggcgcgatctcggctcactgctaccttcacctcccaggttcaagcaattcttctgcctcagcctcccacgtagctgggattacagatgtgcatcagcactcctggctaatttttttgcattttaagtaaagatgggttttcaccatgttggccaggctggtttggaactcctgacctcagatgatccgccaccttggcctcccaaagtgctgggattacaggcgtaagccactgcgcctggctgggaatggatctttcgtagaggagggagggtgctgaggttttcaattgtgagcagaatttgagggaaactttgaagcaggtgaggaaggtctgagtcagacttgaaaggcccctgaaggctgggcatggaggtgtacacctgtaatcccagccctttgggaggtaggggcaggtggattgcctgaacccagaagtttgggactagcctgggaaacatggcgagacatcatctctccaaaaaatacaaaaattagctggccatggtagcatgcacctgtagtcccagctatttgggaggctgaggtgggaggatcacttgaacctgggaagttgaggctgcagtgagccatgatcgcatcactgcacttcagcctgagtgatggaatgagaccctgtctcaagaaaaaaaaaaaaaaaaaagcccctgaggaggagggtccctgggggtctcacctctgaggttctcaggatctaaggagctctgaggccctcttcttaggagggggtggggtacagggtgggtttggaggtatcaggggtctgaggaaggaatgggaagggttctgaggcccctgcctatcactcacacctaccccaggaggaggtggggcgctgggtggctcatcaggagaaggagacgcggcggctgcagcgccctgggtctgctcgcctcttccctctgcctgggcgggaccacaagtatgcagtagagatccagggccagctcaatggctcggcaggccctgggcacagcgagctaactctgctgtgggatcggactggtgtgccaggaggcagcgtgagtacccaggacctacctccaaccctagccgcaggccccagcctcagatcacctgggctttctgaaccccaggccacaaactctgaaatccctagattctggcctcggactccttaactcttggcctctgaactctggacctcctcttgaaccctgtggcccctgacctctgcctatagaccctaacctgatcccatattttgacccccatcttctgactcctcacccttgaccctgctgaccctgacctctgccctccatactttgacctataataatctccagattcctccagaccttggacctctttactgatttcctaaatcctgacttcctatgtgcctgagttctcaacctgggctccaaacccttactttcagttagcgccagactctgacccctgccccagaccttgactgctgccttcctgtgaccccttccccaggagatctccttcttcttcctggagccctaccgctcgtcgtcctgcacctcctattcttcctgcctgggctgcttggcagaccagggctgtggctggtgcctgaccagtgccacctgccacctgcgccagggcggagcccattgcggggatgacggggctggtgggtccctgctggtgctggtgcctaccctctgcccactctgcgaggagcatcgggactgccacgcctgcacccaggtgcctgtggggccaccaggggaggtcacaaggtggagggagccacagcaggcaatgggcagtcaagggaacccctggtggggggtgtgggggaaacagcaagggcttttggccttgatctgcagagcctggtggggagggtgagatggagctgtagagagaggcacctggggagtcaggactctccctgttgtaggggccagagaatgcaactccatccttttccactagcggggagtttctcagcataggcactggagcccaggagtaggccttcaggcctgccacctccaagtgatgtcaggcagccctcgacaccctgcttcctcttgttccctgggaggg

SEQ ID NO: 91883 - DNA, 1046 bp, Homo sapiens
ttctatgtatggctcctgtttctatgttgtcccccgcttcttcactctcccaccctgcaggtgcctacagggggacttctcagggcccctcggtgggggtaactgctccctgtgggtgggggagggcctggggcttcccgtggccctccctgcccgctgggcatacgcccgctgtcctgacgtggatgagtgtcgcctgggcctggcccggtgccacccgcgggcgacctgcctgaacacgcccctcagctacgagtgtcactgccagcggggctaccagggtgatggcatctcacactgcaaccgcacgtgagtgaggcgggggttgctatggagatgttgccccaggctggggcacatggaggtggagggaggaagccatcatggcgctgggtcccctcctgtggaaccagcatccccagttagccaggggtttttaccttgcacactaggtccttattagagtgacagggtccccagtgtaaccctggttaccatggaaatggggcacccataggctgtgggccatagtcttcagcgttgccatggaggcggaggaggacctagttgaaagaggttttcacagtggtgctatgtggttgctatagagacaggcttggtgatgcatggagttaccttggagacagggtcacccacatagcccaaaaccatggaaacagccagtggctttgatggtgtcatggtgggtggagatgatggggtgctttaggggctctgggcctgcctggcgctttccccacccccaacacggcccctcaggtgcttggaggactgtggccatggtgtgtgcagtggccccccggactttacctgcgtgtgtgacctaggctggacatcagacctgccccctcccacacccgccccgggtccgccagccccccgctgctcccgggactgtggctgcagcttccacagccactgccgcaagcggggccctggcttctgcgacgagtgccagggtaagcagcccttgtcctgggcccagcctggacccagggagcctcctcccttcttggggctccagt

SEQ ID NO: 91884 - DNA, 1122 bp, Homo sapiens
acccagcctgcatcctcagaccctgaccctagtattgctgtttttttttttttgtttttttaatccttcaaaacccaaactcctcctcagatccccagcactttgttcctaggcccacagacagacccccccatttcccagatagcttcctatttcctcagctcccatctccaattctccagattctcaatctccccattcctagagcaggaatggtaaattgttacaccttgtacaccaactctgattgattggtactgactgccaggagctgcatgttgagaaaggggctcaatgcaagagtgcctgatagatgagccgtgtctactttggacacaggaaggggagtggtggccttatgccatagtttgacagtctcccctggatgttcaaacagcccatttcccagtctcagattgccctcccctcttgaacccctcctcctcccagaccccaggtgtcgttctcatcctcattgtctcctaatcctcgattctgcacccctctagctgagctacgtcctggcgtttgatggattcccacgcttcctggacactggtgttgtccagtcggaccgcagcctcatagctgccttctgcggccagcgacgggacaggcccctcactgttcaggccctgtctggtacgggggctaggggaagtgggacctcttagtcctgggctatgtatcccttgcccctgaactcaccacctgaagtgggctcaggacccagctctgccgctgcttatggggtgatgtagtccctcaccatctctggacctcagtgtccttagttgagaggaaaataggattgcgccggctgagctacgtctgcagagagaagggctgaatgagacatgtctctggggcatatagaatgtggttggtgtgaggatcccacaccactcactctttccagctaggcaggagtgtagtagcgcaatctcagctcactgcaacttctgcctcctgggctccagcgattctcctgcctcagcctcccgagtagctgggattacaggcgcatgccaccatgcctggctaatttttgtatttttagtagagacagggtttcaccatgttggccagtctggtcttgaactcctgacctcaagtgattcg

SEQ ID NO: 91885 - DNA, 1730 bp, Homo sapiens
gcctggcgggccccatgcacccaacggcgcctgcctggggtcagccctcgtcacactgcggcacaggctgcacgagtactgtgggggtggtgggggtgctgggggcagtgggcatgggactggtgcgggccggaagggactgttgagccaggacaacctcaccagcatgtccctctgacatgcccagggttctcatccacagcagctgggtcacctgatagggccgccctggacttggggtccctccacctgggggcccctggacactgtctacttggagaccactggcccccttcccccagggttgcccagatggggcctcctttgttctgcattcagcagctatttatcgagtacctactctgtcaggcactgtcataggcgtggggcaaagcaggaaccaagagacgaggttccctgatctcatgggacttaggttctggtgaagggagacaatcagtgcacatgcacacaccccacacgcatacacacatgaacacatgcacatgtgcacacacaagtaagatggcttcagagagggagaagcactgtgaggcctccagaggatgtggcagtgagggacgatggggtgaagtcagctgggcattcaaagaagctagactgagaacgcctgagaagaaccagctacgggaagagctttgggaagcaaaggcagaggccctggggtgggagcaggcttgttttattggaaggaccagaaaactggtaagtgtgacccagatcaagtgtgaggagatgaggctggggatagtcaggggctggatcacccagggccttgtgggccccacatagggttttgggttttattctcagggcaatgggaagctgttggatggtttgatgaaggggagtgacaggatccgatgtacctatttaagaatttaagagggtcgggtgcggtggctcatgcctataatcctagcactttgagaggccaaggtgggctgatcacaaggtcaagagttcgtgaccagcctggccaatatggtgaaaccccatgtctactaaaaatacaaaaattagctgggcatggtggcacacacttgtagtccgagctactcgggaggctgaggcagaagaatcgcttgaacccaggaggcggaggttgcagtgagctcagattgcgtcactgcactccaacctgggtgacagagcgagactccacctcaaaaaaaaaaaaaaaatttaagaggtcactcagttgtgctgtggagaatggaccggagggacaagaggggcagcagggatggtgggctggagtagggtgctggcaatgagggagtctggctcagatgtgggatgtgtatggaagaatataaatgatggtgtggatgtcagggtgagggaggagacaaaaccacgatgacccctagctttgtggcctgaactgtgggtggctgaggggatcgttaattgaatggggcagactgaggcttgtgaggaagatcagagtctggttcttgacatgagatgcccttcagacatctcttcactcaggtccaactagggatacagaaacactgaatatttcaacagcagaaattgaatggggggattgatagcgctggcgagggaagcagctggaaagagacagatggcaccctgagacagcccagaggtgaataggacccccaggctgcagggataaagctcagtggtggtgttacctcaccggggaccagggtcacacagcaaagctggaacaacag

SEQ ID NO: 91886 - DNA, 1033 bp, Homo sapiens
ctccctctgatccccagtctttccccttgtgtgccatccctgggcctggagccccacagagacctactgtggcctcagatgagtctctgggcctcagtgtccccatctgcaacaggccctcaccgatagcacttccatctcggtgatgttccagaaggctttccagaagtgcacgtccaggttctgtgtgatccgctcaaactcagccccacgcagctcggggtcgatggcaaagcggccgctggtgaagagagagctggcggccacacctaggggtcagaaggggtgtcagggagccccagtgggtcaggctgcttgggcaggagtggggaggagggccaagagagtaggctgcgagtagaacctggctgggactcactgaggcctgtctcgttgcgtttgtagtgctccccgaaggacaccagcccaatggagatggtctgcaggaatggccggatggcaggcgtgaactgtggagagacgcggctgcgtcacccaccgctcaagagagggatggggacagggcaggagcgaggcacagggatgtgcggggaagacacattcattcagtaaacgtttcatgagctcctactgtgtgctgggcatagctctcggctggttcacggacctgatgttctcaaagggaaaacaaatgatcagcagataagcaaagccacgcgcagtatcatgacaaggaatgacgaatggtttggaaaaaaaaaaaggcagtaggtggagagggcaccagtgatgactaggggtcaggctacttagcgggtctcggaggagagatctgactgaagcgaggggagggtgttccctgcacagggaacagagagcatgaaggcttaaaggtgagctcataggaggctgaggcaggagaatcgcttgaacccaggaggcagaggttgcagtgagtggagatcacaccactgcactccagcctgggcgacagagcgagactctgtctctaaaaaaaaaaaaaggtgagctcatgcttggtgcttgacctgggtagcgacagtcagggggc

SEQ ID NO: 91887 - DNA, 1084 bp, Homo sapiens
gtttgatgctgacactggtgtaatcttcagagattaatgaccagatctccaacagccccatctacccccactttggtaaacagtgaggttttaaaatctaagaatttggttaaacctttccagtatcaggaaaattgtatcctgcttttcctctcttcctatttcccgacaaggtgacattgagtagaaagggctgagttgtgtgcttatcctggtcttaatttcacctcttttttctattctcaacgtgcttcttccctagtgatttcacggagtgactctggtataaggaaaatcatcctttggaaacttacttgttttcttcacattgcccttgaaatgatcacaggggcactgcttctttggcagcccagacactgtcatgaattttcttctcggggctctcaggaaccaatctggaacaacagcattgctgcttagatgggagagttaatacatttgataggagggagtaggacagagctttaatcgccatcttctgtgccttgcatttccactgcaatggggtgggaaaaggggtcaacagagaacagtgtccatccagctatttgaatgccagtatttctgagttgtttttcctgacaactttgggcaaggtttgggcaagggtttgggcaagggtttggtggcaggtttggagggtgcatcagaatatcattactccaaagaatgaggagtaaggcttgggtgtctgcttttcagtggctactttcccttggggaagccattttgcctctctgctttcagtcttgcctgtgagtaaaataaggctgagaataggattcaggaagcttttggaaggccaggaaaaaataaaaaggcttttggacggtagctctgggttcttcaggaaaaggataaggggcagggcgcagcctgacatttggctggctttcccctagaccttggagaagtccagttcttgcctgagagtcaggaagaaagtgggcacaggtgctgcatgtggcaggctgtggagaggggaatgggtgaggtcagctgagataacatctgcattggtctcagaggggcccaagggagagagctggggtcatggtgatgc

SEQ ID NO: 91888 - DNA, 1079 bp, Homo sapiens
acgttggccaggctggtctggaactcctgacctcaggcaatccgcagcctcccaaaatgctggaattacaggcgtgagttaccgtgcctggcctgcaggtttgttatacaggtaaacttgtgactcaggggtttcgtatacagactattttgtcactcgggtacttagtacccaacagtttttttttttttttttctgatcctctccctcctcccaccctccaccctcaagtaggccccagtgtctgttgttcccctctttctgtccatgtgttctcatttagcttccacttataagtgagaagacacagtatttggttttctgttcctgtattagtttgctaatctattttattaaagtatgtttccctttcacccctcctccctccccaccctaatattttagggctaagccctcatcactggacacaaagaaactggtttcttagatgctgctatgctttggttccacccaccaagacaatgggcctatttttttctataatcaaaggccctgtgtttggcccgtacagttctacgttaaactggtgccaaagctcacgccttcctgttccgttccttccaggtcatctcagaatctgcaggcttgtggggcagggtagggagtcctgagtggtgaccacagaaaggggaaagctgtgggaatccaagacagttgttcttgagagagtcttctaggcctgttggcagaagaagcagaattgtgggccaggacctgggtcctggtgttggtgactgagctctgactttgaatgagtagatttgcctatctaggccttagctgtgcctgctgcaaaatgagatttgagatgaactcaagcccttacagcttgactgctctagccatgcattttcttttctcttcctcattgaaatctatatcattccttcagggcccaaggacccatgctcagaagaaatcaatttggctaatgtccttatgagaggggaccaaccctcaggctttatgtgctctttggccttttatgcaagagtggtgagggtggatatttttgttctggtcttcttttggtgctctttgatagcaggaagggcaga

SEQ ID NO: 91889 - DNA, 1049 bp, Homo sapiens
tccatagaacctgacagatccagggcacagagagacacatgtgcatgttccagctcccagtattcatacagatatggtgaagggtaggtggagttagattcttacggtttggttagtattgtccggggagctcctgtaacacatgtgagattctgtgttctgtgataatgtcttgtatgtcactgctacttaagagtttaaggtgaagctttgtgagtgtattacatgtgtctggtgcatgcgtgtgggtcagaatgtggatcagtggctgctgatgtgctgatgctgagaggaagtgatttaggagctgggcttgctctctttatgtttctgctttttgtgcaatgtcctggtaacttgtcagaggctggataagatgttagaaattttcttaatccagtctgaaatctgccttgttttattcctgggtatgaatcatgtgaggggttgggaggtggaggatgaaattcccataccttctgaatagtccaaggtcagttctcagaaatcagatgttggttgtttagccatcacacccttagatttatgagttggacctagaggatttgatcgcttctgtgacagaggtatcatcctgttcccagaaaactggcgacacgttgacatgcaggaaattggtcagatttatggcttgtttctaaccaacatgtaggcgttctgccctttaaaaacaattaaatttcactgatgtttttcatgtatctaacaagggccagttgctgaattctcaaagataaataaaataagccgggcgtggtggctcacgcctgtaatcccagcactttgggaggccgaggcaggtggatcactaggtcaggagttcaagacaagcctggccaagatggtgaaaccccacttctactaaaaatacaaaaattagccggggtggtggcgggcacctgtaatcccagctacttgggaggctgaggcaggagaatcgcttgaacccaggaggcggaggttgcagtgagccgagatcgcgccactgcactccagcctgggcgacagagtgagactccatctcaaaa

SEQ ID NO: 91890 - DNA, 1133 bp, Homo sapiens
attctttaacaataatttaaataatcgctgaagggcagctctctgattcctttcccaagttcctagcagattgtgtttatcagaagctggttccctcctgaagctataacccctccctctcagcactgccttgaacagagcccataaagatattaaaacatatatgtgcttttgcattttccatcaggaattgccttggattttggcaagtgattttcctagttgcttctagtgggttctctgaagacaggcttgccagaaggattaggtggtattctagctaagcaccaaggtgcttagaccctgatcctacaggtagacaaccctgacagtggacaaaggtgtggcatttcactattggttatatatttgattttcttgtgtttggtgagttcacacaaggctttggagaaataggagaaggcattactgcctttactttctctctctcttgtttcctggcacatgtacttaatggaaaaggacataacctcaaggctatggcaaatccgaattagagtgataggacaggactgggggtgggaaggaatgagtgctctgaacaggcaagtttaaaacaagtccaggttgggaaaaggggaagggaggggaagttctggtccctctttcccaaagtcagctttgccaaatttcaatgacaagaaggttgggtttcctacagactcccaatgtactttcatctattgacactgagagaggggcagtgaccaggcagcctggagatgcctattaggaaggaagagtaggagaaagttgtttctgtccccacccctctacccctacaggggaaaggaatctcctagtgatgagggtgagagacttgaaatacatcagcactgcagtgagcaggacaggtttcattactgcttttttacttctgaataaattatttctgtggctgttagggatggggaggctgaagttggttgtgtgggttgctgggcttcaaagttcagggtagaataagtaacttcattcatctgaaaagcacaaataatgatcagttaagtcagtgacacagggcagggcctcaccttgcctggtgtgattcagcaccacaagctgttaccattttgaaattttagctctggagaagggcttttgttgttacc

SEQ ID NO: 91891 - DNA, 1690 bp, Homo sapiens
caggcgcccgccaccacagctggctaatttttttgtatttttagtagagctggggtttcaccatgttagccagaatggtctcgatctcctgaccttgtgtttcacctgccttggcctcccaaagtgctgggattacaggcatgagccactgtgcctggccataaaatgaaaaattctataaaattattattaaaaaacaggatctcagatctattaaaattgaaattatccttttgacaataagagcaggatcagactgaaggtaggggagtgagaatgattcagtgccttccttttttaggccattgtgctgggtgctctttgtaggttatctcgtttaatcccttcaacttctctttgaagtaggcagaatgcccattttacagatgacaaagctgatgatcaaagaggttaagttacttgacaagggtcacagagctactaagagtcacatccagtattcagacacaggatgggaataattccaaaatgcatgttcttgctgcaaagtagactcatgggagtgattacaaatacgtctttgttgttgcactgaggaacattaacccaaacttgatgttacattgtgtcttcatgaataatcaattctacacagaatcatttccatgagaaaataagcccatgaaaaccggctatgcttaccttgttaggtgggtcattggagtggtcctgagctggagaagcaaaagaagagttagcgatccatggaaatgcaaagctgacttcaggtgattctagctgaaggaggtggcagttggagggtggggagtttaaggatcagttaaggaatttacttccctcagagtgtatggtccagacccagcatgttagtaccagagagggggcaggggcagaaccacaggaggccacaatccacttgtgaagagttctaccagttcacaaggccttgatttttgcccagatgtgtttctcagcaacatgctccagtggcaaggaggggcattgagacttgtagcacccacagcacccacaagataaggaaagtctcaccaagggagagtgcccacatccgtaatagaggcaggaggcggaaggagtaaggctgaggaaatggctcctggaaacatgggatcttcctcaggcctgcctggcctaggcagagtgagcctctctcctcagatgtgtctcaggggactcctgtggctaggaagggtgggaagacctatgccaccttagggttgggaaatagagatcctttctgtgaaaattcagaagggagggagtggtttgggaatccaggattccctgccaggggagggcacgtggtggaacataccagttctcactggggtaagtggctttacttactgtggttggagactgagggtttgtgctctgtgagatcacgctggtcgcttgccctaaataaatatcagaaactgtgactgctattcccaagcacaggatctttgttccgtaagttaggaaggacactgtgagcaggtaattccttagagtccttgatgttcatactgcctttcttctgagggcctcgttcttcagtctaactacaatcccttctagtgtttactcttttcctgtttgctggatgttcacatttcatttcattctttatcagctgcttctgtgcctacttctatccttaaaacctttcccattttgttttccggggtagatactttttttt

SEQ ID NO: 91892 - DNA, 1049 bp, Homo sapiens
ccctcctgacctgtgcgtatgggggacataggggagagccgtgtgtcacagaaggtggactgatgatgaaaagggagccgccttggcccatggagaagtgcttatccttttcttgttttctcctcagcgggcctagagctgtattgtcaaaagggtctgtccatgactgtggaagcagatccagccaatatgtttaactggaccacagaggaagtggagacttgtgacaaaggggcactttgccaggaaaccatactaataattaaagcaggtgaaatgagatggggcatttgggctgggtaggagggaggttgattatctccatgccaatgcttgttcccttcgtccaggccaattgtgacggccaccatccatttcccctccttcctgtctcataacagggactgagacagccattttggccacgaagggctgcatcccggaaggggaggaggccataacaattgtccagcactcttcacctcccggcctgatcgtgacctcctacagtaactactgtgaggattccttctgtaatgacaaagacagcctgtctcagttttgggagttcagtgagaccacaggtaccctggaagtgggggagataggtactaagagaaactccataaagagcttgtgtatggcctccctttgcattctgacttggcttagcctaagtggtccataccccaaagtacctcacagttcaagtaattttatgtttctgaattgttcattgggatctaaacactgctcagagcagcgagataccagtgaagcctggagtgtaaactgggttttgtgtttattaagcaataagacaggctgggtgaggtggatcgcctgaggtcaggggtttgggaccagcttggccaacatggtgaaaacctgtctctactaaaaatacaaaaattagcttagcctggtggcgcacacctgtaatcccagatactcgggaagctgaggcaggagaattgcttgaacccaggaggcagaggttgcagtgagccaatatcacaccactgcacttcagcctgggacagagagca

SEQ ID NO: 91893 - DNA, 1051 bp, Homo sapiens
cgagaccagctggagtaacatggcaaaaccctgcctctacaaaatacaagaaattagccaggcatggtggcatgctgccagctacttgggaggctgtggtagaaggattgcttgagcctgggaggttgaggctgcagtgagctatgattgtaccactatattccagcctgggtgacacagcaagcccctgtctcaaaaaaaaaaaaaaaaaaagagataaagtgcttgagcctgctgtgtgtggatgtagaaactatgtgactgccagatgcctagaattctgcagggcatgggttttcctgggccttacttgtggagcttagggaactgggggaaaactaaatttcccatagtgtccatggaggagggaaagcaattttaggaatattctgggaagagcccctgccagagaggcacccaaggcctcctggggaatgtagttctgagaggcctgaggcactagactccttgactttccttcccctcccttggcccctagggttcacagtgtccaccgtggaggaggagaggactctgaaccctcggctcaccctcagctgtgaggagtttgtcaaaatcatgggcaacctgaacttgcctaaacctcagcagataggtgagcagctggggacctggacttctgggtctgagagaggaggggctggggtcttggactcctgggtctgagagaggaggggctgggggcctggactcctgggtctgagggaggaggggctgggggcctggactcctgggtctgagggaggagaggctgggggcctggactcctgggtctaagggaggaggggctgggggactggactcctgggtctgaggcagtaggggctgggggcctggactcctggctctgagggagtaggggctgggctgggggcctgggctcctgagtctgagggaggaggggctgggggcctggggtcctgggtctgagggaggaggagctgggggcctggactcctgggtctgaaggaggaggggctgggctgggggcctgggctcctgggtctgagggaggaagaactgggggcct

SEQ ID NO: 91894 - DNA, 1061 bp, Homo sapiens
cactttcagaggctgacgggggcagagcatgaggtcaggagatcgagaccatcctggccaacatggtgaaaccgtgtctctactaaaatacaaaaagttggcggggcatggtggtgtgcacctgtaatcccagctactagggaggctgaggcaggggagtcgctcgaacctggaggcagagattgcagtgagccgagatgaggccactgcactccagcctggcgatggaatggactctgtctcaaaaaaaaaaagagggaggggaagaaagggggtacccaggtctgcagggcaggtggccagactgactgggttcactggggccttcctgagctgggagagaatgggctgggaacaagaccatgaggcccactagagtgagtattttagtaaatgccaatggctgttgcctcctgaacgccctccccacttcccttgggcctgtttgtctgaggcccgatttgtcccctaggtacctcatggcagggccaggttccagcagtgaggaggatgaggcctctcacagcggtggcagcggagatgaagcccccaagcttcctcagaaggtctgatgccccctgtccagtgggggagggtgtagtgggaggatgacatgagtccgctgtggcaccccaaacttcccactcttgcctcttgcaggtacccccccaacacacccacactgttcctgccctcctcacccacccactctccctccttagcaaccccagaccaaaaccaagcccactcaggcagctggacccagctcaccccagaagcccccaacccctgaagagaccaaagcagcctcaccagtgctccaggaagatatagacattgagggggtacagtcaggtcagactctgagggaggaggggctggggcctgggctcctgagtctgagggaggagggcctgcggcctgggctcctgagtctgagggaggaggggctggggcctggactcctgagtctgagggaagagagcctggggacctggactcctgggtctgagggatgaggggctgggggcctggactcctgggtctgagggaggaggggc

SEQ ID NO: 91895 - DNA, 1431 bp, Homo sapiens
gaggaggggctgggggcctggactcctgggcctgagggaggaggggctgggggcctggactcctgggtctgagggaggaggggctgggggcctggacccctgggtctgaggggggaggggctggggcctggattgctgggtctgagggaggagggtctggggcctggactgctgggtctgagggaggaggggctgggggttgacccccagtggtgctaacctaatctactctttgtcttctccagtgccagctccaactcgtaccccagccacagccccagtccctgcccgagcacagggggcagtgacaggcaaaccccgaggagaaggcaccgagcccagacgaccccgagctggcccagaggagctggggaagatccttcagggtgtggtagtggtgctgagtggcttccagaaccccttccgctccgagctgcgagataaggccctagagcttggggccaagtatcggccagactggacccgggacagcacgcacctcatgtaggcttgcgcccccctccctgcgccgctgcagtttctcccccagctccctgtgtctcctccaccttgtgctttctctgtgtccactatgctgcatgctttctctctctctcacttgctttctttctcactgcattctgtagcctttgtcttctctctgatttttgcatctctcccttggtctccaacctctttttgtttctcccacctcaatctcatgatctgtctgtctgtctgtctctctctctctctgtctgtctcccctgtctcgttcccctttgcccctcagatcacacctaactggcatcttcacttctgccccccaccagctgtgcctttgccaacacccccaagtacagccaggtcctaggcctgggaggccgcatcgtgcgtaaggagtgggtgctggactgtcaccgcatgcgtcggcggctgccctcccagaggtaaggcctcacacgccaaccctgctccttatcctgtgctgggcaatgccaggaatctggaggggagtcagactggggcctgccagcggagaacacaggtggtcccagcccagagccagcagactactgagaggagcggggcaggggctggggtactccagatgagggaaggaggacctgcctgggaggtcacagagggctctgtgaagcctgcttatcagaaaaggctggaggagcagtttgtgcaaaaactcaggggtgggagaacaagtgttagggtccatattcattcattcaaagtgagtcccggtgcagtggctcacgcctgtaatcccagcactctgggaggctgaggcaggtggatcacttgaggtcagaagttcgagaccagcctggccaacatggtgaaaccccatctctactaaaaacacaaaaattagctgggcttggtggcgcacgcctgtaatcccagttactcgga

SEQ ID NO: 91896 - DNA, 1002 bp, Homo sapiens
ctccctgactcccacccctcctttcccaggactccccctttggcttgagttttgtacggtttcatagccccccagacaaagatgaggcagaggccccgtcccaggtaagctgtacctgtcactccccatggccttctccctgcctctccacccccacctgccagcagcccacctataatactgaccttgcgggaccttagaaggtgacagtgaccaagcttggccagttccgtgtgaaggaggaggatgagagcgccaactctctgaggccgggggctctcttcttcagccggatcaacaagacatccccaggtgagctcggacaacgtgggtcctgagtgagtagggttgagacctagactcgtgggtctgagggtagagggggctggggctcagattcctgggtctgagggaggagggtagtggagtcctggactcctgggtctcagggtggaggaaggtgggcctggcctcttgtgtcctgagggttgagaggtctggaggctgggactcctggatcactggtgggttttggcaacaatattctgtgtcccatagataggagtgaaagggtcttggggctcagccctctcatcctggatccactttctcccttcatagtcacagccagcgacccagcaggacctagctatgcagctgctaccctccaggcttctagtgctgcctcctcagcctctccagtctccagggccataggcagcacctccaaggtgaaatcatcagactttggtggggtggaggaggagagaagctggaggcctcaatccatccccatcccctcagccccaggagtctcccaaagggaagaggaagttggatttgaaccaagaagaaaagaagacccccagcaaaccaccagcccagctgtcgccatctgttcccaagagacctaaatgtgagctaactagatcccttgtttccacaggggcctgtgctcctgtgtcctaggggaagcggggctggagcctgctgtcctgaatc

SEQ ID NO: 91897 - DNA, 1048 bp, Homo sapiens
cctgactctctggattctgttttctcatttccagcctctagtaattccccttgcctttccgctgactcacctgtgcatttccaaaaggtgtttgaatattgtgccagtttactgaatattctctgccgggaaagttccttaggacatgtagcccgctgtattgccagatatggaagactccatgggagaatttagataagggtcgctcacatctggaggataaagagatccctctggggcctgtgtcagggcaggactgactcaaggcctagaaacaaagggtctggagacatctaggcccaagctacattctagtgactcccagtcccctgtgtgggccctgtgccctcttccccagcccctagaagctctcatctaagccaacctgccctggttctcatgcactgtggcttctcccacccaggtccttctggtcacctcatctttcatgtccccttccgagagccgcagtggctcaaaccccaaccgcgttcgcatgtttgggcctgacaagctggtccgggcagccgccgagaagcgctgggaccgggtcaaaattgtttgcagccagccctacagcaaggtacctagggtgggagccagggtgcagagtccttggtcctgggcaaggagggaaataagggccaatattgagtcccatagggctgggaggagtagacagctggtgtcccatgggattatggggaggctgggtccctgcgttccctgaaatgggtttgggatctttcctgtaatgagaagtttcatctcccggaggaatctaggaagggtgaactgcagcatctcagaggggaatcggaggaggggaactgacttgttagagaggtggcctagtagagtgggcctagtagttaacatcaggagatctggcgtctgattactgagttcacgtcctggctataccactttttagctgtgtgatcttgggcaagtgacttacgctctctgggcctccattgcctgatccttacagggttgctgtaggttaagggatgctaaaagctgtggtaacagtgagactggagta

SEQ ID NO: 91898 - DNA, 1019 bp, Homo sapiens
aaaaaaaaaaaaaaaaaaaaaagaaaagatctcagttttaggatgatttgttacacagcattattacagtgtaagttaatacaacttggttgttttaaaccactgagattagggactcctttgttactgtaacatcatctggtccaccccaattgatgtcagtgtttagtgcctgtcaactaatggcctccacttcccaggttcaaatgattctcatgcctcagccttctgagtagttggaatttacatgcctggctaatttttgtatttataatagagaccgagttttgccatgttggctaggctggtcttgaactcctgacctcaggagttcaaggcaaatgagcaccaaatgctaatttaagtgatccacccaccttggcctcccaaaatgttgggattacaggcatgagccactgcacctgacctcagtcttttaaactgtgatagatacagattgctgacagttttagtcttgagatctagattcaagcccccagctcttcctcttaatcggtgacctcaagaaaattgtttcatttctctaacctgttttctcatgtgtccattgggaataatgacatccaagcccggagttgtgaaaattcggtgacataatgtctgcacaagtgctctgtcaacatgtaggtgtttgtgtagagggagggatttgtgtttttattacttagtgggtgatgattccactgggctctcttatgatcaagtgactccagggaaatcacatttcattctgttaccccagttgctgtggaaacagagtgactggaggcagaagagacagaacctgtctctggcctgggagagactgagggagtattgcagcggtcaccaacatggtaaaccccagagggagcagcttggggaggtgatgtgtttcagttgggatgtccaggtttgatgtgactttgggacattctaggggtggcatccaggaggcagttggggatcacatgtggagctgaagacagaatgtggggaagttgtcagtgcagagaaag

SEQ ID NO: 91899 - DNA, 1045 bp, Homo sapiens
ctatggtttctcttccaactgtgacttctcactctgctgtgcgtcctcttctgactgccacttcttgaccttctggggcttctagattggctgtgactttgcggcctgctgcgggtgctggcctggttataactcttgaccctgctggacatttcagtggggctgtaactcttttccctactggggatgatcatctgaccgtagctcttcaccttccttgatgaggatggagatgggttgtcactcttctccttggagggaattccagtcggggtttgacacttggctgtactgggagttacagccagctcggaactcctccctatacctgagcctcctggtgggcggtaactcttcttgctcagatttctaggctggctgtcactcctttccctgttgctggttctaggccggccgtaactctttccccggctccctttttgctgtgaagtgggagttctcaccctgctggccatgcctggtctggcaccatgagttcttatcctgccaggagtgctggccctgctgggtgacctcttggagctgcggcttccccttctgccaggtgtcctaccccggctgtgtgtgcccctccgctggtggcatctcacgtcgctggccttgctggctttgctggtcctggtgtcggtgctcaccctgctgggtgttcttgctttgctgcggactcgggacctgctgctgggccggttagaaggggctctttttgtactggtcgatttggtggacttggaactgcttgggctcatgactgagttacgggatgtcgctggtttggtgggcactaaggatctgttgggtgttgctgatttggtggacttcaaggaggcaggaggcttgggatccgcagtgggcatggaggatccactgggtgccagagacatactgggctttgaagatctcttaggtgaagacatggtgggcgcaaaagggcttgtggtcctggaagtcacagtagacatgaaacacctggtagccgtggacgatgacctgattgcctgtcacaggccaactgtgtgaagtaata

SEQ ID NO: 91900 - DNA, 1018 bp, Homo sapiens
ggggcaggggccaaaggtccagaccccccaagtccagtgagggcagtagggattgggttgggggaagataactgggggaaggccagggcccctaggctacaaaaccaggtcttgtggggagggggtcagtttctgggaagggtggggggggcagggaaggggaacacagatttctttgggggtcctagaccccatgccagccattgtaagagttccacagagctctgggcacttctttgcaaagccatgtttgcacggtggggggatgggtggggggagggcgtggaaatagggattctgtgtctttgtgtcataactttgatgggggcagtgagggagacagccccaacccttttctccaatcccccttccccaggttcctgggctccccttctctctaccttctcccccaacgtctgtcccatccatatttgtctctctgtccacccactcctgggggggccttccccatctctcctccaggccccccggggagggggaaaggagtttggggaggattcgtggtcttcatggttttatatataatatattaaaaaatcaaaagtctgtatgaaaatatcagattgcacccccctctccccattcctggcttttgccccctttttcttgttaaaaaacaaaaaacaaaaaacaaaaaaccacacacacattttgtacggggtggggaggggaatggggagggggtttggcaatctcactaaccaccattaaactgaggagagaacaagtgtttggggtggctgtgtgtctgtcctgctgtcaagggctgtaccattgggaggggaactaagggagaggggagggaggagtgtgatggttgctggtggacagtataggccaggagaaggtcctgacctcactgagggtacctcgacctccccagaaacctgggtttggccatttcttcagccaaatagtcacagtcttgtctttttgatagcgactgagctaccccattccatggcccggacccttaccctggcttccccctacccca

SEQ ID NO: 91901 - DNA, 1086 bp, Homo sapiens
tcagagttctgcaggctgaaccagaagcatggtgctggcatctgctcggcttctggggaggcctcaggaaacttacaatcatggcggaaggtgaactgggagcaggtacttcacatgcccagagcaggagcaagagggggcaggtggcacacactttgaaaccacgagctcttacaacagattcactattgtgaggacagtaccaaggggctggcgctgaaccatgagaaaccacccccatgatgccgtccctcccgccaggccccacctccaacagtggtgactacaaactacaagttgacatgagatctggtggggacacagatccaaaccatatcagtgcctgacctatgctgagcctcaataaatgttaaatgccaccatcatccacaggtgccaggtctgcattgggcacatagcattttgcaatcctctaactttgcaaataaatgagccaatacatactctttctccttaatgcaagcgattggtctctatcaccagtgactgagaagtgccgactgttagggaatggcagctaaaaagcattatttcactacaaagtctagttcagtcatgcgctggtaccgggggtgacctcttttcccactctgggcctctgctggaagacgaaggggaaggggtgggcagtatctcaagggtccaggctctccttctctgccaccagtaccccagagcatgtccctgaccttccagctactgttgacagccatccaggatctggctgagcccactctcctcagagaaggtgctggggtggcagctttgggggtggcaaactccatcttggagcagaggaaggagaaacgccctgctgcaggatctcgcgagccagctgggcatggccggtggtcaaatgctctgatgcaatgataatgaggatgtaacggtccagcagcacctgctggaggtacttgtcagcctaaaaagtgggcgtgcctatgcctggccggtctgatgatgaccgtgggtgcgggtagggtgtagggtccacagccatttctatcacagccatgcaggctgagttagggtctttatttcgtagcctctcatgatattgacagg

SEQ ID NO: 91902 - DNA, 1093 bp, Homo sapiens
tagtaaataaagcagatggtcccaataatactgggaatccagagtttcctatcttgagaacccaggattcttggaggaaaacattcctgactgagtcacagagattgaacagagatcagcaaatttccataaaaaataaattatgtcaatgtaagaagggtgttgatcccatcggttggatttcacatcatgatggtcatagagtacacaaaagtgaaaaatcttatagacccaatgattatgaaaaagacaacatgaagattttgacatttgatcacaatagcatgattcacacaggacagaaatcgtaccagtgtaatgagtgtaaaaaacccttcagtgatctctccagctttgatcttcatcagcagttacaatcaggagagaagtctcttacatgtgttgagcgtggaaaaggcttctgttacagcccagttcttcctgttcatcagaaagtacatgtgggagaaaaacttaagtgtgatgagtgtggtaaggaattcagtcagggcgctcatctacagacccatcagaaagtccacgtgatagagaaaccatacaaatgtaagcaatgtgggaaaggtttcagtcgtagatcagcacttaatgttcattgcaaggtccacacggcagagaaaccttataattgtgaggagtgtgggagggccttcagtcaggcctctcatcttcaggaccatcagagactccacactggggagaagccattcaaatgtgatgcatgtggtaagagcttcagtcggaattcacatcttcaatcccatcaaagagttcatacaggagagaaaccatacaaatgtgaggagtgtggtaagggcttcatttgtagctcaaatctttacattcatcagagagtccacacaggagaaaaaccctataaatgtgaggaatgtggtaaaggctttagtcggccttcaagtcttcaggcccatcagggagttcacactggagagaagtcatacatatgtactgtatgtgggaaaggctttactctgagttcaaatcttcaagcccatcagagagtccacactggagagaagccatacaaatgcaatgagtgtgggaagagcttcag

SEQ ID NO: 91903 - DNA, 1032 bp, Homo sapiens
gccttttttgttgccataggcatgaaaaaaaccaatgatagtctgggtgcggtggctcacacctgtaatcccagcactttgggaggccgaggcgggcggttcacgaggtcaggagatcgagaccatcctggctaacatggtgaaaccccgtctgtactaaaaatacaaaaaaatgagctgggcatggtggcaggcgcctgtagtcccagctactcgggaggccgaggcaggagaatggaatgaacccgggaggtggagcttgcagtgagccaagagcacaccactgcactccagcctgggtgacagagcgagactccgtctcaaaaaacaaaaaaagagaaaaaaaaacaatgataaagtcaagctgaactctccactggtttattaaggtttcccaatgtggtcaacctgtgaaatgtttttttatttctgaacaaatgttcagttgtcttcattttcatttctgagttctctttatcattctaggacacaagaatcaaaatgagatagatacccttcaagaagtaagattaagattcctttcatatgaagaccttatatgctggcaaatatgggaacaatttacaagtaaattaaccagtaatcaagacctaataataaatcttcaaggcaagaggtccaagttgctaaaacaaggtgattccccctgtcaggtgtggacaggagaatctagtcaggtctctgaagatgagaactatgtaataaagctacaaggggagagttcaaatagcataaaaaatcaagagcttccattgaggaccacctgggatttctggaggaaaatgtatctgagagaaccacagaattatcagagtaggtgtcagcaaattgatgtaaaaaataagctctgtaaatgtgatcattgtgttaggcaaagaattgctcatcaacatgatgatcatggagtacacaaaagagagaaagcttttagccacaataattgtggaaaagactgtgtgaaggaatcatcccagcatagcataatccaatcaggagagcaaacctctgatg

SEQ ID NO: 91904 - DNA, 1090 bp, Homo sapiens
ttttaaaaaatttattttaaggtagtacatgtagttggaagaactactataaaaacaatatatgtgggaaaacttccagccctctgttaattgtgtgtctcaaatttgttctggaaaagaaagggggaaagtctatgaacgacttttcaacctggcaattccatatacaatgttaaacttgattcttatgacatattcctatgaaaataataaatactggcacttttccttgcagaaagcactcagacctgaatcagagaaaatcatatgccaaagccaactgccagtgttagacctctttttccataaagagtaaatggaatgctaacactagtgggcttattgagaaaatttaaaggttgctgtagtgtttagaacttaggctggaaaaccatattttagtgcatcattttactacatgatcttccaattagatagcttgtaatctgttccttacagcacttgctgttgttacatgtgaagattttataaattttaggaaagtgtctatgatatatagtgaaaagtgtgggaaaagaatatagaaataatattcacttctaaaaccattatgataaaatatttgtgtatggattagaatagaaagggattatggatgtatctattcaatttctcagtttatgttgggccttcctttttggaatgtacgctgttatgctatgataaatgatataatgagtaaaaattattcaaagccaaaaatgaaatacaaagatttccttctttgactatttaggaaagactaagcaaccaaatagcaaagatccctcaggataatgaggtttatgtttggaatagcatgagcagattactacttaggacacagattcctaggaacattcctcattgaaaataaaatggattcctggaaataggtaactagaaattttggccagaaatggtttcatatgaagaactgagaatgcgtgggaagtatagagggcaagtgggcttattttcatatatgcaaagcaatattaaggaactctattttcatgttttagttcttcccctcatgtagcattgtctctttcctctgggatatgttccctgatgtgagagtcctctg

SEQ ID NO: 91905 - DNA, 1006 bp, Homo sapiens
ccattccttttcttttgttcacaaacatagtttcctcatgcctcactgacacagagtagagtatttagcaagttttatgccttcagaaattcctggatatgtagacactaatctcttagtgaacatctgtgtagcactaaagagtggaaaagactctctatacatattgcaaaattgggttgcaattctgtaggttctatgtagatgatcttattttggaatatgcaggtatttgacatccagagtcttatttattcagactaagattaaaccaagattacaatagttccattttaatgctctgttgtaatattgggctgtggtagttctgtacttaatactttatctcacccttttgctttttcaacctaggttatcggtcagtatttgaaaacaaattcatatatatttttcatactttcttgttagctttattccatttttccatctctaatattttttgactaagatgtcttatattgctttctttcagacttggcaactgcagttggaaaaaaagattcaacttcaaagcagaggatttttgatgaagaaccagctaatggagtgaagatagaaaggtttacaagggatgatccttggttatcttcatgtgaagaagtggatgattgtaaagaccagttggagaagcaacaggaaaaacaagagatacttttgcaggaagtggcattcactcaaaggaaagcagttattcatgagagagtctgcaaaagtgatgaaactggggagaagagtggtctgaattccagtctattttcatccccagttatacccataagaaaccattttcataaacatgtatcacatgctaaaaaatggcatcttaatgctgctgtaaacagtcatcagaagattaatgagaatgagacactatatgaaaataatgaatgtggaaaaccccctcagagcattcaccttattcagtttacaagaactcaaacaaaagataaatgctatggatttagtgaccgtattcaatcttttt

SEQ ID NO: 91906 - DNA, 1050 bp, Homo sapiens
gtgaaatatttactatctggcctttgacagaaaaaaatcaaccacccctgtttcattaatttcttgggaatttagagggaattcctaagtgggaattctatattcaccagtgcaaaagtcagaataagcatcctttttaaggcagacaaaataaaatagtttatatcagttcttatctggtattcctctttggagttgtaaaaacaggtccagcatccaaaacccaaagagctcacccagaaggcacctgtacatcttgactggaatcttttgggcactgacaatttaaggacaactccccaggtcaccaattttcctttttccatctgtcagacttttcctcctccatgaactttggaaggaaatgatgcccagctgagcaggaatgtgtgtccttttttaggaaggagtgaacttcaaaattgtgactgtggacttcacacgggaggaacagggtacttggaaccctgctcagaggaccctggacagagatgtgatcctggagaaccacagggacctagtctcttggggtaagaatacactcctctttaatgaagatccatctactgaaatgatttcacattctgatcgattaagaactgtgaaattcagcagccagaatgattttggctgcatctagattgtgtttgtgctctttattccccagtgaagattaattttagtttgtagggtagaaatagtgcagattcttgggcttgagattttcagtcttcatgttcctaaagaccaaaggccaggaccagattctgcagtaattttcttttgtccccagctttgaaaactcaaattcctgtatctttccttgtcagctttttgaagcagatacaatctcctagttggagcaagggaaagaatataaaaagaattttccaatacatgtgttcaagtgagaaccagacacataggggtcattacaggtgtagaaggtccatttgaaaaaatccgcatagaagatgccacattttttcttcatttcccacctcctggtggactgtatacatgactactttttccatatatactctctat

SEQ ID NO: 91907 - DNA, 1850 bp, Homo sapiens
actctgcacgtgtgctggcatttgggcagattggggaggcatgggcagtcctaggaccctgattctgcctgaggatgcccaggtgtgtgggggggagcagctgcagaggggcgggactgtgtcaggcaccccttgtgcacacacaccggtgtttggttgggaaacaggaggccggagatgagttttagacagagggtgctggggtctttgtgtgattggaaccctgatcacagcctgatggtgcccagtttggtggaaagacaggatcttcctgagccacaggtgcccccgaaagatgtttggtcagaatctgggcaggtgtggctcaagcagggggctgtggagtaaggtggaggaaacagtttgggtgcaatttcaggaaacagctgcattgtgaacctacgctatgctgcgtgagaatatggtgggagcaggggagagagtaagtgggagagatggagtgcagaggttggggtgcctagggtaggatttgccctctagtcttggatcccaaaacacctagttggtacagaggcatctgagcttctgagacatgtatttagagcctgggtagggctgcttttgtctggcttgtgctggtgtctgttggaggcccccagccctatgcaggccttgttgtagtttcaggcctgagtatacccaagttggtggagggactggtttagagctacaaattcagggcctgggagggtgttagggtgggaatctggctggtgctgttcgagtaggagccagtggaccccagaagtgtggagggaacaggatgtgggtatagctgagctctgtgcataaatgcttggctatttgagcaggatgtgggtggccctctgtgctgagttgctggagggacaggtctggctgatggaacggtaggatcagtcttagttgttgaatcagttcctgggagcagtggagctgtgtcaccagcttcatgcagttaggcagtgagtgtgattctggccctaggaagaagtgctggtttggggctgtagattgaggttggtaggggtaggatggggtgaacaccagggggtcctcgatatgcctgatatttgtggggatcccagggcccagtgaataggagagggatggactggtgctgcagactttggtggtgggcagaaggccatgttgggcacaagctgggcttacaggtagatggtccaggggcccaagatggtggaggaaccaggttggagctgcagaaacttggcctgggagagggactgagggactctcagtacatacacaggtatttgggcaggaagctggcaggaacctccagaagtgcatttgctatgggaatgcatcctgcatcctgggagcaggggctaatgggggtggggggcccagcggttccggcagacctacatcttcatgctgtacttggggcttctctcagtgcagctcaggacctcagcaccctgctgtgcctggaggagagcatggaagagcaggatgagaagcccccagagcccccgaaggcctgtgcacaggtgagtggagacccagagcttgggtctgtctgcagcctgaccctctcagcttgggaggctgtggctcctccctgactctctttgcagccttttagggggtttggggccctcatggccatcaggcttctaacacttactatatattttatgaatctccctgctagttgcctcacctttttagcccagataactctttctggaaggaatttggcatcctgaatcaaaagcccttaaaatgctgattcccttttggccagcaattcacagctttgagaatgaacaattggaaatatactaaatgtgcaatgtaagaggatagctgaatgaattacg

SEQ ID NO: 91908 - DNA, 1019 bp, Homo sapiens
aggggctgtgccactgtccctttactcttgatcaggtatttgggtaggaagcaaaaggttgtaggtaagattccgagcaggtggctctgggcccctggagcagacaacgcgcttctccaaggtctgggggcgctgtggttggtggagagaccagattggagttgcagattcttgtgccagaagaggcagtgttgctagtgaacccttggtgggaattacccatgggcagcaaactcccaggctgaaggagggtatcagggcctagaaacaggttctgggcagagggccccctgcacgtcctgggggtgtctgaatggaaaacagaaacttgaactgatagtagggacctatgtaggatagtgcagagctctagagcattcaagatgggcagagactccgggttggagatacagaatttaagtccaggaaggacagagctgcaacagctgccatcaaattggtagctggggaggaagcagtatgttgccagcatcgttatgaagcaggtgttgctgagacctttacttgggtacgctatttgcaggcgtgagaatgtgcaggttagtagagggacagagcctgtgctgcagatttggtcccgggaagagctgactgcacaacacccaggccgtcatgattgggcaagagaaggacaaagggcccagttcccattgagctgctgtatcgtaggctcgagaacccccacgctggcgagtgcccaagtcctggggctgattatggagctgtatgctcaagctactgtttagttgttgtagtgtcctggctgcgggcaaatagtggggcagttgaccccagaacctacacagaggctgtgggtacctgagatgtcccaggcaggttgagacacagggtgagggatgtagattgttgactcaggagcatggtgtgcccccagacgggcagaggagccaggtcctggatgcagattgtgagcacgaacctgctctgtggctgtatcagtaggagggagtctaggtgggtggcccgtgtgcagtggc

SEQ ID NO: 91909 - DNA, 1029 bp, Homo sapiens
aggggagagtaatggaaaacgtgggcagaggtagcaggggccagatcacgtggggcctgtgacaccagaagacttcggtttaactctgagccaggctaggcccccagagggtactgagctgaggtatgggaactgacttagggttcacaggcgacctctggtggccatgtggggaacagacgagggggcgagggcagaaacggagcccagcgtggaggcggctgctgggggccgggatgcacagcgccagagcagggaggtaccgtggaagccctgaggagaggtgggattctggatggatcttaaggcggggccgacatgattggctaatgggttgggtgtgggcatgagaggaagggaagagttggggggcctccagagttgctctccgcttatgctatagagggcgtgagggtttctgggcacgtagtgcgtgctcaatcactgtcactccggacctgcagcagaggccacctcctcacctttctgtctctcccaggaccatgggtcccctgccaccctttgctgtggcccagggcgcccagctcctgatccgtcctgtggacaaaccaatcaacacaactttaatctgcaacgtcaccaatgccctaggagctcgccaggcagaactgaccgtccaggtcaaaggtgaggaactccctgggtgggaagaacagggaccaaaggaagaggtcgaggcagggttccctgtctaatgctctctggctcccatccttctcctaagccttctcacaaaaggaccagtggggccagctttactcccctgttaactccatacctatatcactggtaccgttgttcagctgcctggatacactccctccacacacacaggttgggatagatgtggaatccctctctctcagggactcaggcctttccaaatatattaggcagacctctatcaattgcaattgacagaaacacaaagtagtctaagcaaaaaaaaccaaacaaaacaggactttattgaaaattcaccttcaggtatggttagatccaggggct

SEQ ID NO: 91910 - DNA, 1122 bp, Homo sapiens
ttctgggatttccactctgataggggagacatggcccctatattttgggaatttccaatctgatggaggagacatgacccaagcctctagggtcttccagtttgatgggagagacacctctcaaagtctgggaatttgtagtctgataggggaaacacagaccccagcagacactactgggacccagaatccacctccaccaccgcacaagtcacctccttcctcagtctccttcccagcaccctacatggggagtgccagccagctggggggaggccagcaagggttgggaaggggacaccatgccagatgcagaccaaactgacccagcccgctcgctctctccccagctgcagcagttgccacgatgatcgtgcccgtgcccaccaagccaacggagggccaggacgtaacactgaccgtgcagggctaccccaaggacctgctggtctacgcctggtaccgcgggcctgcctccgagcccaaccggctgctcagccagctgccgtcaggaacctggattgcaggccccgcgcacacaggccgggaggtgggcttccccaactgctcgctgttggtgcagaagctgaacctcacagacactggccgctacacactcaagaccgtcacagtgcagggcaagactgagacactggaagtggagctgcaggtggcccgtgagtgtgtgggaaggggcaaggcgtgcccctttttagacaagggctcccaaaaggagcctttgcttcctccatcaggctggggggacatagaccaaagatggatacccatcccccatcaggctgaaggaagcagccttgtctcctccgcctaacttgggggtccccaaatagggttctgcctcttctatcaaactaatgacctacactgtgggtagacaggcctcctccatcagactgagggttgctaaaggggacccccatgccttctctctcaaataagaggtacagcacactgaaggttttaaaagagaaggcatagtctgatggtggagcatcctttttcctgcagacaggtggaccctaaaacatagggtccatattggggtaatgggttaattataggagtttacctctcctatcagactgcaggcagagaataagg

SEQ ID NO: 91911 - DNA, 1059 bp, Homo sapiens
atttccctgggggcggggcagccgctggggttgagtccgggtcactgagtcacaggaggcggagagggaggctttggggacacagggggcggggcatgggggctgcaccccggacttgcccagggggcacgcggcgtctctctggttctctcccccggtctccttctgtcttcgaaacttgcctgacctccctctggttgtctcctgccccgccctctgtctctgtctccccatctctgttgctgtctctgtgtcccctgggaccttgaaagtgggtattggggccccgggaagggactttggccggactcgggccccacccgagtggatcgttaacccaggatgtgagaagtggctgtgtggagaggcctcaccccttcccttcctttcgacctctctctggatctcccttatcccccttcatggcgaaacatcccgagcacagacctgtgttaattccacctccaccccttgctcccggtgggacctcagacaagccatcccctgccttgagactcagtttgttcttctggaaaatgggaccaatggcaacccctgcctgctggtgttgtgggggccacagcaagggaagaggggaggaattcggttggacaggctgggggctgtgttccctgcccatccaaccccacccctggggaccctcagacacaggagaggggtgtggagcactatcccaatgcacagaaaggaaagctgaggtttggaggggcgaggcttagggtggggaccctcagaggtagggtgggaaggacacccaagcctgtcccactcctggcatcccagggcagctggtgcagtggttccaacctagcaggactgtagaggggagaagatgtgatgggtccggtgggagcttcgaagggctgggagagacggtgctgctggaagagagggtgctgatggttctctgaggttggaagagggataaaagggtcagaaggaggaggatctgaagaaggaagataggtctgagagagaagtagatggtttagtgggaggagggggagaggatctgaaggaggaggacagggtctgttg

SEQ ID NO: 91912 - DNA, 1072 bp, Homo sapiens
accagggggtcttgaggacccaggagaacagagacccgggtttctgggtactcagttatgtggggccacaagtgatcagggtcctatttgaggtcaagatcaggtgggcagaagggatcaggggactgaggatcctaagattgggtaattctgagactttgggtaatttagaggcaggatgaaaatttcaggggtctccagacagaaagcctcaaggcctcaaggcctggtattggagatacgaggacctggaaacttgggagttcaagaacagagggcccacaaggatcagcagatgacgaagaccacacactcttctctccatcctatctccatccctgatctcaagaaggggtgtcctctaccacagctgtggccacgtcaccatccccaattgacccccaaagctgcagagagccgttctacagagccccaaaactttaggtagtttctgcaccctccaccccatcagcgtgacagctggagagcctcaagctatgtgcatcaggagttctgccacggcctcccagctttcctattccaagagtgagaaagcaggcctcagttttccccgtctgtgtgatgggttggtatggatttgcctgctgccatggtcccctcgcctttgtttgtttttgtttttgttttttgagacagagttttgttttgctctgtcgcccaggctggagtgcattggcgtgatctcggctcactgcaacctccgcctcccaagttcaggggattcttgtgcctcagcctcccgagtagctgggattacaggcatgcaccaccacacctggctaatttttgtatttttagtagagacagggtttcaccatgttgcccagactggtattgaactcctgacctcaggtgatccgcccgcctcggcctcccaaagtattggtattagaggcatgagccacagcgcccggcctgccgtggcccctttttaaacagtttgatctaaaattacccatgcgtggtggtcagcatctgtaatcccagctacctgggaggttgaggcaggagaatcgcttgaacctgggaggcagaggttgcagtggggcaa

SEQ ID NO: 91913 - DNA, 1022 bp, Homo sapiens
ggctccggctcctgctccgcgtccagctctgatcctttaaggcctagttttctcgaccctcgggctccacgcccctggctacgaacttgtcccattcctcctctgccacctcaacggcctaggccccgccctgcgatggcctggctgaccccgccttccagctaggccctgtccacgcattgtccttcccccctccagctcccccgactccttggggcgcgggcctcggtgtccagctccggttaattcatcgccgccaacgcagtcccgcttggcctgcccttggctctcgctcctaccttcctgtgaccccaccccgatccggtgccgccccacgtgccggccacccacccgggcctccagcctctgttcccttaccccgggtggcccgcgcgccctcctgacccggccctcccgtcccgcagcacggcgccaacgtgaacgcgcaaatgtactccggcagctccgccctgcactcagcgtccggccgcgggctcctcccgctggtgcgcacgctggtccgcagcggcgctgacagcagcctcaagaactgccacaacgacacgccgctcatggtggcgcgcagccgcagggtgagccggggcagctgtggacatgccccttgcacacgtgtgtccgcgggctggttgcaggcgagtgtgccagagcgcagaggagtgagggtgtctgtgccgttgcgtggaggggagtgggtgagcctctgaaagcgcgggtgtgagttccagaaatgaggagagactggcaccaagaaaaaaagtgccttgcccatcttttcatactgagaagtggagaggccaccacctggatccagtgagctaggagggatgggagagaggactgtgaggcatgggtggctctatggtcacgcccatcttcctacaggtcatcgacatcctgagggggaaggccacccggcctgcttccacctcccagccagacccctcccctgaccggagcgccaacacctcccccgagagcagcagccgcctcagctccaatgg

SEQ ID NO: 91914 - DNA, 1498 bp, Homo sapiens
agggcaggattcgaactgtgggtgggacagaggccaggacggactgagctaagagaccgagagaactccggctagggcgaggggcggggctggtggaggcggggctggtgggggcggagtcggccggaagggccgaaaggggcgtggcaagaccttggcgaggcggccggtaggcagggggcggggcgtgggaactactcgggagcagagggggcgtggctagaccttagggggcgtggtttaacgccgggagcgaaggagacagaattctttggcaggggcgaccttagaatcctggggaggagcgagaatggaatcccggggaggaacaggggtggaatccggggggcggggtcagaacgccaggagggggcggggccggagccagggtcggcttgactcgggggagcagcgggtggatcctgtgacgtcagcgggttcgaaccgccggagctgagcgagaggccgggggtgccgagccgggcggggagagctgggccgggagagcagaacagggaggctagagcgcagcgggaaccggcccggagccggagccggagccccacaggcacctactaaaccgcccagccgatcggcccccacagagtggcccgcgggcctccggccgggcccagtcccctcccgggccctccatggcccgggccgctgccctcctgccgtcgagatcgccgccgacgccgctgctgtggccgctgctgctgctgctgctcctggaaaccggtgagacgagcggacggccccctgccctcgcgcggaccccctccaaccttaccttccgagctggggaagccgagcaccttccccgcccacccccggctccccgagccccctctcgcgtgcccccttcctggctggccccacagactccgaccccctacacgtccgattctctcgaggagactctgacccctcctttctgcatctctctcaccaccacccccatccttcttaatccaattgcccatcctacgcctgcttgtctgtccccctccccatttctcggattcccgcgccgaaagggttaaatcccaggaaggcctggtgccccctccccaccccgcgccgagtagttcacccggatctgggtctctgtctcctctacccctctcaggaatgtggggaatgttccccccacctaccgcagtaaggtctcgaggaagaggcgagaccacctccctcccctatttttccttcttcccggcttgggcgtctgaggcccggagagaactgaggacaagcggacctgattcgggtcccttggagggctaaggataagagttctggcgacttagggggaagggcctgagctcggagctccaaccccgaacctcagggagttgggggttctgactccgtggactccagaaaaattaggggccgggggctccgtcttcagggtccctggtagaatggaggctaggcgctaagtctaactgggatctaggtaaaactgggggcgagagaggatcaaacttgt

SEQ ID NO: 91915 - DNA, 2143 bp, Homo sapiens
ccgagccagggaggggcggggcgggcgctcctggctccgggttccggactccccggtttcgggaccttatctatcctctggtagcgcctttgtcctcagagccatagcaggaggtggacgagtggagccgccgcccttatcccccgtccctcccattgctatgccttggaccccctggcgtccttccatccaccccactaggggaggagagcggcccccctggggagggaggggctgggagggaacccttgaaagaggcgctggccccgccccttgcaggtgacccggttgtgtattcccagcgacaaactctgggatgctagagtttcccgagggtttgcgcagaagagagctcagggggatcttgggggaaccccggccacctctctggcctcatttcccccaggatggctctcactggcctcccagctttgacccagagctgggaactccgcttccatcccctgcctctcccttcaggcagaaataggcagatgagatcagaactggcacctctgggtgaattctccgaacccaccagaccctgagcctactgttagcttggtgcatgatctcaccgaaggctccagcttgccctgggaaacaggtcctgtttctgtttccatcttagagatgaggaaacaggctcagcaaaggcaagcagccttctcaaggtctcacagcaggtcccggggaagccgggctccggttcttcagagccccgcaccgggtgggctccaggaagtgcctctgagtttccatttcctccctcgtaaaaaaactgagataacaatcctttccctgcggaccatccggaaggctcccaggccccactgattccctgtgaaacctcttagcccctggagaaggagctgtcggcccctttcttgaccacccccaccccaatccttcgcctctgctgtccactggctggccggctggcatgtgctcgctctccctctctctctctctcccctccccctccctgttttcctccttccctcactttctttccccctcttcatctctcttcgtttctcaccctttctctctccatccctctccaagctctttctctcttctcctctccccatctctctctctcctctccgtctttctctgtatacctgtctagctccactgcctcccccgcttggcctcctcggggaatgcgggtgcaccacctgggcccccagctgggccggctcccctcccccagctttcttccctgcccatccgtgtgtccatgtccgccaggcagccccacgtagtggagggggaggggagcagagggacggcagcctggctgtctcctctcattagggaagggggactgggcagaggagaagttggggggtgggtatatagagaggctggagctacaaggatgggtacagaggccaatagagggaagcggtcagacacagatttaggaatggggtcagagacacgtgtaggaatggaatcagaggatagaaggggagtgaaatgccggcacagggtcgggggagtgaaataccgacacagggatgaggctgaaagacactggaatgggacggaggagggtgggggaagggagctagacatagataccagatgaaggcagggacaggaaaaggaaaggggtttggtgacaggcagggagccccaaagactccagctgtgggacagcagaggtgccgtgacccacggaggtcagggtacagggggcctcaaggccagcgacatgtgggggccacagggagtgatgaacacagaagggacagggagctgggcacatgggccagctcccccgcccctgcctgggacgctgttacatttttaatgtcccagcagtgctgacaaatggagcaggaaggggaggagaagaggggacccagcaagatgggccaggctgtgagaaggtgtgtcagaaatatggggagacagggcactggagacccaggaggcagggagactccacagtcagagacagaaacagagacgtagaccagaaggcttgtgagaagagaaccccaggaatcaaggcagagagccaggttccagacacagggagacccagacggagaaagagaccggagatgtcagacatacagaggaaagaggaagagagtgactaacggggacagggtatcttctcagg

SEQ ID NO: 91916 - DNA, 1035 bp, Homo sapiens
cagcaattccaaaatcatatgtaatatgaactcatagtacacgttatagttgtataatagaatagtcattttagtcttccctaaaatgtcttttccaggtggcttttttggaatcaggatgctgcgaagctgcctacgttgcatgcggagcctgcatttcccgtggggcccccttcgtggtggccctgcctggaggtgtctgggtccctcccccacccgactacttcactctctgtcctctctgcccaggagcccaggatgtgcgagttcaagtgctacccgaggtgcgaggccagctcgggggcaccgtggagctgccgtgccacctgctgccacctgttcctggactgtacatctccctggtgacctggcagcgcccagatgcacctgcgaaccaccagaatgtggccgccttccaccctaagatgggtcccagcttccccagcccgaagcctggcagcgagcggctgtccttcgtctctgccaagcagagcactgggcaagacacagaggcagagctccaggacgccacgctggccctccacgggctcacggtggaggacgagggcaactacacttgcgagtttgccaccttccccaaggggtccgtccgagggatgacctggctcagagtcataggtgagcagggtaagggcgggaggcaaggaggtgggagggccgcggtgtgggagcatccccttgcgggtcagtttctctcttggcttcagctgtgaggttcacattctctgtgggtttccatccatcagcaaatgttcattaagcacctaccgcgtgccagatgcttttctgtgtgctgaggatgtggcaggcaaccaggcattcttgggaaaaacaaaaaaataagtattggctgggcgcagtggcccacccctgtaatcctagcactttggaaggccgagatgggcagatcgcctgaggtcaggagttcaagaccagcctggccaacatggtgaaaccctgtctctacgaaaaataaaaaattagctgggtgtggtggcccgtgcctataatccc

SEQ ID NO: 91917 - DNA, 1030 bp, Homo sapiens
aaataaaatgggcaacacttggatagggcagtgcaggccagacattaccctaagccatttacctatcaatgtattatttaattcacacagcaatcctaggggtgggtactttcattatccccattttacaaaacaagaaacagctacagagttgcaaaaccacttatcccaagccaggccgctgataagcagcagagctgggattggaaccccggcagttagggcctaaccaccctgctcctctgctgagtgtttgttgaatgactgccggtgaggagtgacgcaccccctctcctcctctccccagccaagcccaagaaccaagctgaggcccagaaggtcacgttcagccaggaccctacgacagtggccctctgcatctccaaagagggccgcccacctgcccggatctcctggctctcatccctggactgggaagccaaagagactcaggtgtcagggaccctggccggaactgtcactgtcaccagccgcttcaccttggtgccctcgggccgagcagatggtgtcacggtcacctgcaaagtggagcatgagagcttcgaggaaccagccctgatacctgtgaccctctctgtacgctgtgagtgtatcgggggtgacccctcccccatcaaaactgcctacactggcttctctaaagcactgtctacattgtctctgaatgttgtctacgtgggttccctgaagccaaattctgcactaccttcctgccattgtctacactggctcccatgggcaaatctacatacttccccctcattgtctacattggctttactgggttcctgcatgctgtgcctagtctgtggtaacctgggatgggcttgcaagagccagtttgatacatttctttccaattccacatccaatgaagtcttctcggtagcttgaaatcaaccttggggaatatttacaccaaggaaattggcaaaccctagaaatgggggcttcttttattccccagagagttggtttaccagcaaagagctgcccccaacagtgtctt

SEQ ID NO: 91918 - DNA, 1346 bp, Homo sapiens
gcctgtaatcccagccatttgggaggctgaggcggagggatggcttgagcccaggacgtggagtttgcagtaaaccaggatcaccccactgctctccatcctgggcaacagagcaagatcctgtctcaaaaacacacacacacacacacacacattatttgtagtggctcccttaggcactgccagcactgaacaataactcccacaaaattatccacagtggtttccctgaacagtgtctacactgacatcagcacacaacagcctggactgatttgccccagacagttttgactgctgtacctcctgccaacccgccccgtttctttagcattcctgtctatctgctaacttgtccacccgctctgggattctcctccttgctgatccagtccccccatttcccccagaccctcctgaagtgtccatctccggctatgatgacaactggtacctcggccgtactgatgccaccctgagctgtgacgtccgcagcaacccagagcccacgggctatgactggagcacgtgagtcacgtggtctcagaaccctgggtctgagggaggcggggctgggggcctggactcctggatctaagggaggaggggctgggggcctggactcctggatctgagggaggaggggctgggcctaaattcctaagtcctccaggatgaagggagcttgcattttggcaatttggggtctccgggagtacttaggtccctggagcttggctcctggtgggtgtatctttagggatgaggcctgtgctcccctctcgaccttggtatccctctcacctgaccccacacccctccaggacctcaggcaccttcccgacctccgcagtggcccagggctcccagctggtcatccacgcagtggacagtctgttcaataccaccttcgtctgcacagtcaccaatgccgtgggcatgggccgcgctgagcaggtcatctttgtccgaggtgagtgggtcttgggggccgtgtgtggagacctgggtccgctcccctggagttctgcccttcaggacttggggctgcactgggggaggctgcgccgccgacctgggagggatgcagacctgcctggctgaggggagatgagggttggccttcccctcgtggcctcagactggggtctggatttggggtgtcggggtaggtgaaggcagcagagttggggggttgaggactttgctcggggttcctagaaagtagaggcctgggtagggtcctcacgaatagacccgaggaagctgccctgggctccagctcctgagaaagacgcacacctagagtcaggcatgcaaacttcaaagagacagaaaccaagagc

SEQ ID NO: 91919 - DNA, 1140 bp, Homo sapiens
ttcaggcccttgctcagttgtcaccttacagtaaggtagaggccctcccactaccttcggggaccccactttgcacctcctatcacttccgcactgtatatttttgtatcccccgtgacttactcccatctggcatgtgagctattgtactggtttgcttactgttgttctccctgcccaaccagaatcaaagttccatgaaggtagacactttgtatgttttgttctccactcatctcccatgcggggcacacatcctcgctccttcctcatgctcagcagtttgagttgaatgaaagaatgtcccctgcccatgggagaggacatagacaggcaggcgatgatgtggggtgggatggtcgcttggaataaggagctgtggcttcctcctggagaccccctcacgctgtccctctccttgcagagacccccaacacagcaggcgcaggggccacaggcggcatcatcgggggcatcatcgccgccatcattgctactgctgtggctgccacgggcatccttatctgccggcagcagcggaaggagcagacgctgcagggggcagaggaggacgaagagtaagtgatgggccctgagacggggatgggagaggggtcgaagaactgaggagtatggggtaggggtgagggtgggagaaaattctccataatggctgtgtgaaacagacagacctaaaggaactggggtctaaatggagtagggaggtatgggtttctctctgctataaagtatggcattgaatttaaaaattagctgggggccaggcacagtggcttacacctgccatcccagcacttttggaggctgaggtggggagatcgatcgtttgagcccaggaatttgagcccagtctgggtaacataggaagactacccccatctacaaaaaaaaaaaaaaaaaaaaaaaaatggccacgcagggtggctctgaccgctccgctctgcaaagactcctcggagcccaggatcctactacattttttttttttttttgtgacggagtctcactctgtcaccgaggctggaatacagtgatgcaatctcggctcactgcaagctctgcctcccaggttaaagcaattctcctgcctcagcctccggagtagctgggaatacaggc

SEQ ID NO: 91920 - DNA, 1043 bp, Homo sapiens
tgtcctctctctacctccaggaaatgcctcgataccatgagctgcccaccttggaagaacggtcaggacccttgcaccctggagccacaagcctggggtcccccatcccggtgcctccagggccacctgctgtggaagacgtttccctggatctagaggatgaggagggggaggaggaggaagagtatctggacaagatcaaccccatctatgatgctctgtcctatagcagcccctctgattcctaccagggcaaaggctttgtcatgtcccgggccatgtatgtgtgagctgccatgcgcctggcgtctcacatctcacctgttgatcccttagctttcttgccaaggatctagtgccccctgacctctggccaggccactgtcagttaacacatatgcattccatttgtgatgtctaccttggtggctccactatgacccctaacccatgagcccagagaaattcaccgtgataatggaatcctggcaaccttatctcatgaggcaggaggtggggaaggtgcttctgcacaacctctgatcccaaggactcctctcccagactgtgaccttagaccatacctctcaccccccaatgcctcgactcccccaaaatcacaaagaagaccctagacctataatttgtcttcaggtagtaaattcccaataggtctgctggagtgggcgctgagggctccctgctgctcagacctgagccctccaggcagcagggtcccacttaccccctccccaccctgttccccaaaggtgggaaagaggggattccccagcccaaggcagggttttcccagcaccctcctgtaagcagaagtctcagggtccagacccttccctgagcccccacccccaccccaattcctgcctaccaagcaagcagccccagcctagggtcagacagggtgagcctcatacagactgtgccttgatggccccagccttgggagaagaatttactgttaacctggaagactactgaatcattttacccttgcccagtggaataggacctaaacatccccc

SEQ ID NO: 91921 - DNA, 1051 bp, Homo sapiens
gctggcacacatgactgaaacagcatgggactcacccgtggggcaggggacagactgttcccagagagtaacaagccaggatgggcaaggctgacatgggggaacccaaaggtcggggagcctaactcagcttaggtggtcagagagcacttcgtggaggaggggacccccatccgaggctttctgaccctaggcttctcaccccggcccatctcacatacttgcacagtgcaccacctctgaccccttccgttctctctgcctcacaggcgttccctgtactggtgggtgacatggacaacagtggcagtctcaacgctcaggtcattcaccagctgggccccggtctcaggtccaagatggccatccaggtgagtggggcacggaggctgctgctcccctcggccaccgtgagcagggagccgccctcacaccccctcctctccacagacccagcagtcgaagtttgtgaactggcaggtggacggggagtatcggggctctgacttcacagcagccgtcaccctggggaacccagacgtcctcgtgggttcaggtaagaggcggagggcttggagggtggtcacaaaactgcagttctggctttgccagcaaatccaccccatttgtgaacctccttttctgccactggagaagtggctcagcaggagtgattttgaaacatcaggcaacatactacagtgggtgagacggtcacccactgaccatgagtgggtgagtcagagcagtcttttttttttttttttttgagatggagtcttgctttatcacccaggttggagtgccgtggcacgatcttggctcactgcaacctccatctcctgggttcatgcaattctcctgcctcagcctcccgagtagctgggattacaggcatgcgctaccacgcctggctaatttttgtatttttagtagagacagggtttcaccacattggtcaggctggtcttgaactcctgacctcaagggatccacccacctcagcctcccaaagtgctgggattacaggtgtgagccaccacgcccagcc

SEQ ID NO: 91922 - DNA, 1113 bp, Homo sapiens
ggttcacagagagatgatgccagcgtccatggtcaccagccagcctgtggcagggctgggattcgaacccaggctgtgcatatttacccactctacccaatggcctctcagcagcagagtggctcagagcctgggtttgggaggtgtggaggcttggattctgcccttgacacattttgtgagcatgagtgagtgacttaccctgtaagcttctataagtggtggtgaccccctctgtaagtgggggtggataaatgctgaccacatgggcttgtgtcgaccagatgaggtccttcaggtaatgcagtcatagcagggcctgggacgctgacctcagcggtagggaacccctgggcgatgggttaggagaaaggagcccttgagggaggcctgagagcaagcccaagcctccagccggggtgagcctagagggcttcctggaggtggagtctagcctggcactcagggtgggtggaaactgatcgtcattttgcccacaggaatcctcgtagcccactacctccagagcatcacgccttgcctggccctgggtggagagctggtctaccaccggcggcctggagaggagggcactgtcatgtctctagctgggaaatacacatgtgagcctggcgcctgggtccgagggtggaggggctgggcccctggactcctcctgggtctgagggaggacgggctagggccctggacactcaggtctgagggaggaggcctgggttcccagatgcccaaatccccttggtaatgagaccccgcctccaccccactctctgacagtgaacaactggttggcaacggtaacgttgggccaggcgggcatgcacgcaacatactaccacaaagccagtgaccaggtgagtgggtgcagggactagctggtgctgccaggggctgctgggcctggaagtccaggtggggccacttgctaattctcatgtgttgctccggcccctccagctgcaggtgggtgtggagtttgaggccagcacaaggatgcaggacaccagcgtctccttcgggtaccagctggacctgcccaaggccaacctcctcttcaaaggtaaaggtctcggttcccctacgcgggaaaca

SEQ ID NO: 91923 - DNA, 1199 bp, Homo sapiens
ttgggtgtttgagcctcctgctgagcactgctggggccacagcggtgaccagccctgtcttcacgggactcagtgagaggaacagattcatccgcagagtgggcaggactaggttgggggaacccaggggtctagagggcttttcagagggcaggggtcactgagcggagagcagaggaggagtgagccatttgctccagcgtgaagttgttggtgtgatggggtttcagggtggcaggagcagtgtggttaaaggtctggaagctgtcggcatgtggctggtatccaaggtggccaggaactctgcatggatatggtgggaagctggcacgcctctcacctcagctcttccctgcaggctctgtggatagcaactggatcgtgggtgccacgctggagaagaagctcccacccctgcccctgacactggcccttggggccttcctgaatcaccgcaagaacaagtttcagtgtggctttggcctcaccatcggctgagccctcctggcccccgccttccacgcccttccgattccacctccacctccacctccccctgccacagaggggagacctgagcccccctcccttccctccccccttgggggtcgggggggacattggaaaggagggaccccgccaccccagcagctgaggaggggattctggaactgaatggcgcttcgggattctgagtagcaggggcagcatgcccagtgggcctggggtcccgggagggattccggaattgaggggcacgcaggattctgagcaccaggggcagaggcggccagacaacctcagggaggagtgtcctggcgtccccatcctccaaagggcctgggcccgccccgagggggcagcgagaggagcttccccatccccggtcagtccaccctgccccgtccactttcccatctcctcggtataaatcatgtttataagttatggaagaaccgggacattttacagaaaaaaaacaaaaaacaacaaaaaatatacgtgggaaaaaaaacgatgggaggcctccgttttctcaagtgtgtctggcctgttttgagcatttcatccggagtctggccgccctgaccttcccccagccgcctgcagggggcgccagagggccggagcacggaaagcagcggatccttgatgctgccttaagtccggctcagaggggcgcagcgtggcctggggtc

SEQ ID NO: 91924 - DNA, 2830 bp, Homo sapiens
tgagtagaaccaaccccaggttaccaaccccacctcagccaccccttgccagccaaagcaaacaggcccggcccggcactgggggttccttctcgaaccaggagttcagcctcccctgacccgcagaatcttctgatcccacccgctccaggagccaggaatgagtcccagtctctcccagttctcactgtgtggttttgccattcgtcttgctgctgaaccacgggtttctcctctgaaacatctgggatttataacagggcttaggaaagtgacagcgtctgagcgttcactgtggcctgtccattgctagccctaacataggaccgctgtgtgccagggctgtcctccatgctcaatacacgttagcttgtcaccaaacatacccgtgccgctgctttcccagtctgatgagcaaaggaacttgatgctcagagaggacaagtcatttgcccaaggtcacacagctggcaactggcagagccaggattcacgccctggcaatttgactccagaatcctaaccttaacccagaagcacggcttcaagcccctggaaaccacaatacctgtggcagccagggggaggtgctggaatctcatttcacatgtggggagggggctcccctgtgctcaaggtcacaaccaaagaggaagctgtgattaaaacccaggtcccatttgcaaagcctcgacttttagcaggtgcatcatactgttcccacccctcccatcccacttctgtccagccgcctagccccactttcttttttttctttttttgagacagtctccctcttgctgaggctggagtgcagtggcgagatctcggctcactgtaacctccgcctcccgggttcaagcgattctcctgcctcagcctcccaagtagctaggattacaggcgcccgccaccacgcctggctaacttttgtatttttagtagagatggggtttcaccatgttggccaggctggtctcaaactcctgaccttaagtgattcgcccactgtggcctcccaaagtgctgggattacaggcgtgagctaccgcccccagcccctcccatcccacttctgtccagccccctagccctactttctttctgggatccaggagtccagatccccagccccctctccagattacattcatccaggcacaggaaaggacagggtcaggaaaggaggactctgggcggcagcctccacattccccttccacgcttggcccccagaatggaggagggtgtctgtattactgggcgaggtgtcctcccttcctggggactgtggggggtggtcaaaagacctctatgccccacctccttcctccctctgccctgctgtgcctggggcagggggagaacagcccacctcgtgactgggggctggcccagcccgccctatccctgggggagggggcgggacagggggagccctataattggacaagtctgggatccttgagtcctactcagccccagcggaggtgaaggacgtccttccccaggagccggtgagaagcgcagtcgggggcacggggatgagctcaggggcctctagaaagagctgggaccctgggaacccctggcctccaggtagtctcaggagagctactcggggtcgggcttggggagaggaggagcgggggtgaggcaagcagcaggggactggacctgggaagggctgggcagcagagacgacccgacccgctagaaggtggggtggggagagcagctggactgggatgtaagccatagcaggactccacgagttgtcactatcatttatcgagcacctactgggtgtccccagtgtcctcagatctccataactggggagccaggggcagcgacacggtagctagccgtcgattggagaactttaaaatgaggactgaattagctcataaatggaacacggcgcttaactgtgaggttggagcttagaatgtgaagggagaatgaggaatgcgagactgggactgagatggaaccggcggtggggagggggtggggggatggaatttgaaccccgggagaggaagatggaattttctatggaggccgacctggggatggggagataagagaagaccaggagggagttaaatagggaatgggttgggggcggcttggtaaatgtgctgggattaggctgttgcagataatgcaacaaggcttggaaggctaacctggggtgaggccgggttggggccgggctgggggtgggaggagtcctcactggcggttgattgacagtttctccttccccagactggccaatcacaggcaggaagatgaaggttctgtgggctgcgttgctggtcacattcctggcaggtatgggggcggggcttgctcggttccccccgctcctccccctctcatcctcacctcaacctcctggccccattcaggcagaccctgggccccctcttctgaggcttctgtgctgcttcctggctctgaacagcgatttgacgctctctgggcctcggtttcccccatccttgagataggagttagaagttgttttgttgttgttgtttgttgttgttgttttgtttttttgagatgaagtctcgctctgtcgcccaggctggagtgcagtggcgggatctcggctcactgcaagctccgcctcccaggtccacgccattctcctgcctcagcctcccaagtagctgggactacaggcacatgccaccacacccgactaacttttttgtattttcagtagagacggggtttcaccatgttggccaggctggtctggaactcctgacctcaggtgatctgcccgtttcgatctcccaaagtgctggga

SEQ ID NO: 91925 - DNA, 2697 bp, Homo sapiens
gtgatctttattctccatcacccccacacagccctgcctggggcacacaaggacactcaatacatgcttttccgctgggcgcggtggctcacccctgtaatcccagcactttgggaggccaaggtgggaggatcacttgagcccaggagttcaacaccagcctgggcaacatagtgagaccctgtctctactaaaaatacaaaaattagccaggcatggtgccacacacctgtgctctcagctactcaggaggctgaggcaggaggatcgcttgagcccagaaggtcaaggttgcagtgaaccatgttcaggccgctgcactccagcctgggtgacagagcaagaccctgtttataaatacataatgctttccaagtgattaaaccgactcccccctcaccctgcccaccatggctccaaagaagcatttgtggagcaccttctgtgtgcccctaggtactagatgcctggacggggtcagaaggaccctgacccaccttgaacttgttccacacaggatgccaggccaaggtggagcaagcggtggagacagagccggagcccgagctgcgccagcagaccgagtggcagagcggccagcgctgggaactggcactgggtcgcttttgggattacctgcgctgggtgcagacactgtctgagcaggtgcaggaggagctgctcagctcccaggtcacccaggaactgaggtgagtgtccccatcctggcccttgaccctcctggtgggcggctatacctccccaggtccaggtttcattctgcccctgtcgctaagtcttggggggcctgggtctctgctggttctagcttcctcttcccatttctgactcctggctttagctctctggaattctctctctcagctttgtctctctctcttcccttctgactcagtctctcacactcgtcctggctctgtctctgtccttccctagctcttttatatagagacagagagatggggtctcactgtgttgcccaggctggtcttgaacttctgggctcaagcgatcctcccgcctcggcctcccaaagtgctgggattagaggcatgagccaccttgcccggcctcctagctccttcttcgtctctgcctctgccctctgcatctgctctctgcatctgtctctgtctccttctctcggcctctgccccgttccttctctccctcttgggtctctctggctcatccccatctcgcccgccccatcccagcccttctccccgcctcccactgtgcgacaccctcccgccctctcggccgcagggcgctgatggacgagaccatgaaggagttgaaggcctacaaatcggaactggaggaacaactgaccccggtggcggaggagacgcgggcacggctgtccaaggagctgcaggcggcgcaggcccggctgggcgcggacatggaggacgtgtgcggccgcctggtgcagtaccgcggcgaggtgcaggccatgctcggccagagcaccgaggagctgcgggtgcgcctcgcctcccacctgcgcaagctgcgtaagcggctcctccgcgatgccgatgacctgcagaagcgcctggcagtgtaccaggccggggcccgcgagggcgccgagcgcggcctcagcgccatccgcgagcgcctggggcccctggtggaacagggccgcgtgcgggccgccactgtgggctccctggccggccagccgctacaggagcgggcccaggcctggggcgagcggctgcgcgcgcggatggaggagatgggcagccggacccgcgaccgcctggacgaggtgaaggagcaggtggcggaggtgcgcgccaagctggaggagcaggcccagcagatacgcctgcaggccgaggccttccaggcccgcctcaagagctggttcgagcccctggtggaagacatgcagcgccagtgggccgggctggtggagaaggtgcaggctgccgtgggcaccagcgccgcccctgtgcccagcgacaatcactgaacgccgaagcctgcagccatgcgaccccacgccaccccgtgcctcctgcctccgcgcagcctgcagcgggagaccctgtccccgccccagccgtcctcctggggtggaccctagtttaataaagattcaccaagtttcacgcatctgctggcctccccctgtgatttcctctaagccccagcctcagtttctctttctgcccacatactggccacacaattctcagccccctcctctccatctgtgtctgtgtgtatctttctctctgcccttttttttttttttagacggagtctggctctgtcacccaggctagagtgcagtggcacgatcttggctcactgcaacctctgcctcttgggttcaagcgattctgctgcctcagtagctgggattacaggctcacaccaccacacccggctaatttttgtatttttagtagagacgagctttcaccatgttggccaggcaggtctcaaactcctgaccaagtgatccacccgccggcctcccaaagtgctgagattacaggcctgagccaccatgcccggcctctgcccctctttcttttttagggggcagggaaaggtctcaccctgtcacccgccatcacagctcactgcagcctccacctcctggactcaagtgataagtgatcctcccgcctcagcctttccagtagctgagac

SEQ ID NO: 91926 - DNA, 1047 bp, Homo sapiens
gggcagatcacttgaggtcaggagttcgaaaccagcctggccaacatggtgaaacttcgtctctactaaaaatacaaaaaaattagccaggtgtggaggcacgcgcctgtaggcccagctactcgggaggctgaggcaggagaatcacttgaacccgggaggcggaggttgcagtgagccgagatcataccactgcactccagcctggctgacacagcaagactccgtctcaaaacaaaacaaaacaaaaatagctgggtgtggtggtgcacacctgtaatcccagctacttgggaggctgaggcaggagaactgcttgaacccgggaggtggtggttgcagtaggccgagatcatgccactgcactccagcttgggctacagagcaagactccatctccaaaaaaaaaaaaaaaaaaacaaattttgaacccctgcccatcttcctggcaggcccagccccagcccaggggaccccagacgtctccagtgccttggataagctgaaggagtttggaaacacactggaggacaaggctcgggaactcatcagccgcatcaaacagagtgaactttctgccaagatgcggttagaacccttcccagggcacgggagagctggggtgtgtttttgggtggagccctggcagatggtccaagatgaacagattgaaaaaaaaacaagtcctggagaggctgacaacatccctctggtcacacagctagatctcaaggtgctcagacttcaaggacagtttccctgactcccatccaggccatattttaaaagatggtcttgggctgggcacggtggctcatgcttgcaatcccagcacttagggaggccgaggtgggctgattgcctgaggtcaggagttcgagaccagtctgaccaacatggtgaaaccttgtctctactaaaaatacaaaaaaattaggcaggcatggtggcgtgcacctgtaatcccagctagtcgggaggctgaggcaggggaattgcttgaaccaggaaggtgggagttacagtgagccaacattgtgccagcct

SEQ ID NO: 91927 - DNA, 1048 bp, Homo sapiens
gtttgttgagttagtgctggaatgaaggctcagttcctgtcttcaagggtttcccagtcttgctgaaaggaggtcgtttcccctctgggtttctgttgattattgggttgatggtggcttgagagaccagggcccaggttgttctcattgccctgagcttccagatggcactctgatcttctcttgtaccaactctgcttaaaaacaatcaagagttacccctttgcctttaggacaaagtacaaattctttaataaatcacagtcttgcacgatccgacacttttcttcagactagactaggatttctcgagctcggcactatcaacattttgaattggataatgctttgtttggggggctgccctgtgcattttaggatgtttagcagcatccgtggcctctacgcactagatgtcagtaggatccacgcccctccccagttgtgacaaccatatatgtctccagacattgccaaatgttccaagagcaggggggcaaagccatccctgcgtgagaacaactgcgctaaaggggatccgctgctctgaacctattttatttctaaacctcttttattgcctctcagtctctttcctcatagtctatgcacaggtctctcccctctttagctagttgatgtgtattagtcctacagatttcagatgtcccttcctgcagaaagccctctttgactgtctgggctccgctgtcccagccctgccctactgggtttcactgtctggggactgggaaccccaggagggcagagccaggactgccttgatcaccactgcttccttagcaccactcagctcagcgccaggcacagaggaggtgctcagtgtttgtggaatgagcggatcttgaaacagaggctgggctgaggtggaattccctgatgccgtggtggatccaggtaatcagtgaagacatgccgcaaaacctagcttcctcctgctcttgcctagccctggtggtctcagctacttcttggaccctttagcagatgttgctggggattgtgtgtgtgcgtggacgtgcagatc

SEQ ID NO: 91928 - DNA, 1050 bp, Homo sapiens
taggattccagattctttcttttaaaaattttatgtttattattttttctttatttcttttttcttttaattcatccatctgcacactgaaggggttccagattcttagtctcctctcgggggatcccagggggctggatggcaggtttcccagtctgagtcaagagtcagcccctgcagccctgtggtcaccaggagctcctgcaggatttagagtcaagggtctgcatgcagaccagggcagtgccagctacccccacacactggcaaacggtggcatctgggctccctccccagatgtggtctttagggacatcttatctccttgccagccctgtgactaccttctcagggcctccctgacttggtcactagccccaggtcaggcgccagcatgtgctaagtcagaaggaagtcaggcgggtctatggcggagagccaaggcttggggactcaccaccttgctgcttctctcctcaggatcttcatcatctgggccatcagcagttggttccgccgagggccggcccctcaggaccaggcgggccccggaggagctccacgcgtcgccagccgcaacctgttccccaaagacactttaatggtaactgccgggtggtagggcagacttgggaggtgatggggtgtggaggggtggaatgtggaggagtgatgtcagcagtcgggacagaccaggtccttgctcactggcaggtctaggaaaacaggtccagggttgaggaactctgggcccatccccaacacgtgagacctctgtcacctgggtccatccccagcacataaaacctgtgtcacccaaaagaaaaagcaaattcatttggttaaaataggttaaatcagggtctttggatgttatatttcaaaagtatgttcagcctttcagggttgcagagggagatgtgcaagggagagagtgtgagaggtggggagggcagggagccagcagaggctgacaggaggtgggcccggaaggagaggagacctgcacttccacagtgggcttgggcacaggcagggcagggcttcagg

SEQ ID NO: 91929 - DNA, 1036 bp, Homo sapiens
atcacaggcatgagccaccgtgcccggtggctcacagtgcttttgtagctctggactgcttcgtccataagcctgcagagctctgaccaggaaggcccagcagccatgagggcaggagatcattcagggagctcctgccccttcctacccctaaattctaattggcaggctggccagtctccaagtgttctttgttcgttgacttcacaggctcagaccaggacaaacatggtggtatgagaaaagagaaaatatgtcctctctgctgctcttcctctctcctctcccctgtcctccataattactgttcccctgagtgtgctgaccgctgccatagctctttagccagcctgcagaggctctgaagagcaggcctgagctctgttcccttcctgtcccaacagaacctgcatgtgtacatctcagagcacgagcactttacagacttcaacgccacgtcggcactcttctgggaacagcacgatcttgtgtatggcgactggactagcggcgagaactcagacggctgctacgagcactttgctgagctcgatatcccacaggtgggggcagctctcggtttctggccccatggctgcttgactggcactgaaggaccttttcctccagtccgctccttgctgagagcatgtggagtttgggctccaggcttggcccttccctgggctcacatggtctgtgaccacaagccagtccctgagatctctgggcttcactttcccctacctgaaaaaggtagataggggtggaattggcctgggaccctcccagctacctctaaggttgtgcagtcctccactttaaactggtgaaagattagtaattgtccttggggatgtttgcctatcaccagtttatcaggcagccccgtttcaaaataatattagttaatgttgattgagctaagtgcagggtactaagctaggctgactcatggaaatttcccggcaaccctgtgaagcaggaactgttattattctcatttaacatgtgaggaaactgagagagaaggaaa

SEQ ID NO: 91930 - DNA, 1040 bp, Homo sapiens
gatctcagcttcctgtaacctccacctccctagttcaagcgattctcctgcctcagccttccgagtagctgggattacaggcacccgccaccacatccggctgatttttgtatttttattagagacggggggtttcaccatgctggccaggctggtctctaactcctgacctcaggggatctgcccgccccagcctcccaaagtgctgggattacagtgccctactgagctggggtttctgcctggggcatttggtgatggtggcgtccccatgatcatgaggaactgggattcgttgagatttggggaggcagttctggcattccaggtcacattgatctcagcaggtgagtgcaaggtggatgccaggagaccgtgagccgttgctggtgggcaggggtccgggctctggaggctgcaggtgccagcaggtctcacgtcccctcctttcccacctcccaaccacagtgatcaacaaatacaagcgcagacgatttcagaaaaccaagaacctgctgacaggagagacagaagcggacccagaaatgatcaaggtaaatgggcagggttgtcagggcctatagggaccaagccaggccattcacagctcatcccagaccactggggctgtcatctgtcaccaccactgaaccaccatgccggctcggtcatgccacctcccctccctgagcactgggctcctcctctgggaaatggggtcaggaggcagctgtctctcagggagtgaggaggatcccagacaaggttacctgagcctcttgccagcctgggaggggtctacatcacagtcccattgtcacatgaggacacttgctcagtctcagccggaagtggcaggccagggactctcacccacacagccaggccccagagcccaagctcagcctggctccaagcacacacacgagaatatggctttagtaggaactgcaggattcatagttgctgtcactcccagtgggctggggagccgggcagttaatctgtggttaacctgcagtgggcactaagagacttcc

SEQ ID NO: 91931 - DNA, 1835 bp, Homo sapiens
ttcaagatcagcccaggcagcatagtgagaccccatctcttccaaaaaagagaaaaaagaaagaaagaaaagaagctgtccatggtggctcacgcctctaatcccagcactttgggaggccgaggtgggaggatcgtgcttgagcccagaattcgagaccagcttgggcagcatagtgagaccccatctcagaaaaaaaagaaagcaaagattaagattttctcgggaaccctggggaggaagtgtacagagagtgatagtccccgagcacttccacctgcctctgaggtccttccccccatgttgcctcagagggctgaggactatgggcctgtggaggtgatctcccattggcaccccaacatcaccatcaacatcgtggacgaccacacgccgtgggtgaagggcagtgtgccccctcccctggatcaatgtaagctccccagccctgccagctgcctgcagagcctttgagagggtgctcggggtccatctccttgtcttctcctggccctgtccccctgagagagctttccagggctccaccctcccaagctcccaccctgtcctatccccttcccatgtcctctccctctcccacaccaccacccctggggaccccaggactgacttctacacgccagcatcggtccgcaatcaagtgccatccagcccacaaactgttttcaaaaaatgtcttatcacttgccagcttttgaaattgaggcagtatcacttaaaagccacaatttctggcttattttataaaactgggttacatggtcacccacagggcagccgtgggctggagctgagccacagctgcccccttcagtggggacctgcctgccctttgcctcagtcccctctgctgaggtcaaggcaccctttagctcctcatggtgtggcctagaaatgtcccctgtcctccagtctctgtagaggggccctgttgggtctctccagacatctgaggcctgcgggtaccctggcctcctgcccgggccaaatggtgcccctgccccacgtgctgcagatgtgaagttcgacgccgtgagcggtgactactatcccatcatctacttcaatgactactggaacctgcagaaggactactaccccatcaacgagagcctggccagcctgccgctccgcgtctccttctgcccactctcgctttggcgctggcagctctatgctgcccagagcaccaagtcgccctggaacttcctgggtgatgagttgtacgagcagtcagatgaggagcaggactcggtgaaggtgagtgcggccggtgtgggcgggacttcccggtgccttcctgggcgcaagaggccaagaggaagtgtgccaggcctgggctgtgggacctcccgcctggtgctcctctgcccacagtttcacaacctcccaggtcccttctccacagtgaaaggaagtgggcacccagccctccagccctagatgactgggggtcctctccccaggctgttctgttggaccctttgggtccagacctgtcccttcctccttctgtcccagaccttgtgtccctggccctggctccaactctgtgtctctgccatctcactgggtcctgaaatgtcagcctgtgtctgtggcgtgaggctcggctttgcctcctgggctgtcgtcactgttgggtctctgctcctggctcccagtgtcccttcacccactccccgcagcactcccttggcctctgcctcttcccctagtgccatctccccgtctcttctgtctttgtgagtcaccctcctctctctccccatctgcccatctctgacccagtctcctcctggctggcccacctt

SEQ ID NO: 91932 - DNA, 1075 bp, Homo sapiens
tcccggtgtcagggcaggggcctggaggaggtggtcttgaagtgcatgccacagatcttccttcccagggagggcgagctggcaccatggtgtggcacagaccccgcgtcccttcagattctgccatgccaggctgtttggcctcagggaagcagcttccctgaccagtccttagcacctggcacgtggtgagccctgtccatggcaccagtcaccgtcaccatcagtcaagggactgcaccttggggtgctgggtgctgacgtcctatgggagggctccaggggtgccgcctgtctggtgctctgggggtcacccaatgaatatgagagccttcctgggagagaggggtctcgttcagcacccctcctgaggacccagccccaccccagggtgtgaggatgcaggccaagggggcctgagggagctgcagtagggtctcagcacctcctcagcctcctggttcccccctaccccctgcgcacagatatccagttctggaacagccggcagtccctggagggcctgtccgtgcgctccgtcttcttcggcgttttccagtcattcgtggtcctcctctacatcctggacaacgagaccaacttcgtggtccaggtcagcgtcttcattggggtcctcatcgacctctggaagatcaccaaggtcatggacgtccgggtaaggctggggcgccatgctgtctcgggagctgcaggggttgggagggggtagtgtggcccagctggaccctggagctggcccccgggggattcccagcaagtgcctcactcccaggactgaggggattttctcaccaggggattttttgggtcacacatggggcaggggaactgggaacggtggggaagggcaggggctggttctggcttgtggggtgggagccagcgtagcaactgaccatggcacccacctcatccacagctggaccgagagcacagggtggcaggaatcttcccccgcctatccttcaaggacaagtccacgtatatcgagtcctcgaccaaagtgtatgatgatgtgagtgtcctgcacagtgggcccctgggggtggtctcc

SEQ ID NO: 91933 - DNA, 1632 bp, Homo sapiens
cgtgcctgtagtcccagctacctgggaggctgaggtgggaggatcccttgagtccaggaggttgaagctgcagtgagccatgattacgccactgcactccagcctgggtgacagagtgagaccctgtctcaaaaaacaaaagaccgggtgaatcacagccaatagtgagtactgtgaagggcagagtggtgggaggatgcacattaataggggtccgggggcccctctgaggacaggacatttaaacagaggcctcagatatccagggagagagctgtgcggatgtgacagaaggccccaccagtgcagaggccgctggtagagtgtgcccaggtataggaagtggtagagtgtgcccaggtgtaggaagtggtgagggggctggtatggccagtgcagagtgcacaggggagaggtgggagaggccatccctctgctcatgggtgctctcactgcaggcttcatcaccatgacgccccagctcttcatcaactacaagctcaagtctgtggcccaccttccctggcgcatgctcacctacaaggccctcaacacattcatcgacgacctgttcgcctttgtcatcaagatgcccgttatgtaccggatcggctgcctgcgggacggtgaggcccggtgggcaggtgggagctcccaccggaacagggccctgaggcagtctttagggcccaggcctgagggggtgccacggccccagatggggtgctcagtctgagggggctcggccccgcccttgcatcacgccctctccacccaggcccacctggctgtggacgggccagcccgacctcacactgcctcccacccctctccagatgtggttttcttcatctacctctaccaacggtggatctaccgcgtcgaccccacccgagtcaacgagtttggcatgagtggagaagaccccacagctgccgcccccgtggccgaggttcccacagcagcaggggccctcacgcccacacctgcacccaccacgaccaccgccaccagggaggaggcctccacgtccctgcccaccaagcccacccagggggccagctctgccagcgagccccaggaagcccctccaaagccagcagaggacaagaaaaaggattagtcgagactggtcctcacctgctccggctcctggcgaccactacccctgcgtcccggccccctcgcctcccctccctgtcgccctttccctggacagatcaggccggggcggtgggaggcccgcctcaggtcagggcccagcgtgtgatgtaggggccggggcaggccagggtttgtttgtggaggcgctgtctgtccctctgtccctctgtgtttccagccatctcgccctgccagcccagcaccactgggaatcatggtgaagctgatgcagcgttgccgagggggtgggttgggcgggggtggggccgggcccccctacgggatgcccacggccgttcatcatcttgtccctcgtccccctaccacactccccctcctagaccgccgccctttaacacagtctggatttaataaattcatatgggtgtttaacttaaactcagcactgcccctcctcctcgtgccttccttcctctgttgccttggacaacagcttccagcagggat

SEQ ID NO: 91934 - DNA, 1053 bp, Homo sapiens
cagatgaagaagccaaggcacaaaaaggtgaagtaataggcttatggccccacaactagcaagttgcagagccaggatttgaacagaggcagtgaacccagagctccagccacagccgcccaggactcagtctccccctacagcccgggagcctctggagggtccaaagtctaactctgtctttgggtccccaggttcatccagcacagatgcctaagaaggattttcccagttcaagtgacttgaggttggccctgccactgacctagagcgtgtcccttcctctctgccagcctcagtatccccatctgccaaattggggggaccttggcaccctactggcttcacagatcccatgagataaggggtgcaggaaaactacctttcaaggggcaaaggtctggctgccaggagccactccctgagaacagaggaggacagatctagcagcggaacaggttcgcgtctataaatccccagccagagaccagcgcaggcagccctgggtgggacacctggctgcagctgccttccgttgctgtgtgattctaaggctcactggcggcctctgggcttccccttgtcctgtctatggaatgacgggaggtcggtttcgattcctccacgattctgtgaagggctgagctttcctggggaggtgaaaaggggcttccctgaggacccagcattactgtacctcctcacttaggaagcaggggtgaatctgggattttgggtggtcactgtgggaggacagggctggggtacagagcaagaggctgcctgggttcagatcagcctctttgcatctttttgttgttgttgttgtttgtttttgagacagtctcgctctgttgtccaggctggagtgcagtgacgcaatctcagctcactgcaacctctgcctcctgagttcaagcgattctcctgcctcagcctcccgagtagctgggattacaggtgcccaccacgatacccagctaatttttgtatttttagtagagacggggtttcgccatgttggccaggctggtctcgaactcctgacctcaa

SEQ ID NO: 91935 - DNA, 1013 bp, Homo sapiens
cccctgtctcctgggttcaagtgattcttctgcctcagcctcctgagtaactgggaccacacccagctaatttttgtatttttagtagagtcagggtttcaccatgttggccaggctggtctcaaactcctgacctcaagtgatccacctgcctcggcctcccaaagagctgggattacaggcgtgagccaccatgcccggcaaaagatcttcgttttggacagacactcaccgggcttcagcttgagggctggcgattgttcgttaaccccttctgtccgagtgacttctttctccacctggactatgggttccatgaggatcagatgccctgccttttcaattccctacgtctccagggccccggggatggcacccactgggtgcccagtaaggctttggtgactgaattctcgggattttttttaatacacttcttcctcttgctccttcccagaatccacaaacacatcagagctgcggatttgccgaattaacaaggaaagcgggccgtgcaccggtggcgaggagctctacttgctctgcgacaaggtgcagaaaggtgaggggcctggggcagcaagcttgggcagagcggggtctggcaacttggaggggtagccagggagcccgggaagatgaaaggatgagaaagagctggttaaccagggcaccagagtgcaagggtccagaacactgtctttgcagtcagacacagctgatgggttcattcactccctgagtcgccttctcacccgtctgcgtaggacgacagagactcgtctgtggtgacccatgctgcaagctaggcggtgccatcacagagctcacgacatgtccagaggactctgatgttaagggtggaattgcataaatgaacgctttacggtggttctgataagcgctatgggtaaagcaaataggacaggagaagcaactccacttcattcatctctgttcaaatggcccttcctcaaacaggcttttaaaaaaaaaagacagctggtcaccgt

SEQ ID NO: 91936 - DNA, 1032 bp, Homo sapiens
catccttattctccttatccctctaccacccagactcatacccaaccccacgcatggcccctagtgggagccttttcagttcttctctttctcttgagctccagccttaagtgctcagggtttgccttctgaccctacttcaaacactgctgatgtttcaaaacctttcattcccgactccagcgcgtggaatctaggacacccctttcccagtgatgctcacctcagaatcacctgagggtttttcagaatgcccaagcttctagatcgaagttgttagggatggacttgaacatctggcatactgttctgcagcttcacttctgctccctgaagctaagagatgtgttgtttgggatcgactctgccaccaacttgttagatgactttgattctgcccatacgggtttcacagaccatctgactttcctggtcccttcatccctcaggttgaggccccaggcttggcctcaccacaatgtggcacgaggctcggaagcatgagcggaagcttcgaggcatgatggtcgactacaagaagagggcggagcggagacgggagtattatgaaaagatcgtgagtaactggccttttgtctggggtgagggaccctgggttggggggcacagctggtcatcctggtaaaatctgggcttggaagtatgtcaagacaagaggctcatttcctcaggagtatattcattaatcttttcttgaggataatcattggtgggatcccaagggcttctgtttgttgtagcatactgtgtcgtttggtgtggcctcccagtgccgatccggtgttagcaagaaaaagggaagtctctgtaaccctcagagcagtcctgacgttagactggccacctccagaatgtctgtttcgcttattgctgtgttccccattcccagaagagctcagccactcttgagatttggcttggcacacaataggagtgagtattaagttggcctggcacagtggctcacgcctgtaatcccaagtggatcacctgaggtcacgagttcgagac

SEQ ID NO: 91937 - DNA, 1679 bp, Homo sapiens
ttgtttatttctaagatagatgcttttttgattttctaaaatcagaggctgccaaaattctagtgatcactgaggccttagaatcagggacatgtgttataattgatactgtttttgccatcattccaggccacatggcttcctggtggtagagccagggttccccttagtttcgcctcactctgcatttattcattcacttccacaaacagtcattgaacacctgcggtgtggcaatggtaggggagagggcagcagctccataatcaatgtcagtgatgccaattgcaaaccaaggtgatgtgacagacagtgtgccattctctgagaaaaataggacagaagtcctggatagaagctccctgggaggcacggataggccacaggattccaggccgagagcagcctgtgcaaagccctgtgtcagccaggactgtgagcacactggaggggcagagagaaggcccgtgtggctggagcagggagagcgagggcgcttgtgcaagacagggtcagcagggcctctcttgggctttggagacaacaagtagaaattggggtatctgctagaacaaggaagggccgtgctacatccccttctggcctgccagcctgcccacctcttgttccagatagaaaagctgaggccagccgggcacggtggctcatgcatataatctcagcactttgggaggttgaggcggtggatcacctgaggtcgggagttcgagaccagcctgaccaatatggagaaaccctgtctgtactaaaagtacaaaattagccaggcacggtggcgcctgcctgtaatcccagctactggggaggctgaggcaggagaatcgcttgaacctgggaggcggaggttgcggtgagccaagatcgcgccattgcactccagcctgtgcaacaagagtgaaactctgtcttaaaaaaataagaaaagaaaaactgaggcctagggagggaaggaaggaaggggacttacaacccactgtcccacagcgagtcagggacacgtgtctcactgcagggaagatcaggaaggctctggtacattgttgagtcccccaggctgggtgttgggggtgcaggagagcccaggtcatcccagcccacacctaacttaaaatgagccacagagaggcatgcagtggagtgacctgtgcagtcagaatggcgtgtggcactcaggagcaggttatggttctgaagggtccagccagaggcctccagaaacagtgagaatggtggtagagtgcccaagtaccaggccaggcactcactctgcccgtggtcccattttacggaaaaggaaactgaggcacagatgtgttaagtcccttgaccaaggtcgtgtgtccaaggctctgctgcagttgcttgtgtcccaccagacatagtttgattatctggaagtggtgactgccccccaaggtgcactggggttgcacctgtcttcctgccccaccgcacccttgtgttcccccactgaattcctagtgtccccaacccactctgacctggggtctcttgtttgctgcagtctcagaggagcagtgcctgtaccagatctacattgatgagttgtacggaggcctccagagacccagcgaagatgagaagaagaagtgagtcggggtctggggtgcagggggttgaggaggcaggagggctgg

SEQ ID NO: 91938 - DNA, 1044 bp, Homo sapiens
gtcttacaggttctgtggggtctgagagggacatggttgcaccctggggcatctgaggcccatgccttggctacctggtctgagggcagtgctgaggctggggtcagaggtggcagctgccctttccccctcccaaccatgtcctctggccctgcccccacccaggaccgaacctgccgctggtaaagagacaggagctgccaaagtcagtaagaatttggaactcgcccgtctaattcccgtcagcagcagtgcccaagagctgggcccggtgggcctgcaggggggcccgggtgggctgggagatccagccccagggacagggaggggaggggaagggtctgcccctgtgagaaccatgtccctctcccctcctcactgtacactggggctccacctgtcactgaacctctgggagcctcagggctgtccacagcctgcccctcctccccacgtcgttctcccccccccaccccccccccgcacaaagccccaggcttttggctgaggtgggttgtgggagctctgggacacccaccccctctcccgcctcttctcccccctccccagcccaagctgacgcctcaggagaagctgaaactgaggatgcagaaggcgctgaacaggcagtgtatgttctgccctgtccctccagggtttcacagctcttctttcccttggcagtgggagcaaggagactcagcaccactttgggaggcctggcccttccctagagaggccacgcaggcacggaggtgctctggggaggaatgggtttgcatcagctccgctgccgctatgctggggcctctgcagtcaggttgacctgtctgagctcagcttcctcattttagagagtggggctcttagcgggcacggtggctcacacctgtaatcccagcactttgggaggccgaggtgggcggatcacgaggtcaggagatcgagaccattaacacggtgaaaccccgtctctctaaaactacaaaaaattagccaggcatgttggtgggcgcctgtagtcccagctactcaggaggctga

SEQ ID NO: 91939 - DNA, 1054 bp, Homo sapiens
gtgggaactcggtgtgattaaatttggtcactaagccaaacgcacgggacactgcctagattgagttaggccgccgtcagggccccagcagggcggctcggtcccctcccatgagccccgccctggtaggcggagccacgggcccggccagcacgtgtaagagttcgcggcgggtcgccgcagtcactcacctgagcgcgcacggtccgcgcgtcctccgctcgtgcgtcctccgcccgcccgcctgcctgcctgcccgcccgctcgctcgcccggcccgcgactcatgtcccgccgcaaggccggcagcgcgccccgccgagtagagcccgcgcccgccgccaacccagacgacgagatggaaatgcaggacctcgtcatcgaactcaagcccgagccagacgcgcagccccaacaggccccaaggctggggcccttctccccgaaggaggtgtcctcggcggggcggttcggcggcgaaccccaccactcccctggccccatgcccgccggggccgccctcctcgccctcggcccgcggaacccgtggaccctgtggacgccgttgaccccgaactatcccggtgagcaccccgggccctgggcccagcctcccttacctttgaccctcgggtgggacccttccctttgggcatgggcccctcgccctgccttatctccttcgccccgtcctgcccctcaggcccccttctgaccttcggtttcccctctccttcagcaccctcagcccccatcctggccccaccccacgctcaccacccgcttcctccctgcagaccgccagccctggaccgacaaacacccagatctgttgacctgcggccgctgcctgcagaccttcccgttggaggccatcactgccttcatggaccacaagaagctgggctgtcagctcttcagaggccccagccgcggccagggctcaggtgagtaaagccgggtgcagtccccctctcaagttcgagggctgggcttcctgctggaaaggggctgggctggacggcagggcactgagcactacttcccctttctc

SEQ ID NO: 91940 - DNA, 1024 bp, Homo sapiens
ccaggtttcctgtagaggagcgggggttcccactggaagcaaggggttaggagtgggtatgtgtagggggatggggatgcaaagaccgagctctgcccttaacccagcagggaggaagtcttcccctctctgaacctcagtttcttcctgcctaaaatgggcatcccagacgcccccaactcgcaggcaggaagatcggtcccaagtgccccgcaaagccgcgggccaggtggcgacccgggctgtgctggcttccaagcctgcgagccagcccgcgaccacgtggggcagtggcggcggcgcgggcggaacccaggctccgcggcttgcggcctgcccgggcctctgcagcgggggcgccggcggaagtggggacaccagtagccgcggacctcggtgagtacaaggtggtggggggtcgccagcaggttccctctccccggccccagctctggacgctcaccccagtgcaacgccctgagtgacggaaagaggtaggaccgcgcctgcagcgccggctggagggacgttctggtccccagacgctcctatcagggactgtttgatcccgatcgccggcagcgggaatgccccacgcgggtggggtgaggagaagggagaaggagaaaaacttcccctccggaaaataataaatggccacgataacagaagcatcggtggcagtcatcccgctttacctggagcggaatcgctcgctcagtctgagcctggaggtgggaagaaggtccagtccgaacgcccagggcggtgtggggagtggacgcctgggggccgggaggacctacttagtataagaaaaggagagcaatgggtggtcagggcggaattgaaaggaaactgaccggccccaggggagaaggggaggggagagattctgtgcttggggttctgaccctctcgggtggccccatttagctaatttgcatcaagattcagcagccgatgatgtctgtatgtgtgtgtgtgtctgtggacacgtcaacaccttggttaattaattagg

SEQ ID NO: 91941 - DNA, 1012 bp, Homo sapiens
gctcactgcagcctccatctcctgggctcaactaatccttctccctcagcctcctgagtagcccagctaatgtaaaatatatatatatatttttagaaatggggtctcgctatattgcccaggctggtctcaaactcccagcttcaaagtgatcctcctgccttggcctcccaaagggctgggattacaggcatgagccaccatgcctggccaggttcatcttttggcaaatatttattgcctataagttgagataaaaacattataaaagcagacaaaggtccttgccttcacggggctcatgtttttgtgcatgtgacacttttgtttctgatccaagccattgggggacgatggcacagattttaggagggtggatcagtctggggcaggtgcagtggagctgcctggtagaccagcctctgcttccactcctccctcctccattagccccatgcttaccatgtaatgacttcctgctctttttcttcactcaacagccaagacaatgcaaactccagtgaacattcccgtgcctgtgctccggctgccccggggccctgatggcttcagccgtggctttgcccctgatggacgcagagcccccttgaggccagaggttcctgaaatccaggagtgtcccatagctcaagaatccctggaatcccaggagcagcgggcacgagccgcccttcgggagcgttacctccgcagcctgctggccatggtgggtcatcaggtgagcttcacgttgcacgagggtgtgcgtgtggccgcccactttggagccaccgacctggatgtggccaacttctacgtgtcacagctgcagactcccataggtgtgcaagcagaggcgctgctccgatgtagtgacattatttcatataccttcaagccataaagatattgtgttcacttttctgcttgaggctaaggcactgtatcccaggcctcccaatgttcccgagccaggaactctgggccccatggagttatgagctcccttgga

SEQ ID NO: 91942 - DNA, 2014 bp, Homo sapiens
ggtgccaggacgaggactctttctcagggacctacagacaggctttagcacccattctgactcccggaagagcacgcgaagctggcccccagctggcactcggtaaccagccttcagtgcgtcagcgggagtgcgtgtgcacttgtttctgggagcgagtactggggctctgcgaaccttcacaggcatccgactccaagaggattaagaaccgtggggccaaatgccctgtgttggacggactgcagctggagcagtcactgagcacggaggccagaaacctgtttttacaaaagctccccaggtggttctgacaacctcgcttggctgtctgtgtgctttgctccgccatccatcactcagtcccaagcctgccttcagacctcagttcaggggtggctggcattgacctcaaagccttttttggagcaaattaacaggtgagcattgaaatactgcagaaattcaagctgagccggccacctgctgcagtagggcatgggggcaggtgggttaaattcttgccttctggctgaccttagtcatcaccagtcattgccttccatgtgcctgtaccaggcactggtctcagtgccttttgtgtattatcgcatttagatatcacagccaccccaggaggtaggtgccgtttgccccaatttgtagatgaggaaatggagcccatagaggtaaagtaattttcctgaggtcacacagtgggtaagtggtggagctgggattcaaatccaggcagccagcctggcgccgaagcctgcgcagtaataacccctgtgcggcggctgagtgcttggacgcattcggtgcaacgtgccatacggtctcttcatctataacccagaatcgtttataaaatagaggcaacagtgctggctttgcggtgttgtggcagggaggagaaacagaaacaggtggggtaagggcccagccttggtgggcacgcaggagggggtcactgtggttcgtggacagcttgagtccctggagatttgtgctgctcctctgtcctcagcattgcctgctgttctgacccttggcctctgggacgtgttcttcctgtgctactcagtgtctggtatgtgataggcgctcaatatattcttgctgcgtgagtgacttggtgaccccgtaaccagtcatgcattcagcatggtgtggccgtgccacgtgttacgagtcagggcagaagacaggcccagtccatgcttctgtgggggtcacagtcaagtgagggagacacacagtaaagaattctcagcaaaccaggcttctgaggactcagattagggagggtccacagggtgtgcaggagggcagggcagaggcagcttcctagaaaggacgtcaccaaggaaatccagcagtaagccaggtgaggagcagtgggaggagtgcaccaggggtggaaggcagagagaaccagcctggtatgtctgaagaacagaaaaaagccagacttagttgaggtagaggcaggctggtcagaggtgaggctggaggaggcaggagagactgctgtgtggggccttatgggctgtgctagcagggagccccagagggcttaagaaggggcctgggctgggcatggggggctcacgcctgtcatcccagcacttcaggagctccaggcgggaagatcacttaagcccaggagtttaagaccagccttggcaacatgacgagaccttgtctctacaaaaaatacaaaaatcagccgggcatggtggcatgtgcctatagtcccagctactcaggaggctgaggtggaaggatcacttgagtccaggaggtcgaggctttagtgagctgtgatcacaccactgccctccagcctatgtgacagagtgagaccctgtctcaaaagaaaaaggaggggcatggtgggtgtttttaacagaatcctgtgtggaggtgacatgaatagggtgagactgagacagggaggccagggaggggccgtgagccaggagcccggaggctgtaggcttggcgtagc

SEQ ID NO: 91943 - DNA, 1035 bp, Homo sapiens
aggtgcccagccctgggtaaatatttgtctcagggcagacaggagtgggtgtggtcagcgtttcagagcccgggggcaggtggaggcagcaggtggggtggtgactgggggcccctggctggagctggtggctctgcttgctctttgctcatccagcatccactctcccgggggctgctgaggcgttggcctctgcaataacaggggcttccgtttgccacgcgccagccccacactagacgctttacacaagagagttcagtggctgcttttagaagtctttgtgtgtcagtctcagtctcattggctccattttgcagatgaggagactcagccatgaagggtcgagagccattgcctgtgtcaactggggtctgttgagttatcagggccagaatccacctggggccacaggaggtgaatgagggtgttcattggatggaggccaggctttgcctgttcccaggggtcctgaaagctggcaggaaccaggtctgccacctgctctctggaacacatgcactccttgttcctctttctctcttcagaacgtcttccactaggctggccatgggccacacaagcccagccctcctggtgtctggaacaggaccacccagtccagccccctgacccgggcagctcatgcaggcttagctaggaccccacatcctccctgtcaaatgggcgatagagggccagcccacgcttgttggggtggagggcagtttttagaggaggctctgcagacaccccaaataggcacccccaaatacaaggtctgactgcaaaggccatgccctcactaggttgctgttacatgtgtttagaaggtgcattcacaggctgggcatagtggctcacacctataattccagcactttgggaggccgaggcaggaggatcacttgaggccaggagttcaagaccaccctgggcaacaagtgagacccccccccccatctccacaaaatataaaaaattaaattttcggaaggtgcattcacatcacaaggcagaaagtcactagtgtcc

SEQ ID NO: 91944 - DNA, 1081 bp, Homo sapiens
gggctgggcctggtggggggtgggaggttgggggcagagggcccttccagccatgcaaaggtgcactgtcttagacatgcgcacggctgctgtctccccccaggtgagaagcttgactacaagacctgtgaggccctggaagaggtcttcaagaggctgcagttcaaggtcgtggacctggagcagacaaacctggatgaagatgtgagcggccctgccaccgcccacttggctccctgagctcccgggccccttcgaggtttgggtggggagaggacactgcaggaggagggggtcccctagacaaaggctgaggggtggcgcaagggcggggcctcttgcagggcaagagggagacatccaatatgaccagagtggatgtggagggcgcgttggggcacctatggcccaccctcataagcaaggagagccttagggagctgggctgaggggcaggcgtgtggcccccaggagccctttcaggaaccacgctggagggtccagctcctacagggtgggcttgggaagcattctgagagcagcctcccatcaaggcccaagggccctcacctcctcagccttgggagtccccaggcaccccaggtgtcgggatccaggggcaggggacctggagaactgaggcccaggctcaggaacaccaaggcctgtcctggtcactcagcacgtcagtcaaggactttggagggcaagtgacagaaaacaaaactgactacagcagagaaggaaagggtttgtccccgtggctcacggggccctgtctgtgcttgtcctcctctcccgtgtggctctctccagaccctggacccatcgtctctcggtggggcccggtgtcagggcccacgcctctcctccagggcagcccagagctgaggctgagcccccgaatctctatgcgcagggtgcctcggccctcttcgacatgatcgagtactacgagtcggccacccacctcaacatctccttcaacaagcacatcggcacccggggctggcaggcggccgcccacatgatgcgcaaggtgggcgcctctcggcttccaggaagaggcagctcaggctcc

SEQ ID NO: 91945 - DNA, 1110 bp, Homo sapiens
accccaggctgagccttccctccccagccacagttacccccattgtaaaacaaggcgacatagccagacgacagctgtggcttcgttgctcattgagacatgggggcacaggtcctggggccagggagtgctggggcggtcctggggccagggagtgctggggcaggcctgagccagtgcctcacccctgtcctcttgcccctgcagacgagctgcctgcagtatctggacgcccgcaacacgcccctgctggaccactcggcgcccttcgtggcccgtgccctgcgcatccgcagcagcctggcagtgctgcacttggagaacgccagcctgtcggggcggcccctcatgctgctcggtgagccccaagcccgggagggtgagcaggatgtgcagcctgttggggggcaggggcctgcccagtcaccgtgccccctccccgtccccagccacggccctgaagatgaacatgaacctgcgggagctgtacctggcggacaacaagctcaacggcctgcaggactcggcccagctgggtaacctgctcaagttcaactgctccctgcagatcctggacctccggaacaaccacgtgctagactcgggtgggtgcagtggcccaccccacccacacccgtcacccagcacccactctgcccggccctgcgctaggtggtgctggggacacagacatggccaagaccaccccaacgctgtcctgctggggctcccaggaggaagacagacccgccctagacagtgacaacctagagtgggcaggactgggctggtggagcccagaggcggggtccgatcagtctgggggccagggagggcttccaggaggaggagacagctcagctgacagccgcaggatgaggcgaagtgaataattacaatctgaaaagaaagcagtgttgctgccataacagggtcagctagaggctgctttcagatgggagaggagggaagaccaccgtggggcggggcctctgggcttccatccggaggctgggagcagaaccagccttgtgagaagcctgggaaagggtccagaccgcgggagcagtgagtgcagtgggaggagctctggtgtttgatgctgggggt

SEQ ID NO: 91946 - DNA, 1048 bp, Homo sapiens
cggcgggcagggggtgggggtggtgggggtgtgcagaatgggccccctgcctctcccacactggcccatgaggctgcacccctgcccgccgggcggccccgccccaccaccaacctcttcaccaagctgacctccaaactgacccgaaggtgagctccgcggggatggcaggggcagggcggggcggggggccgatgggacctaacctgtcttccactctgctctgtctcctgtaccccaacatttcctcttcctcctcctcctcctcctcgtttcctcctcctcctcctcctttcctcctcccctgtcacccctcacctccctcctcacactgcagggttaccctcgatccctctaaacggcagaactctaaccgctgtgtttcgggcgcctctctgccccagggatccaagatcagtaagtcccgtccatgccctgttctcgctggctctgcctccctgcctgcatgtctgacctgtgtgtgcgggcattgggagggggctctgtggatgtgagggtctgtgcgtggggtctggttgttcatttactcacagaagcacagcctatggagccagactcgggggttcaaatggcagctctgccaagtgaccttgagcaagtcactcaaggtctctgggcctggttttcctcttctgtaaaatgggtatagtaataacaatacctgtctcctagggttattgtgaggactaaatgaagtgacgtatggactgagcgtagaacattgccttggaaagtgctttacatgtgtattagttattaattgctattattcattgagcccctactgtgtgcctggcactgtcctaggccctgtagtagagggtgagcaaaatgtacaaaactcctgccctggcagacccaacattctactaagggatctagacaaaaaacaaagaaataagtaaaatatacttactatatagactgctaggtagtgcgaagtaactaagaagaaaaatagagtaggagccaaatttggtggcttatgcttgtaatcacagcactttgggaggctgaggcgagggga

SEQ ID NO: 91947 - DNA, 1785 bp, Homo sapiens
gggacccattgggtgcaagtggaaggatcctggtgccccctctgtcaccatggagcacctagggaggtcaggggaggggacagcaagaatgggaaaggaagggaaggctcctgctgtgagaacggcaaagagggagtgggacagggatctgggggggccactgagccaggcagagaggagtcagagagcacggacaccagggaccccaacagagcaggcaggagacctggggtggctagaagcttggcagaggtctgggggtacagggcccagtgttagagaattgcgaaatatggaggggcccacaaaaggccctcaaagggtgtgccacccatgcttggttcagccaggttccctgggcctgtcaggattggcccagcccctgtggctgcagctgccccaacccttggctaaccccctccattcctggggcgccccccacagggaccagaacaagtacaaagaagccacagaccttctccatgatgccctgcagatccgggagcagacgctgggccctgagcaccccgcggtgagtggggccccagggagacgaagtggggtcaaagtggggccacacctgcccatccctgacctgtgcctcccccaaccccgcaggtggccgccacgctcaacaacttggctgtcctctatgggaagcgtgggcgttaccgggaggcagagcccctgtgccagcgcgctttggagatccgagagaaggtcccatccccctcaccccaccccgaggaaccccttgtcccatgtagccctccccagggatgctgagcacgtacatcgtgaccctgaccctcgggccccttgcgtttggtattgggagaccccagttggagcctagatcacccaacccatcacccttgaccttctgagatcccagtttggtcttgaccctgactgacctctcgccttacctcacacatcaccctccaactgggtccccccatagcctttccaacccctcatggccaccagcacaagcccaaccctgacctacccatctcaccctgtgccccacgtttctggaccaccatgacctctgaccttggtaatcccgttagatggtataacttgtgtccccagcccccaacctctcaggtcactctctgctttgaccctgtaatccccaactcatgaccaccatacagcagtgatgtcacgtgtcccaccaatcctgtatgatccctctgacttgtgacccctggcccccaggtcctgggtgctgaccacccagatgtggccaagcagctcaacaacctggccctgctgtgccagaaccagggcaagtttgaggacgtggagcggcactatgcccgggccctgagcatctatgaggcactgggcgggccccatgaccccaacgtggccaagaccaagaacaacctggtgaggcccctggggctcagagtgggccaagagtggagggtcctgccctggggaggcacccattggttggatacagggtgagcaacgtgagggtgggggggggccccccaggccgggcccttggagcaagtgtcagacacaggagctggctcagcacagaacacggaatcaggaaacgcgtaagtccacggcagccagaggacagccagtgaagcggaagctggcaggcacaggtggcagcagcagacatttattgagctcactgtggccggctcccctcttagcccggtccccacatcgctagttcttatagcgtccctatgaggtgggagctgtcgctccactttgcgtgtgggaagactgaggcaccgaggccatgccacc

SEQ ID NO: 91948 - DNA, 1025 bp, Homo sapiens
ctggggggcccccccccaccctcacgttgctcaccctgtatccaaccaatgggtgcctccccagggcaggaccctccactcttggcccactctgagccccaggggcctcaccaggttgttcttggtcttggccacgttggggtcatggggcccgcccagtgcctcatagatgctcagggcccgggcatagtgccgctccacgtcctcaaacttgccctggttctggcacagcagggccaggttgttgagctgcttggccacatctgggtggtcagcacccaggacctgggggccaggggtcacaagtcagagggatcatacaggattggtgggacacgtgacatcactgctgtatggtggtcatgagttggggattacagggtcaaagcagagagtgacctgagaggttgggggctggggacacaagttataccatctaacgggattaccaaggtcagaggtcatggtggtccagaaacgtggggcacagggtgagatgggtaggtcagggttgggcttgtgctggtggccatgaggggttggaaaggctatggggggacccagttggagggtgatgtgtgaggtaaggcgagaggtcagtcagggtcaagaccaaactgggatctcagaaggtcaagggtgatgggttgggtgatctaggctccaactggggtctcccaataccaaacgcaaggggcccgagggtcagggtcacgatgtacgtgctcagcatccctggggagggctacatgggacaaggggttcctcggggtggggtgagggggatgggaccttctctcggatctccaaagcgcgctggcacaggggctctgcctcccggtaacgcccacgcttcccatagaggacagccaagttgttgagcgtggcggccacctgcggggttgggggaggcacaggtcagggatgggcaggtgtggccccactttgaccccacttcgtctccctggggccccactcaccgcggggtgctcagggcccagcgtctgctcccggatctgcagggc

SEQ ID NO: 91949 - DNA, 1024 bp, Homo sapiens
atgtggtggtttatagctaccactacctcctggaccccaagattgcagacctggtgtccaaggaactggcccgcaaggccgtcgtggtcttcgacgaggcccacaacattggtgaggggggcgccaggggccaaagggatgccagcccctctgagtgaggcccctgcaggcctgcctgagccggctctctcccccttctccagacaacgtctgcatcgactccatgagcgtcaacctcacccgccggacccttgaccggtgccagggcaacctggagaccctgcagaagacggtgctcaggtggggccggggacgtctggcggtggtgcccgccctgcccctgggaccctggcccctgtctgacttgtccccagggttgccagccccctcccagccccagctcatctctccgcaggatcaaagagacagacgagcagcgcctgcgggacgagtaccggcgtctggtggaggggctgcgggaggccagcgccgcccgggagacggacgcccacctggccaaccccgtgctgcccgacgaagtgctgcagggtgagccccgaccccccgctgccccccagtccctttcccgcctccccgtcgccgctgatagcgtctcctcgcagaggcagtgcctggctccatccgcacggccgagcatttcctgggcttcctgaggcggctgctggagtacgtgaagtggcggctgcgtgtgcagcatgtggtgcaggagagcccgcccgccttcctgagcggcctggcccagcgcgtgtgcatccagcgcaagcccctcaggtgcggccccagacagcgcgcggggtgggggcccggcaggtcccggttatgcagagccgtgtcctccacgcctgtagccccaggtcaccactgcagcatcaggagtgagtgagctgggcgaggcacgtgggaccttgtctggtctgacctgggaggtccgggagcaaggttggagctgatcctgggtccgtgcgtcgggcaggggcctggcaggcaacacctggctggattg

SEQ ID NO: 91950 - DNA, 1112 bp, Homo sapiens
gcgaggctatacctatagtctcagctactcaggaggctgaggtgggaggaccacttgagctgggaggtcaagaggctgtagtgagtcacaattgtagcctgggttacagagcgagaccctatctcaaaaaaaaaaaaaaaggtgatttgccttcttctttgatgttggggagactgaggcccagggagtggagaggactcaacgcccaaggtcacacactccctgttcatccaaatgagccgccagcctgaacaggttctgttccttcgacttcccagacagaggcgggtatcagcatgccccagcctgccctgctgcctatactgccagagctaagtggtcgatgcagcagggaggtggcagagctggtgggtgtggtggctagcatggggatagggatggtgctggcctgaccggttcctagtggcctagctccctcccactgggccagtgaccacagctgcccctccacccctggccacctccctgttcctcttgctaacaatgggtcagtgagagccagacctccactgaatggggaccctagggaaaggaagctgagcagtcgcttccctctaggacccctctaatctggtagagatgacccagaataagttagatgcgggtgtgaaaccgattactaccgacttcttgcagggtgaccttgaacatatgtttctgagccatgctttcttgcctgctagggtggttttgaccatcaaatgaagctttcggtgcacggcatttctcaccactctagaagggagtggcccctcaattaatttttttttttttaaatagagcctcgctctgtcacccaagctgcagtgcagtgacacaatctatgctcactgcaacctgtgcctcccaggttcaagtgagccttgtgcctcagcctcctgagtagctgggattacaggcacatgccaccatgcccagctaacttttgtatttttttgtagagacggggtttcaccatattggccaggctggtctcctggcttcaagcgatccatccacctcggcctcccaaagtgctcgggttacaggagtgaaccaccgcgcctggctggttattgttgttgttgttttaaacatatttatttatttgt

SEQ ID NO: 91951 - DNA, 1022 bp, Homo sapiens
agtgtgtcagcgccacttcccgccccctctgccaagatttaggatcctactccagaattggggcaccccttctccccaggtgggagaggctttccagagcggagggagggtcaaggggaaggggaaatgtttcccctatccaggatctccagacggtttccttcgcgtgggcgagagagacaccggggtgcagcccctgcgggctccaggactacaattcccacaggacccgaggcaaagagtcgcccgagggcggtcgcggaggctgctgggggttgtagtccaaactaagattttgaactcttgctgggacatcctttgaagatccaacccgcgctttttatcgacggggagattcgggctcagagaccctgggggatactgatcaggaaaggggatagtgcgcctgaaggggtggggcaagggctcaggagtcagtctccagccacagcgaggcaggcgtctcggctcttctgtatctccctggcctggtcgctctcggcttctgggcctcgcccttcctgtctgtgaaatggactctgggtgaatccaaatgggatcgtcttgggctacgtcctgtccctccgggactacaagtcccaaggtgctcgaggcgaccttggctccccctccccaccgggacccgcctccctccagcccaagtcacgtcgtctaacctgttcccagctcctgccccgccccgttctccgctccccaagccggagcccgagctggaggaagcccccaggtgccaggatctgcccggatccgtgagtttcaccctcctggggaccagaggccctgaaaaagcccaacacccgcgtccctgggaggattgggaggggactcggacgccaggtcccagggcggaatttggggcgcgccgacacctggatccttagaaggaaactccgttgcctgttttactggagggaaggaaagcgggttcggatgcctgaattcttggaatggagggattctaccccttcatcccggggagacgttggagctggaattcctga

SEQ ID NO: 91952 - DNA, 1034 bp, Homo sapiens
cattcgacagcagtgtgtgggttgagagtgccccagctctacttgctggggctgtggctgtattggtgtagctctgtttcctcaccccaggtttgttaatttattcaaaatgtactgaatgaggctgggtgtggtggctcacacctgtaatcccagcactttggagaggctgaggcaggtggatcacctgaggtcaggagttcgagaccagtctggcgaatatggtgacaccccatctctactaaaaacacaaaaagttgctgggcgtgagggcaggaagtgttcaggaccacaggacacgcagactggggctggagggagagggctgagctggagacagacccggggaccctttaggaaaggcctggtgccagtgggcatggaggggaggagcctggatcagaggatcagggactgtccagggttaggaggagagagaagctggaaaagaccctgccacaggtgggaggagggaggaggtgtgggaagaggtgcgaggaggcaggaggtgtgggaagaggtgggaggagggaggaggtgcaagaagaggtggaggagggccctgtggttatcaagggtcatccctattgatggcttctgcccttcgtccctccccagaggggcaatcccgtactgaagttcgtgcgcaatgtgccctgggaatttggcgacgtaattcccgactatgtgctgggccagagcacctgtgccctgttcctcaggtgagctctgcggcgccaccccagacttcaggaagggcaccccactggcctgggagggtcatgtcccagtgttctggactgttctatgagaagcctctgggcatggtcctgcaggttctgggccttggtgggaccctgtgttggaggcagggggtcttggcctggaggtgcccagtgcaacaagagctggagcccgaactcctgggtctcaggaaggaggggctgggggccggactcctgggtccgggggaggaggggctgagggctggactcctggggatctgagggaggaggggctggggcctagactcc

SEQ ID NO: 91953 - DNA, 1180 bp, Homo sapiens
gtgggggcgccagaggtgaaggggacctgcaggctggggtcttccccgcccgggtcagcggggtccctgcggggctagtctaagcgcctattattaccagcccccggggcggcgttgcactgcgcaggcgcgggcggggcgcgggcgcgcgcgcgagcgagcgagggattccctctgacgtcattgctaggataccaaacaaacactccgccgcgccggccgagctccttatatggctaattgcgtcacaggaactccgggaaggcggggccgggatcccctcccgccgagtggcccggaacgcaacccccgagacccccagggccccgagggtcatgcaagtgaccagatcgagtctagaacagacctcttgctggacagtgcgggactcgatttggcggggccggagatttggggaagtttgtccagcaaggggcgggtgacgtaagcaggggggcgggtcccgggcatataaatacaggctggcgggtctgtgcttcattcataagactcagagctacggccacggcagggacacgcggaaccaagacttggaaacttgattgttgtggttcttcttgggggttatgaaatttcattaatctttttttttccggggagaaagtttttggaaagattcttccagatatttcttcattttcttttggaggaccgacttactttttttggtcttctttattactcccctccccccgtgggacccgccggacgcgtggaggagaccgtagctgaagctgattctgtacagcgggacagcgctttctgcccctgggggagcaacccctccctcgcccctgggtcctacggagcctgcactttcaagaggtacagcggcatcctgtgggggcctgggcaccgcaggaagactgcacagaaactttgccattgttggaacgggacgttgctccttccccgagcttccccggacagcgtactttgaggactcgctcagctcaccggggactcccacggctcaccccggacttgcaccttacttccccaacccggccatagccttggcttcccggcgacctcagcgtggtcacaggggcccccctgtgcccagggaaatgtttcaggctttccccggagactacgactccggctcccggtgcagctcctcaccctctgccgagtctcaatatctgtcttcggtgga

SEQ ID NO: 91954 - DNA, 1575 bp, Homo sapiens
atggatctgcgaggcccttgcggggatctagtccctgggctctcaggagaagggggtgtctgcttgtgtgctggcgtttcttggagagatacggtggctgtcaccctcttctccaggcacacacagacacattcccactccctctgctcctcatgcccggttcctccggtgtgtcccaagacaggactagaaccgcgaaccgaagggcaaccagccaggtggtctccaggagctccgccccctctgggttcccaggactctgattggtcggcgagccagcccttccctcaccacgccccccgagagagtagttaagccttcagagcagttccaggagtccatttacgggaggggggagatgagcgctgctgaggcttgggggctcaggtcccgcaccattccccctccgcgacaatctgagagagctccagtggttacttttatctacctgtccgttcaccctaaactgtcactcgtcagtctcactctgagaagagacagtaacttgaaacgttgttctaaactcctaggcccgtcccccaaacacccttttgactgggacccccgcccctgcatgggacctcgcgcagaggggggtgtgtatgtgtgtgagtgtagaggaaggcttggcctaaggcctctccttctccctccccttgcctctggggtgggggtggggtgttgtggctgtgtgtgtggctgtggctccgtcccgggggttctgtcacccggctgtgtccagcctcctctccaccccccatacctaagagtcaccaacccggggtgtgattcaccacccgctggaaccgtgcaacctttccccgaggaagaaggaggaggtagaagccagttgagcagaaatcctctcattaaccactgcgtcacggtgtagtggaagggtgggtgttgtggctttttccctgtgacacacacatccacactcgctcaccctgtgctcactcacggggtcggtgtgtgttatgtgtgttgggtgtgtgtgtgtcggtgtctttgtttgtgtgtctacgcctgtgtgtgtatgtgtcaccccgtaggagtgcgccggtctcggggaaatgcccggttccttcgtgcccacggtcaccgcgatcacaaccagccaggacctccagtggcttgtgcaacccaccctcatctcttccatggcccagtcccaggggcagccactggcctcccagcccccggtcgtcgacccctacgacatgccgggaaccagctactccacaccaggcatgagtggctacagcagtggcggagcgagtggcagtggtgggccttccaccagcggaactaccagtgggcctgggcctgcccgcccagcccgagcccggcctaggagaccccgagaggagacggtgagtaagggacatcagaacttggcctgggtagggggaagcaagagaggcaggaagtttcttatgaatggaggggggctccactaaggcctcagtgttacagaaaccccaagatccttgctacacgagcgaggaccggaggcttgttttttggctcttgggggttctgaaagaagtagaggttcgggatgggtggagg

SEQ ID NO: 91955 - DNA, 2041 bp, Homo sapiens
gacccgccccggcccggtccacattctccccaggaagccggactctatggggcgggaccctgggggagcctgagccgagcccggagccagccccgaacccctgaacctccagccaggggcgccccgggagcagccagcccgtgggcgagccgcccgcccgccgagcagccatgaggtgagccggacctgccccccgacccgtccccgcccgggcgggctccgcgccccgcctttgtccccctcccccccagctagctccgggctggaatttggggacagatccttgggagcctcggatttgagctgaatccccttggacgcgccccagaaccgtcgatcacttctccacgactgactccccaagctcggggggtggtggcggtgaggttctcctgggagccctcaagatttgggggcgctcggaggactcccgaattgttaagactttttttagaggacctcaaagttggcagcgactccccgcagggatgccaggattgaggcagggctcagactctcctccccctccccccagacttcagctcgaggtccgggaaggattgtgggggaccgatttgggataccctgggacttggaagagagactgagactcagaccctgggtgtgcaggtcccccgtttacttggtgctggaaaaagtctccccaagtgggaccgcgctccataacttcgggggtacttcttaatcccctggattttgggggtcacttaggtcttcctgtggaggaggctggtgtgaaccgatccagggacctggacgcagcctccagagtctggtgggaccccccccttccccgtcgctccgcacacaatctgcttaactggccgtgcctaggaccgagcgggcgctcggagcagagggcggctccccgcctccggccataagggcggcccggctcccccacctgcgcggccctggagagggagggggcgcggcagctgggggaagggggcctttgtcttcctgactcacctgtcgagacagctggtgtggggggcgggcaccaagcgctgtaggccggctgccttccccaccacggcccctccccctttgctcaccgtccccctatccacccggagccttggggttggaggagggggagctggaaagcttcaaggtcatagccctcttccctagggacccaggcttcccagataattccagctatcttcccaggaatttaatcctgggggtggcggcccaagggacccagggatttggtctggccggggcctcccccgaactcctgggctcacctgagggcggggccagtgtgggcaggggggcccaaccatcccccctattcttccctcccctggccccccataatctctcccatggggccagagcctgacaatactatctcccttcctctactctctctgggacttcctgccccaaagcccccagcctgagcagggaggcccctggggacggttggggattaaccccgtggtgcccacatcccccgcatttcctgaacccctgccctttgacatcggagtggcgtggcattcctttttatgaccactagagaatccccctcccgcgtttgttccttctgatgtgaaaggcatggctggaaaatttggagcaaggaggacacccacagataccctcaagacttcctgcctatccgctccccattatagcaacatcccttccaagtccgccctggagaggggtcagtttagggagcgtcgctctcttccttcgccctcttcctccgggactcttctctccccttgccccccagccccgcccctccaccccccctcgcgtttccggtcccaggctcggtggaaggcggatggcggatgtccgagttagtgctgcctcactcactgcaaccgtaaaagggcaggagcggtgtctgggccggccccctgtcctccccaccaccaccaccaccaccagcaccagccctggaagccctggccctcccacaaggcccacctcttgctgtggtggtggccaagcatcccgtcttgtgggggtgctggggtggggtgcggtgcag

SEQ ID NO: 91956 - DNA, 1201 bp, Homo sapiens
tccacctcctgggttcaagcgattctcctgcgtcagcctcctgagtagctcagactacaggtgcacaccaccacgcccagctaatctttgtacgtttttgtagagacgggatttcaccatgttgcccaggctggtctcgaacacctgagctcaagcgatccattcacctcagcttcccaacatgctgtaattacaggcgtgagccaccacacccggctgtaccaagccctttaggtgcccagattcatgtgcccctcccccactgccctggaggtggggactgtcattttcccagttcacaggcaagaagaggtcttgagtgggaaggtcatgtgcctgagtcacatgaagtaggtggctcagtggggatttgaacccaggtctggggatatcagctcctgaactctgcaccagtttactgacacctcccacccaggctaagtcagacgttgccttttccaggaagtcctgcctgactctccaggctggggcaggcgttccttcagggtacccccagaccctgggctccttggtcctaaacctgggttggtaccgtctggggacagctgtgtctcccacactggactgtgagccccaggagggtggtgccggagctgtctgggtcactgctgtgtcttcatccccagccccacccaatataggccagacacagagcagggagtatctggggaatggccgctagtgccctggggagccaggcgaggggtgggcagcgggaagtccctttggaggaagagctcagaggtctgggatgggtccccaacctgctgcaggcctcacacttcccctcccaagcctcagcttcttcctgagcaggcagtggtggaggggggtgcgtagagatagggaaactgaggtcaggcaggggctggtccctagtgcagctctgggctcttggcctccttctggcccctctgtcttccctcctgccctctgctctgctaacccgcatccccccactggcattggcctcggcctcttacacccctcagcctgtctctccatctttatcttttccttcttattagttttgttgtgttgtgttttttatttttcattaaaaaagtttttttgtggactgggtgtggtggctcacccctgtaatcccagcactttgtggggctgaggcaaatggatcacttgagcccaggagttcgagaccagtctggccaacatggtg

SEQ ID NO: 91957 - DNA, 1033 bp, Homo sapiens
cctggaataggaggcggggaagcaggtcctctctctaatctcattgctgtcccaaaccacaccaactcccccaggatgaagtcgtcttcttcggtgaccacttccgagacccaaccctgcacgcccagctccagtgattactcggacctacagagggtgaaacaggtaacttgggggggaagttggggaccacagcaagagagatctaggtctggcccctgccactggcatgccgtatgatcctagataacatctcagaaacctcaggtttccaatctgacaaatggagaaactggattgggtcaaggatgaccgagactccacacccccttttctggcacctgtgacagacattattaatctatcaccgcgctcattccagatgagtgccttgaattctttccgcacattgacccagctgtccatcaccaattggagttggcaggaggctggaatgcgcttgccaaccttggtactggatgttctccagtacttttccggctccaaggatccagaattctcccctagaatcctccagtcactctgcgaccttgacagcgatgtcatggtgtcgatgtaggggtaggtctcaaacctactacccctggcttttccatcaacaagaaagaggggactctggcagggcacggtggctcatgtgtgtaatttcagcacattgcgaggctgaggtgggagcattgcttgaggccaggagtttgagaccagcctggggcaacatcgggagacccccatctctaaaaataacttttaaaagttacctgagaaggccaggtgcggtggctcatgcctgtaatcccagcactttgggaggccgaggtgggtggatcacctgaggtcaggggttcaagaccagcctggccaacatggtgaaacccatcgctactaaaaatacaaaaattaggctgggaatggtggctcacagccataatcccagcagtttggaaggctgatggggacggatcacgtgaagtcaaaagttcgagaccagcctggccaacatggcgaaaccctg

SEQ ID NO: 91958 - DNA, 1038 bp, Homo sapiens
ggatgcaccaatgaaccccacaggaagggggaaggaaggagggaatttcacattcccttgttctagattcactttaacgcttaatgccttcaaagttttggtttttttaagaaaaaaaaatatatatatatttgggttttgggggaaaagggaaatttttttttctctttggttttgataaaatgggatgtgggagtttttaaatgctatagccctgggcttgccccatttggggcagctatttaaggggaggggatgtctcaccgggctgggggtgagatatccccccaccccagggactccccttccctctggctccttccccttttctatgaggaaataagatgctgtaactttttggaacctcagttttttgattttttatttgggtaggttttggggtccaggccattttttttaccccttggaggaaataagatgagggagaaaggagaaggggaggaaacttctcccctcccaccttcacctttagcttcttgaaaatgggcccctgcagaataaatctgccagtttttataaatgctaagatctctggagtgatttgaaggcctgttctgatggggatggaggtgtgctcggcccccggtgcccctccaggaagatttggtcctctgctgagaacccctgcctcctcccaggaatccaccttcccttcatcttccttcccaccctgcatattgcgcctgctcactcatcctcaggcccgcagccaggatgatctctgccccctccagcctccctccccatgccccttaggaggccacttcctccccatcccaccctgcccttcaccaccctaggggaggccagaagcagcctcactttgtgtagccttgggcaagtccatttgcttacctcaggcctcagtttctgatttgggaaagggctcataagatgattctctgcccccactctaccactctcccagcttctttcctctttttttttttttttttttttaatgagttggagtcttgctctttcacccagtctggagtgtagtggcaggatcacagc

SEQ ID NO: 91959 - DNA, 1141 bp, Homo sapiens
aacccccctttccgtggtgggaaatttgatcctaactagggctaatccagcctgtccttcagcctcagccccctattttcctgtcctcagagtccctggagcttgtactgtgtggcatgtcctttcttgccttccccaccttgctcagtagcatttctcagggacccagtcgaatccaagcccatggattcaattgtcacatccttcatcttccatccgtgtctcctaatctgtgtgctcttgctttctttcctcggagctctggactgacccgacagcctgtcttcatgtagcagtaccctcctgcctccatagcccccggtcccacccccatcctaccaattaggccagcagttggccttaactgcttgattaatttccttggactgccataacagatcaccattgggtggtgaacttgatggcttaagtccaacaggaatttaattcacacagttctggagtccagaagtctgaaaccaaggtgctgacagggacacgctccctcttccagctcctggtgattccaggccttccttggctctgcctgcagcttcacatggccttttccctcttctattttgtctcttacaagaacacctgtcattgcatttagggcccatcttaagttcaggatgatcccacctcaagacccttaattacatctgaaaaaacactttttccaaataaactgtcataagcacaggtcctgggggttagtatgtggacttgtctgttgggggcacaccattcaagccattcagcccactattcctcctcaccccaagagtacgctggcgtccaggtgcagtggctcacacctgtaatcccagcactttgggagaccagggcaggagggatctctttgagcccaggagctgaagaccagcctgggcaacatagtgagaccccatctctacaaaagtaaaataaaaaattagccaggtgcggtgatgcatgcctgtagtcccagctacttgggaggctgaggcaggaggatcacctgagccctggaggtcgaggctgcagcgagccgtgatcgcgccactacactccagcctggatgacagagtgagaccctttctcagaaaaaaagtaccctgggactcctgccaaccccgcgggccatttggccttcctg

SEQ ID NO: 91960 - DNA, 1039 bp, Homo sapiens
gcagagctgggatcccagccaaagtctgtatgaccgcgcggcttcctcttaatcccaatgagagccctagcttgcagaggaaggtgtatttggggctcataggactaattaggactaattaagagcctcctttgggtggggacgccaactcggaacgtgacatcacgaaggagtacagtgacgttggccaaggcgggcgtgggaatccacacgccttccagcatccgtttaacggcaccgccccctgacccgcctcacttccgtgtatatttgcatattcagcgaacggacgtcgctacgccagcgtcgacggggtgacgtcaggatgcgcctctgaagtttccctcgagcgtacgtacatacgtactgacgcacgcatggccacgagagggcgggggaggagtgaagaggttgaggcgccccgcccagtcagcaaggttgcgcgtgccctgtgagaccgccaagatggtggtgggcgcgttccctatggcgaagctgctatacttgggcatccggcaggtcagcaagccgcttgccaaccgtattaaggaggccgcccgccgaagcgagttcttcaagacctatatctgcctcccgccggctcaacgtgagtctgacccgaattccctccaacctttttcctttctccaacccctgtcaggtggttgcttaggggatggacttctgtctacgaccaatcacagcccgaaccggcaaagtccagtggccaatagtggggggtttctgatagaggggcgtacgggtggcccagtagtgagggcggggcggggcgtaaggggcgggtcaaggagccaccacgcgagtaggaaatgccagccgataaaggaagagagcgcttggagactgatgccctgttaaaccaatagtgtgagagatgggagaaatttggacggggctttccaggatagaggagctaggggaggggctgaggagaaaccggacggggtcctttgcccggctgtccttgggcaacttcatttcaaaagcggcaccgtgtgcctcagtttccccactgatc

SEQ ID NO: 91961 - DNA, 1029 bp, Homo sapiens
tagctgggattccaggtgtccaccaccacgcccagctaatttttaaaatattgttagtagagacagggtttcgccatgttgaccaggttggtcttaaactcctgacctcaggtgatccgcctgccttggcttcccaaaatgctgggattacaggcatgagccaccacacctggtctaatttttgtatttttagtagagatggggtttcaccatcttggccaggctggtctcgaactcctgacctcaggtgatccagccagatgctgtggctcatgctgcctcctgggattacagacgtgagccaccatgcccggccagatgcgggtttaaaagtagatgctcctgcttacgctgcgggctgtgaagaccccagcatgtgatgccttctcagccagtcctgacaggtagaatgagccctgggaccttagcctcctctgtcttggacctcagctccgattgtctaagaaagggatgggtttactgggtagttcttccaactctgaatgtctcctcccattttctgccccaggggacccggctacctgtaagcagatcaccagtgcggatgctgtgaggaacatggaatgggccacagctacttgtgtcctagggtttggggtgtttggtgagttctggaatgagagaggtctcactgaggacagtagttctgagagacatccccgctggtggtttccagagtcttactgcttacctccagtgtgggaagctcactgctttactgcatgtgggctgtatttgtgtaagaggaaagggtagggtgagatgactcattagagctgtaataaaatgaaaccaaatgggcgtggtaactggccaggagagatccacactgccggtgccctagccacccattcattcaggcacgaatgaagcaaacacatattccctgagcagttctgtgcctgccgtgggcttggcagtgaccatgactgacggccctgctctcctgtggctctcagtccagtgggggaggcagacttgtccccagacagtgatgacccagagtga

SEQ ID NO: 91962 - DNA, 1050 bp, Homo sapiens
gtaggtggcaggtgcttgggtggttgggtgggtggaagagcagatagaaaggtcgaaaggtggggccgggcatggtggctcatgcctgtaatcccagcacttagggaggccaaggcgggtggatcacttgaggtcaggagttcgagaccagcctggccaacatggtgaaacccatctctacgagaaacaaaaaattcgccaggcatggtggtgggcgcctgtaatcccagctacttgggaggctgaggtaggagagtcacttgaacccaagaggcagaggctgaagtgggccgagatagcaccagtgcactccagcctgggcaacagagagactccgtctcaaaaaaaaaaaaaaggtggaaaagtgggtgagaatggatggacataggcttgagagttcaagatgctttcaggggtcagcataggggtggcttctccctgttgaccctgcccctggccaccctgcaggtgggaaccgtatcacacaggcggtgctgggcgcccacgacggcggcgtgtttgggctctgcgccctgcgggacgggacgctggtgtctggagggggccgtgatcggcgggtggtcctctggggttctgactacagcaagctgcaggaagtggaggtgaggaggggcagtgggctcagatgggggtagagaggccccccccgatctcaccagggctcccaacgccagaccctcctccccacagtatgtcaccccacacccacccgtgtgcatcctactcatcttccctcttatctgtccacccaggtccctgaggactttggccctgtgcgcaccgtggcagagggccacggagacacactgtacgtggggaccacccgcaattccatcctgcagggctccgtgcacacaggcttctcactgctggtccaggtgcgcctctctcctctgcacccctcccctcttcccagctctttccctggccttccctgcatcatccactccccctccccactcccagttctcctcacctccctgctctgtcccttctctgacctggccctgacccaggaccccttcccag

SEQ ID NO: 91963 - DNA, 1026 bp, Homo sapiens
ccgagtccatgttctcaaccactctcccccacccaccccgaaagaacctgggatcgggagtccacagcccgggatgtgtgacccggtgggaccctccggctccaggggtggctgtggagggcggggcaggggcgcggcggcccgggcgcctcccagggccggaagcggcagagccggtcccggctccacccccggccccgaagctccgccacccgccgccatgagtagctttggagctgggtgagaccctttcgcagaccaccccccatctcctctccgcgctcccggggcttagatctcaggtttcacccaacccctgggacccagaccggcgtggggacacgccccttcccttaaactctccccgtttctccctctgcttgacgtttggtgtgctgggggaactgcgggtggggggcgctggggagcaccttgctgattaggagggaagggtccttggtgactcccttcttccaggatcgcgtccctgccacttcgtgctgtgtgatctttggcgatcactgcctctctgggcctgtgtcttaggctctgcaagatcaaccgagcaaagcacacggcctgcagagaggcagcgctctgccccttactcggccccgttttcatcggagacctccggggagcggtgggggtggaggaatggtttctccccttttctgaactgaatactaagaccctttttttttctttgtcctttcctgacagcaaaaccaaagaagttatcttcagtgtgggtgagtggggagatggggaagggctcggtggaagcttgcttgttggggtgacaggctggagccagaggtcaggagtcttggctactgggtctttgcctctctggcctcagtttccctgcctttaaaaaaataaataaataaagctggaagaggagagggaatagggatggggctggtgtcagtgcctgacctctgggggtgtcctggcagaggatggctccgtgaaaatgttcctgaggggccgccctgtgcccatgatgatcccagacgagct

SEQ ID NO: 91964 - DNA, 1042 bp, Homo sapiens
ttttgtatttttagtagaggcggggtttcaccatgttggccaggctggtctccaactcctaaccttgggtagtccacccgcctcggcctcccaaagtgctgggattacaggcgtgagccatggcgcccagcccgttcattcattcgatacaaaatactgagctaggactgtcctgggctgtggggagcagcagggaccaggacaggagattggcggccccagcagtgctgcctgctagtgaagagtgagggcttcgaagctggacacagctgaggccaaattcaggttctgtcactttctagctgtttgccagctgtgtggccttcacctcagggttgagggtagggagaggtaagtgaggtgccaacgtgcagaatctaaggaaagattcattccaaaattgaaggcccaccttacacttgcttggtttacctgagtccccaacctgcttcacctcattcggcctgttttctcatctctaaagtggggaaaatactagtctcagtggacaaggctgttcattcattaaattcagcaaaaaattactgagcatgtgtatatgctaagcactcctccaggcttatcacaggaatacagccaagaaccaaatggtccctaccctccagtgggaaagacacactaaacacactatagaagtaaggcatacagctgggcgcagtggctcacacctgtaatcccagcattttgggaggccgaggcaggcggatcacctgaggtcaagagttcaagaccagcctgaccaatatggtgaaaccctgtctctactaaaaaaatagaaaaattagctggatgtggtggcggccgcctgtaatcccagctactcaggaggctgaggtcggagaatcgattgaacccgggaggtggaggttgcagtgagccgagatcacgccactgcactccagcctggccacagagggagatcatgtctcaagaaaaaaaaaaaaaaaaaggaaagcatatagaatgtcagatggtgagatgtgcctagagggagaataaagcaagaaaagagatgaggagt

SEQ ID NO: 91965 - DNA, 1022 bp, Homo sapiens
cgagactagcctaggcaacatagcgagacccccgtctctacaaaaaaaaaaaaaaatttaattatgaaaaacatgttttaaacgataacgggagtggtcctagataattagtcctattgaaatgaatgttaaggggcagcgattttacgaatactgggggaggccgagcgcggtggctcaggtttgtaaatcccagcactttgggaggccgaggcgggcggatcacctgaggtcaggagtttgagaccagcctggccattgtggtgaaaccccgtctctaacaaaaatacaaaaattagccggccgtagtggcgggcgcctgtaattgcagctattcgggaggctgaggccggaggatcgcttgaacccgggaggcggaggttgcagtgagccgagattgcgccactgcacttccagcctgagcgacagagtaagactccatctcaaaacgaaacaaaagaaataaaacgaataatgggggagggaagttaggacttttagaaataattatttgaaataagggacttatcttgatcatttgagctggagacgggtgcgttttcgacttgattcacaacttacacggataacgaacgagtcattgacatgattttgcgcatttattagtgcagcagatattacattgaatgcttatgtatcagacactgcttaagctacataggatacatcagtgaatgaaacctctagtccccaagggaaaagaaaaatctttttctctttttctttttttttttttttttgagacggagccttgctctgttgctcaggctgtagtgcaatggtgcgatctcagctcactgcaacctccgccgcctgagttgaagcgattctcctgcctcagcctcccgagtagctaggattacaggcacccaccaccatgcccagctaactttcgtatttttagtagagaccaggtttcaccatgttggccaagctggtctcaaactcctgacctcaaatgatccacccgcctcgaccttccaaagtgctgggattacagg

SEQ ID NO: 91966 - DNA, 1037 bp, Homo sapiens
agaacccagaggctcccaaagtatttcactatggaacactttttattgggaagcacttcatagaactaggatacttcggccgggcatggtgggtcacacctgaaatcccagcactttgggaggccgaggccagcagttcagctgagctcaggagttcgagagcagcctggacaacatgatgaaaccccatctctactaaaaatacaaaaattagccaggtgtggtggcatgagcctgtaatcccagctacttgggaggctgaaacaggagaattgttggaacctggtggcagaggctacagtgagccaaaatcacgccactgcactccagcctgggcaatagagcgaggctgtctcaacaaacaaacaaaatacaacaacaacaaaaagaactaggatacctcagaaggtactttggaaaacatggggttttgaaagtctgagagcatctatgagaggaatgggtaagacagatctagatttaccgcagagtagttagggcacactgtctttccccttcagctgttggtacagcactgtgagatggcagtgtaactgcaaactccaatgagcaagtatttcccaaccctacctaattttcagactcagctggggtgctcattaaaaaatgcagactgggtgcagtggctcatggctgcaatctcagcactttgagaggttgaagtgggaggatcacttgagcccaggaggtttttctttttgaggcggagtctcgctctgtcacccaggctggagcgcagtgctgcaatgctggctcactgcaacctccgcctcccgggtacgagcgattctcccgcctcagtctcccaaatagctaggactacaggtgcgtgccaccacgcctggctaatgtttgtatttttagtagagacagggtttcaccgtgttagccaagatggtctcgatctcctgacctcgtgatccgcctgtctcggcctcccaaaatgctgggattacaggcgtgagccaccgtgcctggcccacgctgtccttaaggagacactttggtgcatacac

SEQ ID NO: 91967 - DNA, 1172 bp, Homo sapiens
gccggagggaaggagcgagggggcgggcccttttacctttcgcgcgcatgcgtgtgggctgcagccttctcccgccgcctgggggggctgcgggtgagggctctttgggggcgtgtgtaggtttcgagggtcacctgaggggtttggaagatttctttgggggggcggttacaagatttgggggttccttttccatttgcaaaatgttctggggcttggggaagttttaacgtgggtttaggggatacttttggggttctctcgcgcttaaggggcaccttggagtttgggttcgtttgtaatgcggaaggttcggttgtgttttcgggatcgggttccctttgtgttttggagtgtttgttgggcatagaatttggggagctcccggagagacagaagcaaagagcccgagagtaccagtcctggaggtggaatgtctgggctcgcgtcttgacttcctacctgtcttaacccggacaggagatttcacctgtgtctcatcgggaactaggcattaataacactacctgcttcctagggaccgaggaggattaggaattgttagcgcagtacctacctagtaagctcgcagcgagcgtgcagtaagcacatgtctgctattgtaacatttgtgaggtttctttgttttttttttttggctttgtgaaacatttttatggtttaagattcatcttaaagtgttagggagcttttgtgttttcaaagagttcgtctgctgttggaggcttctagtggaattgggagataatggaggagggttggggggagtataggattccgggagagtgattgtttatgacatagtttggggaattgctgtgttgggatctgtgagagattgactgagattcggcccttcagtgctggagaggatatttttaggttcggtggtttaaagtagtatttgaaagcttttcgatatttgggggaggacattgagatgctgggggtaaggttggaactgattaggggacttgagggggtggccaggttgtagcaggatggcatctgtagagactggcttttgctgtgttagcctgcctccctgggcagttggttatacaggtcaagtatcccttacccgaaaatcttgggactaaaaagtgtttcggattttggatttcttcggattttgagtatttgcattatac

SEQ ID NO: 91968 - DNA, 1039 bp, Homo sapiens
ggtccttgtagccgggaatgctgctgctgctgctgctgctgctgctgctgctgctgctgctgctgctgctgctgctgctggggggatcacagaccatttctttctttcggccaggctgaggccctgacgtggatgggcaaactgcaggcctgggaaggcagcaagccgggccgtccgtgttccatcctccacgcacccccacctatcgttggttcgcaaagtgcaaagctttcttgtgcatgacgccctgctctggggagcgtctggcgcgatctctgcctgcttactcgggaaatttgcttttgccaaacccgctttttcggggatcccgcgcccccctcctcacttgcgctgctctcggagccccagccggctccgcccgcttcggcggtttggatatttattgacctcgtcctccgactcgctgacaggctacaggacccccaacaaccccaatccacgttttggatgcactgagaccccgacattcctcggtatttattgtctgtccccacctaggacccccacccccgaccctcgcgaataaaaggccctccatctgcccaaagctctggactccacagtgtccgcggtttgcgttgtgggccggaggctccgcagcgggccaatccggaggcgtgtggaggcggccgaaggtctgggaggagctagcgggatgcgaagcggccgaatcagggttgggggaggaaaagccacggggcggggctttggcgtccggccaataggagggcgagcgggccacccggaggcaccgcccccgcccagctgtggcccagctgtgccaccgagcgtcgagaagagggggctgggctggcagcgcgcgcggccatcctccttccactgcgcctgcgcacgccacgcgcatccgctcctgggacgcaagctcgagaaaagttgctgcaaactttctagcccgttccccgcccctcctcccggccagacccgccccccctgcggagccgggaattccgaggggcggagcgcaggccgagatggggaatgtgggggcctgcagagg

SEQ ID NO: 91969 - DNA, 1171 bp, Homo sapiens
gccctcggtgtccccacaggatgaaacagtaagttggtggaggggagggggtccgtcagggacaattgggagagaaaaggtgagggcttcccgggtggcgtgcactgtagagccctctagggacttcctgaacagaagcagacagaaaccacggagagacgaggttacttcagacatgggacggtctctgtagttacagtggggcattaagtaagggtgtgtgtgttgctggggatctgagaagtcgatctttgagctgagcgctggtgaaggagaaacaagccatggaaggaaaggtgccaagtggtcaggcgagagcctccagggcaaaggccttgggcaggtgggaatcctgatttgttcctgaaaggtagtttggctgaatcattcctgagaaggctggagaggccagcaggaaacaaaacccagcaaggccttttgtcgtgagggcattagggagctggagggattttgagcagcagagggacataggttgtgttagtgtttgagcaccagccctctggtccctgtgtagatttagaggaccagactcagggatggggctgagggaggtagggaagggagggggcttggatcattgcaggagctatggggattccagaaatgttgaggggacggaggagtaggggataaacaaggattcctagcctggaaccagtgcccaagtcctgagtcttccaggagccacaggcagccttaagcctggtccccatacacaggctgaagtggcagttccagcggctgtccctgcggcagaggctgaggccgaggtgacgctgcgggagctccaggaagccctggaggaggaggtgctcacccggcagagcctgagccgggagatggaggccatccgcacggacaaccagaacttcgccaggtcgggatcggggccggggccggggccgggatgcgggccggtggcaacccttggcatcccctctcgtccggcccggacggactcaccgtccttacctccccacagtcaactacgcgaggcagaggctcggaaccgggacctagaggcacacgtccggcagttgcaggagcggatggagttgctgcaggcagagggagccacaggtgagtccctcatgtgtccccttccccggaggaccgggaggaggtgggccgtctgctccgcggggcgtgt

SEQ ID NO: 91970 - DNA, 1036 bp, Homo sapiens
tgtagaagccctacaggggcggaacccgaggaagtggggtcccaggtggcactgcccggaggggcggagcctggtgggaccacagaagggaggttcatttatcccacccttctcttttcctccgtgcagggacatcaaacccgacaacatcctgctggaccgctgtggccacatccgcctggccgacttcggctcttgcctcaagctgcgggcagatggaacggtgagccagtgccctggccacagagcaactggggctgctgatgagggatggaaggcacagagtgtgggagcgggactggatttggaggggaaaagaggtggtgtgacccaggcttaagtgtgcatctgtgtggcggagtattagaccaggcagagggaggggctaagcatttggggagtggttggaaggagggcccagagctggtgggcccagaggggtgggcccaagcctcgctctgctccttttggtccaggtgcggtcgctggtggctgtgggcaccccagactacctgtcccccgagatcctgcaggctgtgggcggtgggcctgggacaggcagctacgggcccgagtgtgactggtgggcgctgggtgtattcgcctatgaaatgttctatgggcagacgcccttctacgcggattccacggcggagacctatggcaagatcgtccactacaaggtgagcacggccgcagggagacctggcctctcccggtaggcgctcccaggctatcgcctcctctccctctgagcaggagcacctctctctgccgctggtggacgaaggggtccctgaggaggctcgagacttcattcagcggttgctgtgtcccccggagacacggctgggccggggtggagcaggcgacttccggacacatcccttcttctttggcctcgactgggatggtctccgggacagcgtgcccccctttacaccggatttcgaaggtgccaccgacacatgcaacttcgacttggtggaggacgggctcactgccatggtgagcgggggcggggtaggtacctgtg

SEQ ID NO: 91971 - DNA, 1022 bp, Homo sapiens
tctctaacccctcccatctctccctctcatcttccccagggcatctcctcccaaccaggcaactccccgagtggcacagtggtgtgaagccatggatatcgggcccccccaaccccatgcccccagcctcctagccataaccctccctgctgacctcacagatcaacgtattaacaagactaaccatgatggatggactgctccagtccccccacctgcacaaaatttgggggccccccagactggcccggacacgggcgatgtaatagcccttgtggcctcagccttgtcccccacccactgccaagtacaatgacctcttcctctgaaacatcagtgttaccctcatccctgtccccagcatgtgactggtcactcctggggagagactccccgcccctgccacaagagccccaggtctgcagtgtgcccctcagttgagtgggcagggccgggggtggtccagccctcgcccggcccccaccccagctgcccttgctattgtctgtgcttttgaagagtgttaaattatggaagcccctcaggttcctccctgtcccgcaggacctcttatttatactaaagttccctgttttctcagcgggtctgtccccttcggaggagatgatgtagaggacctgtgtgtgtactctgtggttctaggcagtccgctttccccagaggaggagtgcaggcctgctcccagcccagcgcctcccaccccttttcatagcaggaaaagccggagcccagggagggaacggacctgcgagtcacacaactggtgacccacaccagcggctggagcaggaccctcttggggagaagagcatcctgcccgcagccagggcccctcatcaaagtcctcggtgttttttaaattatcagaactgcccaggaccacgtttcccaggccctgcccagctgggactcctcggtccttgcctcctagtttctcaggcctggccctctcaaggcccaggcaccccaggccggttggaggccccgacttccactctgga

SEQ ID NO: 91972 - DNA, 1038 bp, Homo sapiens
cgtggtggctcgaggccatggccacaagtcctgggtcaacgctgtggcctttgacccctacaccacaagggcagaggaggcggcgacagcagccggtgctgatggggagcggagcggcgaagaggaggaggaggagcccgaggctgcgggcacaggctcggccgggggcgccccgctctctccactgcccaaggctggctccattacttaccgctttggctcggcgggccaggacacgcagttctgcctgtgggacctcactgaagacgtgctctacccgcacccccccctggcccgcacccgcaccctccctggcacacctggcaccacgccaccggccgccagcagctcgaggggtggcgagcctggcccaggccccctgcctcgctcgctgtcccgctccaacagtctcccgcacccagctggcgggggcaaggcgggcggcccgggtgtggcggcagagcctggcacaccattcagcattggccgcttcgccacgctcacactgcaggagcggcgggaccggggggcagagaaggagcacaagcgctaccacagcctgggcaacatcagccggggtggcagtggcggcagtggcagtggtggggagaagcccagcggccctgttccccgcagccgcctggaccccgccaaggtgctgggcactgcgctgtgcccgcgcatccacgaggtgcccctgctggagccccttgtgtgcaagaagatcgcccaggagcggctcacagtcctcctgttcctggaggactgcatcatcactgcctgccaggagggcctcatctgcacctgggcccggccgggcaaggcggtgagtggccccacaccagcctgccggggacctggcaggacctttcgtgggaagaggcaggcattggcagagagagggctttgttgctgtcacagcctctggctccgtggggtgaggggaagccagggaaatcttagtgtctcagtacaagacctctcagatccttagagtgagggggtctagccctaggcagcaggcagcagaaagagggg

SEQ ID NO: 91973 - DNA, 1053 bp, Homo sapiens
gcatactgagcgctgctgtgtccgcgctctgggccctgcgagcagaggggatgagtggggaagccactcggacacgagtgacgggaatgggcaggactgggacagccacctgggggctgtgggagtcagggtagggggcatctggcccagcctggggggtcagggagagagatctggaggacgaggagagccagccatcggtggggcctgaggaaggaccaggcagggccatctcaggcaggttccctcagcagagccctggattacagacaggtagactcagaccccgagtaaatggaccattaaatgggaaggcttgggccatgatagggcagcacgggaggcctggcccaggtgccaggaagcattcccaggagatgcacagccttcgggaggcccagaagctgagcaggtgccgtggaccaggcaaagaggagggtggatgcaaaggcaaagagaccagggccctcgggactgttagaatgggtatgtgaccaacatggagggcagcagagcagcagcgggccggggccaccccatacaacacctggcagacagtgtgaggcagggagctgggggtttattctgaggccacagggcaggcatggctgggattggagccagagagggacagggtcaggatcgcactttagaaagatccttctagttgccttgtgtgttggcagtcacgggaggctggaggtgggaagtcctggtccccgccatttccctgccctagaacaattagctccccagccccggctcccttctctgccctccccggctccactgcccaagaagggacattcctgagggtccgagggggttggagaagagtgtgggccaatctgatgcccgctcctgccctgtcagaggtggcagcaccctggacggaggagacagtgaagcagtgtctgtacctctacctggccctcctgcctcagaaccacaagctgatccacgaactggcggccgtgtacactgaagccatcgccgacatcaagcggacggtgctgagggtcattgagcagccggtgaggcccctgagcccac

SEQ ID NO: 91974 - DNA, 1021 bp, Homo sapiens
agaggtgcagtctctgcccagatcatccagccgccagcttttgaaccctgttctgttcacctccaaagctttataagcaggggcttgaacaagcagcccctgagggagggcctgctggccctgagctcctacaattcagcagggcccgggagccaggcggcctcttcctctgcagccatggccctccctccatctctggcaggatcttcaccaaggttgtgctggaggcgccactcatcacagagagtgccctggaggtggtccgcaagtactgcgaggatgaggtgaggacaggccctggtcagtgcagcccggggcaggggacagggccctgccctgaggggtctgaagggcacacagtctaaaccttgtggccgggggttttgtgagggaccgggcccttttgtccaggtacctgatcagaggcaggcaggaaagacagagcccagaggcacactcaggtgggctgagctcgggtccctttccttttgctgcagagtcgcacctatctgggcatgtccacacttcgagacctgatcttcaagcgcccgtcccgccagttccagtacctgcatgtcctcctcgacctcagctcccatgagaaggacaaggtgatcccctcctccacttcctggctgccctcagcctgcagcttgcagaggccgcctctatcctgagtaaccagcccacgtcttccacactcccttgcaagtttctctgggcccattcccttctttcagtggttttttggctatttctgtctgttttattttcattttcagtggcatcaagctgcctagaaaccagggttaccgtgcctgagtctgcctgtagtgtgtacacacacacacgtgcgcttgccctcctgggaagggcagtcccactctcgctcttagtccacccgtggtggccagcacaggctcctcgtgcagcccagtcctgtgccggggcctgagggcattgcccagcccagcaggggagccggtgtggcctcagccagcagtgaggacacagcgtgctc

SEQ ID NO: 91975 - DNA, 1186 bp, Homo sapiens
ctgattctgccacttgctggcactgttaccttcaaagaatggggaaaagtgactttttccccattctgtgaagttaattgttgattagccagtagtataggaacatactccctgagctgaaaaatatttccggggaatccagatccagtactcttccgtggccatcacctgcaccccatccctctcttcaaaggtgacaaaggcacaaatgaggggaatctttgaggatctttttctgtgcacttaagtacatgggtgctgctcctagaaactcatttttattctgtgatgatcgatccccaccctggtacccccaccccccaacacacaaacgggaccttcctaggcataagggtcctcggctggccttcctcgcttcactccttgtctgctctgagagttcctgcgtctgggtgggagaagtcgcagggcacgattgcggagtccctggattgcccaccctacactgacatgctggctcaccctcccaccaggtccgcataaagatcctggccagcctggtgacacagttcaactcgggcctgaaggcggaggtcctgtccttcatcctggaggatgtgcgggcccgcctggacctggccttcgcctggctctaccaggagtacaacgcctacctggccgcaggtgcctcgggctccctggacaagtatgaggactgcctcatccgcctgttgtctggcctgcaggagaaaccagaccagaaggatgggtgagggggctgaccctgcaccctcctgtccccgagaggcttcctctcctggtgctgccctccctttctgattgcgaccacctccctcttcgtcaccccccgagtcagtcctcctcgcacccatcccaagtctcctctcctcctccccctctggaggcacgttcaaggttgtagttttgcatgtgggctccaggtcgcactccctgagctgttcctcagctctgccacttgctctgagcttgctctgcgtggctttgtcactccctctctctgccattttcccatctgtaaataacagtgctcacccatgggcctggagatagacttctctacaccccattcactacctgagttggttctgtagcttcctccctatccgtggcctccagcttactcgtctatcctccacacagcagctccaggaacattttattatataaatccttttattacttc

SEQ ID NO: 91976 - DNA, 1056 bp, Homo sapiens
agtgggttgtgttgttggctgaggaaggggcagtggatgctaggcaggcagaattacaggcatcctttttcactgtggaacaggggaggctcacttatcagggtgaccattagaaagtcatcctggcgtcagggagactagcagtgagctgttgcagcagttcagttgggggtttctggaggcaaaagtggtgattataaccctccccaagcgaagcatatgtgaatttccagaccagagatggaggaggacgaaattgtatgtatttactaaaagagagggtgagtttttctctttaagattgactgatactgatggagacccccagggtttgaagcatcagcttgtaaggcggaaagccacacgttagatctgagggtgaaggaacttttctagtagatgcctgcaagaccactgcccaagtttggggttgagaattaagactggcagcatgccatgagatcttccacaagacacagctcctgccactttcctcacagccaacctgcccccgacgctggccaaatcgcaggtgagcagtgtgcgtaagaatctgaagctgcacctgttgagtgtgctgaagcacccggcttccttggagttccaggcccagatcaccaccctgctggtggacctgggcacacctcaggccgagatcgcccgcaacatgccgagcagcaaggacacccgcaagcggccccgcgatgactcggactccacactcaagaagatgaagctgggtgagaggggctggtggggtggggcaggcagaccatgctgaaatgtttcattatttaccttaaactatgctgaatttgtatttactaagattatattatagattatgttatgtgggccaggcacagtggctcacacctgtattcccagcactttgggaagctgaggcgggcagatcacttgaggccggggttcaagaccaacctaggcaacatggcaaaaccctgtctctaattttaaaaaattataaaataattataaaaataaattacagtatttaatatgatatataaattacaatagaattatcaaaatata

SEQ ID NO: 91977 - DNA, 1612 bp, Homo sapiens
actaaattttttttttttttaatatggagtccaactctgtcacccaggctggagtgcagtggcgcgatctcggctcactgcaacctctgcctcctgggttcaagcgattctcctgcctcagcctcccaagtagctgggattacaggcacaggccttcacacctgggctaatttcttgtatttttagtagagacggggttttaccatgttggccaggctggtcttgaactcctgacctcaagtgatctgcctgccttggcctcccaaagtgctgggattacaggcatgagccactgcgtctagccccttataactaaatttttatactcattaatagtctcatagaactaatcaaccaccacattttctgtttttcccgccattcatagacatctaggtaccaggatctgtccttccttttagtcccaaaagctgctgtctccagaggcctgggaaaacggatcccactgactggttctcctctctgtctcttagacgtgctatgggaagagggcaaggcagccttggagcagctgcttaagttcatggtgcaccctgccatctcctccatcaacctgaccacagcgctgggctcccttgccaatatcgcccgccagagacccatgttcatgtctgaggtgatccaggcctatgaaactctgcatggtaggtcattgtcctcccccctccccctgccttctcttcactggccagtctgctctttcttttttttttttttttttttttttttttgagacagagtctcgctctgtcaccaggctggagtgcagtggtgcaatcttggctcactgcaacctctgcctccccagttcaagtgattctcctgcctcagcctcccgagtagctgggattacaggacacaccaccacacccagctaatttgtttacttttagtagagacggggtttcaccgtgttggccaggatgatctctatctcttgaccttgtgattcgcctgcctcggcctcctaaagtgctgggattacaggtgtgagccactgcacccggcctcagcctgctcattcttaaagaaatgtagctccgtggtggaccccgagcgctagtcatccatctggcaggcctgagattctctacattagacaggaatcttttggcatgtgacagaaacttgattcaggactggctttaatattgaggtatgtgggggtgaaatgacatgatgtctgtgaaatactttcaaatattccagtcctctccccccaccaaaagggaggatagatgttccaagattagcgaaatgttgatgggtacacagagactcataccattttctctgttttgtgaaacgaaaaccgagaagtctggggttggggtatgaatgcgtacaggtcgtggatctgcatttctccatctctcagctctttgtttctccattttagtttcactctctggccctttccttagggtagcaaagatggccccccatagttcatggctcccattccgttcacttagcaacaccatgggaaagagagtgtctccttcccaaccattccagcagaagtccaagggctgacggtcattgtttctgattggctgagcagagattatgagccagtctctgagccaat

SEQ ID NO: 91978 - DNA, 1086 bp, Homo sapiens
aaaggtatactttgctagctcagtgagctagttcactcaccatgttggtgagcagagagccacacctttccccattttaccttgggaaactcactccaccatctttgccatctcttgaaagtcccttctgcaatctgacctcaatcttttgtgctgcagtttgtccagaggggacacagatgtggggtcagggatgaggattattgaaaaacccatcatctctttttttttccccgtctccctattagccaatccgatctcagagtctctgagtggcctccttgcacccttctcttcagcacccagtaggtgcttaataagtgtttgctgcattggattatctccctattccttctcatttgccctctagcttcccataccttctccaagtgtcttcctccctttctttgtctggctccctatgactttctatttttttttcctccgtgtggttcccattgttttctgtcctgtctctatcttagtctttgtctgtcttcctcctttcctcaaatgtctcaactctctctccccaatttccccatttaaaaaaaaaaaaaagtgccaaacttccttggaactgagccgctctggggggagaggaccttggatagaggggaggaaatgggaccatttctctttgaggaggtccctaagaggcattgcaaaagtgtggacatggagctaaattgggtcccccttccacagccctcccaccctgagtttttcttagaatctttgtaagaaaaaaaaaaaaagacagaaaaaagctctccttttcaacttacccctatccttttgggtccccccaaattccaccagccaaggagaatcccacttgccaacttcctggcaaatctatggaaactggggaggaggagacaagctcaactcctcctctgctagcccaaggggcggtaccaactggattcaagagaaggacctcaaagctcctatgagaagagggggttcgatgtgccaaattaacctccttcatcccccatctcagggggctctgagccaacctgcccagccaccttcttctgccctgtcccagccacctctacatgggcaaggaggcttcac

SEQ ID NO: 91979 - DNA, 1034 bp, Homo sapiens
tgcatgcctgtgtctgcgtggctttgtttcattgaatcgggtgagccaagtgtgtggtggctctgtcaggccagtatggccaggtgtagagttcagtgagccatagtagggtcccttgggccagaatgcttcgtgtggtctgataggttagattggtttggtggcttccagcaagctggcatacttcggtgatgtctgatggatcagaatgttttggtgtgctcaccaggggctctggagaactagaatgttctgatggagtctgacaagccaggcggccttgagagttggtttaggagtggctccctgagtgctgtggctgtggtcagctctaaggacctgttggcagactgagatttcagggcctgacaaccatgtagactaggatagctgagacctccctctacccccacccatctccctctcttccttggagaccacctccactttctccaacccaaagcagggcgcccagtgccctggttccatcatcagcatctctgggggaggggcgccccatgcccaccctctcccccatttgtccgcctcctaggtcttccaaacccttttcttctctatgactttgggggaaatccagcctccttgtctctctcctaaaaaaggagggaagaaaagccacagagacaattcctgcccctaaagcctaggagatccctctcccttgctagagagccacccccaaatcaaaatgtgaaaatccctagaaagcaatagccttcgaggtaccttgcactgaatttcccaccccagcccttccacccgatgggaggctgtaacttgggcactggggtgactttttccatgcccttgtcatctccagggtgggaggcaggccccacttcccctcccctatcccccacttcccattgttgttgccccacccctaatctccagactgaacccagatggagatctgagtgccaaaacaattcttgatgtaactttgtacatatcttctactaccgttgggggctcttggggttagaggtgggggcggctctgtgggccattgc

SEQ ID NO: 91980 - DNA, 1060 bp, Homo sapiens
catgaaacggggattcatcctatctttggggttcaaggaaagcttccaagaagaagaaacatttgagtgagaacctaaaggacaaaagatattgactgagggggcccgggcgcggtggctcacgcttgtaatcccagcactttgggaggccgaggagggcagatcacgaggccaggtgacccagaccatcctggccaaaatggtgaaaccccgtctctactaaaaatacaaaaattagctgggcgtggtggtgggcacctgtagtcccagctactcgggaggctgaggcaggagaatggcgtgaatcggagaggcggagcgtgcagtgagccgagatcgcgccactgcactccagcctgggcgacagagcgagactctgtctcaaaagaaaaaaaaaaagaaactgactgaggggaagagaagctgccaggcacagagcatgcacaaaagccctaaggtgggaaggagcagggcacgtttaaggaacaaaatatgcactgagcctgaggctcacggaggaagatgaggaagtgaagctggaaaggtgggtggggccaagtcacaaagggtcgccaggctggagtggagtgcagtggcgcgatctcggctcactgcaagttctgcctcctgggttcaagcgattctcctgcctcagcctcccgagtagctgggactacaggcacgcgccaccacacccggcgaatttttgtacttttagtagagacggagtttcactatgttggccaggatggtatccgtctcttgacctcgtgatctgcccgcctccgcctccgccttccacagtgctgggattacaggcgtgagctaccgctcccggccgcaaagggtcttcttatactgagaagtgtccagaatttccatcctggaggcacgtaggggcaacgggcaggggaggctagatgcttgccttgagactacattaacaaaatgcttttcacatggtcaaaaaaactggtttataataagcaaggtgcggtggctcacgcctgtaatcccagcactttgggaggccgaggtgggcggatcacttgaaatcagg

SEQ ID NO: 91981 - DNA, 1268 bp, Homo sapiens
agggttgtcccagatggaggcttgtgtggccctggccggatcgtgcgtggggacaggctgggtaggtgtgtggggtgaaatggaggaaatggtgggtgtgtaaagctaggtgggagaatgtgaggctaggacaggtgtgtatgtgtgtgcgtgtgtgtgtatgtgtgccctctacagcctggatgtgtgacattagggatcaggaatatgacagcataggggggtgtatgagaaagacaggggacaggggctgggctccatgtttgagaccctccagcgggtacgtgtgacaaggaaaggtgtgtgcttgtcacccccaagggggctgtggcagagtgtgacacatgagagggtgtgtgtgacatgcaaggaggtgtgtgggggacaccgaatgggctggctctgggtgtcagccagaagaggccgtgtagatcagaggaaaggggtccagtgtgtgtgacacaggcgtggctggtgaggggatgtgacaagaaaagggtgtgggtgtgactccagagaggctgtggctgggtgtgacacatggaggtgtgcaacagtgacatcagagggggtgtgtgcaacagggaaggtgggtgtatgacgagggagaggctggggcttgtgggtgaaacgcacgagggtgtgtaaaaaggagaaggaaggatgggtccccatgtgacagggcacgtgtgcatatgacacccagctgtgtgtatgggtgtaacaaggagaggtgtgtgtgtgaaatggctgagtgtgtgacaccagagatatggggatgattctgcatgtgtttgacaagggaggctgtgtgtgtgtccgtgtgtattggagattgccgaatgtttgacaccacggaaggcagtgtgagggaagagaggggctctccctgggtgtgtgacccaaggaggtgtgtgtaccagagaagaaaagccgagctgggaactctaggtgcatgccctgccgtggggggctcagggaagaggtggggttttttggggtcctcagagccctgtcctctagctccctggtaggagggagaccccgcagcggacaagcccctccccgcggtcaccttgccaaaatctccacttcctctggccttttcctccggatgggagagggatggcttcaggcagagtgcaccctttcctctccgccaggcctggcagtgggtggggtgggggcctcctacctcctccctacagatgaatacaagccgactttcttcctcccatcctagccctcccccacctccatccaggtgg

SEQ ID NO: 91982 - DNA, 1073 bp, Homo sapiens
gttcttttttttttttttttgagacagagtttcgctcttgtagcccaggctggagtgcaatggcgcgatcttggctcactgaaacctccacttcccagattcaagggaattacaggcgcccgccaccacacccagctaattgtttgtatttttagtagagaaggggtttcactatgttggccaggttggtcttgaactcgtgacctcaggtgatccacccgcctcagcctcccaaagtgttgggattacaggcgtgagccaccgtgcctggctagcttggagtcttcttcacttctcccttttgtcttacttatatatggtctagcagatcgcattagctctgtcttcaaaacacatccagaatccaaccatgcctcaccagctcctttgctaccactctggcctcagtttgtctcctgctcttacctggtttgttgcagtggccttccaggtgggctctctgcctctcactgttagggggatactagtagaacagaagtcaggtcaggttgtttctcctttcaaaccctctcctggctcccacattacactgcaaaagtcttcaccatatccacgaggccccaacctattgggttcctcctcctccctcccctcaactcccatcacttctctcattcccctggctcactctgctgcagccaccctggcctccccgctgtcatttgaacatagcgaacacattgccatctcagggcctttgtactcgctgtccctgaacgcactgccacctcagggcctttgtactcgctgtcctgtccttctggatcaggtcttttcaggtgtctgtgtggcttcttccacacctctttcaggtctccgctcagacgtcagcttcacaaccaggcatttgctaaagtactactcaagctaaaataactcctgtcactgtatggcccttcacttggctttatttttcttcataacaccactacctgatatagattattattattattttttttgagatggactcttgcgggtcacccaggctggagtgcagtggcgcgatctcggctcacggtagcctccacctcctgggttcaagtgattct

SEQ ID NO: 91983 - DNA, 1355 bp, Homo sapiens
gtgggtgacaaggaagttcccccagactacaccagggctgccaatcccagtggtccccaaattgttatataagaggctttcacaggtggtgactggaacaaggggtccgggtacagggaggggccttgaggatgtgctcataagcctctaggacagtgcagtttttggaattgtgtgttttcgtactctgtggctctcagaggctgctgtttaccctcaggtgcattcttggcctctgagatgccacggttttaatcctccctcctcaggattcactacccgctgcccctcccgtaccagggcaagccagaccccgtggttctgcagggcatcatccggtcactgaaggaggaactgggccgcctgcaagggctggatggccagaacactcgggacacccgggagaatgagatctggcatctgcgggagcagtgagtcttggaggggtgggcagctggggcgggtgggggccctcccatcatgcaccgcggggcccatgctcggtcctgtggggaggatgactgtccttcgcccaccacgtattcttttttttttgagacaagagtctcactctgttgcccaggctggagtgcagtggtgcgatcttggctcactgcagcttccttctcccgggttcaagcgattctcctgtctcagcctcccaagtagctgggattacaggcacgcgccaccatgtccggctaatttttgtatttttagtagagaaggggttttgccatgttggccaggctgatctcaaactcctggcctcaagtgatctgcccgcgttggcctcccaaagtgctgggattacaggcatgagccactgcgcccggcctctgagcccctcttctgtacctttgtgctgggtggtgctggggacatagtggtgaccaagactatcttggcactgccctcctgggactctgagtccagggagggaggcagatgtgtttgcagacagtgaaggctctgggtggggtacctgaccctgcctggtacgggaggggtgttcttggcaaagggagcagcatgtgcaaaggttggggggaggtcgagctctatgtaggcgaatccaccttcatggggtgcaccttttgtgctagcccctccctgccactcacgtagtgcccagccctgggggagatgggtgctaagtatataaccacttgagtatatcattacagatggagatgagtagggcaggaaagggagcctgtgctgtgggaggctgtcacaggactccactggggtgtagggtgggtcaggcccaggggctggggaagtgttgtaggcagagggaacagcctgggcaaagtccttgtgttaggtgggaatgcggtgagaacaaggga

SEQ ID NO: 91984 - DNA, 1233 bp, Homo sapiens
gtttagaattggaactcacatggctgtgttcccactccttcacccgcaccagggggaggagtgtgtgtgtgtgtcctgtgcgtggtggggtcatgtcctcttcgtgaggtgcatgggggtgatgtgaccacatccctcctcacacgtcgcaggggatatgataggaccctgcccctccccatggggtcagttgagactgatgagccgtgtacccccttccggggaggtgaaatgatgaggcgtcccacccccatggagtagtgggaatggggccatgcctctctctccagcgctctctccgcgtcttccccagggtgtcgcgcctggcgtccgagaagcgggagctggaggcgcagctgggccgatcgcgcgaggaggcgctggccgggcgcgcggcacgccaggaggccgaggcgctgcgcgggctggtgcgcgggctggagctggagctgcggcaggagcgcggcctcgggcacagggtggccggccgtcgcggccaggactgccgccgtctggccaaggaggtgagcagcgggggcccggggcggccagcgaggcgcggacctcggcctcagcctggacctccgcgcccctctcccctcccggcagctcgaggaggcgaaggcatcggagcggagcctgcgcgcccggctgaagacgctgaccagcgagctggcattgtacaagagggggtgagagcgaggcctgccaggcgcctgggcggatgggcgggccctgagggtgtggaggctgatgaggcggagcctaagggggcggggcggggccaggtagggtggagggggcggggctgaaggggaggcggggcttagcggaccccgtctggagtccagacaggatttgggtgcagtggttaggaggtggacccgggctgtgcggagatgcgcaggcttggggcggcgttcaggagggactgggaaagggatcgtgccctagggtctcctggtgcgaaagggtgcggcgcagcaggtgggatcagggtgaggtccgctggcatttatggggtgggtggtggaaaattggaaagagtttccggggagttgtggaagactccggaaagaagggtctgttgaaggcggtgtgttgaaaggatgtaggggaatgacagaggggtgttttaggggtccaattgggtgaggtctgggggggaagatatcgagagggtcatgggcccaggagtgcacgtctaggagttgatggggtaggcctgagggt

SEQ ID NO: 91985 - DNA, 1056 bp, Homo sapiens
agagaggaagggaagatttgttcaaggtcacacaggtagtcgacaatagggctcgacgcccgggtccggctccgcgtagggcatggcgctgccttgcaaaacagccacacccgccagcgacattcacaacccaccccccaaccctagaggacagcggggaaatcccactttcagaaccgagaaactttttacagccttggaacacggtaactttgggaggagaggccacaccaggtctgtttccccgcgcgccccttctctcattccctattggctctctctaccaggggtaccgtctggggaacctctggtcaccttgtcctccgcgcgctctgtggcgaaagggacctgcgcaggcgcgtgaagggcgccttcagggcccgcgctttacgacacttgtgcggcagcggcggcggccacccggcgctccttcgcgacggttcggccgggtgccgctggcggccgttgccagggtaggggtcgctttgcggcatggcgatggcggagggcgagaggactgagtgtgctgagcccccccgggacgaacccccggctgatggagctctgaagcgggcagaggagctcaagactcaggccaatgactacttcaaaggtgcgcccgcctggcagggagggtggacagtggcccaggctgaggggtgccgggcccgcgcggaaccatagcaacgcggagctgcagcctgggcgcggggcagacactaccaagtgaccgggcgtggggaggcccaggatggcgctgccaaggagcgacatagggggcttcggagagtgatacctaggagtggcgtgcggagcgggtgctactcagtggagagactgaggagggcgccaccaattgtggggcgagagggggactggaatgagggcgctaccaaacgtgaggcctgtagagggcgctaccaggcagtgacatgtggtgggggagtgattgatggcgctaccaaatggggagtcctggggtgggtgccgccaagtggggggtagagggggcacagccccaatagagaaggcaatcgtgggggtggggaatggatc

SEQ ID NO: 91986 - DNA, 1021 bp, Homo sapiens
cgacctctcctccttggccagatgtcacatcctgtcactccacacttagaacatcagtgtccagacctcactgtggctgcccggggcccagggatctgtcccaccagcctccctgcctcatctctcctccccctgcccactccacccagctgcctcagctctcactggccctcagacaaggctcaaccacctctgggcctctgcacctgctcttcttgctatcggagtgctcttccctcagtctgctgctagtgcccagcttggggctggaggggtgggtgggcgggtgtgtggagtcctggagactgtggccgagaggacaagccctgagctaggttggttgggacaggcaggaggggcaggctgaagagatgtctctgggctcagggtagccctcagcttccccatctgtgaacagggagactgggcgtcacccagcccagggcctgtcctcgcagggttggagcactgcctcatgcctcttcttctgtctccgcagccaaggactacgagaacgccatcaagttctacagccaggccatcgagctgaaccccagcaatgccatctactatggcaaccgcagcctggcctacctgcgcactgagtgctatggctacgcgctgggagacgccacgcgggccattgagctggacaagaagtacatcaagggttattaccgccgggctgccagcaacatggcactgggcaagttccgggccgcgctgcgagactacgagacggtgagctggggagtgggccaggcctggcacctgagccaggcagatactgagggctgggctggcggggacgggtgtgaggagccattcactcctctacttaccactcagccagccagcaagtgcctgtggggccttgggcccaggccagagtacccaggccacagctctgctcagccatctcacattttgtgaccctgagccagttaccccgcctcgccacaccttcctttccatatccgtgaaatgaggagaacaagaggatcagcctcaagggtagcgg

SEQ ID NO: 91987 - DNA, 1157 bp, Homo sapiens
ttattgagcatctcctatgtgcccggcactgtcctaggcactaggggtacagctatgaacaaaacccttcctgtccacatggagccgatattctaggagggagataagatgatgaataagtcatgaaatgaatagtgctaagtgccataaaactgaatagagtaaaggggggtgggtgaaggaagacagggaggtcaggaagaggcctctgggccagacctgacccaggaggggactcttcactcactctgtcccgctctcgacctgtgtgtccacacccaagttttccccatccctgggagcgagacccccttctccctcatagtggctgtggtcactgactctcgtgtcccgttgttcacaccctagccattgaggatgagtacagcggacccaagcttgaagacggcaaagtgacaatcagtttcatgaaggagctcatgcagtggtacaaggaccagaagaaactgcaccggaaatgtgcctaccaggtaatgcatctgtcaggtactgggcacccgggaaccctgggatggcatcacagcactgccagccgcgggcactgagcaaaacgacaggagaagggcggccatgacagccaacaccaaacaggagtcgtgtgccggacactgtgccgagggcttaccacatgatctcatctcgtcccacagcagtttggggaggtggcaggcagtgccatttgacagatgcagggacaaagggccagagaggtcaggtgactggcccagggtgaaaggtgaggaagcagtagagtctgttgctttgagttctcatcccaggctcttgggcgtctgtggctgctggttgttgcaggttgtttgggacctgctggttgctcctagtcctgagaccaccccctccccgacctaggagggcagctggccacagggtgttaactggttgagtgagactcaggctctggtatcccatctggacaaggccccctgccctgacctctcagggctacagggaccttaccatagttttggggaactgctgagatccaccacctcctgggttggttatgaggatgcgggacttcttgtgagtcaggttgacaggcaggtgactcttacaggagtgtgcaggcaatatgggaagccgccatttgataggtcctagagagccaagtggcc

SEQ ID NO: 91988 - DNA, 1092 bp, Homo sapiens
cagcagttactgagaggacaggttaagaacagggcctggcccacacctgatgctatctaagtatttccccgtgttatggtatctgctcgatgaacggccacttgtagggccactaggcctatgcattgttgagtgggagggcccgtgtcccatctcccccatggctccaggcctctctgaggagagctgaaggaggtggactgactagtccccgcacctccccgccactggctttccgggagacaggaggcagggtcctcagtgccatactactgaggctcagcggccaagctctggctggagccacggtgaggaaaggattagaaacccagatcccttgagccctgccaagtcctcactccctgggaggtgctgacaggaggcttgaggccaggcaggagcagcccatctggcccatcttctgccaccacccccaaccccaccgcaccgcacccttcccctccacgcttgccatgttttcctcagcaggacagatatttaatggtgactttgtggaccgaggctccttctctgtagaagtgatcctcacccttttcggcttcaagctcctgtacccagatcactttcacctccttcgaggtgagctgggaagtgacaaggtttgggttcattgtggggtcctgagtggggcactcactctgcaaggataatagttgcagctgtatttattttgtggactcggagatcatgcacagggcgaccttttaagattgagtatgtagtgcactgcacaaaagcatcacaccaaaggacgcgtttacatcatagatagtgtagaaatggatgtttactctgaccatttttcagcagatggcaaacaagggtgtgaggatgggccccttattctaatttgcacaagggcatgaaacaggctcctgggtggccctaaatctggcactaaagctgagtgactgagtgaacagaccagggctcgagggtgggagtaaggagactgttgacgaggcagttgtgccccctcagattcaggcttggtgtcagatttgggttctcttgattgaagtagagcccggagctgagtgtgctggttcacacctgtaatcccagcacttt

SEQ ID NO: 91989 - DNA, 1075 bp, Homo sapiens
ctggaaacttgcacatttcggatggcaggtttgggaaccgctgcctttcaggaaaggtgctgacgtgggccactgccgcttcgctgggaagcaatgggcccagctaggcccggggcgcggccacacccctgtgggggaggggaaggaggccgccccgaagggagtggacagcccccctgtcagtcttccagagtctgggagtgtaagatgagacgggggaaggtgggcctcattctggcggagggcgaggaggaacttcctgcccgcgcgctccacggtgcagagctctaagcgcgcgggctggcaggctgcggcgcgtcaaggtcagcctggagctgggtggcggcctgcctgggggcgggggaccctactggaggcccgggctggggcctcccagcgcctcggccatattgaatagcttcgactggaccgtctttgtctgcgaagtcctgtcccaagttccagccgcgtccctggggcctggggcaggaagagtcgctggcagcccgcgcgccccaacttggagctgggacaccacgtttccagcttggagtgggccttgagccttgggactgacctcgcccccggctcacgtaggcatcctggaaattgattcccccaagtccttggtgggggagccggacttggtcaagactgtacttgttgcaggcgaagagattggaggcgtttggctcgtccctggctagggaggtgagactctccggtcagcgttgctggaactccccccatccagtccctccctcaagactaagggctacagtagtttgttggggctcattgccccctcaccccagatatcaccctggagatcttaaagactctcgagaaaagccacgtggggggctggttcccctggggcttcctgccgtcccccgactgcctcattctttggagcgtccccgatgtctgcaaagatgtggatttggacgtcctcgtggaagccctaaagcccgtggggacatttaagaagatcggcaaggtgttccgcaaggaggaggactccacggtggggatgctgcagatcggggaggacgtcgactatttgctcatcccc

SEQ ID NO: 91990 - DNA, 1108 bp, Homo sapiens
aggtgacacagaaactagcagagatagccccagacatcgtccctctgccctacccaaggactggcctgcttcagtttggagccttctagagcttcttgatgaggcctccagggcaatcgttcccttcactcggcctctggggctctcactgatgagatgcaaacctgtgccaggcctcaccagcgctgctggtttggggctggggcaggcttttctcccgcccctgtggctcccacatgctgagttgagattggaagcccgtgggtctgggcagcttcatcgggccgtgcgtccagcaggcctgagtgtccagcccaccctggtacccagctttctgaatcaccagactttatcatcaggcgctggctctgcctcagaccctgactctggcatgctcctccctggcccggcgggaatggcacgtggagctggcctcactggggccgagggtctgggctgagtgaggaagatgcgtccgtgctgtccggcctggtgactgactttccccttcatgcttttacaggctgaccagctgactgaggagcagattgcaggtgagtctgctatccccctcatcttagctcaggaaagcctccacatccccagccaaatcttagccactgaggagtgacatctgatgggtgaacctgtgtatcccttgtgtcacctaacactatgccttgtgcctagaatgctgataaatgtgtgtaagagcacaccagtgccccaatgacacgaagccccatggccctgagacaggcctttaccagacaccaaaggctgtgttcctctcctgggcctgggtcatctaggggcttgatatcagtggctgcaggacgagcccaactctctctcccagcttcagccaggttggcttagaaggtgagctccctgcctccctgtggggcctgcagagctcctgtcccactttaggagccgcccaggagctggctcgtcactcccacctctgcgcttgcctgcgctttgcacttcctttcgcatgtgcctgcgcctgcctgttctgctggcggaagtgcctccccagtgctttgcatgggcagctccttcccgtcccttagctcagatgtcccctcggggaggccttccc

SEQ ID NO: 91991 - DNA, 3459 bp, Homo sapiens
gatgcctgcatttcctcttcaggccggccagaggcattctgcagcctcccctcctcgtcccagccagccaaccctggctaacacactcagacaaagaatcctttcggctctcattcactccatgactttggttcatttcatcatttcaagggagaagtcaaagccagggaccaaacagaaatgtagaatcatctaaggacagctgtcagaccattttccccactgtcttcactggctggccagaaaaatagcttcacctagcacagtgttgatgttcaataactgttgaatgaaggttggaagggctttgccctgagcactgaggagagagagctggttgcgtgggacttgaagtctgtctcagtttctttaggtgggactgatgcccttggccttcctccagggaaggcatccagcatccagaggtaaggattctcctgtggaccttgtgacctctgactcctcccccttcttcccccagagttcaaggaggccttctccctctttgacaaggatggagatggcactatcaccaccaaggagttggggacagtgatgagatccctgggacagaaccccactgaagcagagctgcaggatatgatcaatgaggtggatgcagatggtgagccccacagagcgcgtgggcagccctgctcctggtcaccccgagtgactgcagggagcctctctcagggtgatggatgagcccgtgtctctcagggcccaggccaagagcattctccatcctttccccaccttccagggaacgggaccattgacttcccggagttcctgaccatgatggccagaaagatgaaggacacagacagtgaggaggagatccgagaggcgttccgtgtctttgacaaggtaagcagccctctccaggggcggctctgagactgacgccagccttcaggcagacaggcggaactggagccacggagctaccacttccaggaggtccgggtcccggtgccagcctcattgccaacctgctctgccacctcaggcagcctccctcactgtgctcactgctgagggatggtgatgacagccacccctctcactgcctctctccccaccgggagaagtgcccagtgaaaggctttatccccaacccccaggatgggaatggctacatcagcgccgcagagctgcgtcacgtaatgacgaacctgggggagaagctgaccgatgaggaggtggatgagatgatcagggaggctgacatcgatggagatggccaggtcaattatgaaggtgagtcaaggccaggcttgatctctggaacaagaagagaatcgcagcttcaggaacaagcccccagatccctcttgttggggagggccgctcgccacttagcctgcccgcctgacctcctctctctctgcttcactccacagagtttgtacagatgatgactgcaaagtgaaggccccccgggcagctggcgatgcccgttctcttgatctctctcttctcgcgcgcgcactctctcttcaacactcccctgcgtaccccggttctagcaaacaccaattgattgactgagaatctgataaagcaacaaaagatttgtcccaagctgcatgattgctctttctccttcttccctgagtctctctccatgcccctcatctcttccttttgccctcgcctcttccatccatgtcttccaaggcctgatgcattcataagttgaagccctccccagatccccttggggagcctctgccctcctccagcccggatggctctcctccattttggtttgtttcctcttgtttgtcatcttattttgggtgctggggtggctgccagccctgtcccgggacctgctgggagggacaagaggccctcccccaggcagaagagcatgccctttgccgttgcatgcaaccagccctgtgattccacgtgcagatcccagcagcctgttggggcaggggtgccaagagaggcattccagaaggactgagggggcgttgaggaattgtggcgttgactggatgtggcccaggagggggtcgagggggccaactcacagaaggggactgacagtgggcaacactcacatcccactggctgctgttctgaaaccatctgattggctttctgaggtttggctgggtggggactgctcatttggccactctgcaaattggacttgcccgcgttcctgaagcgctctcgagctgttctgtaaatacctggtgctaacatcccatgccgctccctcctcacgatgcacccaccgccctgagggcccgtcctaggaatggatgtggggatggtcgctttgtaatgtgctggttctctttttttttctttcccctctatggcccttaagactttcattttgttcagaaccatgctgggctagctaaagggtggggagagggaagatgggccccaccacgctctcaagagaacgcacctgcaataaaacagtcttgtcggccagctgcccaggggacggcagctacagcagcctctgcgtcctggtccgccagcacctcccgcttctccgtggtgacttggcgccgcttcctcacatctgtgctccgtgccctcttccctgcctcttccctcgcccacctgcctgcccccatactcccccagcggagagcatgatccgtgcccttgcttctgactttcgcctctgggacaagtaagtcaatgtgggcagttcagtcgtctgggttttttccccttttctgttcatttcatctggctccccccaccacctccccaccccaccccccaccccctgcttcccctcactgcccaggtcgatcaagtggcttttcctgggacctgcccagctttgagaatctcttctcatccaccctctggcacccagcctctgagggaaggagggatggggcatagtgggagacccagccaagagctgagggtaagggcaggtaggcgtgaggctgtggacattttcggaatgttttggttttgttttttttaaaccgggcaatattgtgttcagttcaagctgtgaagaaaaatatatatcaatgttttccaataaaatacagtgactacctgatttggctcctctcctcctgtctcagtttctggcctgcccccctccaacacacatacacaccaaccccagcactgactcctttggcccagaggtggaagagcctctcctcaaagctggctctgaagctgtgtccagtcagtgcagcccagtggacgcctctgaaccacagttctgatcccagctagatcgcagggtcatcaacggcagggtcctgtcctagagatagtcgcacaaatggactgaaaggcggggactgagaaggctcctctgaggcaggcccatcatgccatgggagcacacagagaaggggtcagcccagtcaggtggcaggactgagctgagacctacctgaaagatgggcagtcccctagccgggtaggggaaggacggaa

SEQ ID NO: 91992 - DNA, 1054 bp, Homo sapiens
cccagagcagcaacaggtaggaagctccggtcccggccccacagctggtccctttgcctgctccgtggccaccgtctctccgcctgggaatgaatgagtgaatgagtgaatgagtgagtgaatgaattcttctgcgtctccatcagcctgtctctcgccttgttcctctctcccactttctgtttccatctctccccaacccctccatctccctctttgtccttcccttctttcctctgtccctctatctccccgtctctgttcctttatctccttggtgtctctgctccttcctccctccccccttcctccatttccccttctctctccttcgtccctccctccatcaccccatcctctcccaccccatccgtccatctcctccatcctctcccaccccacaccccctccctccatctcctccatcctctcccaccccacaccccctccctccatctccccatcctctcccaccccacaccccctccctccatctccccatcctctcccaccccacaccccctccctccatctccccatcctctcccaccccatccgtccatctcctccatcctctcccaccccacaccccctccctccatctccccatcctctcccaccccacaccccctccctccatctcccctgctctgtcccctctgtccctttgtcccctcggtgcctgtcgccttgtatcaccctgttccttgctccccccttcatttgtccctctattttctcctccatcacttcattcctcccccagtctctccctctctctattcctccccgtctcttcatttctcccgtgcctcagtctctccctccattactctgtctctgcctctgcgcgtcccgttgtccctctgtccatccgataggcctctcctcaggtgcccgagttgggctcccccagccctctgccctggctgctaatgagcagaggaggctttgaggtgaccagggctagggtgggggggctccctgagggtggcggagagggcagctgctgccaaggccctaatgaggccccctctgtgcccctcccgccgcg

SEQ ID NO: 91993 - DNA, 1278 bp, Homo sapiens
cgaggagcgccttggctcccctcccctcttccgcagccgggcctggggccctggcacgtccggcgcgcctgatgctttccagatgtgggcttggtttccctcctttatctggccccgttgagcccgcaaggggaggggggaggggagctagggtccgagacccaaatctccaccagggactcgggtcggggtcccctccccgcccgtctcccttccctgtccaggcggtgaaaaccgagttagggtgggccgactgcagtaaagatgctcctccccacctccacctcttcctagggctcccgccttctccaggtccagaaagaaccccaagccccgtccatcgggacacgcccccaggtacaccgaggggcacgcccccttagaaaccccgccccggacccctccccttcggtcgcgcctctgcaggccccgcctccgtcgtcgggtccccactggaaggcgccctctgtgcatctctttgtctctctggccgcctctgcctccatctctgtgtgtctgcgtcttcgtccctgtctctgagtttcggcttgggtgtctctctcctaccccggtctctctgtgtcctgtctgtctctgcctctcctgtccctctctccgcagcgccctccccgtctctgtctctctgagtccctagctcgctccttctctaaatctgtgtccctatagccccctgcgtctctctgactctccctgcatctccctcccctgtctgtgaatttctctgtgtccatcttctgtcctctccctccggtccctggctccctgccgtgcttcctctggtcccgagtctccccttcatctcccgcctggccctcctccctgtggccacctcctccctgcggcctctcggggcagggtgggcgcctgggcgtgctgcgcgcgccctcatgtggccggcagacgctgcgtgtgagcgccaaaaggggagtgctggggagcgggggacgctggtgttcgcggtgacactgggaaatggcgtgtgacacctggaggctgtgtgagtgtgtactgccgggagacggcgtgagacatctggagagtgtgtgagtgtgtactgccgtgatggtgtgtgactccaggagatctgtgagtgtgtactgctgtgagatggtgtacgacgccaggaaactgtgtgagtgtcgactgccgtgagatggtgtgcagtgccaggaccaggacaccatgagtgtgtactgccatgatggtgtactggtgagatggtgtgtggtgctgggagtctgtgtgtgactgattgat

SEQ ID NO: 91994 - DNA, 1003 bp, Homo sapiens
tttccccgttttagtttagaagcctagtctgtttgttcccctccaccgctctccctctcattcctgatgagccctctcattcctcctttccttgcccagctatggccccctctcattcacaaagtgccccctccatgtccctggacccttaagatatccccttggcaccctggtcagagactctgtgtctgactcaggtggtccctgcagagtgccctgggaagggaaggagcactgatttgggggttttgagggtcaagtaggggttggtaacacctggaaagaaggactctttcacttcgatccctggacaattatggaggattcggaggtagaagaggggaaggaagatggtttctatctcatgacccccactccctgtgagagggaatgggggaagcctgatgaccctcagctgttccaatctagtattttttttcttttttaaaattactgtatttattatgacgatggtgactccccagtgcaaaggggggccagattctgtgtgtttctctaacctctttgtaaataaatgcacagtgtaacatatgtggtggactctcactgaatgattaaatgggagaaatgctctttttcctttggactaacatttattgagcaacttctgtttgctgtggatatggcagtttccagggaggtcccagggtgaatctcaacatcatcttcctaccattggctattttacatcaaggaatctaacctttgattgggttatgtttggttataaatacgatttcaggcgggatgtgatggctcatgcctataatcccagcactttgggaggcaggggtagggggatatcttgagcccaggagttcaagaccagcttgggcaacatggtaaaaccccatctctacagaaaatacaaaaattagctgggtgtggtaggtcattcctgaactatcagctgctcaggaggctgaggtgggagaatcatgtgagtctgggaggcccaggctgcagtgagccatgattgtgt

SEQ ID NO: 91995 - DNA, 1129 bp, Homo sapiens
tgagaggggggtggacccggaaacagcctggcaccttgggggtggagcccagtgctggggcgggcctactggagggatgtggctacaggaggagccgtcctgtaaaagatgggctgggactcaggcctagactaggttacttgggctggaaaccaagtgccccagaagcgctgaggacacttggaaccttaggggggctgagtgagacttggcttgtctagggtgggaccaggaaagggactggacttgagggtaccaaagggctgcggtgaccaggagaaggggctgagcctcccaaggcattggctgggacctggagcctttgggtttacgaccccaaaagggtcagccttgcaaaaaggaggcaccggtgggtagggttgagaaacaagggcatggctactttgctgtgtactggggccgtgacttgggtgaagatgggcctgaagcctggggtcggttcagtgaccaagggagccagtctagggacgtggccgtggagggtttccgaagaggtccaggaacagggctgaccctgagtcctggaagctgggagtggatgggagtggggaggagaagggagccaggactgaggcagacattgcactctgcattctggggctttggtgttgtggctgggcctgatgaagtggcaccgggcctggtgacttgaacctacttgggaatgggtctgtaactttccctgcttggaaaagttaagtcctaaggcctggagctttgaggctgggtgtgggatggcatgtttagagggccagaggcagggctaagatactggggtgtgtcagaagccaggagaacaagggacctgtgttggagccagggagctcaggaagacagatggagtatgggaaggggggggatcattcattcatttatttataaccatttattcaacaagtacattcatgtatttgtaaccattgattcaacatgttgagtgcccacgatgtgccaggcattgactgttccagctctgggaatactgtgatgacttggacagaaggggtcaggtgcagggtagctcattgagtggtccgcgaagggtggaaaggggaagggtcctctctggagggtgcggcttcatggagcaggtggagcagggtgacac

SEQ ID NO: 91996 - DNA, 1049 bp, Homo sapiens
tctcatccccctttccacatatttgtcccttccaggggcccagtgttggctgtggctatgggcagcaacagtgaatactgctacagtggcggggcagatgcctgcatccatagttggaagattccagacctcagcatggatccctatgatggctacggtgaggacaacgcctcccgccttcccctcacatccactggggcctggccgtcccctccacgcacacacacgtcgcgtccacctcttgccaacactgcaggcctcaggagtgcgtgtgacggctcccctgtctgctctgttgtgagcagcgcgatgcagcgcgtggccaagggacgagccagccgggatgggaatgatggctgtgggaggaggtggtgaagctgcctgagaatctctgtgagccggcgtccagaaggcagtgctgaggcagcccaggctgggagcagcccatgcacaggcgtggctggccctggcagcctctgctctgccatgccgtgtactctgtgtgtggggatccgccagggtctctgcgtggttgaggggagggcatgtccagagaaagcagagaaggtggagttagctgggccaggctggagcgcgttggggctttctctttggagcatctaagacctaagtagggaagtgaccagactgtcacttctgttcaacatctgtccccctgttctctgccttttttttttttttttttttttttttgagacaaagagtctcactctgtcacccaggctggaatgcagtggcgtgatcttggcttactgcaacctctacctcctgggttcaagtgattctcgtgcctcagcctcccgagtagctgggattacaggcacgcaccaccatatccagctattttttgtatttttggtagagacagggttgcaccacgttgaccaggctggtcttgaactccggacctcaggtgatccacccaccttggcctcccaaagtgctgggattgcaggcatgagccactgcgcccggctctgcctccttgatcatgcacctggccctgtgctccaccttgtctgggcaga

SEQ ID NO: 91997 - DNA, 2376 bp, Homo sapiens
tggtcccccccatgcaggtcagaggctggcccctcactggtgcccgagaggtgtcgccaaactcagcctggggggctgacatgtggaaggggtcagccacgccctggaggagttcacagtgggcagagcttggccttggtgacctagggcaagtgggttcctgctgctcagcctgtctcctggcctgtaatgtgggaatgataatgacagtgttcacggtagctgttcgcagggttgggggttaagtgaagtcgtgtctgcgaggggtagtcagtggtcattcagtgagtggaatttgctcttgtgccagcacggctgctggtgctgtgtttatcgctgcaatgctgtggtccattcatcctcacttgtttgcacctccgtatattcacacacggacaccagtgcatatctgccctccctgcaggcagattgttgcattatctgacttttcttcatccgaggcaccttgctgggggactggagcaggctgagccctggctaggggaaggactgcgtgagggtggggtcaggccgaccggccctagtggtagcagctgtccaaggcccagcagggggcgctccagggcagctggctggcggctgaggcagccccatgaacagaaacgggcccagagccccggcttacctgttcctaggcacggaggtggcttagtctctggacaagaggccccctgacttgtctggctttctccatgtgccagctcccatccaaggctctggtgcccgaaatggaagacgaggatgaggaagacgactctgaggatgctatcaatgagtttgatttcctgggctcaggagaggatggggaaggggctccagaccctcggcggtgcactgtggatgggagcccccatgagctgggtgagctgacgttttctggccagcccccgcttgccttccccaccgagggggtgggagcaggctcagctgcccgcagctgcttcctgtacagggtctctctaccggacggatatgtttcctgagaggagggtagccaaggagagcaggaggcccaggtcatggccgccggcccctcaccccttccctggaaaatccccatggagacgcaggcagtcctggctcttcctgaagtggggccgccagccctccagggcgggcgtccagctctggctggcctcaaggagggaacaggatgaggacccagtcggggagaggcaggtgggagggccgcatcttcctccctgtcctgtgactcctagctaggagggctctcaggatacgtgggatgggtggctggggcctgaggcctaggcaaggcagtgacctgcccactgccccacggaggggcccaatcaacctcctctcctctgcccattccccccctcccccagggccagagcttcacagccccacagagtggcagggggccctcagtgtggggaaggcgtcacctatgccagactgggttggaactgctgggtgactccggccctatgcctcgaccctgcagaaagccgtcgggtcaaactccaaggcattctggctgacctgcgggatgtggatgggctgcccccaaaagtgactggcccgcctcctggcacaccccagccccggccacatgaaggtaagaggcaccccccacctggtcccagtcctgcgggcccatggcagagggaggctgcagagctgagcccagggcttctgtgtcttcagggtcgaggcccagcctccagtctgcagcctccctgccccaaaagttcgtctgtctgtctgtctccctctctttttgtctgtcctgccctgtctgtctctctgtctctttccagctgtgattcttcatcttgtcctctccccgtctctctctcttgctctttatctctttctctgcctctctctgtcattctctctctccctggccctctctgcccctccctcccctccccctaccaggttcctttggcttctcctcagacgtcttcatcatggacactatcgggggcggggaggtgagcctgggggacttggcagatctcaccgtcaccaacgacaacgacctcagctgcgatgtaagttctccgggtgccccccacactgtccccattggcattgcgcccagggccagcccctgcaagctctgactgggtgccgcccgtgccctgctcatcctgtttcacagaggggtgcagatgtagacagtggagggacttgactgcggtcgccaaggcgcagggcctggaagactctggagcctgtgttttaatcacagttccacggctcctccactctgcccctcccaccctggtgatttggaatgcaggaagatgacctgtagccaccccctgctctgccaagtcaggccaatctagtgtgaatgggcagctgggctgaaatgaa

SEQ ID NO: 91998 - DNA, 1596 bp, Homo sapiens
ggtaagaatagtgggacgccacctccaccagcagccttagggacagcacctgccagagggcgtcaggggtagtccagggcggtgaatgcccaccctcctctccactgccatccctgacccgacttccccccaaaggcagccaccaggtgaggcccaggctggccccattgttatctcaggggttaagggctccccttcggccctcgttgtgggtgacgtggcagggggccctggaaacagatccatcctgtcctctcagtgctccctgaaccctggcttgggatctttgtgcctgaggaagtggctgctgcccattactgtggggtgactgtgggctggcactatacctgggtgagtgatagacacaccggcattgagcctgagccccattatctccctttgcctcctgtctgccctcccaggctcaggtggccttccttcagggagagaggaaagggcaggagaatctaaagacggacctggtgcggcggatcaagatgctagagtatgcgctgaagcaggaaaggtgagccttcatcctgccctgggcctgccttctgggtccgtctcaagcacagtgtcaggaggccaccagccacgcctccttccagctaagggagatttggggtcgacattcttttccatcattccagtaccataagattctaggggagaaacaggacagagtaggtgggatttgggttagacaccaggaacgatattcacgatgctagtggcccactgtgcgccaaatatcgtatagtccttacctccgttatcccttataccttccaatagcctaacgggtattgttagccctgtttcagataaggaactggggtttcaagggctgatggtttcctcaaggacccctgagagcaacctaggttgcctgactccagggagtggtttcttccaccaggccaggggtgtggggggatgcttcagcctcagtagtagacgagctgggggaggccctgtgatttggggtttgggattctggattccttaggtaactactgaccctgtctactctcccgcatctcttattcattaatcatttgctcttttagggccaaatatcataaactgaagtttgggacagacctgaaccagggggagaagaaagcagatgtgtcagaacaaggtacccaccctctgatgctcgcactgtcggcaccctcccgcagaagctgagtgttctggagaagcaggaagatggggtgcctctttctcactttgctccttagaaggcagaatcggccccggggctggggaggggcggaatctcactctcagagccctccctatgggctgccaggtcccgtgctggaccctgggggccagtcccgcttgggtccccctgtgcaacagaggcagacacacgagcagctcacgggatccctttgcgaggagtgggcgccagggctatttatagagtgctggggacggtgcgggaaagccggggaagacgtcactgaggaggtggcgtttgaacagggttgccgttcaatcgttcatccaaaaaagactttatttgtagggtacaggctttgtatcacagatcaggaatacagcagagagcacgggagacat

SEQ ID NO: 91999 - DNA, 1011 bp, Homo sapiens
tgcgagcagctgcggggggcagaggccggctcggtggtggatgagcgcggcttcgtatgggagaaggcggtcgagggcgactttttccgcgtgcagtacagcgaaagcaaccacttgcacgtggacctgtggcccttctacccccgcaatggcgtcatgaccaaggacacgtggctggaccaccggcaggatgtggagtttcccgagcacttcctgcagccgctggtgcccctgccctttgccggcttcgtggcgcaggcgcctaacaactaccgccgcttcctggagctcaagttcgggcccggggtcatcgagaacccccagtaccccaacccggcactgctgagtctgacgggaagcggctgaagccctgataacctcgcctttgtttttcgggggtctgtctggatgtggagaagctctgtgtgagcggtgaggggtggagggatgtcgcggagaggggaagggggaaactgaccaagaaagaaattctaaggagagcatgagagaaggctggcattggcaggaggagagcaccaggacgaggatgggaagcgacctccagatttatcaaatggtcatgcccactgggagccgtggatatgcgtggggacatcctgggtcatctcagtcatggagggagacggggatgtcacgccgtcccgcagggcccagcacagccccagacccgaaaaaagtgttctgcccaagattccgagagccctgcgctctagggcaggggcagagttttggaaacagtgcaggctctggagccagactggcgagattcaaatcctggctctatcgcttcggagccaggtgggcctgggggggcgtcgcagtctctctgtgcctcagttgcttccaggatgcgggacccttggctgcaggggttgcttccgccactagagggcgcgccggtcccgctcctggtggcccactgtggctgcccgggcgacagtacgcccagggcctgtgttccatagccatctactctcttgagcctttgga

SEQ ID NO: 92000 - DNA, 1343 bp, Homo sapiens
gcctgggcaacagagtgagatcctgtctcaaaaaaaaaaaaaaaaaaaaattctggaattaattattggcaatggttgcacaagtctgaatatactaaaaaataccaagatggacacttttaaaaggttaattttatggtaggtgaattataattttttttcgagacacagtctggctctgtcacccaggctggagtgtagtgatgtgatcatggttgtgatcactgcagcctccacctcccaggctccagcgatcctcctgccccagcctcctgagtagctgggactataggtgtgcactaccatgcctggctaattttttttttttttaaatatatataaagatgggatctcactatgttgcccaggctgactccaactcttaatttttactttttagattccagggggagagaggcaggaggcttaggccttggccctttccttccctctcaccctctcccctcccgcttactttgctgtcatttctacccctttagcgaccggtcctgtaccgtcctcaatgtagaaggtgacgctctgggggcaggactcctccaaaattacgtggaccgtacggagtcgagaagcacagagcctgagttgatacaagtgaagagtgagctgcccctggatccgctgccagtccccactgaggaaggaaaccccctcctcaaacactatcgggggcccgcaggggatgccacggtcgcctctgagaaggaatcagtcatgtaaaccccgggagggaccttccctgccctgctgggggtgctctttggacactggattatgaggaatggataaatggatgagctagggctctgggggtctgcctgcacactctggggagccaggggccccagcaccctccaggacaggagatctgggatgcctggctgctggagtacatgtgttcacaagggttactcctcaaaacccccagttctcactcatgtccccaactcaaggctagaaaacagcaagatggagaaataatgttctgctgcgtccccaccgtgacctgcctggcctcccctgtctcagggagcaggtcacaggtcaccatggggaattctagcccccactggggggatgttacaacaccatgctggttattttggcggctgtagttgtggggggatgtgtgtgtgcacgtgtgtgtgtgtgtgtgtgtgtgtgtgtgtgtgtgtgttctgtgacctcctgtccccatggtacgtcccaccctgtccccagatcccctattccctccacaataacagaaacactcccagggactctggggagaggctgaggacaaatacctgctgtcactccagaggacattttttttagcaata

SEQ ID NO: 92001 - DNA, 1306 bp, Homo sapiens
ccaagggacagactggggacgtgggtgggacttcggctgggcaggtggtatgggcaggatctggtgggcggggctttggctgggcaagtggtatgggcgggatctgggtgggcggggctttggctgggcaggtggtgtgggtgggctctgggtgggcggggcttcaactgggtgggtggtgcaggtcagacctggagggtggttgggtgacagggctttgcttaggcaggctctggtggggatccactgggtggggtgggtggggctttggctggttggggtggggtaggcgaggcctcacctgggctggacctggagggtgggcggagccccggtcagcaggttaacctaactcagctcccccatcccttgcagttccgccacgctgccgctgatgatgaagtgcgtggaggagaataatggcgtggccaagcacatcagccgtttcatcctgcccatcggcgccaccgtcaacatggacggtgccgcgctcttccagtgcgtggccgcagtgttcattgcacagctcagccagcagtccttggacttcgtaaagatcatcaccatcctgtgagtgtcagggggctgcggatgggacccccggacccctgttgacccccatcttctcccacaagacaggcatctgcctaacctcccaccttctccctcagggtcacggccacagcgtccagcgtgggggcagcgggcatccctgctggaggtgtcctcactctggccatcatcctcgaagcagtcaacctcccggtcgaccatatctccttgatcctggctgtggactggctagtgtgagtgtgggtctggagactggggcagggccaggggtacccctgggaaagaggatgagtgagtgagagtccttagagcctctggacagaagaggaagagaagaaggaaggaattctggaggaaatggggggaaccttgagcattcctgagggcaaggaatggcatctttgtggctctaagagggatgtcagaaaagtagagcgtctgtgtggtgaatacagcagactcttcagccagactgctcaggttcacatcccagctccaacattcactgttgtgacctcgggaagtgcttaatcttcctgcgtctcagtttctccatctgtaaaacggggagaagaacagtctctccctaaggattagataacagacacacctcccttagagcagcccccagtaagcagtaattgctacataattatttgctatcacgattaagctattaagagtataaagattggaaagcagccaggcacggtggctcacacctgtaatccca

SEQ ID NO: 92002 - DNA, 1227 bp, Homo sapiens
tttttttttttttgagatggagtttcactcttgttgcccaggctggagtgcaatggcatgatcttggctcacagcaacctctgcctccctgattcaagcaattctcctgcctgagcctcccaagtagctgggattgcaggcatgcgccaccacgcctggttaattttgtatttttagtagagacggggtttctccatgttggtcaggctggtcttgaactcccgacctcaggtgatccacccacctcagcctcccaaagtgctgggattacaggcatgagccaccgtgcccggcctgcacggagagttttatctccgggctgctctacctttgaggggaaagagagcatgagattggcatgggggcttcaggggccaggcctgggagtggtgcccatgctgaagcacacattgctggggcttctcctgacctcaggaaggcaggaagatgtgggtagggtgctgagcctcacgcctggccactgggcccgtggaagaggcaacaagctgtctcctgtgttactgatcaggtacgcccctgtgggcatcatgttcctggtggctggcaagatcgtggagatggaggatgtgggtttactctttgcccgccttggcaagtacattctgtgctgcctgctgggtcacgccatccatgggctcctggtactgcccctcatctacttcctcttcacccgcaaaaacccctaccgcttcctgtggggcatcgtgacgccgctggccactgcctttgggacctcttccaggtacggccttggggtgggctagggtgggatgtttaatccgctaagcggcatggagcggatgaaattttctctgcccgggacattgtatctgggtacaggggccatacttcaggagattctcataaggtcctggatttatccccacccttaaaaagataggaaatgattgccctagagatttatttccctctttcttacactgcctccccgtggccctggaggcactcttttttttcttttgttttaaacaatggcgtctcgctctgttgcccaggctggagtgtagtggtgtgatctcagctcactgcaacctctgcctcctgggttcaagtgattctctgcctcagcctcccgagtagctgggactgcaagtgtcccccaccatacccagctaatttttgtgtttttagtagagacggggtttcgccatgttggccaggctggtctcaaactcctggcctcaa

SEQ ID NO: 92003 - DNA, 1080 bp, Homo sapiens
ccctgccagcccgcctggctgcccatccttaactagtgaccctgcccagattattctactctagccacagtagattatggctcttctttgaatgcccaagttgcactcatttctaggctgttgcacattctgcttcctctctgtagatctttctaccacccttctttacctggttcactcctcttgtcctccaggtctcagctcagatgctccttcctccaggaagtcccccctgactgccccctactccccaagctggcactgccctctcttggttcccacactcccctggactcccttattccagccccacctactctgggccatccctgacgactaatatatttcccctggacctggactgggagccttgggaggaaggggtctgagggctgccttgtctctgctgggtcccagtggtgccaaggacaggccctcagtgactgtgcaggtagactgagtgtcctttccaccccgatctgttccttgcccacaggtgcccgtggggcaggaggtggaggggatgaacatcctgggcttggtagtgtttgccatcgtctttggtgtggcgctgcggaagctggggcctgaaggggagctgcttatccgcttcttcaactccttcaatgaggccaccatggttctggtctcctggatcatgtggtaggtggtgggagaggaggctgggggtgggtggggttggagggtcggtctgctgccagaggcaggtgcggggcattctgtttgggatggggcaccctctattcactctttggagccagatgacctgcatttaaatccagcattgaccattccctgtctatgtgattttaggcaagtgattttccttctctgcttcagtttcctcatctataaaatgggaacggcactttgggaggaggtgggtggatcacttgagatcaggagttcaaaaccagcctggccaacatggtgaaaccccatctctactaaaaatacgaaaaaattagccaggcatggggacacgcacctgtaatcccagttactcgggaacctgaggtatgagaatcacttaagcctgggaggcggaagttgcagtaa

SEQ ID NO: 92004 - DNA, 1029 bp, Homo sapiens
ttttttgagagagtctcactcggtcccaggctggaatgcagtggcttgatcttggttcactgcagcctcaacctcctcgggcttgagtgatcctcccacctcagcctccagagtagctggaactacaggcacatgccaccatgcctggctaatttttgtattttttgtagagacacggtttcgtcatgttgcccaggttggtcttcaactcctggctcaagcgatctgtctgccttggcctcccaaagtgctgggattccaggcaagagccatggcgccttggccttagctactattttcatcttaaggcagacactgtcacacaagagtaagggtagccttgtaaacacagatgcatattcatgagatatgaagccgtcccttttctccctccccgccaccgcctcccaacacacccagatcctcccccatactctcagagccgctggcaggccctccaggaggaagtggctgatgcaagctgtccagggtattaagtttgctgcatggggtggagctgaggcccggggcgacctgccctggcctgccgtgggaggccagcattcctcaccccgaacccacaatgcctcagggctagcacgccagcctcttggggctgaaggaggctgactccccaagtcctgcaaaggggtgcaagcctagttccaaccctgccgggctgaggcatgagtaggggctgtatttgcgtgcaggcgggcccccaaagcttccactcgctgccttaaaacgccaacccagcctctcagacaatgctgccctcccactatggtatctaataaccctctgtgtgtctgtctctgcagaaatatcttcccttccaacctggtgtcagcagcctttcgctcagtgagtcctcaggggtgtcctgaggggatgggggtggacagggagggatgccagccagggggagcccttgctacctgattttggttagttcctggaaaaatgcatgtcaatgagaatacgggctcagagcctcctgtgagttttaattctagctgtgtgact

SEQ ID NO: 92005 - DNA, 2602 bp, Homo sapiens
aacccctgtggtttaagggctccaacccacaacccagttcctttggcgggaaacagcaccctcccaaggccccgccccttcctggccccgccccgtcgtctctgggcccggctcctggagatgggtattattaatctgccttctatgggggacctggcccatctcgggtatcagccccgcccctactcgtccagtctccgaacgctctgcagccaatcggcgcccgagggtcggtccccgccttctcaagccccgccccctacccttatccctggcagcttccgctaaacgggctcagagccacgcggcacgcccgggaggctttctctggctggtaaccgctactcccggacaccagaccaccgccttccgtacacaggggcccgcatcccaccctcccggacctaagagcctgggtcccctgtttccggaggtccgcttcccggcccccagattctggcatcccagccctcagtgtccaagacccaggcagcccgggtccccgcctcccggatccaggcgtccgggatctgcgccaccagaacctagcctcctgcagacctccgccatctgggggcactcaacctcctggagccaagggccccacgtcccacccagagaaactctcgtattcccagctcctagggccaaggaacccgggcgctccgaactcccagctttcggacatctggcacacggggcagagcagagaagcctcagcgcccagcctggggaatttaaacactccagcttccaagagccaaggaacttcagtgctgtgaactcacaactctaaggagccctccaaagttccagtctccaggtgctgttactcaactcagtcctaggaacgtcgggtcctgggaaggagcccaagcgctcccagccagcttccaggcgctaagaaaccccggtgcttcccatcatggtggccgatcctcctcgagactccaaggggctcgcagcggcggagcccaccgccaacgggggcctggcgctggcctccatcgaggaccaaggcgcggcagcaggcggctactgcggttcccgggaccaggtgcgccgctgccttcgagccaacctgcttgtgctgctgacagtggtggccgtggtggccggcgtggcgctgggactgggggtgtcgggggccgggggtgcgctggcgttgggcccggagcgcttgagcgccttcgtcttcccgggcgagctgctgctgcgtctgctgcggatgatcatcttgccgctggtggtgtgcagcttgatcggcggcgccgccagcctggaccccggcgcgctcggccgtctgggcgcctgggcgctgctctttttcctggtcaccacgctgctggcgtcggcgctcggagtgggcttggcgctggctctgcagccgggcgccgcctccgccgccatcaacgcctccgtgggagccgcgggcagtgccgaaaatgcccccagcaaggaggtgctcgattcgttcctggatcttgcgaggtcagctcccgctcccccgggaggtggggaagagtgttacggatggcgggagtggtcacgtggacaggacggggctttggggcccctggagcagagacttccctctagagtcttaggaaaactcgacaggatattgaggggaggctccagccctcgggagtgtgagtctagtctcctggggaaggggtttctaaatctgggggcctgggtacataagtggggtcttatagagggagaagaaagtgatttggggagacataggagggtctgcctaggggagaaagacactgaggggaggggaccccaggaggaacttttgcggggggaatctttgcgtggtcaagggccccaagatggggcttctagatataatttggggccagggttggagagtttgggtaaggagcccctggaggatctgagatctgagtaactcccaccaggccctcttcccagccctggggcacccccacaccacgtgtcactcggacataaccaggctctgtttttggcctccgcttcccgcccatttcagctggggtctggccgcttcccctttatcttttagatcagccctgccacccctgcctttccctcccgtttcctcctctgtctgggccaccccctagcaggcagcccagaagaggaccagttagaaaggggagcagattcttttccttctcctggcctctgccccgcgcccccaagaatggcctcccccactttgaggagggcggggggcagaggcccccttgcgcttgcctttagggcttgctcattcagtgtctccacgttggggacttcctggaagttgggggaaggaaatgatgagtcacggaacagggttctccagcctctggggcgtcagtgcaggctgagatgcgagactggggcaggcttggtgtcccgagttgaagcctgggagcaccttctggctgggggagattagctgggtcctggcccagcctgggcctgggtggtacaggcggaccttcaggcaggcacacccactccgaggctgtttatgagcacaggcctcccctgcgtgccaaaacagctgtagctcacacttggcctgccacacaggcttataaccaaatgacatacagct

SEQ ID NO: 92006 - DNA, 1049 bp, Homo sapiens
tggtgaagaggaggctgaaggagccagaggagggggacgggggggacccgtggtgcactagccacccggagcctctgctgaggtctgtgtcccagctcgaggggcatcagagccccagcttccagggtccgggccagcatcctggggggcctcgtctcaccccagggtctcccctcacacaggtttacacggtcgtggacgagatgttcctggctggcgaaatccgagagaccagccagacgaaggtgctgaaacagctgctgatgctacagtccctggagtgagggcaggcgagccccaccccggccccggcccctcctggactcgcctgctcgcttccccttcccaggcccgtggccaacccagcagtccttccctcagctgcctaggaggaagggacccagctgggtctgggccacaagggaggagactgcaccccactgcctctgggccctggctgtgggcagaggccaccgtgtgtgtcccgagtaaccgtgccgttgtcgtgtgatgccataagcgtctgtgcgtggagtccccaataaacctgtggtcctgcctggccttgccgtctttgagcccttgcctgtctcccctgggaaccagatacctaggatgccttgccttcagtccatcagtcagtcagtcaacaaacgcccctcattgtgctgagcaaggtgagacacccaggtgctcttcagacctgctcctgctcaccaagggcccccaggctggaaggggtgatgggtttagattccaggcacttgctactaaaataacaatactcagctaatgctgaagggcactcaccctctcccaggcattgttctaagcaattgacatgtcttaccttacttaaagctcactagattataagtctgggactattttttttttttttgagacatggtctcactctattgcccaggctggagtgcagtggcaggatcatggctcactgccgccttgacctcctgggctcagttgatcctcccacctcagcctcccaagtagctgggactacagatgtgtgccaccatacctggtta

SEQ ID NO: 92007 - DNA, 1041 bp, Homo sapiens
tagagtagctgctcaggaagtatttgttaaataattgagttaattaattccaggctaagggatgtgactgtctccagaggtagcaggaagtcacagaagggagtggcaaggttgcatggacactattgaacacgtcaggctcccgcccagccccgggcttttgctatctgcttagaacattcctgcctatcctccagctctcagctccgataccccctcctccaggaagccctcctgactctccaggatcagagggggttaggcaccctctttgggctctcacagcccatcctgtccattctggggatgcctgcccccgctgcactgtgagcagggttagggctgtctcggtcactgctgtgaccccagcacagggccaggcacagagctgggcctcgggaccacgtatggagtgaaggagtgaatgttttggccccactctgtctggcacgttaggtcctggcaatctccgttgctgacagcctctctgttctgcagttccggaactttaagatcatttaccgccgctatgctggcctctacttctgcatctgtgtggatgtcaatgacaacaacctggcttacctggaggccattcacaacttcgtggaggtacggcgggagagggatgtaaggtggggaggcgggtgggcagccctggagtggcccccaaggcctgggaaccctccctggtccctcctgagccctccctctgcagtgactgggactctccctctccatttcttttttttctttttctttttttttttttttttttttttttttttttgagacggagtcttgttctgtcgcccaggctggagtgcagtggtgcaatcttggctcattgcagcctccacctcccaggttcaagtgattctcctgcctcagcctcttgagtagctgggattacaggcacacgccacgatgcccagctaatttttgtatttttagtagagatggggtttcaccatgttggccaggctggtcttgcactcctaacttcaagtcatccttctgccttagcctcccaaagtgctg

SEQ ID NO: 92008 - DNA, 1229 bp, Homo sapiens
ggcctagaggggcagacaaagcagggcacagtggctcacacctgtgatcccagcagtttgggaggccgaggtgggagaattgcttgagtccaggagtttgagaccagcaacgtagcaagactctgtctctacaaaaaaaaaaaaaaaaaaaaacagagagagataagaggtggtggaggagcctgggactcggggccctggagctgactccagagttggagacttgtggaagggaagtcactccacaggggtgctggagggacccgggatgaagcgtgtggccaggccggcctggcttgggtctggggagcagccgagacccctggaagtcaggcagcagggaggccctgagccctatctcccctctgggtggatgggtggggccgttgggcagcacccaacccgccctctctgcctctctcacttcctccttctcctcctgctgcccccagatccgctttatcctcatccagaaccgggcaggcaagacgcgcctggccaagtggtacatgcagtttgatgatgatgagaaacagaagctgatcgaggaggtgcatgccgtggtcaccgtccgagacgccaaacacaccaactttgtggaggtgacgcccgctccatgcctcctgcaccccgctgcttcctcgtgccctacttcgccactccctgcccagcttctagttgcaagaaccccttggaccctctatccatcctatatcattcactcaacctgctttgagcttgcttgcttcttcccttcctttacttgtacttttcattgtgaaaaatcataaacatacagattagtacaatgaaagaaaagtagattggagattcgtatacctactacccagatttaatcagtattaatattttgcctttttgttctgcattgttattattaattttttttgcctacgattaaaaaagaatttttttttttggtcaaattttttttgctggtgcgtttttcaaacttcctatagaatgttcaaacacagaaaagtagagagaataggccaggtgcagtggctcatgcctgtaatcccagcactttgggaagccaaggtgggaggattgcttgagcccaggtgttcaagaccagcctgggcaatgtagcaagaccttgtctttattttttatttgattgaattgaattaattaattaattaattaattaattactttttttgagacagagtcttactctgtcacccaggctggagtgcagt

SEQ ID NO: 92009 - DNA, 1178 bp, Homo sapiens
cccctgttcggccaggcactgctgccccaggtcttccccttggactgaatcccgttccctcgtgggccctactacccgcatttcttgtctgccctctcgcagagcctgctgcaccccgggatgcccctcggctggctttctgacccttccgtgccccagctcattcccctgatcccctcggacttggctgcaccgtgcttgcctgttccccttctcagctcttgttcccgtttaccattcagaccctttcctctcttccagacctttctgcctctcagctctgccccttgcccgacctcagatcttgctgcgctcccctcacctgcttgcttctgactctgccttcccgggaagcagcctcctcccccttctctgactctgcaggtctcccatttctgctattcacttaaatgatgtatccctaactcagactgccttcagtttcagcccgtgttctcttggaggtttcctctcttccccacctcctttttggcactcctctgagctactgcattcatttgcttctcctttctttggcctgtctctccttcagttctctgcctgaaaactgcttcctgtcccctctttgctccaattcctctcctccccgttttagcccttagacatgccctttaacctcactatacctctgatacctcccgggctggtcacccatccccttcctgttctgcatctcacagacctgcccctagatccattttgtacctacactttcttctcgtttttttcaattctgctccatcctctttatttagtgtttccctccccagctcggctccttcggagctgtccacttgcccgcatatttttagaccggtttttaacttctgtattgccgtcctttcttggagcggtcctttaacactggggttcttgtcactgtgtcccctctctgttccctcccgagtcttttaagttttccacatgacagtctcttccccccaccattttgattcagccctcacccttcactctgctttatttgcccaccctccactgttctgcctcttgtcttcttttggagttctcactccaattgtgacattacgatgtcttcttaatcattctttcctatgtattcccccccaccttcctcttggagctgcctcagtgctgtgatagattatcactcccctttgatatccctctcccaattc

SEQ ID NO: 92010 - DNA, 1037 bp, Homo sapiens
cctgggtcacttaccaagttagagttggagcttaggactaagctcctgttgctactctttgattcctctctcacctgccaatccccaactgcctgtcatcaagtcccgtaacccagagtctgtgtagggggctctttccctgggagatgcagtaaaatgaactggattacctttgttgtatactttttcagatataaaataaacactgcctgtttttcaaccattcacatggagattactttataatttagggggatggggttatccagattatattagctacataactaaaaccatatacctcttttaaaaacgatatggaatttttcaagctgagtcattgttgacctaggctctcaaacagcaatggtctgaacagcacttgtattgctggcattaagaaatgcaaacaaataattcgtgttcatcttcccaaaacttttgatccagtgctttatcaggcttcatctataaagaattcttgaagataacttttggcatctgtcaatctaattttcatttatttgcttctctgatactgagaaatgccattaagttgatatattagcagagaaccagatactttcagccatgaagtatcattacaggaaagtaatatttattttagttgaaaatagccagacttgcctatctctctcatcttcctttattgaaacgaacattttctttttatgtactttgcagcagttgtgactgttgtattatagatctgcaggtatttcctgcctcttttgctctcctgatatctctgcattcttacttggatgatgccctcgtcctggccactgtagtaaactggtaattgcatttggacaattgagaggcggcttcctatgatgtaaagaacattgaagaaacctgggtcctagccctagccctgtcatttactagctttgtgactagccaaatcattttcatttctctggactacagttccttcatttgaaaaatgaagggattatactagttggttcccattctgccttattttgtggctaataatacttgattgtcat

SEQ ID NO: 92011 - DNA, 1028 bp, Homo sapiens
atgtgaatcaagattgtatacaaaagagatgttaactatgttaactatatgaatgtttataaatttaaaaaaaaatctaaatgttttaaccttaggggaatggtttgctttgtggaaaggttatggagtcattaaaaaagtatgtttttgagaatacttgacgtgggaaagtgcacacaaaataaaattaaatgtgggaaaaaataggatatagaactataaacagcatgagtccagttattttaaaatatatatgtgaaaaagtggaagaaatatgctgaagtgttattagttaactctgtgttgtaggattatgggtgattaaaactttttttttaattttcccaagctttccacaatgattttactatttctgattcagggaaaaaaagattaaacaagttttttttttttttgtagtgtggttgtgttgtgtttggtttttcttataaacatatgaaagaaaaattgagctgaaaagcaagaaattcatggtaagatctgttggactctagtacctttgaaggtaaggcattcaccctttcttagagaataatcaaattaattactaataaggctgggtgaggtggctcaagcctgtaatcccagcactttgggaggccgaggcgggcggatcacaaggtcaggagatcgagaccgtcctggctaacacggtgaaactccgtctctactaaaaatacaaaaaaattagccgggcatggtggcaggcgcctgtagtcccagctactcaggaggctgaggcaggagaatggcgtgaacccgggagacggagcttgcagtgagccgagattgtgccactacactccggcctgggcgacagagcaagactccgtctcaaaaaaaaaaaaaaattaattactaataatattaccaaataataacaatgaactgtttattacataccagaagactaaaaaatgttatctcattttctcctcacaataaccctctggggtaggtggtattcttaccttctaggtgggaaaccgaggttgcagagaggggac

SEQ ID NO: 92012 - DNA, 1050 bp, Homo sapiens
caacttctgcttgggattgttttgaggatcaaatgagaaagcactttaaagattataaaacacacttaccttgtttattatgaatacttctctccccccttggttttgccccccttggttttgacttaggttttttaaaagtttaaaattgaattgtaccaataggagtatgaactaatgatcccagggtttaggtagatttggggacttaaatctttcaataagtgatcctttagctagattgggatgtaggtttgtaatatcatcttcaccagtgaaaaatgtattgggggggaagtccatttatttatggatattttggatattttgtttctgccttaacataagttcgttcgttcgttctttctctttttttttttttttttttaagatttcaaactgtctctgccattattcttaaatacaactttatattggtgaaggctgcttgtcagggaaaaaccaaacttctctactgatttgggatttttttttaccataaattcagggtgcagttgttcttgaagtggttccattttgtgattaggctgagtatttttaagcacaactctctcccttgtccttagaattatctccagtatcctcaaaacaaagagcaaatgatgcaattaggatgcaatcccttgcctgtggatttcaaggaaaattattttccacactacttggaagctcatggacaaagtcaagctttctttagatctggtgaacttagaaaaaataacttgatgaagtgagattcttaccttgaggttagtttttgagagtggatcaatgatgtgaaatttctaagatattcttgatttataaatatcactttatgactcattccttggagcagtttttattttttcctttgaaaaactttagatgtaattgactttggtttacactctatcctgttttttggtttttttttttttttttttggagacggagtcgctctgttgcccaggctggagtgcagtggcacgatctctgctcactgtaacctctgcctcctgggttcaagcgattctcctgcctcagcct

SEQ ID NO: 92013 - DNA, 1043 bp, Homo sapiens
ggaggctgaggcaggagaatcgcttaaacccaggaagcagaggtttcagtgagccaagatcgcgccactgcactccatcctcggtgacaagaatgaaaccccgtctcaaaaaaaaagctataaggaagcccagcacagtggctcacacctgtaatcccaagcactttgggaggcctaggtgggaggatcacttgaactcaggagttcagaccagcctaggcaacatggtgaaaccctgtttctacaaaaaattagccaggcgtgatggtgtgcacctgtagtcccagctgaggtgtatcaccggagcccgggaggtcaaggctgcagtgagtggttattgcgccactgcacctgcactccaacctgggcaacagcaagtccctgtctcaaataaaagctaagaaggcaagttttgtaatagtactttgagcagcataaggtacatatacaaaatattgtgggaaatatattatgaagttttgcatctaggtacataagagactgtttccctcacagtggagagctttggtaaaagagcaagtggattagagcagttgtagcttctgttttctccagaaagctcacgctgtgcagcagctgtttttgtccattctggctttgcagcagtgcagtattggggttaagccacgtgtgtgggcctcagaggcaggcagctggggccatactaagccgggtgatcttgaacgagtctcttgacctctgcaagcctgttttctcatctgtaaaatggggattataatagtagctgctctgttgggttactgtgagaaatgcttaatatggattgtagggcatgatttcctatggtaaggtttttagaagtaataatggaccagctaaaaatgttcaagcatttatctactgggcatgttgtctttttttctttctttcttttgagacagcttcttgttctgtcactcagtctggagtgcattggcgcgatcttagctcactgcaacctccgcctcccaggctcaagggatcctcccacctcagcctcccaagtagctgggactacaagc

SEQ ID NO: 92014 - DNA, 1075 bp, Homo sapiens
tttgaagaatgcttttttgctttctgttagttacgatgtatatttccatttatttcccctattgagattaaggaaaattgtgataacaagtattttacttcctttgcttgtagttctgtatgaaattatttccttacagtgttactagttggtggtgttctgtatgtgattatttgaaactcagtgtgttttcagaagttgttgaatattctcaggtggagatggtcatttttattatggataatggtggaagatttttgtcttagggggcattctagattacagagcacacaaacatttcctacttcggggagagagggatgaggttgctgtgttggaagagtgatacacacgctgtgttggaagagtgatacacacacttccaggcgtatgctgatagagctgttgacagtatgaactttcccagtcatagtaaatctgggatcacggtggcatttctaggtcctacaaaaatgtgtgctatcttgggaatgttaccacttcttgccctgagtgtttcatagaggtgttaaaaaagaaaacaccctccttctaccttccagttgcggcactctggtggggaccttgtgtcttggttaaacaaatcacaaacaactctagatgcttggtgacagtctgaagaaggcacgtagatatttgcattatgttttattacagcatgtatttgtgactgagaaaccaaaatacttctgaagtattttcctctctgaagtagttgactcttggcataaaatgggaaactttgaagtcctgtgtttctgtttttctaatgaaatatctctgtacagctcaaagataaaagtaattaccatttttaaaggatccttctttcccctctgttttaactcttccatttaaaaaggattagcactggaaaattattagaatggacattcagattctgttgtgtatcttagttgcctgctaagaacactggttcccatcacatttaaactctaaagacattgtgaagtctggatatgcccggtctcctactttctctttctttgtggccttcagatcattaaatttagtgactcagctaatttttttt

SEQ ID NO: 92015 - DNA, 2906 bp, Homo sapiens
ccatacttaattattgtggcgctcaaattgtcccagagttggccagtgggagccccttcaggctggcttctgtgtccttgtgagatgctccatcgttttttttcttgcataaaaagatgttccaggctcattttgtccctatcctgccctaaccctggaatcagccctttttccagggagccctcacacccttgttttagcacttagcacactgtttacttatgttttcctccactggactagattgtacctctctggggacacatagatgtgagtcttacttgctcttgtatcttcacccagcacaaggcctgacacatgagatgtttactaaatatttgttgaataaaaaattaatttttactgtagttaattgattaaaatttggttctaaaattatgatgctgatgggttttctttttttttcccccatctaggaagaaatgttggctatttggcgatgagaggtggtgaacagtgaccatactggtatacaacactatgggacctggcatttttgctgcatgtccagcccacccccactaataatgtaggaagctgtctggtccattggaaacactaatctgatctcagaagtggctgatcgtggcaggatgtgtcgacgatgatgatggcaagaaagcaagatgtccgaattcccacctacaacatcagtgtggtgggattatctgggaccgagaaggaaaagggccagtgtgggattggaaagtcttgtttgtgcaaccgcttcgtgcgcccgagtgctgacgagtttcacttggaccatacctccgtcctcagcaccagtgactttggagggcgagtggtcaataatgaccactttctctactggggagaagttagccgctccctggaggattgtgtggaatgtaagatgcacattgtggagcagactgaatttattgatgatcagacttttcaacctcatcgaagcacggccctgcagccctatatcaagagagctgctgcgaccaagcttgcatcagctgaaaaactcatgtacttttgcactgaccagctggggctggagcaggactttgagcagaaacaaatgccagacggaaagctgctggttgatggttttcttcttggtattgatgttagcaggggcatgaataggaactttgatgaccagctcaagtttgtctccaatctctacaatcagcttgcaaaaacaaaaaagcccatagtggtggtcctgactaagtgtgacgaaggtgttgagcggtacattagagatgcacatacttttgccttaagcaaaaagaacctccaggttgtggagacctcagcgagatccaatgtaaacgtggacttggctttcagcaccttagtgcaactcattgataaaagtcggggaaagacaaaaatcattccttattttgaagctctcaagcagcagagtcagcagatagctacagcaaaagacaagtatgagtggctggtgagtcgcattgtgaaaaaccacaatgagaactggctgagtgtcagccgaaagatgcaggcctctccagaataccaggactatgtctacctggaagggactcagaaagccaagaagctgtttctacagcacatccaccgcctcaagcatgagcatatcgagcgtaggagaaagctgtacctggcagccctgccattagcttttgaagctcttatacctaatctagatgaaatagaccacctaagctgcataaaagccaaaaagctcttagaaaccaagccagaattcttgaagtggtttgttgtgcttgaagagaccccatgggatgccaccagtcacattgacaacatggaaaacgaacggattccctttgatttaatggataccgtccctgcagagcagctatacgaggcccacttagagaagctgaggaacgaaaggaaaagagttgagatgcgaagggcgtttaaagaaaacctggagacttctcctttcataactcccggaaagccttgggaagaggcccgtagttttattatgaatgaggatttctaccagtggctggaggaatctgtatacatggatatttatggcaaacaccaaaagcaaattatagataaagcaaaggaagaatttcaggagttgcttttggaatattcagaattgttttatgaactggagctggatgctaagcccagcaaggagaagatgggtgttattcaggatgttctgggagaggaacagcgatttaaagcattacaaaagctccaagcagagcgtgatgcccttattctgaaacacattcattttgtgtaccacccaacaaaggagacatgccccagctgcccagcttgtgtggacgctaagattgagcacttgattagttctcggtttatccggccgtctgaccggaatcagaaaaattcactctctgaccctaacattgatagaatcaacttggttatattgggcaaagacggccttgcccgagagttggccaatgagattcgagctctttgtacaaatgatgacaagtatgtgatagatggtaaaatgtatgagctttccctgaggccaatagaggggaatgtcaggcttcctgtgaactctttccagacgccaacatttcagccccacggctgtctctgcctttacaattcaaaggaatcgctatcctatgtagtggaaagtatagagaagagtagagagtccacgctgggccggcgggataatcatttagtccatctcccccttacattaattttggttaacaagagaggagacaccagtggagagactctgcatagcttaatacagcaaggtcaacaaattgctagcaaacttcagtgtgtctttctcgaccctgcttctgctggcattggttacggacgcaacattaatgaaaagcaaatcagtcaagttttgaagggactcctggact

SEQ ID NO: 92016 - DNA, 1300 bp, Homo sapiens
cccgcctcggcctcccaaagtgctgggaatacaggcatgagtcaccgtatccagccacttcttgacattctttctagcagtttttataccactgcttcccttctggaagccttactgatgtttaagttacatgttgatactcactttgtttttgtgcttccctttctctttcctggacagaaaccaaagcccaaaccccggccatccatcacaaaggcaacctgggagagtaactattttggggtgcccttaacaactgtcgtgactccagagaagccgatccccatttttattgaaagatgtattgagtacattgaagccacaggtaagagtattacctcatagcagtttataactttcactgtctacaggatgcttactggagggtcaagccatctggagattctggaatcagttgttgttgattgtgagatgctcttggagaaggagctgagcagtcccaacagttgtcagatgtgtagattctccatttgtgtgcagttttgaggctgtcgttgggcatttattaggccttggcctacgaaggagctgttctgtgctcaaggtggcagctatggctgcttgggcgctttctctgtgctacctcacccaccagagcatcagcactctgtcagttgcctgcccgcctgtgttccctgcagatctgtgaactccttgagggttgtgctatcattgtgtcctcagtactatagtggatacataatacattttggtttagtaaaattaatacagccctcagcattgttcggatgcctgagacccatgtattgataggatttttttctgaggtaagaaaatgattaggatgtttgggatatcttctggttatgccgctcctctgacaacttgatgctatcacaaaggtagactgtcttgggaaatttttttgcattgttcttgaaataattaagttttacttgtgttgaaaccatttgctttattcatttgagctctcatgtgtccctttggccttccagtttcactaaggtgggttcttgagcattcggagttgggctcaggaacacaggcttaaactaatttgaaactaaggtagggattacagccttccaatctgttctttctaactctgatattatctacagtggtattaagtattgtgtggtgtggacagcctactaggctctgctgataatttcagcagcatcgtgtgaagctgagtgacagtgttcatatttacttaggatgttgtaaagcagggaagatggctttatttattattttatttttatttttatttttattttttgaaatagagtct

SEQ ID NO: 92017 - DNA, 1809 bp, Homo sapiens
tgtggtcaagaaatgaccagagagtagaacagctttcagattgatctgcagatgcttttaggacagcccagccccggacaccctctgtgcttgctgtgctaataggatattcgactttcactctctcagctccggttacatggaaaggctggatgagggcatgtcactgccacagctgctctgggaccgccactgagagtgggaaggaggcggggttgagggggagcttaggaggcggggttgagggggagcttaagagtcagactaactttctatttctagcttgaatgctttttttcctccagttttcatctttgtggaaaattggttgaggcaatggagtcactgctcccttctgcagcagtgtggctcctaatgacagagaacattggccaagctcatctgagctctctgatgcacagcaggaagtagaattattcaattcagtgtacctctctggaatggggcaagaggttacttttagagctggctcacaatcctcctgagaataatttctcagggtaaagtacactcttgatagctcatggtggtcacaagactgaggttttaaatcctgggtctcagggccaaatttgagtcaagccttcctaggattcaagaaatctgacagcataggaaccccctgaggcagcttccaagtgtcgtcacacctgcccacccgggacggtctcagcgttctggagacagaatcctagtgccccacttgccttggctctgctgtgtgtgttcccgggtccccagcctctcctcagcctcacttgctatttaactagaaatagcattctctacgcatgctttctttgaataatatgtgaggccagacttcgttccctgtttctgtgatttttaacctctgcttttggcagtgtgagaggaggcatggcaacagtgaggaaatgatttccctggccccagtcctttcttaattggtttgcttactgagatgaccaaccctccacatctctagccagtgctgtagaggccgagaagaggaattgtgcctagggagaaacagttttactggggcagaaggcacccatcttctctcttgagttatgatgtattcaaactattctatataaataactgccaggacacagttttgttagtgcagctgactttcagttagtccctctggaatgaaaagctgtctgaagtcaaggaaggcctggcaggtgttccctcaccccgctttctgttccatacatgtttcttgagcgttgatatggcctaggcctggctctgggcactccgtcatatatgatcccataagagatggtgttttgctctaagaacatgggtgtggtaggaagctagcccttgggaggggtcagggtacatctcagtcctctgtcactgtggggaggacctcagtgtcagtaaagttcagggttagtctggctggaaaaaaggtggcagcattgatattcccttccctgtatataaaaccttgagaggagtcctgcataaaatccggtggcagaacccaggctctgcctctcagggcagcacctacctgtcatagtaatttagctgaagttcacatttattttctttttcttattttttactttttttcagaaatggggttaccctgtcacccaggctgcagtgcagtggtgcaatcacagctcactgcagccttgaactcctgggttcaagcgatcctcccgcctcagcctcccaagtagctgggactacagaagtatgccaccatgcctggcttggtttttttgttttgttttgttttgtttttgtttttgttttgtgtgtgtgtgtgtgtgtgtt

SEQ ID NO: 92018 - DNA, 1113 bp, Homo sapiens
cttgtggtggtgtgtttttgtatcttcggggctgaaggagtgattctggcagggtgagtgtgggttccccaaagctatcaccacattcttgccccagctggatcgttgccatctactgaggcctggctggccctccattacctcgctgtggctctctctgtggttttgcattgagtctgtggtttgcacacatcttgatgaccccatggtttttacctgccgggccatcataggacagtgctctctgatgaaatgctggccatttgtggcacagagaagtaggtgtcaacaagaacacctagcagtgagacaagtcttcaccaagactccaaaatgaaaggttcagccttgtgggcagtttgtgaggagaggaaagagagcaagtcaagaaatgaggctcttaccccagtccctttacagggcgaatgtggagcccggcagctgtggaccagtttgtctccatcatttgcaggtcagaggttaccctcagctcctcagctgcaaatggaagccctctatcaaacggcctttgccagaatacttaggctgtgaccttccccctatgcagctcatttgcctgggtaaatgagtagagtgctttctgcgtggcagatttaaatttcaccactaattgatgctagcgtcttcaggggaaaatgcttgccattagatcacaggcctttgggagacagcctcataacaaatacatccaggacagggggcggggatggggaaagtacagaatgcagctgtaccgaaaggaactgtgggacgtgcccagagaaaccaactgagtacttttgaggcatgcccttggggactgcgcatgtgcatggttgtgccatgtgtgttttgatggcctttttttttcttgctagtgtatagtatgtacaggacaaacttggagccaaactgtctggaatcaaatcccagctctgctgcttacaagcaaatatttaacttctccattgttagtttccttgaccataaaatggggataatgatggtactttgagtcatgagatgattcagtatgttagagacctcataacagtacctggcaggttgtaagtagtcaatttgctactgttgttggtgttattattgaaatga

SEQ ID NO: 92019 - DNA, 1095 bp, Homo sapiens
cgaaacaaacaaaaatcccagctctgccacttggctaaactctttcacattgctgagcctctgttcttcctctgcaaaatgcagctaataataatgcccaccttattaggactatgaggattgtttttgttttgttgtgttgtgttttgttttgtttgagacagggtctccctctgttgcccaggttggagtgcagtggtgcgatctcagctcgcagcgtgcagcctcgacctcctgggtctcaggtgatcctcctaattcagcctccagagtagctgggaccacaggtgtgtgccaccacgcccagcagtttttgtattttttgtagagatggggattcgccgtgttgcccaggctggtcttgaactcatggccttgagtgatctgcccaccttgagtgatcccagagtgctgggattacaggcatgagccaccatgcctggccctacatcactctttaagtggtcctttgtgcatttatttctctgcctggctccagagagctggaggactgtgaagacactccttttttcgcatattcagcaagtatatattgagcatcttatactatgtgccatgcactgtttaagatgctggtgatacagcattggaccagacagacaaaatcctcaccctcgtgtggcatacattataacccggggggagacagataataagaagtaaaatgtaaagaaccttagtgattagtgtttgggaaggaaaaaaatgaagcaggaaaggtggggtatgaaatgtccggggtgaacattaacattttagataaggagggctggggaagagtggcttttgagaaggtcctgaaggaaatgggggagagaaccatgccatttcctggggaagaacctttcagacagagagaacagcaagtgcaaacgtccagaggccaggacattcctgggaaagagcttggtttttactctgagtgaggtaagaagccattgaggggtttggagtggagggacaggacttggcctttgcttaataaaataactggctgctctgtagagaacagtcctcgcccttgaggacttgtgtgttcttgttctagctgcctttctgcaaatctttctccat

SEQ ID NO: 92020 - DNA, 1113 bp, Homo sapiens
tagctgtccccttgtgttagggatactgtttctgtctgtcactccttagaagaagagacaggagggagcttgctctcctccctctgccatgtgaggacacgagaaggcagctgtctgtatgtaagccagcaggagggccctgccagaaaccaaataggctggcccctcgatcttggacttcccagccctcagaaccatgagaaaaagagagctattgttgaagccacccagtctgtggtattttgttatggcaacccaagcagctaagacagatggcaaggtgaccaactcaggcatcagaacacctgagagccttaaggcaggggccccttctttcctgattcatgtgtccccatgggacctggctctccagagtcctccatcagggatctttgtgtccacatgaccagaacacagcaattgggtcagcagaaatgggaattgaggcaactgaaagtcagaagggctgagacaggtggacgaagacgtggacaaatgccacttgagagccgtggtctgaagagatgagctcacgcctttgtgtagtgcccggctcccaggtggtttactgtttgaaatgtaagctgactgggtatcagacaactgaatcccactttttcaaacaaagatggtgcaaggccttgtgatttcaccccagtttgcgttctttcactcttggctggcatcctttggctatttaaattcgtagcctcccaacagtttttaaaaaacaaacaaactcacacaatttatcttttcatgtaagctgcaatttggttgaaacaagacctttctagtacatagtccaaagctcctgataactgaaactacaatcagtgtttctgttctgtgatctgttttttgttttaaaagccacaacagaaaaccttttcttctgttacggctgtcaggagccgtttgggcttaatcaataatgaggtgtttcacttcctggggctgggctatctgtggagagcacttacttctccgtaacccatgaagccagtgaaggaccctgaatctgggtaaattcaaaattcttctgagccttggatagtcttaggcatagttctggcagggtctgacttgaaaaagtaggttgtgtatttatta

SEQ ID NO: 92021 - DNA, 1049 bp, Homo sapiens
ccattgttggatctgtctgctacaagtgttactgggctggattcgaggactttgtttttccatctgccctctgtattttcctaggaatgcttctgtgaatacccccctcccacctgccaaggcaagtgaggcagcagcaccaggagagctggacccctgcacacaccaccactgccaccacgctgcctttgctccgctgcctggcttctctgtttcccctactgaactgtgaggaattggggcaaagactgcctcttctttccattacctgtgacccatagtaggcactcgggtatctattgaaggaattagtgaatttttctttccacggattgaattagattgggacaaagaaagaaagtcatggggtgcagggtgaattcttggggcttgatcacttcaagatctcatcttggcttaagtctgtcaacatttttctttttccttacccagccctaagctatttccattggcaatatattgcacacaagctgtgtttcacttcttaatgctatgggatattgctgctacaagagccatccttggtgtttgcagaaatatttgtgatttgaggaacccagtgcagtgtagagcaggtaatgtgggggagagcaaactcacacccctgcagtctctaacttgaaggactgtgcaagcaggcatgttccttacgtaggggtgcttaacctaaggtctgtggataggctatggaagtctgaactcctcaacattactgcggaaattttgtgtgtgtgcacacacacccaggtgtacacttgccctgtggatggtgcagagtctatacccttcatcaggagatcagagtgaggggcgtctcctcccctgaaaaagttagagatcactgttcattcacagcgtttgtggaaactataccactgatcgagagcaagccaggacgatgatgcagccttgttctcaagggatttataatctagtaagggtgaagatttcaccctaaaccatgtagagcctacaaaaggaggtcagggaggccagggagggctgggaggtagagttgttgggactta

SEQ ID NO: 92022 - DNA, 1054 bp, Homo sapiens
acgccaggctactttttgtatttttgtagtagagatgaggtttcgccatgttggccaggctggtctcaaaatcctgacctcaggtgatcacccacctcagcctcccaaagtgctgggattacaggcgtgagccaccgctcccggccagctaagtgtttagaataagtaatatgcatatattttcagctttataactaactgagaacaaattgcagtgttgtcctgatgggacacagcaggacaaaaggccaactatttcttgagctgatttcctacagctgctggtgaactaactcccagattgcttaatctaactgggaagtgctctttctttagacttaggcgtgcggcgcacagcctttcgtgagaggtacgaaagcagtgtctgcgggcagcatgacagatgtggccctgagcgagttccttcactcctgagtctccctgtccttgattgaaaaatgaagacaaaagtagcttccttgcaaagtacttgcacatattaaaagagataatatgtaccaagtgccaggctggagctcacattgccaggccctgtgctaagtgtttccatgagtctcatttaagcctcatagcaaccatattagatagctgtgatttccaattttctcttaagaaaaatgggattcagaaggatgaagacagaatctgggattcaaacccagagccattgcctgctagccacactgccttcctttactggagtgaattgaagcccacagaagacagatcaggtggagtcctggctactcacagagcaatggaaacaggcagatagtattcaaccctgttcccctgcactgaagatttacttccaaacctctcttaactacctgaggattttttttcttcctgacaaatctgtacattttcttttcttttttaaaaaaattgagacaggtcggctgcagtggctcacgcctgtaatcccaacacttcgggaggccgaggcaggcagatcacctgaggtcaggaattcaagaccagcctggccaacatggtgaaactctgtctcttctaaaaatacaaaaattag

SEQ ID NO: 92023 - DNA, 1051 bp, Homo sapiens
tggtgcttaggccagagggcttcacccaagtgtggtgctgcttctgagaaacgggggtgctgtggtctgtaccccagcctggtggattaataggaagcagcagaagcttgagccaggtgtcttctggaacactaaggaggcaggacagtggcagagtccccggactcagaccactctgcctcttagcagctatgatctggggcaaggacttcacctttctgaatcttagtttcctcatgtgtgtattctctacctacccaatagctcttcccatgaggtgtgggagattaaatggcatcatcgtttatttaataaacaagcaaatggtggatggggacaaagcacctagctcagtgcacagcgtgtgaccactctgatatggaaagtgccagcactctcccaggcgagtacagcagtggcagctcctttgtaactaggcgttgcttggtaggatgtccctggggttggtccattaacctccttttctctcggggaaagggccttggtgcaattaacagcttttaagccagagaattgatgcctcttgctccagtgttcttgaagcctcaagaagtctgggacccccagaaaacaggcaggccagttgcttttatcttgcctgatggctgtctctccagaggtagcagtgacaataacaaccaacacgtggctctcggaagcctgactgactccagggcccggtgctctctactgtcggcactgtttctgttgtccaggggcagcacccacagtgcttcctctgtgcaccttcagcaagacagagtcgctcaaagccagtcttcagaagggacccagggttgctttagccatgagaccccatgtcagttttcacagtgacttcactgtcctttcgacaaagtccttgagatcttgatggctcacagtggacttcgttcccaggacagggtgagtggactcagtagacagcttggaatccactctaagctgaacagtgctcctctgcccacggtaggatggggagggagtgggagcccatccttcccttgatattttattctaacttacgtat

SEQ ID NO: 92024 - DNA, 1292 bp, Homo sapiens
tggtggggggttggggacagctggaaggtgccaggtgcacttggggttggggttggtgtgttgggtgttgaagtggaatcgtttcatcccagccatggaggccaccagcaggagtgttcatggggatgtgggcgaggtggggcactttgaaggaatggcggtctgctggtgccctcgaaggggcatccttcctggtcttcgctgacccagaggcgctgtgcctgcatatcatccaccaccaccctagcccagccttcccactgccccaggaaaagctcttctcctggccacctctgccccccagcacctcaaacttgcatggctgggctgtggcctctgcggccaggaagcctgacactaggcaccccccaggcgagagctagtggggtgcagagggccccatgccagacagcccttggggctcgttgcactttaagaaataggatctgtggtgtattccagggggcctgatggacacctttcccgggcgtctgcagctgccctgcccgtgcccgcctgcagtggttggagacgggagtggcccttcggctcccgagctccctctggggacggctggctcactgtctccagttctcaatggccaacgaaggtgcttggaaacacctaaccttgcaagttttaccgccttttgaggaacacaaatcggagaacaaacccagggttcaggcgtgttttctgtgaatgttggatgatgaatttttgtctcttctggtggagctgtgcctggccctgtaggcccagggttggctggaaggtgacatctgtgtttcgttttagctgaggttggcagaaacgttcccaaactcccccagccctggaccccagcagatgaggaaacggccccatttactgaccccgcccccttttcgaggttatgctcacctggtcagctcctcacgtaattgggggtggagggaaagcatggtggtgccctgggccgtccctgtgtgaacgcaggcaaaagcagcccagtccccctcactgcttgagctaacactgccacctcttttgtgtgagcacaaaagccacgtcccaagccacctggcccgattccacagatgtatgtgcggccagtgacttccccaggagtgtggagggggtggtgaggaggagcacctgggctctctacccctctcctcacagaagtacctgaaactaggtctggggcactcccaatgcagcgccttgtcagccaaggtgggcaggcagggactgtggcagcttatgtccaaagggagcccccatgcacaggaagccacagggttcctctt

SEQ ID NO: 92025 - DNA, 1073 bp, Homo sapiens
cgcccccctcccatcctttcctatgagaagccactgctttgggggcgccggctagaaaaagtagggtgcggtggccaggagggcccctgccgcgcggggggctgggtctggttgagtcgctgctttcccgagggcagcgcagggatccggggaagctgcggcagggagcgggcgccggcttcgtggctctgaggtgtaacgggggtgggctccctccctcggaggacatcgtctgtgtccaggtcagaaagtggcccaggaagggggcagtttctgtcgcgggtccggtgggggcgcggccgcggtgcggtcggtgcagcgtggccaatgcgcggcgcgcgcgggggacagagcaggaggcggtctgtcacctcggccactgctgacctgggctggcctcccccagccctcccgtggcggagccggcagcgatgctacaggcctaagttattgtttgcataaaaagaatcatgttccctgtgtacatttaagaaaaaaacaaaaaaacggaaatgtcagaattgtatggaaataaaacttgtttgaaaatttggaatagtgctgctgccagcttatttttctggtacttgtattttcacatgttaaatgatctttatatatgttgaattaacaaatattttgagtttctgagaaaaaacaaaacatattaatggtattgaaatgtgttagtagtctggctgtgtgcccaaaattctgtttcgcagcaaaagtgaagacctgtatgtaaagaaagtataacaattatttctttgtattttaggggctttaaccggaacatcgtctagctggtgttaggaatgtttgcttaatttccagacttttttttaaaaacacatcgtgggttttttgaggctccaacctgattagtgcatggtcagccctcaatgaaggctgaggcatctctgactgaggtgtttttgtttggttttgttttttaaaatcatgtatttgctacaaagtattgtacttgtctcaatgggaatggtgtaaaaaacaaaaggccttatgtgatctgtatcatagttaataaatgaatcttgtaaaaaaccaaa

SEQ ID NO: 92026 - DNA, 1264 bp, Homo sapiens
tgcctctgggccacttgaggggcctcaggaagtgtgtgcttgtggctgcatctgcccgtctccctggcccaccatgtggctgcaggccaagctcttcattgctgaccatgaagagacctagttacctgccaagggattccccttccctcctcctcagggtggggtgaacaaggctcctatcccaccccaccccaaaaagagaaaaatgaaaaactcatagtttggagccaggaggcagggtgtcctacagggctgcacagccctgaggggtcagtgctgggatctggttggttggtttgtctttttgtctttttttttttttttttttttacacaatcattaatgagatttgtcttcagccaccagtgttggccttgaagcagagggcacagcccttggtgtttgtaaaataagtatgaatacacagtgtggcagtgttgtggtttttgttgttgtttttcctctccttttgagaattttcttttgtaaaagaaaaatattttttaaaccgaaatctgtggatgaaatagaagctggagccctcctcttggaatattcagcctaagaacctcataggactatgaattcacccgaaattctcatttgccatcaggccgagcttttaaagaaaaattgttctctaaccaggattgtaacaaaagtgtaaatactgtttcagagttgagagttggtggtgcaaatatgtatataatgaactgtatttttacaatgatcgccgcatgactatttcacaccctttttatactccatatctgtcttccagaaacgtcacctgcctttctcctgtggtctcttaatccagtaattgtattactgccattaaaggatgcagttattttaaaaagcttgtgggtctggtctctccaggctgccccagaccatcccttgccctgggaattaacgagggtggaaggtggctggggggtgaaacaaggacctattctctcagcggtcggcctcagggtaacatgaggacactgagggacaatttgtgcctccaaacagtgtcagctgtcctcagtggatggcagtagatcacctactagcaacatcccaaggtccctgagcttctgtgcgggccacgctcagcatttgggatccaggggtgacctgcacagtcctggatctgcccctgcagtgctcatagaaagaccattaacacagacaggacagctgggctggcttccagggacgggacgagctttagcaggcaccctacccatgtgatagccaggggtatcct

SEQ ID NO: 92027 - DNA, 1750 bp, Homo sapiens
ccggaaactggtactcaagtgatgaggatgagggtggaagcagtgtcacctccatcctgaagaccttgaggcagcagacgtccagccgacccccggcttcagttggggagctgagcagcagtgggctgggggacccccgcctccagaagggacaccccacaggaagccggctggctgaccctcgcctcagccgggaccccagactcacccgccatgtggaggcttctggcgggtctggcccaggtgattcgggaccctccgatcctcggctggctcgcgccctgcccacctccaagcccgaaggcagccttcattccagccctgtgggccccagcagttccaaggggtctgggccgcccccaacggaggaggaggaaggggagcgggccctgcgggagaaggccgtgaacattcccctggacccactccccgggcaccctctgcgggacccacggtcacagctgcagcagttcagccacatcaagaaggacgtgaccctgagcaagcccagcttcgcccgcaccgtgctctggaatcccgaggacctgatccccctacccatccccaagcaggacgcagtgccccccgtgcccgcggccctgcaatccatgcccaccctggacccccggctgcaccgcgctgccacggcagggccccccaacgcccggcagcgcccgggcgcctccacggattccagcacacagggcgccaacctccccgactttgaacttctgtctcgcatcctcaagacagtcaatgccaccggctcctcggccgcccccggttccagcgacaaacccagtgacccccgggtgcggaaggcccccaccgaccctcggctgcagaaacccacagactctacggcctcctcccgggctgccaagcccggccctgctgaggcgccctctcccaccgccagcccgagtggggatgcctccccaccagccaccgctccctacgacccccgcgtgctggcggccggtggactgggccagggcggagggggcgggcagagcagtgtgctgagcggtatcagcctctacgacccgaggactcccaacgcggggggcaaagccacagagccggctgctgacacgggtgcccagcccaagggtgctgagggcaatggcaagagctcggcctccaaggctaaggagcccccgttcgtccgcaagtctgccctggaacagccagagacagggaaggccggtgctgatgggggcacccccacggacagatacaacagctacaaccggccccggcccaaggctgctgcagcccccgctgccaccaccgccaccccaccccccgagggtgccccaccccagcccggggtgcacaacctgcccgtgcccaccctcttcgggacggtgaagcagacacccaagacgggctcaggaagcccatttgctgggaacagtccggcccgcgagggtgagcaggatgcggcatccctgaaggatgtttttaaaggcttcgaccccacggcctcccccttttgccagtagtgtccagccagagctgcggctccagccacccttcctagggtggcattcagggcagcacccagggtagggaacttgggggcaaggggaggcaggctgggtgttccttttttcttttctttttcttttgctttccgtctcttttatttttttttaaagtagtactttctttgagatttgtaaattgtatataaccatcttaagttctggtcagtgtggcgggctcaggggctcctgctgagcaa

SEQ ID NO: 92028 - DNA, 1097 bp, Homo sapiens
acgtagggaggctccatgctgggtttgcctattgggtcaggtcttcacagtgaagactgcagtgggaaggattgggaccacctgtcgtcaggctgtgtggaaacgggttatggtatgagtcccctggatggtcaccatccttcaaaaaggagcagtgtgtaggtggggacagtgttcattgttccctacctgacgctctcctgccctctcctctgcgcattccagtatggagagagtgaggagccaatgggagacgacgactatgacgagtactccaaggagctgaaccagtaccgccgctccaaggacagccgaggccgaggtgggcaggggcctggagaggacacgctgggtggggcagggattccagcagctgctggaatctagtcctgggggtgggggagggggtggtcagcaggtcttcacacaatctcccctccacagggctaagtcgaggccgtggcaggggctcccgaggtcgagggaaaggaatgggtcggggccgaggccgaggtggcagccgaggagggatgaacaagggcggaatgaacgatgacgaagacttctatgacgaggacatgggcgtgagttgactccactctgatctgatgtttgggccaaggtcccttcttagtcctttttccctttaatgagtcattctgtgaagctgatccttgctgccatcagccaccccccaaagggctggccagtgttgaccagcataaccagcgacaactagagttatcctggggagatgcgctgctgctgagaccctgtgtttaaaaccatgtcattagcagcacctgcagccatacctaacacatctctgaggttcagaaggttctaggtgaaccatccaattagccctggaaggttttgcagggagacccatgccaccacctctgggtgtggtggacgtgttcctgcacagttgtgtggaacttgaggtgtaagtggctaacagctctaaaggctagagcttttcctcaccaggcagcaacaccccacaccgtggggcttataaggtgcacgcagcctccgtgttagatgcagcctgcccatcggtgctcttgtgagatctgaagggacccctcatc

SEQ ID NO: 92029 - DNA, 1043 bp, Homo sapiens
taaatcacaggtccaaactacagggctagcttgtcttgtcagacttcaaggctagcatcttgtagtttggaccagacgtgttagttgcacattagcccatgggctggtgtttgccatattggacagtgcagttctaagtagacaagtccctgtgaggaaggggagtgagtactggagtagctgtgtgtctggggtgctgagggacccccattgagagaaccagagggtccagtagcctacctggggcatctaggaaggcttcttggaggaggaggaggaggagaaggaggaggaggcagctgaagtgattgacctcaggagcaaaatgtgggttgtcttctttcttgctggtggcatctgctcctgctggaggctcactatctgaatctccatgcaggcagccgaggccggggccggggctacaggggccgaggaagccgtggaggatcgcgaggccgcggcatgggcaggggcagccgaggcaggggcagaggctctatgggaggagaccacccggaggatgaagaggatttctacgaggaagagatggacgtaaggtttcctctggccctggggacgtcggggtgaggctggtgggctttccggggcgtgagcactgctggtagaggctgtgaggccaaggtaggaagacatacggcccttctgaaggaagggaagcctcagagcgcagatgtatgtgtttaaaaatattcatttatcattttggaatagataaaaccttcacgtggtttaaagtagaaaaggtatcggctgggcgcggtggctcacacctgtaatcccagtactttgggagcctgaggcaggtggatcacgaggtcaggagatggagaccatcctggctaacacggtgaaaccctgtctctactaaaaatacaaaaaattagccgggtgtggtagcacgcgcctgtagtcccagctattcatgcaggagtctgaggcaggagaatcacttgaacccgggaggtggaggttgcagtgagccgagatcgcaccactgcactccagcctaggcgacagagcaa

SEQ ID NO: 92030 - DNA, 1183 bp, Homo sapiens
ggagagagacttctgtggtcaagcaaggtttagaagtgccccaagtgcttcacagcagagctgtgtgggtttctggactatggggcttcctggaagttgtgcagcgttaagcattatgaatccccaagatggggctcttcctgcttatgtgaccacagcaccttgtcggtttcttcttctaagaacactagttctgttgggaaatctggcgtagatgtgtcccggtgttagtggtaatgcccttaaactcctacccctcccccagccaggttagactggagcaagcacagttctttcagggggaggataagggatggaacaagaggccatggcccccatgtcctcccagggtctcacttcgctcacagcagtcaggccttcggttcctgtcagccttggccagcccagagccctaggaggtctcctctcaaaccctgtgttcatggtgggattggggtttgtttgtagggaagatggagagttggaagaaggtgaattggaagatgatggggcagaggagacccaggatacctccggagggcctgagagaagccggaaagaaaagggggagaagcatcacagtgattcggatgaggagaagtcccacaggagactgaagcggaaacggaagaaagagcgggagaaagagaaaaggaggtcgaagaagaggaggaaatccaagcacaaagtaggtcggagatcccctgggactgccactgcctggcattgggcctggctgagagccccaggggctgagcttttgctgtccaccccagagggcactcttaatgcctttgcttatctcaaattggataaagaccttttttaaaagagttggtagcttatgcttcattgccactaagtgccccaggtgaggtgtttcaggtgaagcgcagagccctgcggcacatgccagcatagtttgtcctgaggctgactgtgcccgagtggcctgcctgtggcaggttgctgagtctccttcccctgtcattacagcgccatgcttcttctagcgatgacttctctgacttctcagatgactcggatttcagccccagtgagaaaggtcaccgcaagtacagagagtacagccccccatatgcgccggtgagtgactggcatgcactgctgagctctggggccgggaggagttcaactgcttgtgtttcttgagcacttgctg

SEQ ID NO: 92031 - DNA, 1955 bp, Homo sapiens
tgaaatgtcacagtactgccttttttccccccagactgatgtaccagtattagttaaaaatcaaattaatggatgttgcaaaaaaaaagaaaagggtgtcactcagaatccctgatttaataacaaatcttattatacacttacaaacttttacatttttattttctctgggtgagagatttaacttgaaagcaaatcaaagtctcctagtagaaaaaaagtctgttgtgaccatggaaatatggatgttctcgtcataaaacccctttattttttaaaactcctttatttttttaattcccctcaaatttgctctttaaaagaaaaaaatgcggttccccaaaatgactaattcatggcctgtcctctcccccaggtacaattttgctctgctctgaaggtttaaatttttgatttctttataagccatagttttctctaagtagagccagctattttagtaagccactgctgtggtttttccacagccaggaaggctgatcccaggggagaattgttttgtacctgtggacctggctgttcaactgcctggcaagttaaagatgaacggttttgactcttgcgtttccatacagttgaatgtagagcaatttcatattgggcctggttagtaatttatttaacggtgcctacacctctgcttcttgctcttagatcttttaccttcttccctgatgggagagaaatggctgtctgagggtccttcacttccttttgttacatttttatggctattgggcctgtagaaacatctctccatagaggtcagatccagttacagtaaatacctctggtgaaaattgctaatgaaactatttccaggtctccgtggatagctatcaagtcaaaccagattctagagaacttaattttggtccccacgaacagtaattctagtgccagagcaactgggtccgattcacaccgagagttgagtgacagagtgaatagcaagcaaagtagctgaattgagccaggcgcttaacctgtgccttggcagcacagctaagaaaaaaggatgactcctgagatttctggcaattggtatttattcagcagatcagagactgtaggagcagcctcattggtggagggactcctctccgaataacatggtatgaagccagtttcataattaaaacctaataggatggaaaagctgccagtttgtctgggtggcatgtcaagttcatggggataagttaaagtaaaaatgagattgattggggggagccaaacttcatgggtttgactcccagtttcttggccttgtctttgctgcagaacgcttttgcttttaggagttaatgcagatgcagttttgaagacattgtgtacagtttcactggtgatgtaatgaggtgcgataggcagtttattttaaatagatttctggcacatcacccattggggtgactcttagtagttgttgacaaaaatgaagatacggcctcttggttggtgctagatttagttgtgtcctgttactttttttttttttttttcttaacagaacgcaggattatttgctgagagcatagtttgctgcttctggccaaactggtctgcataaaggatctttctcgtgtattttttttgccatttcgcatctgtgtgaataggtgactcagtgccctgtttgtcaggcaagtggtgacatctttttgaatgtcggaggtggcaacaggatgtggaggaagactgtggactttggagccagataaaactgttcaggcctggcttctccccggcagtgtgcagtaggcatcgagtataaaatgcccacttctcagggtccttgtggtcaaatgagtgcatttggggacacccacacaatgccagcattcagtgaatcttcctgctttccctactagagaagaatttgaaacagaacttttacagttggtgtataaacagaagtaagaataacatct

SEQ ID NO: 92032 - DNA, 1137 bp, Homo sapiens
ttaagtccgaaacgcgggccccccacgcccttctctggctggcgggtgataatggggtcagcccggcgcgtttcagggcgaggttggggccccgtttccttcccctgctcgagcagaaggagttggggtgcagggttcgcccactgtttcctggtggggcgagagaagaggcggctggagagtaggtttggacacggacggtgggtttcagccggcaggaaagcgagtcttggagggaatgggggtggagaggggaagagaacgctctggacagatggctactccgtcgcagccctggctggggagccgctgaggacccttccttagccggggggtctcagccagggcttcccttgccaggctgtacgtacgaccccttctccccactcccacctcccctttcccctttctccttcacagaccatactttgccttttaaaagaaatgccacccacattcagagacacaagtgcagcagtttggtgagcttttacaacattttttttttctgttttgttctaattaaatgtatcgtcctgggaatcgcagcccatcgcagcccgactccagttcaaggaaataaacagattagcaaaggtctgttcgctaagccctcgttgggcttccgggccccctctccgggggcaggtgcattactcaaaggtgcttacacgctttattcgacctctaaggagttctcttatgtcagaagtgtatgtcttacaatgggttgggatggtaagtagcctcttttattgagtaattcaatgatctccctctttttctccctttactgcctgccttcctcctcgcctttagaccaaagtgatgcttgagagtgaattgatatgttcgaatcaggattctaaccctgttgagcccttttagacttgcacatcctttcaatgtttaatttttaaaatttgacgtacacagttttctcagaaaaaaaagtgtgttactgtaacatgacaaaaatcgatgtaaaaggcccgtatgttttcagacccttggcatccttctttccatttcaatccattgctttgtctccagccttcatctttgaagaaagtggatacttcaagtccatttgtaggagacaagcttactggatttgatttatgatgcaggtattca

SEQ ID NO: 92033 - DNA, 1023 bp, Homo sapiens
gtagctgttgctggaagagttcggggagggggagtgcttgctggtattgactcagccatgataaaaaagcctttttttgaggaaatggcattggagttgggttttgaaggggaaaggcgtaggtaggcattgagaggaagaaatggtgcattttgcgagggtggaatgttgtgattaaattttatttaatttttaattaaattaatagcaaactcttaccagcagaacttaaattgtgtgaaaattattcttagttattactaaatccttttcagtatgaataatacatttgctgcagaattattaatgagtttggttacatgatgcagcccaagatcttgatgagttgtttcataatacatgatgtaaagtctgtatttcctttttgaaatctgaaaaaattgtgactctgaaatacttctggttcaagagatttcagataagatatagttgacctattctgcttcctactgacctcagagaagtcttgggatggcctgacctctgattgccttttttcagcctcatcttctgtcactttacagatttaaaaagctaaaaacaaggctgggcacggtggctcatgcctgtaatcccagcactttgggaggctgaggcaggtggatcacttgaggtcaggggttcgagaccagcctgaacaacatggtgaaactccgtctgtaccaaaaatacaaaaactagccaggcgtgacagtaggcgcctgtaatcccagctactcgggaggctgaggcaggagaattgcttggacctgggaggcggaggttgtagtgagctgagatcacgccactgcactccagcctgggcaacagagcgagactctgtctttaaaaaaaaaaaaaaaaaggtaaaagcaattcctgtgtacatgctcttttcatgccaccatgtgttttgcttgtgtgttatacttaactagtgcctcttctcagcacctcttctgctgtcatgctagtttgagccaccatcatcctccctcaccttaactgtgacatcttcctacc

SEQ ID NO: 92034 - DNA, 1744 bp, Homo sapiens
cgaactcctgacctcaggtgatccgctggcctcggcctcccaaagtgcggtgattacaggtgtgagctaccatcccctgctgacataatgctgtttgattaatattataatggtagagcccaactccaatgtagctttctctgaccaggctcatcttcaaggtgaaaataagtgctgctctctctacattcccatgcctcagtgacattttatttattttatttatttattttgagacaaagacttactctgtcgcccaggctggagtacagtgacacaacctcagctcactgcaacctctgcctcccgggttcaagcacttctcctgcctcagcttccctagtagctgggattacataattacttcatctggttgtaagaatccaacattggaggccaatcacagaacagtgcgattctgacaccacaggtgtgaggccactgcacccatcttagagcgtattatgtagtttacattcaacaagcatctgagagcacctactgggtgccctgaagtctgctaggtgctggtgatagaaagatgctcacggtttggttcccattctcaaggtttttttttttttttttttccggaaaccatagcaggctccctgactgaggttgtggtacatgaaagatttcctggagtcctgatctgagctaagtcttaaagaacaaggagggttgtcaagataagagcctgtgttttaggcaggggacatagcagtgtcacaaaggcaccctacagtgtggtagaaatggaagctaaaagtagtttggtgtttttagagtgtgagacccaaagtggtgggtagggacaggttgctggtgaagtccaagtcaggaggggctcctaggaagccccactgtaagcttttacttaatcctctgggtggtgcagactcactgaagagtttcaaatgacaggaagggtgacatggttagctttgggctttatgtgtagatcagtaattactgtataaactatggttggcacaaaatacagggcagaagaccacttagaaggcagtttttagtagtttaggtgagaggtgaaagtggccttgctgatagggatggcaggaagcacacagatgtgagaaatagatttaggtggtagaattgggaggtctgtgtatgggagcttaaggaaagccaggaataaccagagcagctgacactgaaggggctaggcactgttctcagagctgcagttgtattatctcattgagtcctcacaacacatctgagatcaaggacccattaccatccctgttttacagatgggaaaactgagtaaaaggaagaaaagtactggcccatccaaggccccagtagttagtggtacggccgggacccaggcatctgactccagagcccatgttctcagccacctcactatggaccactctcatggaaatagcaaggatatgaagatgaggcttctggcttgagtgactgggtgggtggctggtggactccggagacagcacacagaagcaggcagacatgtagggtttatggatatctgagagaaaacggctggtgggcagtacagtagagaagactcaggtggatcaggaagaaatctgcaccagaaagagtgatttgaaaaataacagcagattttggtagaaactgaaagaggcattgagttggtttatggagctatacagagtggaaagataagtaattctgagatggaagcttggggacagccacacctaagagggcccaaattgag

SEQ ID NO: 92035 - DNA, 1060 bp, Homo sapiens
tcgtgatctgcctgccttggcctcccaaagtgctgggattacaggcgtgagccaccacgcgtggccctcaactgtacgtttttatccatgtcctcgttttatatgggattcccacattcttgctgaggttcacacagttgttgagccaggatttgaatcaaagattgaatccagcctgaattatttcagagccttactgttaaccattgtgtggtacagcttctcagcacataatgagatccctgaagaagcaggatggaatgggtcaaggatacagggttagcctagaatgggaagtgggccagctcattttcttggaggagaaggtagtaagatagagagtgtgctgtggatggttggtaggaggtgttgaggggagattacttctgttgtacctagtcttggtgaaggtggcaaggttatttgcagagattaatggttaaattagatgtttgatgtgtgaagaaatactttgagagcagtatggaatctgtaatcttactggtggctattaggggattatattatcctgtctttgaggctctgctctgctgatgttcagccttaggggtgaaataattcctctgttccagtccccactcatctctccacctctctgagttctttttttttttttttgagacagagtctcactctgttgcccaggctggagtgcagtggcacgacctgggctcaatgcagcgtctgcctcccaggttcaagcgattctcctgcctcagcctcccgagtagctggaattacaggcgtgtgccaccacgtccggctaattttgtatttttagtagagatggggtttcaccatgttggtcaggctggttttgaactctggacctcaggtgatctgcctgcctcggcctcccaaagtgctgggattacaagcgtgagccaccgcacctggccatagtctatctatgttttttaaaagttcatttcaagcattcttaattgtgtctgatttttgcacaagtttgattttttttttaagttttctcatgaggttgcaatttttgttgttttttgagagagggcctctctgtgtt

SEQ ID NO: 92036 - DNA, 1072 bp, Homo sapiens
ggctgtgcacagtgtttcatgcctgtaatctcagcactttgggaggctgaggcaggcggatcacgaggtcaagagattgagaccatcctggcaaacgtggtgaaaccctgtctctactaaaaatacaaaaattagctgttgtggtggtgcgtgcttgtagtcccagctacttgggaggctgaggcaggaggagaatcatttgaacccaggaggcggaggttgcaatgagccgagatcatgccactgcactccagcctggtgacagagcaagactgtctcaaaaaaaaaaaaaaaaaaaaatttaggtggtaggtattttagctatcctttaaaatttaaagattctttttaagatttattttccctaaaaatacaagacttaaaaaaatatgtgtattattcctaggtaactccagaagatcccggagctcagttcttgattcgtactgggtctgttggccgaaatagggctgaagcctctttggagcgagctcagaatctcaaccccatggtggatgtgaaggtggacactgaggatatagagaagaaaccagagtcatttttcactcaattcgatgctgtaagtttcttattataaaatctgctgtgggaattaaacaaattaaggtgctagttgtatatactttcaaatcccaaagcaatctgagagcattcaaatatcaaattctgagctttttcccaagaaaatgtataagctgttctattgtttaggcttagtatattgtgtgaatgtgttgctagagaggtccagtctgttgcatctgctgtagttgttggtgacttgctgtctgctggcttcttctctgggcatatgttccctcagccaggtttcgtctttggtgttttgtcttccttccagaatctttgcacataactttaatccatgttattgcaaatgttttcttccgaaaacttaacaagttggtgattaatttctgtggcagcggcatttttttgttagaaatatcaaactacagcttgtgttttgtcttaagaaaagcacacctgatcttgatctatgtctgtctgtctgtttctcacagtcacattg

SEQ ID NO: 92037 - DNA, 1190 bp, Homo sapiens
ctctcaaagtgctgagattataggcatgagccaccgtacccagcctatattttttttattgtgacatttaatgcacaaaagaagatatgcagcatcaatgcagataatggaacaaaacaaacactatccgccttaaaaacacaaatatttttggtacttttgtaccaatctgtatgctgtttctctatcttctacttcttctccctgtaccctcaccaggtaagtaaccccagagctgctggtacatttgtgtggattaaaaaagacacctggaaggggcagatacagccctgcttgacttcctgttttatcacgtgtttataaatctaaacaatgacatggaacttattatacaatattttaggcataaattaagaatgatttcgctcaccatcatagacctaccactcaatttgaagcatcaaacattactggtatggtgaggccctctggctgtccctccaacagaagttaccaccctcctcagttgggtttctcattcctatgcatttcttcttactacttatgtatgtatttccaagcaacacatagaattgctttgcatgctttttatcttcttaaaaattggttttatattgtatgcatggtgccacctgcttttaaggagaagcaacacgtttgtgaggccatctgtttatatgttgttctagggctttgctgtccattttggtagccactagccacagctggctgtttaaattaattaaaatcaaatcaaatcaaatatttagttcctcagtctcactggtcacatttcaagtggccagtaagcacatgtggccattggcatctgtattgcatagcacagattacattctgttccatcatcacagctagttctcttggacagccctgcagggcatttctttttggtttttgttttgtttttatttttgttttttgctagagtctttgttgtgtaaatacattactattttatatccatttttctatttataagcatttgggtatgctcataatttgctgttacaaattgtgctgcataagcattttgtttgtgtgtgtatagatgatctccttgggcaattgtgttaatttctcttgggtatatacctgggagtaaaattaagataagggcattttcagctttaccagaccccgttaagttactctcaagtggttttatcaatttatattctagaaccaac

SEQ ID NO: 92038 - DNA, 1052 bp, Homo sapiens
tcttgcccctcattgtggaagtattcctgtagtatgaatacagccagaggttttttagttttgttttggtttttttgaggagtcttactccttcatccagaggctggagtgcagtgacgcgatcttggctcgctgcaaactccacctcctgggttcaagcgattctcctgcctcagcctcccaagtatctgggactacaggcggccgccagcatgcctagctaatttttgtatatttgtagagacgggggtttcaccatgttggccaggctggtctcgaactcctgacctcatgtgatccgcctgcctcggtctccaaagtgttgggattacaggtgtgacccaccgcgcctggcccagtgagagttaaagggccagagtggaagcaggtctttggaagcttggctctgtcttccttcagtgcagggagtttgtgttgtccatccccagcctctacagaagcacacagtgagtgttcaataagcatttcttggatcaaatggcccctgcttcttttaatggtcagtaaactttaaataatgagatttttctgcaatagagaagagcaactgccttgtgattggaagccagcatatgttattcctaagcagttctgccttttttccacagaaggtggtcttctgccctgttaaagaagccctggaggtggactggagcagtgagaaagcaaaggctgctctgaagcgcacgacctccgactactttctccttcaaggtgaggtctcaaagcacaacttaccccgggagagcttttggctctgatttctgcaaatgtggttgcaaggtccagatggttttgtgatgtttgccttgggtggcattcttcattggctagttctcagtgatcacttgagaaaggggtggtcacttgaagggggtgaggtctaccattgagctctgggttctaatgacttctcctttttttacttgttgaaatgacctccctgtcaagttgaccttatggtaatagtgttacaggtcacagattgagaaacctctttttttttcttttttctttttttgagacagagt

SEQ ID NO: 92039 - DNA, 1008 bp, Homo sapiens
ggtagttttttaaaaagtattttttttaatgttatttatgcatttatttttttgagacggagtctcactctgtcacccaggctggagtgcagtggtgcaatcttggctcactgcaacctccacctcccggttcaaacagtttccccgcctcagcctcccgagtagctgggattacaggtgcccaccagcacacccagctaatttttgtatttttagtagaaacggggtttcaccatgttggccaggctggcctcaaactcccaacctcagatgatccacctgcctcggcctcccgaagtgctgggattacaggcgtgagccaccacgctcagctggatgaactatttgaaagtcccgaatatccatttgtgtagaaataaatgggttgagcaggaatgagtgttgcatgtgagtgggctgcactcagaaaatgcctcctcttgatagtgggatcaggtgtggaagaggcaccagcagtaagagcagagtcttttccatgtgggaacagtgcctgggccctttgggagaagcttgttgctcactgcctcgcacatagaaagccctcaggaaacaatggcgctaatttgccaaggtttgggtttgacttgagcatctctaactgctgcttatgaaaggagtcaactgggctgggctactaaaaatacaaaaattagccggatgaggtggtgtgcgcctgtaatcccagctactcgggaggctgaggcagaagcacttaaacctaggaggcaaaagttgcagaatccgagatcatgccaaagcactccagcctgggtgacagagctgaactccatctccaaaaaaaagggggagaaacagagtcaatcacagatcatctactccagagttgaaaagtgtacacgccaaaaaaaaaaaagagaaaagaaaaaaagcacatatcttcacggatgacagagttctctaggacttgctctgtgccgggcgttttccatgtatatcaccttcatctcacaaaggccctcaggcaag

SEQ ID NO: 92040 - DNA, 1028 bp, Homo sapiens
tagctcacattactgaatccagatagctaggagtgacttgcatgtctgcatttttctatagcacccaggtttctcaaatcagccaagttaggggaaagtactgtcataggaaagggaagcccatttcccaggtcaaagcctttgcttactcgtttatgtttattttatttttgagacagagtctagctttgttgcccaggctggagttgcaggtgcaatctcagctcattgcaacctccgccttttggattcgtgcaattctcctgcctcagcctccaagtagtggggatcacaggcacacgccaccatgcctggctaatttttgtatttttagtggagacagggtttcgccatgttggccaggctggtctcgaactcttgacctcaagtgatccatgcacctcggccttccaggtgctgagtttataggcatgagccatcgtgcatagcctgcgtttttcttttaaaatgtgttaagcactgtatttcaaattacatttgtgcactgaagcagggaggaaaaaggagctaacccaagtagctgttcaatatagtattttgactgcataccctcaaagtaaagaaaaatctcacctggcgcggtggcttatgcctgtaatcccagcactttgggaggctgaggtgggtggctcacagggtcaggagatcgagaccatcctggctgacacggtgaaacctcgtctctactaaaaatacaaaaattagccgggcgtggtggcgggcgtctgtagtctcagctacttgggaggctgaggcaggagaatggtgtgaacccgggaggcagagcttgcagtgagccgagatctcaccactgcactccagcatgggcgacagaacaaggctctgtctccaaaaaaaaaaaaaaaagaaagaaaaatctctagccggtcgcgatggctcacgcctgtaatcctagcactttgggaggctgaagcaggtggattgcctgagctcagaagtttgagaccagcctgggcaacatggtgaaaccctgtctctactaaagt

SEQ ID NO: 92041 - DNA, 1061 bp, Homo sapiens
ccctggaggcagaggttgcagtgagccgaggttgctccattgcactccagcctgggtgacagagcatcttaagaaaaaaaaaaaaagaaaaactctaaataaatattgaactctgcttagtagggattttgttttcagatgaggtcttgctctgtaccccaggctggagtgcagtgtcacgatcataacttactgcagcttctccctcccagctcaagcaatcctcacatcacagcctcccaagtagctgggattataggcaagtagcagggattacaggcatgcaataccacacccagctgattttggtattatttgtagagacggggtttcactgtgttgcccagggtagtctctgtctcctgggctgaagtgagcctcctgcccaaagtgttgggattacaggtgtgagccactttgcctggcctagtaggtttgtttttcacagtgataggggttagcaattctgaaactacttactgttcttctaagattgagcagataggtaagtatagtgttaatagtgagaatcaagttttcttattgtcagaaaagggtgttcctatgaatgtggacagtgggaaaggctagaaggagccatgtggtattggattggaattgaagttatctggatgaactcatggtttcttatacgtagatgtagtaatagatgtatgtgtgtatgcatatccacttttacacgtgtttatttcctagaattgtttcctagaattgttgagagggtttatgcccagagacatcccagaagcactgaacgcactcatgccaagatgttaatacctttcctcactaaagagaaaccagggttccttggagaaatggctgtttccagatctggggtaggaaaattacaggtgagcttggaatatcctgctatgccagaaagtaaggaagtgctctaagaatgataggggcatgtcaaaagaacaagaagaataatcaattaatgtaaacaaggaattatgaagataacaaagtctatctttgactatcaccatagtagtaacaattgtttcaatcaagaatcaaagtgctaaaat

SEQ ID NO: 92042 - DNA, 1267 bp, Homo sapiens
ctcagcctcctgaagtgctgggattataagtgtgagccagtgcacctggcctctttttttttttttttttttttaattttacagaattttttttttttttaagacagagtcttgctctaaggctgtagtgcagtggtatgatcacagcttgctgcagcctcagcctcctggactcaagcgatcctcccacatcacccttctgagtaggtgggattattgtaggctaaatttttaattttattgtagagaggcctcactccatggcctaggctggtcttgaactcctgggctcaagtgatcctcccacttctgcctcccaaagcattgggataacagacgtgagccactgcacccagcctgttagataatttagaaaattttctttcctcattcttcaatttcccctcattcacactcccaactttcctgttttgtgatttttaaatgacgttgtctttggatgccggctggatttggtgattagttctcttcagaagaaacttcttattttagaacttgtaacctttgcaaagcaggccataggcagccatcgctatttgggtatgacattccccagtgggtttttggtgtccagtaatgacaaaaactgctgagaaagagacagccacagggaaatgggttccgataatggggcagcagctgagtgcttgttgatttgctgctgtcatgaccacagatgtttaaaaataatttgtaaggaaaaagaaaaaagcgtagtgtgtgtgtgtgtgtgtgtgtgtgtgtgtgtgcgcgcacgcacgcgcgcgcgcacaccactgccttatcagtggtagagaatgcagaccacagtcattcagaaaggaagaaggcaccaccatggaaacaggagaggtgaggagaagggcagaggtgacccacaaatgcggctcagtgccttacagcagagagctcatgagagaacagaactggttagtcaccgactctgctcctcggtctgcaagagaggttcagcaccaagtctatactacacagtactggaaggattagatgaaggcctggcacacattgtgaattaatagttactggttacaggcggggtgtggtggctcaggcttgtaatcccagccctttgggaggccaaagtgggaggattgcttgaggccaatagtccaagaccaacatgggcaacatagcaacaccctgtctctttttttgactgtttttttgaaacagtctcgttctgtcagccaggctggagtgcagtggcacaatcttggctcactgc

SEQ ID NO: 92043 - DNA, 1372 bp, Homo sapiens
tgaggaaattgaatcttggaagggctaagtcatttgtccagggtcatcacacgcagtaagtgttagagtctaaacgagccagagctgtcacactgtcatccccagggccttgtgtttaagcatcgcccaacaaagtgctcagtcagactttaattattagcattactaataataccattatgatgattattttgtctaaacttcacaggcacctcgtgacattttcttattccacttttgcagatgggaaactgaggcccaccaagatcagattacaataatgggcaacattgtcagcaacctgccttgctttttttcttagcaggcccacatctcccccactcccccacccacttggcagtagcctgtgtttgagctgctcacaggccccaaggcccagctgcaattcttgtttaaagcctcacatcttttctctgactgtcagacaacagtcacgggaatgtcctgtgccatcttccctcggcaagaggggttggcagagagcagcagatgcctagagtcaaggtcatgtgctgctcaagtgctgggctggagacaagaccctctctccctgctgcttgtgaccaggcagggtggctctgaatgtagagggctctgtcagaacagttctgtgaccagagggtgtggttggcaaagcaatgcattaggggcccatggaagtttattcttgttgtccacattatttccctgtgacttttagatttttttttcctttttgtaaattagttttttcatactagttagaatgtttcaccttaaaggtgagagtcaagctctggaatcgcctgacatttttaaggaaaggaatagaatattgggctggggctagtctgaaatggtggtttgtattattttaaattgatgggctctgggttaggggagccaaatccattttaaagtgatttttgtaaaaattggcatgtcttctgtttcttctcttttccaaaggtgacactataacgtagaggttaagaatgtggtgacttttaaatccgtcgtgaccataagcctctcctaagccccagttttcctaccactaaaatgggggtggtaacagttgtacctacctcattctgtcttttttgttttttgcttgtttgtttgttttttagatggagtcttgctcttgtcgcccaggctggagtgcaatggtgtgattttggctcattgcaacctccacctcctgggttcaagcgattctcctgcctcaacttcccgagtagctgggatgacaggcacccgccaccatgcccatttagtttttgtatttttagtagagatggggtttcaccacgttggccaggctactcttgaactcctgacctcaggtgatccacccacctcagcctcc

SEQ ID NO: 92044 - DNA, 1334 bp, Homo sapiens
ggaggagtctacgttcagctgcagggagccagggaattggggccgaggtgtctggcacagaaaagctttgggcctgtctcaggtaaatgaagttttgatatagattcaactcccctgccccccacaattgaactgtttttgggggccagcaattaggggctaatttgtgacagtgactttattttcttcctactaaagtactggtttattcggtggccttggtgattagatttaggcataatagttaaatgtaatagaagtttatgtaacaaacagtgattaataatgttgctgtccagattcccgttatagcgctaacctgatgttatgaactgagattaaatttgaatttgagtgcttacattattttgtaaaggtggttgtatattcacatatccacagttttttctataaataacgtgaaaccgtgcttggtttctcttttccaaagtttgccttttccattacatgggcaagtcctgaacctaagccgagacactagtccatcatctccagcaatgaatgtcatccccccagacttcagcatcctgagttaattaaaaggtgcagatgaagttaatcaagtttggaactctaattttgtgcagtgttttgatacgatttgatgagtcatcttttggtagagcacctctctatccctgacagtgtttgatcttaacggaacagttttataatgtgtaaactggtgggaggtgctcttcagaaatgcagtcaacagtggtatgtgtgcgtgtttggctcttggggcggggcggaaagcagaacaaaggagaatttaataagcgagaacttgtcaggggctagggtcagttctgaggctgctgcctgtcaagaacatggctttcttcctgcccccctccactgctgctaactggagtctgaccttcgagaaagagtgaaaaaagacagcttctgtttgttttgctgcaagtaagtggctggactgattggcccccttcccagaggccctgcaaggacttcagatgtggtcagcgaggtatgtggatggtgccagcctgccggccctcgtccagccaaactgcaccaggaacaggcaagggtcccagagaaacagcggggtcagctgctgccgcctttgctcctgctcttaatgctgtcctatttcttcctaagaggaagctggtttactctctcaagattgatgggcaaagttttatatgaccacggtctccacttctcacccactgaacttacagcttgaaattaacagaggcgaggcccatctggaaaaatgcatttgacaaaaacttgatcaaatgggggatcccctgaggtgggtggcaaagaaccag

SEQ ID NO: 92045 - DNA, 1057 bp, Homo sapiens
tactaaaaatacaaaaaattagctgggtgtggctgcaggcacctgtaatccccagttacttggcaggttgaggcaggagaatggcttgaacccgggaggtggaggttgcattgagccgagatcacgccattgcactccagcctgggcaacagagcaagattgtctcaaaaaaaaaaaaaaagaaagaaaagaaaaagaaaaagaaattacctcttctctgatatgcagagccccgtctatactggacaggtggaagttaccagagaaatacaggccaggggcctttgtctgacattggcactgagaaaagcatagcccagaagcagggtgtgtcttttttttttacctgggcatctgtggtttgagatcttcttggaacactttataacccatttctgaacgtctcccaggcttcagtggagccacctgttgtagcttctaaaactgtgtcctcctcagttgttctcccacccattgccttcacagatgcagagaccaagattcactcactcgccattggacctttagcacccaggtctgtctggcacaaagtaagtgccaggctggtggagtgaatgaattctacttagagaatggccctcaacacaggctgctcattaccaaaactatttggtctttaaaaagtgtgactctgatgcttcagtctggggtgggtaccaaatacttgtattttttaaagagcctcacagcaacttgaatttaccttaatttttatgtaggaacccttgtcctggtagagagtataatttgctgaataagtctactttttcaatcaacatatacggaagagatatcaatgaaagaactgacaaactgtaaagccccctctccaggtgtaaagcactcagggcttgggcctagaagctgatccatgtctctgtgtctgttctgaaatagcctgtgtgatgtgggagaaagagtattgtccttagagacaaggctcgagactggctgtgccctttccttgggcagtatgtagggaacaagaatgcctgcccgcccgcaggcaggttacctgtggacaaggtgtagtggg

SEQ ID NO: 92046 - DNA, 1498 bp, Homo sapiens
gctgtcacagcacttttcacagtaaggtaaattgcttttataattattggattgcctctctgactatgtttgttgaataaataaaaaaaggtggccaggtgccgtggctcacacctgtaatcccagcactttgggaggccgaggcgggcggatcacgaggtcaggagtttgagacaagcctgaccaacatggtgaaaacccgtctctactaaatatacaaaaattagccaggcatggtggttcgtgcctgtagtcctagctactcaggaggctgaggcagaagaatcacttgaacccgggaggcagaggttgcagtgagccaagattgtgccattgcactccagcctgggcgacagtgtgagcctccatctccaaaaaaaaaaaaaagtggctttataacctgccttctttttcttattcccagtgctcttaaagttccgtacagataaaggaagagatcccagttctgatacatatgaggaagattctgagttgttgctccagatacgaaatgatgtgcttgactcactgggtattagtcctgacctgcttcctgaggactttgtcaggttggtgtcagtatttatcactgtttagtctggacagataaagtttgttttcaggatttgccttaatttgacaagctcttttattagaaacccttcagagagcaccctgccacattctgctcgctcctgtagacttctgcctctccactagaatagcaatatataaaaaataaagaggggacagattctgatttttacaataagtatcttatattcacgtggttcaaaattcaaggcaatgtaagatctgtaaacattattctctaccttttttcactttatgtgatcttgttatctcttggggacatctccagatcagtacatagtttgctccctcttttccacagctccttagtattctagagtgtgaagcgatggagtttattgaaccagttgcctgctcactcaagttgtgttcaggcttttctaactgcgtaacactgcagtgtgtgaccttgtgtcgtacgtgtgcaggtacaactgcaggataattaggaggaagggagttgctgggtcagaaggttgtaatttatcatttggtcagcattgccaccttgcctccattggtatcctatcaattcatacccccagcagcaaaaccacccatgttcccagcatcctctcacttggacactccatgctttcaccttacgtgactacctttttgctctcataaacaggcttaggatttgattggagaagaccacatagtgactaggtcacaatctctctctctcttttttttttttgagacagagttttgctcttgttgcccaggctggagtgcaatggcacaatctcaactcaccgcaacttctgccgcctgggtccaagcgattctcctaactcagccttttgagtagctgggattacaggtgcctgccaccacgcccagctaattttttttgtatttttagtagagatggggt

SEQ ID NO: 92047 - DNA, 1115 bp, Homo sapiens
tgatcctcccacctcagcctcccaaagtgctgggattataggtgtgagccaccgcacccggccaagcccccgtctttttaaccacacactgtaggtatttgtagagaaatcagtttctgtgtccccatgaacacaccaggagcccctcaaggctctgtacaggatgacccgtgaccctgttaggtaggtgttagtgtgtctctcagaagggaagcatcttatacagggtcacataaccagtaactagcacagccttttgagggtcttctggaacatttgggttgctaaaactataccatacccccaaatatattgtacattctttgcagactttgctatttgcccgaagatgttaaatttgccttttgcaggttcttggctgccttcgtggactccggtgaggctttttccttctttcttatggagcagagtcgtgcctggttaaatgattggccatgtccatgtacatgtcaagtttgagcttgggaggacagtttggaggccagcccttaacactttgtcttggggtctgtacattctggaggcgtttggctcaatttgttagtcacaccgttttcctaaggctactttttttttttttttttgtctattttttctgatccttctctctggtctaaattcttcctttgatcaaatctaactttcttctatgtaatgggcaccgaggagatatttggagggggaagaaaagtgtgcaatggccatacctctttccttgctcacattttatacatagcccagagtgatgtgaaaattacagtttatatgcccaatctgagaagagggtaatggccacccagaggactgttcgagcaggattctgaggctccctgtagacaaactgcaggaaagagtgcagcaatgggaatgttctaagtggggaatgggaatgtacatatttttgtagcctaaaatgacgacaccaccaataatagacaagacttactgaaagcccactgtctgccacacaaagacagtgttttttacgtggatactcatttcatctcccaccggccctatgaggtaggaactcctgtgatccctggtttataaaagagagactaaggtgcaggaaagaagatgcttgcccaggc

SEQ ID NO: 92048 - DNA, 1134 bp, Homo sapiens
gagcaaaatcgaccccagttaagaaccactgccctagactgcttttagaatttttttttccctctattcctcttaaagcacttgagctaaaccctcttttcatttttctccccaggccctgtctcagcgggaccctcctcacaacaacttcttcttcttcgatggcatgaaggggaatgggattgtggagtgccttggccccaagtgaactcaagatttggcagccccagagatgccaactgcagcatgcccacctgtattccctgtccccttccttcatgaaggcatctccaggcaaggaaaactgaagtcattggcccgatacaaaacatttcctgcaacgaaggaggtggtgccgacgtgctgcttcccatcaccagcagctgctcgacaaggggcgcagggtggctgtctttgttccagcactgttcaggctgcctgtcatcccgggcctgccagctcccctgagtgatgagcacttccaagcacccctctgccctttctctgtccttatgctgtcccggcctcgccagccctctggggcattgtgggagatgcctgccaggaatgagcaagctctgttgctcgggagcctcttgtcaccttcttggacttattccccacctgataccttatagagaaaagtgtgaattcaggtggagagtaggcccaggccccatgaggcaccagtggaagcacagctccaagttcagacaggtgcccttagagaggaaaaccatgacaggcaaatgcatttcctctggagtttgagaccctgacaaacaacaggtggcatctggtgtgctgttcttgagttttcgtttaggattagttgagttccagctgggttttgggagaaaggagatgctaccaagtcttggatgttagggcgagaccctgcaagttgagtattagagagcttgtctttcaaggcaggttcctggggcttcagggctaggagggaggagcctgcccttttaacagaaccccagtcacatgcggctcaagtcactcagaggctgttgcatttcagggctatgttggtcctttgtttacctcctaaaccacagctgtttgtgtttcacatatgttgtgaattttccttggttctttttaaaggaatgataataaagt

SEQ ID NO: 92049 - DNA, 1388 bp, Homo sapiens
gcaacctgcctggtacttttcagaatccttgttctttgagttggaatccccacagcaaccccatggggatagatgctgttctcctacccatactggagataaggaaacaggctcacctcacaagcaagggagagatggaaatggcgctgactgggaaagctgcggtgcggggcactcagtagagattcatgtagtggcacggcttgttcgctcagtgagaacaagattttgggcttcccttcacaagtccctgagacccagtagtcactggaaaacatcatgtcggccttcataaaagagggccttcaactaggtccaaaagggtgggtggatttggttcctaagcttgtacgatattcaagcaatatacaagcataaagagaagattcctctccgctgcagggcacagcctgtcagcacaatgttggccacataataagagcagctgacttcacagctaaactgcattttggagagaaatatgagatgctttttggacatgttagctgtatccactttctttttttctttttcttttttcttttttttttttttaatagacggagtcttgctctgtcacccaggctagagtgcagtggtgtgatctcggctcactgcaacctccacctcctggtttcaagcaattctcctgcctcagcctcccaagtagctgggattacaggccccggccaccatgcccagctaatttttgtacttttagtagacagggtttcaccatgttggcctggctgctctcgaactcctgacctgaagtaatccacctgcctcagcacccaaaatgctgggattataggtgtaagccacagcgcccagcctagctttatccactttcatatccactccccggaggtcacccctgttaactgttgagagtgaatccttccagactgccatgttcaaacctagactctaccactcagccatgtgaccctcgctacactactttctgttaccccatccctaaaatgggtagaatagtggcacattcctcagatatgtggggattaaaaaatcagtctttgaatcaatattgctcaatgttagctgctattttacatattcataaataactttttctccaatgtgcttttttctcaatatgtcttggagatccttgtcagtatttcatgcatcaaattccataaccaaaacaggtgaaccattaactattgaatcagtctgctgctgtgtgacattgtgcacacttaggaaagacttcccaaagccaagttccagggttagcaagtataaaaatgcattttaggagttggttcttgttttttattttgttttgttttttgagacagagtcatgctctgttgcacaggctggagtgcagtggcgtgatctcggctcactgcaacctc

SEQ ID NO: 92050 - DNA, 1117 bp, Homo sapiens
tgctggtgcccgttccagctgcaggggtgacactgggaggggggggctctcctctcggtgctccttcactctgggcctggcctcaggcccctggtgcttccccccctcctcctgggagggggcccgtgaagagcaaatgagccaaacgtgaccactagcctcctggagccagagagtggggctcgtttgccggttgctccagcccggcgcccagccatcttccctgagccagccggcgggtggtgggcatgcctgcctcaccttcatcagggggtggccaggaggggcccagactgtgaatcctgtgctctgcccgtgaccgccccccgccccatcaatcccattgcataggtttagagagagcacgtgtgaccactggcattcatttggggggtgggagattttggctgaagccgccccagccttagtccccagggccaagcgctggggggaagacggggagtcagggagggggggaaatctcggaagagggaggagtctgggagtggggagggatggcccagcctgtaagatactgtatatgcgctgctgtagataccggaatgaattttctgtacatgtttggttaattttttttgtacatgatttttgtatgtttccttttcaataaaatcagattggaacagtggatactctttctgcttgccttccctgcagcctggccttggagaggcttctgatcgggggctctgctctgtgagccctgcttgtgagtgggtgggagaggtgggccctggcagttgtggctccatcagaagaaaggctaaggggcctgggcttctccagaccgggacgctcctagccttcatcatccccattcccggtaaaagtgaagcttggcctggtgccatggctcatgcctgtaatcccagcactttgagaggccgaggtgggtagatctcttgaacccaggagttcaagaccatcctgggcaacacgatgaaactccgtctctacaaaaataaaaaaataaaaaaaattagccaggcatggtggtgtgtgtctgtagtcccagctactcaggaggctgaggcaggaggatcacttgagcccaggaattggaggctgcagtgagcgatgatcaagccactgcact

SEQ ID NO: 92051 - DNA, 1063 bp, Homo sapiens
actccctggaggaggtgacaggagtgcaggcggagagcagtgtgggcgccctgcctccccacaccgcgcctctccaaaccccgcgagggaccctgggccagggtcgccgggtgagaggcggctcggcgttggggcgccggtctgggcgcacaggtgcctcggcggtctggcgggtttgtttacaaacaatggggtgcgggctcggcagcgccccctggcggccagtgcggccccggggaagagggtcgaccccaggggtgccccagcccccaaagtccgggaggggcgggggggcggcacggaggggcggccacacccagggcgcgcgcccgctgggggcggcgacggggggcggctcgcgggccgtggagtctgcggctcctgcgggcgggggctgcgccccagcaacagccggttattggccccgcgctcgcctggcgggcggggcgggcgcacgtggcggcggtggggggggctgtgacagcggaggggggtgtctgggaccgccgtgggagcgcgcgtgtgcggggttgtggatctgcaggtgtctcgcctgggtgtgtgcgcgtgtctggctccgagtttgtgctgggttctgcagggagtggtggtgtcgatccagaggaatgttggggtttctgacccgtcggggtgtctgcgtgagtccccgcgcctgtttgtgtggggttctgtctgtgggtgccctgcttgtggggtgggtggacctgcgtgtgttgtcggtgagagttgtctgtgtgtgctgttccgggatgatactgggggtctgtggtgcctgcgtgtgctggggtgtggaggttgtagtgtgtgtgtgttgctggagtgagctgtttgtgtgtttatgtgtgtgtcttgcccgagcgtgcgatatgtgtgcttgtgtcttgcctgtgtgtttctgtcttggctgaggccgtctctgtatctccggggcatgtgtcttttgcccagcgtttgtgatgctgcgcctgctaaatgcaaatgtctgttttctgtccaggtgtctgtgtgagttgtcaggtgtgagtgtgtgtgtgtatgtatg

SEQ ID NO: 92052 - DNA, 1089 bp, Homo sapiens
ggtggtgggtgcgaggaggtgatactggagcccagagaccaaggaggaagctggggctggaaccctagtgggagaggaggtacctggctcagggcagggctgttgagagggactcagttactgatgggcagttcagggcagggggaggaagagggaggatttaggacaaggctgctgagtaggtgatgtggctctccctgagatgggatctgggaggtggcatgggtttcatttattcattcttcatgtattcattcattttaaaaaaggcatattgaatttcccttgtgggccaggcagcgttctagacttgggatacacgtcagtgacatacatcactgaaagcagacagacattcctgtccccaggcagattctgccgtagtggaggaagcagacagtgagcgagacgcatatggtgctgggtgcaaatgggatgagaacagagagggtggcaggggagctggtttccacagggtgctcagggaaggcctcacgagaaggcagcattggagcagagacctacaggaggtgaggggttggagggtctctgggaaaagtgttcctggcagagggatccgctggcgcaaagcccctgaggcaggtttcagcctggtatgttgtgggaatagcaaggaagccggagtgatcgtggggagagggtgagagatgaggtcggggaggtaccaaggccagaccccacgggtcccacaggctgtggggaaggctgttactcagaggggcaccacaggaacgttctgagtggggctgcaacgtgctgaggtttgagggatatgagcggccttcttgttcagagtccaggagagaggcctgggctggggccagacttaggaggagttcaggggtctgggagtccgtctggcagacagggcacctgatgcttccctaccccggctgtctgctcctaggagattgaggaagaccgtaagaaagctgaacttgagggagtcgcagtcacagctccccgaaagggccgctcagtggagaaggagaacgtggcagtggagtcggtgagctcgtcactggggtgtgggaccctgaggatggggaggggcagagggttgaggcc

SEQ ID NO: 92053 - DNA, 1062 bp, Homo sapiens
ggccagcagccgcagaaggagaaagagcagtcggccccaggccaaggcagcgcccagggcctacaggtggggcaccccttctgcgggcttgcatacccccagggctctccgcagggcgttctcttctttggcttgctgtgaaggtgtgggtacatctgtctgtccctgtctttgtcttggccctgtctatctcgcaggtccgtggtttgaggggcttgggatctggctcttggttttaccctcatctgtcccctttctgccgtcacccatctcctctcctgctacctgccccactttcgttctgtccttgacacatggggacacacatccgccattccctcagccctccaccatgccagatgctctgggcagctcctccctagggagggtggaggcaggaagccccttcctcctgtctactctccacccaggcatcacccctccctctgttccctctagtgaccatgatgaccgctgggagacaaaagaaggggcagcatccccagcccctgagactccacagcctacttcccccgagacttcccccaaggagacacccatgcaggtgaggctgggctgtggttcagggcacgggcctggggtgggggctcaggacctgtgccttgccctgacttgcctgtgtccccaaagccacccgagatcccagctcctgcccaccggcctcctgaagacgagggggaagagaatgagggggaagaggatgaagaatgggaggacataagtgaggatgaggaagaggaggagatcgaggtggaagaaggtgatgaggaggaaccagcccaagaccaccaagccccagaggctgcccccaccgggatcccctgcagtgagcaggcccacggagtccccttcagtccggaggagcccctgctggagccccaggcccctggcacgccttccagccctttctcaccacccagcggccaccagcctgtgtccgattggggtgaagaggtggagctgaattctccccggaccactcacctggctggcgccctctccccgggtgaggcctggccttttgagagtgtatgaagctgg

SEQ ID NO: 92054 - DNA, 1107 bp, Homo sapiens
ctacctcgcacttacgacccacgttaccgcatcaacctctctgttcttggccctgccacgcggggctctcagggactgggcaggcacttgcccgcggagagagtggctgagttccgccgagccctgttgcactacctggactttggccagaagcaggcatttgggcgtctggccaagctgcagcgtgagcgggcagccctccccatcgcccagtatgggaaccgcatcctgcagacgctgaaggagcaccaggtggtggtagtggccggtgacaccggctgtggcaagtccactcaggtgccccagtacctgctggctgctggcttcagtcatgtggcgtgcacccagccccggcggatcgcctgcatctcactggccaagcgtgtgggctttgagagcctcagtcagtatggctcacaggtgagtgggacgcaccaggtttccgatttttccagcgtgaccttgggggaataggttgcttgtccatatggcagtatcaataaaaatgaagcacttacccttggacccagcgatgattcttctagaactttatccacagagtggcttgtctgtggtctacatgacaaaggagctagcattaaccagtgtagcactttaacagcaaaacaatgggaaatgtcctaaaggctcatcactttttttttgagacggagtctcactctgtggcccaggctggagtgcattggtgcgatcttggctgactgcaacctctgcctcccgggttcaagcaattctcctgcctcagcctcctgagtagctgggattacaggcacccgccaccatgcccagctaatttttgtaattttagtagagacggggtttcaccatgttggtcaggctgggctcaaactcctgacctcaggtgatccacccacttcggcctcccaaagttttgggattacaggtgtgagccaccacgttgggctgcgagggtaattcttgacgatcactgcaatgcaaactgccatcttggaaggccaataatagtccttctgtctcatggtggtcatgaggatgaaatgggttgatatacataaagcacttagagtggcatataatgtcctggcacatagcagggactcaaga

SEQ ID NO: 92055 - DNA, 1224 bp, Homo sapiens
cctctactcctcctcagagaccaggggtgacagagacagatcttgaaaaccttgggacaagtgcccttgggctgcagggttgggaacggggggagcatggccagcctatcacctggtgtgccctcaggtgaaggaatacgactccatctcccggctggaccagtggctcaccaccatgctgctgcgcatcaagaagaccatccagggcgatgaggaggacctgcgctaagccccacccagccccccagtgcccgtcttcctgtcccatctgctcagagagaggtggggccgagacttgctggagagcttccctcctttcccatctggggagtgccgcgggccacagtgggcaggtggcaccgggggtcagcatgcaggggcgccagaggcccaggctgctggccggacagtcaccctctgttctcgctacatcccttgccccctgtccatttatttaagcccccataggtgcccttcacccccaaaaccagctgtacagaatctttgatacagacctatttgctaggggtgctgccggggatttggggtcagcatctggccccctatctcctgaccagctgagtcatgaggccggtttctctctctctcccacttttgtcccccagccaagctctaaagcacatgtagccgctgagacctgctgtttctgctgggggcaggctcctcttcccccagccccgggagcctcccccagcttcctgcagccccgacctctcaggttagaccctgggccctggagcttaggggattctccccaccccagccccacacctgctccttccctaatgctttgaggttttcttggttggaagctgcagctggcccaagaaagaaaataaaaaacaacacttttgcatgagtctctcttcctcctcacctctgctacccactctgcccctgggccagtcaccagtccctctcacactcctggtcccccagactctgggcgagctcttgggaggtcaggcgcatgcatccttgaaacacgtgtgggctgggtcagtttctaggtgggggagacccagggacggtgggcctggggaggagctctggcttgggagtcccagagcgcccatcttgatctttctctgggttcttggggtccaggggccttgatttcctcaactgggatgcacggtggtgatgccacccctcagagccagtgggagggtcgaatgtgacggtcctcatgactgctttgga

SEQ ID NO: 92056 - DNA, 1109 bp, Homo sapiens
agctcccagctggccccccagtgcctggcagtggctctggccctctggctgcttgccctgagctcaccagtgccacttctccatggctacaggtggggaccaatgccatggacagccccctcctcaagtacagcgccaaagactacttcttcaaggcggccctctgccacttctgcatcgacatgctcaacgccaaggtagcacaccccacgcccgcaggaccaccgcaccaggccaccatgtgcttatctccaggccaggtcccgttgcccccgaagagggacgtgctcctccctcacgtctggcccctgccagccagcctttggatgagaagtgtggttctcacagctgtgtttctgtgctggcatcacctgcccacccagccctggaggcttttgcgggtccagctcctgcctcacttagtgctctttccttcatgggtgcactttttgaatcctcactgcaccccattaaagtcagcaccattgtcaccgcgtcttatgggtgaagatggtgaggctgggacgagagtcccttgtttgaggccacatgactagggacctgcagccccagtgttccagatctttgtgactcctgctgtcgtggctttagctgtagctcacacatgcccacctattttcaggacacttggcaaaagaggggccaaagagggcagtgggagggggcgtggccagcgggaaggagctggagggttggcgctagattttgcttggccggagtttttttaccattgcctggcagaagcacggagtccaggatttcctggtgtccctggctcacggcctggggtggtggccccacacaccccacacacacacaccccacagagccctgccctgctgtgggcaccggtggtgggcaaaagcttgggctttgtcagaccaggttcccattcccaccccatgtctcaccgtgccctgggcaggtcactgcccctctctggatctgtttcctcactttgaaaagggggctcaccgtcatttgaccctctcagggtcctcaagaagcaccagccccaggcctggcatggaggatgtgctcatttgtcccctgccccagctgagccaggtgggaggaggcagtgggtg

SEQ ID NO: 92057 - DNA, 1015 bp, Homo sapiens
aggtctcaagccctccctcccatcctggtttctccagagccctttgccaagtggctctggactggtccttccgcctctctggctgttatcagaggcttcctaagggccagggccttggccaagtgctcgtgctcacattctctctggtgtcacaccatctgtgccctcgtggatgggatggaattaggctaaggccctggagtggcttgtccaacatcacccgctcagcccagcacgcatagccaggcctctagtgctggggccctcccttctcactcctgtgttcccccacctctcgatcttcttcacacctcaggtcttcttcatacctcctcacaggcgtggctgaggggtgggaacttgaagggtcataggtcagcaggcaggcacgcaggaggtcatgagtcgcaggcagccccttcctgtgtcccctccagggccgattcacgattgcggccaagcaccacatctccattgctgagatctatgagacagagttggtggacatcgagaaggtgagtggcagcagggccctgcatgggctggcagccaggaccagtgctgctctctcttcttcccaccaggggagtcctctggtgtctgagtgccgagaagggggcatggggcgccggcagagcttggagaatggggtctggctgtgtcccaggcaggcagggcggagggtgtggaagcttcacggaggcctcctctcccttccctgccctcccctggaacccatcccccgtgtctccccaggccattgcccactacgagcagtctgcagactactacaaaggcgaggagtccaacaggtagcccccttcctgcctgccccagccccgcagggaccgccaccacttcccctcactactcctccccacacagctcagccaacaagtgtctgctgaaggtggctggttacgctgcgctgctggagcagtatcagaaggccattgacatctacgaacaggtggggacaggtggggatggcggcttccaccctgccccctctcag

SEQ ID NO: 92058 - DNA, 1009 bp, Homo sapiens
aggctgaagggggctgacaccaggcagaggggctcagggctagatgatcctaggagcggtgagccgcgtctgaagtgtggggggtgcatggggtgagtacggccctggttagcagtgactagtttaaggacagctgaacggaggaacccgggatgatggagtcaagactgtggaggtctcagcactttgggaggccgaggtgggcagattatctgaggcggggagttcgagaccagcctggacaacatggtgaaaccccgtctctactaaaaatacaaaagttatctgggcctggtggcgggtacctgtaatcccagctactcgggaggctggggcaggagaatcacttgaacccggaggtagaggttgcagtgagccgagatcgagccactgcactacagcctgggggacagagcgagactctgtctcaaaaaaaaaaaaaaaaaaaaagaaagaaagaaagaaaaaagcctgaggaggcctgggttgaggctggagactcctgggtgggggaatgcgtggtggtggcttggccaaggagatggagggataacagggagagacagggggactgagagaaccaaaacgggggatcaaattcctgctgtgtgatcctcgagtaatagggatgacagagacatgctgagaagagggatgggaaaaggcctgggagacagaactaacacatatgacgtggcataaaactcacgttagctcctaaaagctgacacgaccatcctgtgataaattgtagtggcttagaagtgccaagagcccaagtagctctgccacttacttcatgactttgggtaaattgtttagtctccctgctaaaggagatcacaaatcaaacctacctcccatttgctatgagtgttagaattgagcctggcgtggagttacatctctgagagtgttagctgttgttaatgtgacttccagaaggaaacaggttcggagcgtgcagagagctgatgggggttcaaggtggacgcccgagcggagaggt

SEQ ID NO: 92059 - DNA, 1727 bp, Homo sapiens
gtttcaccatgttggccaggctggtctcgaactcctgaactcaggtgatctgctcacctaggccccccaaagtgctgggattacaagcatgagctatgcacctggcctttttaactttttgttaaggaaattttaaagcactcaccgagagttgagaaaatagcacaaccacccctgtgtaaccatcaccagcttctgcaaaaattttctgctgatctgatcttttttttttggccattacctactgtgcacatatattttttcttttttgccaaggtattttaaagcaaattccagatatcatatcatttccattgtattattattgttattaatggtggtgttatttctgggatccagaatttgtttcagcacctccagagtctgtcctgttctatgaagaaagtggcattaggcccatttcataggttgggaaactgaggcagcagggagtgggctttgatcaggtggtcctttttctgtgatcccctttttgggactgtggtgaattccctgtcttggccacaccaagcctcaaaccctgtgggttgtttctgattacacaggtttgggggtcacacctgggtgcatgcagtgtggggtacaggttctgttactctgtgcagaaatcgtcctcataaaggaagagttgaagtggggctggcagcaggggatggacccctaggatgaccctggaggtgatgggcaactgggtcagctgtgtgggttaaagtcctgtttctgctccttctaaccctgtgacttggtggcaagctatttccctcctttagtccaggttagagaactggaagtacaggagagataataaatacttatttggatgaccttattgttaaataaggtctagcgtggaaaagatgttttgcaagtgcctggctcagagtaaacggtcactattgttagtgttgttattgcttctgtgtatactcttgaggttggggacaaaaatgctgtttctaggattgcagaggaagggttgatgccccttgaccccccagcccggccccgctaccttcattcccttgccatgcccaccctgtccctctgcactctccctttgaagtgcttgcctgtttagggggctgccaacttcagcgtggcccctctcagcctcttatgtcctctgtgtcccagcctggtaaccttgggaacggagtgagcgggaatatctgtctgaggctgtgagacccttgctaaagacccttggggtccttgagggagcgcctggtggcctctgctgcctggaggcagaggatggcccagtgtccagggacacctgcaggtgaagctccccggagccacctttccagaggctggatgccaactctcgtccaccgtgtgaggctgggcgggcagatgtccacagcgcctgcctcacagggtggctgtgacagttagctggactataacctccatcacctggcacgcatagtgtctcattgacctcagacacttggcgcccggcctgggtgcgggagttctccctgggagaagtctgagctcacagcttagcaagctcttgctgtactgcggaatttctctccctagaacgtgcgcggtgatctcctacttttgtgtgtatacttactctttcgtggacagtgtatatatatatgtatatatacatatatatatacacattttttttcccaaccccttttttttttccttttttttgtgtgtgtgtgtttgagatggggtctcgc

SEQ ID NO: 92060 - DNA, 1028 bp, Homo sapiens
tttgccccacaatgagccaggaaaaaagaaaaggatggctttagagatttttggaggttggaattgcagattagggggccacagacctaaaatgcctaccgagtaggatgagtgggttttttgtttgtttgttttgttttgttttgttttttgagacagagtcttgctctgttgcccaggctggagtgcagtggcacgatctcggctcactgcaacctccacctcccgggttcaagcgattcttctgcctcagcctcccaagtagctgggattacaggcgcatgccactatgtctggctaatttctgtatttttagtagagacgggatttcttcatgttggccaggctggtctcgaacccctgacctcgtgatccactcatgtcagctcctcgaagtggtgggattacaggtgtgagccaccgcgccgggccagggtgtggggtttaattgggatgatatgttgtggagtgactggcacatgacaacatgacaaggactttgtcattgctggttgctattactattgactgttgttgctattattattactaacccctcttcggtctgtatgggctggtgcagacacattgggctgtgatgcagatccacagttttctagacttgcacaccagttcctgggggatcctgttaccacgtgagttctgagtcagctggtgcagacactttgcatttcttaactcccaggtgaggctgctgtggtcaggggcctgccctctgagtagtaaggtgtccagtggttttccaggtgtttctgagttactttcaaggattctgcaaatggaggggaggcattggatgccagggtcaaaataagattccttagctcttagctttggggtttgccaatttgcagccaggtctgtgttaatcattacatatggaaaaaagtcatataacacgacgaaagtctttgcaccatctcctcttctttccttttccaaaggtgacctctgtggggagtttggggctcatggtctctctctgttgtccaggctggagtgcagtg

SEQ ID NO: 92061 - DNA, 1048 bp, Homo sapiens
tttttgtagaggcaggaactcactatgttgcccaggttggtctcaaactcctggcctcaagtgatctttttgccttggcctcccaaagttccgggattacagatgtgagccaccgcactcggccgatttatgtttattataattattggtatggctggagggcagtggtatgatcccggctcatggcagcctctgcctcttgggttcaagcaattctcctgactcagcctcccaagtagctgggactacaggtgcacactaccacgcctggctaatttttgtatgcttagtagagacggggtttcgccatattggccaggctggtctcaaagtcgtgacctcaggtgatccacccgcttcaccctcccaaagtgctgggattagaggcatgagctactgcgcccggcctttccctgcttcttttaaatggaatattttagtgttccattttatctccgcttttagcctggtagcgctacctctttattgctctagagtttccattctctgtctttgactaggactttggctttgaatctgagtgagatgggagccatgggagggctttgagctggggagtgacccgacctgacatttttatatccataccttgggttgcttatgcaagagtgtttccaccggccagattcctggaaaaggaattgctgaggcaaaagggagcgagcatttagactttggtggccccgccaagttgcattccagaaaggcttcaccattttcactgctggcaaacagcagccggagcttttgagtggctgttccatgccaggcctgtgccggactctggggaccttggcaggagtcagcctggggctggctgcttcctaattctcagtcctcgagtcctacctccgatctcaagaaaaggtgaggatttcagagaggccataaaaaggagaagcaagagatgattgtgggtggctgaaggcggcctggcacatcccaggtgatgggagagctggctgcatccgatggtcccaccgcagggagcgtgaccaggaggtggagtgtattggactgggaaccg

SEQ ID NO: 92062 - DNA, 1047 bp, Homo sapiens
cccagcctccagcaaccacaagtctactttctggctctgtgaatttgcctattttggacatttcgtggaaacagactcttacacgacgtggccttttgtgcctggcttctttcactcagcgtgatgttgtcaaggtccctccgtgtgtgtcagtgtctcatcccttttcatggctcagtaatactccattgtatggataggccacattttgtttatccgttcagttggtggacattggaggttttttttttccagtttgcactgttctgaatgatgccgtatgaatgtttgtgtgcaggcttttgtgtggacacttgtttccatttctcctggtttctacatgggagtggaattggtgggtcacagggtaactgtgtgttaacctactgagaccagccagactcttccacggcagcggcacccttgtatatcgcccagcaatgcatgagggctctgatttctctatcattttgatgattcatccattgtcctgttgataggatctgggttgtttcagtttaggggtgctatgaacattctagaatgtgttttgcggtccacctctgccccgctatgcataaagttgggattccatagacagtaggtcctgttaggtaacaggaaaaatgatctgtgggctcctctctctccttggcacgtgtgtgtggcccacgttgcatgttcttgtagaatcctccttcccgggtgaggattggaagccatgatcgcctgcctctgttgctggttttagtctttaacccttgctctgtggacttgagaaatgtgcttttccatggtgcctgtgaccaagatgtccgcatcgttagtgaagaccctgctatgtccttgaccacactgcacggggatcctgtccacgatggggggtgtcctgttgggcttgagtgtctagatatggagaccgtagttcgcggggggagtggggggccgtttggcatatttgccctggcatttggggttgtttattgggggtgggagtgctcctggcatttcctgggcgggaactactggtgtagacctactggatta

SEQ ID NO: 92063 - DNA, 1317 bp, Homo sapiens
ggcgctgtgccaggcacagtggttttagagttgggggaatttgggccttgctgaagagggtctcaccaagcctatcctgaggattggagggtccagggtgcagtctggtgcctggcaggtagtaggtgctcactgcacacagctcctcccagctcggtcggggggtcctcatcctaaccccgcgggttttctttgccccgattctgcagacgagtacgtgtcttcctcccgctcgctcggcctccccatcgcagcctcttccgagggtcatcggcttcccggccacggccccctgtcgtcttcagctcccggggcctccacccagccccctccacacctgcccaccaagcttgtgatccggcacggcggggcaggcggctccccttcggtcacctgggcccgggcgtcctcctccctgtcctcctcttcctcctcctcctctgccgcctcctccttggacgccgacgaggacggccccatgccctcccgcaaccgcccgcccatcaagacctacgaggcccggagccgcatcgggctcaagctcaagatcaagcaggaagccgggctcagcaaggtcgtgcacaacacggccctggaccccgtgcaccagcccccgccaccccccgctaccctcaaggtggccgagcccccgccacggccgccaccaccaccgccgcccacgggccagatgaacggcacggtggaccacccgccgcctgccgcccccgagcgcaagcccctgggcaccgccccgcactgcccgcgcctgccactgcgcaagacctaccgcgagaacgtggggggccctggcgcgccggaggggacgcccgcaggcagggcacggggaggcagcccggcgccgctgcccgccaaagtggacgaggccaccagcgggctcatccgcgagctggcggccgtggaggacgagctgtaccagcgtatgctgaagggccccccgccagagcccgcagccagcgccgcccaaggcaccggggaccccgactgggaggcgcccgggctgccccctgccaagcggcgcaagtccgagtcgcccgacgtggaccaggccagcttctccagcgacagcccgcaggatgacacgctcaccgagcacctgcagagcgccatcgacagcatcctgaacctgcagcaggcccccggccggacgcccgcgccctcgtacccccacgctgcctcggccggcacccccgcatccccgccgcccctgcacaggcccgaggcctacccaccctccagtcacaacggtggcctcggcgccaggacgttgaccagataacaccgggccgcctccccttc

SEQ ID NO: 92064 - DNA, 1058 bp, Homo sapiens
cccctgctgcggcaggaggagctggagagcaccgaggtgggcgtgcaggggggcgcttttgagggcacccacatgggcccgtttgtggagcggggacctgacgaggccatggaggacggcgaggagggctcggacgacgaggccgagtgggtggtgaccaaggacaagtccaaatacgacgagatcttctacaacctggcgcctgccgacggcaagctgagcggctccaaggccaagacctggatggtggggaccaagctccccaactcagtgctggggcgcatctggaagctcagcgatgtggaccgcgacggcatgctggatgatgaggagttcgcgctggccagccacctcatcgaggccaagctggaaggccacgggctgcccgccaacctgccccgtcgcctggtgccaccctccaagcgacgccacaagggctccgccgagtgagccggcccccctcccatggccctgctgtggctccccagctccagtcggctgcacgcacacccctgctccggctcacacacgccctgcctgccctccctgcccagctgtaaggaccgggggtctccctcctcactaccgccagacaccccggtggaagcatttagaggggaccacgggagggacaaggcttctctgtccgcccttcacacctccagcctcacgttcacttaggcacatcacacacacactggcacacgcaggcatccatccatccgtcattcattcaaatatttattgagcacctactatgtgcccagccctgttctaggcactgggcattaccatagagaacaaaatagacaaatacatctgccctcatggaaggtgacgttcccaggagagggcacctacacagtcacgcaaacacacactaattcctggcagggcccccagcccctcccctggctgagcagccctgtggctgaaatgactagcagataaacagacccccttctgctccgcttcctcctgcccagccaggcaacaccctcaaccggctccatcacatcctcaggtctcgggaccatggggggctcagaggggagaca

SEQ ID NO: 92065 - DNA, 1035 bp, Homo sapiens
aaaaataaaaaattagccaggtgcggatgcacccttctgtggtcgcagctactcgggaggctgaggtaggagaatccctgagcttaggagttggaggctgcagtgagccattacccttccactgcactccagcctgggggcaacaaagtgagaccttatctattaaagaaaaaaatcagtttgagcaaagaccccaggcggccgggaaaggtgttcgcttaagggcgaaagctaagaacctgcaaccttcccgtctctttcctaccacccgccgccgttaggaatcttcagatcccgctgtaaagaatggaggaaggaggagccatttatcctttaccaagatggcagcctcctggcaactccagtcactttataaatatggctgccacaggaagtacgtcacggaagagggtgggaaatctgcgcgcgcacgctgcaaaggggctttttgggacgccagtggctgagttcttcctttgacaagatggcggcaggaggcagtggcgttggtgggaagcgcagctcgaaaagcgatgccgattctggtttcctggggctgcggcccacttcggtggacccagcgctgaggcggcggcggcgaggcccaagaaataagaagcggggctggcggcggcttgctcaggagccgctggggctggaggttgaccagttcctggaagacgtgcggctacaggagcgcacgagcgggtacgttgggcgggacttccgggaggtgggacggttcctgcgcccaggtgcaaggccaggcgtgcttgcgtggactcgtcgggggtcgggggtcgggggtcgggggttgggggctcctgtcccggggaccgccgaggaaatggagagcatgggcaggggactcagcatgggaagctggagagcttgatagagttaccagatttagcagataaatatacaggacgctcaattaaatttggattttaggtaaacaatgaataatttttagcataaatacgttccatgcatccaccttagcttgctgttttctaaatatgtgtgtgtgtg

SEQ ID NO: 92066 - DNA, 1060 bp, Homo sapiens
tttttagtagagacagggttttgccatgttacaggccaggctggtcttgaactcctgaccttaggtgatccacccgccccggccccctaaggtgctaagattacaggtgtgagccaccacacccagcctaatttttgtatttttagtaaaggcagggtttcaccatgttggccaggctgctcttgaactcctgacctcaggtgagccacccgcctgggcctcccaaagtgctgggattacaggcgtgagccactgcgcctggcagtccttcctaaatactaagttctgtaaactgctgggcgaagccttagcctggaagagtccggtggcgggacttgactaagcggaagatgaaggctggacctgccaggttaaatctctttcctctccaacatctctggctgatgttctgcatttctgtcccccagtggcttgttgtcagaggccccaaatgaaaaactcttcttcgtggacactggctccaaggaaaaaggtgaggagaggcttttgtggtgtggaatggcggttattcattgttagtcagcttacggtagcctctgagatctgtgttaatgatgtggcttggaaggcaaatatctgcggaaacaggtcaaccttaatataaacaaggggacctcaaatgggcagaaagcaagctggagacgaacttagagaaggcaggtttttcttttgagatgtcagtgatctccatgcacagataagctgctgggagtctgccttgatgaataagttagaaacacattaaaggatctctttttagcttgcagaaaagcaagtcaaggacctgcttaactcagtcctgccggttgcggtgagtcacgcctgtattcccagtactttgggaggctcaggcaggcagatcacctgaggtcaggagttcgagaccagcctggccaagatggtgaaaccccgtctctgctaaaaatacaaaaattagccagttgtggtggcgggcacctgtaatcccagctacttgggaggctgaggcaggagaatcacttgaacctgggaggtggaggttgcagtgagccgagatcgc

SEQ ID NO: 92067 - DNA, 1061 bp, Homo sapiens
gagggtcagagcttgggcaccttgggccccatccttaggggcctctacctccaggtaggagcctggggacctccaagtctcctggggtgacttgggattcaggtctgatggctcccatggaggtgaatagggtgggtggtctttggcagtgggtagggctgaggccttgacttgttctctttcccattcttagggctgacaaagaagagaaccaaagtccagaagaagtcactgcttctcaagaaaccccttcgggttgacctcatcctcgagaacacatccaaagtccctgcccccaaagagtgagtgtcccagcatccctgggcccttctttcccaccagactctggtcctaaagggtttccggggctgggggctggtaggtgagggtcatttgaagggtagggcaggctcaggtttgggcttcggagtgcagattagagggagggagtctgggtgccctggtgctgggccgaggcaggtgaggaggggcctggacccagctgggggcttcggggttggagaggaggggctgagtgggaggcgtgttcaggaggcacatcaggtgggtcttggggcatgagcgggtgagagggtggacagctggccttcccctgagatggggatgtggaggagtgggatttcgggtgatgctgaggttggttttgacgtggtggtgtgaggtgcctggggtatgtccaggacggggctgttgcttcgttgagtctggggctcagaggggaggcctaggctggagacagacgtggggagaggagttctctgaagagggggcggagtgccaccttttggagagggggtgctgaagctgccttaatggtggaggaagcccgacggggaggaggccctgctgccgttcaggctgccacctcacctgctgcacttgtgccccctctccccgaccagcgtcctcgcccaccaggtccccaacgccaagaagctcaggcggaaggagcagctatgggagaagctggccaagcagggcgagctgccccgggaggtgcgcagggcccaggcccggctcctcaacccttctgcaacaag

SEQ ID NO: 92068 - DNA, 1014 bp, Homo sapiens
ctcaaaaaaaaaatgtgaagcgtgcaggtcagactgccttcacagacgtgcagagcaggtgtgagggcgagggtttgaggtgccctctggctctgtgcagggtgggtgtgctggtagacggggtgtggggaggaaagcctgggccggggcgggatccacgggcactggatgagggacagatgggaggtaagagggtctagtctcagtgtcccaggaggggttcagggacccatcctcactcccgcccctcagaccctgctctcagcggcccacgaggtggagttgcagcggcagaaggaggcggagaagctggagcggcagctggccctgcccgccacggagcaggccgccacccaggtgagccccgcacctgcccactccctcccctccccgggcctcctacccacccctgacactgcaccccgcctccccaggagtccacattccaggagctgtgcgaggggctgctggaggagtcggatggtgagggggagccaggccagggcgaggggccggaggctggggatgccgaggtctgtcccacgcccgcccgcctggccaccacagagaagaagacggagcagcagcggcggcgggagaaggctgtgcacaggctggtgagcgcctgggccagcggggcctgcctctgatgcctcgcccccttccttccttcctcccaccatgggctgccctgggtgctgcgggcagcctgcacaccccaagccccgcatgtggcctgtggtttgggctgtttgggatcctcacagctgagactcatttcccagcctcttccaggcagggctcgggctggggtgggacagggtccctggcgcttctgtttgaggggcggggtggggggaggtttctgcaccgcagaccaggggagatggatgacaaaaggggcttcagcaaacagctgctgggaaggcactggaggggccgctgatgtgacggggttaggaagggcctccggggacaggcaggtttgtgcagggaaggctccctgtgtagaga

SEQ ID NO: 92069 - DNA, 1411 bp, Homo sapiens
aaggcccaggtggccctgaggctggcggagctggcgcggcggcagaggcggcggcaggcgcggcgggaggctgaggctgacaagccccgaaggctggggcggctcaagtgagaaccaggccgggggttctgggagaggctggggagggggccgggtcccaggtcctgacaccttcctgcctttgttcaggaactgcccaccccccccatcgggagaccacctcttcccccacaaaaccccacattctcagaggccccttcttctccaggagggggctttggactgggtgtcctgggccccgcgggggtgatatttctgaacacccgccctgttctgcaggtaccaggcacctgacatcgacgtgcagctgagctcggagctgacagactcgctcaggaccctgaaggtgctcactgtgtcctgccgtggagccccgtgcccagtgatgacaccatccttgctccccgtgccccccaggggctatgggcgacaccatggctgcccctgggctgggccagtggggccaatgcccaggggctgagggcacgggatgctgggatgagatcccagggtgaggggccaggctaaggtttgagtccgggaccctaagaaggcctttccttccagctggtccctgttgcagtcccggtcacctttaggactagagggaccttcctgaagctcagaaccaaccctgtccctcccctgctcggaacctgctgtggctccccagtgcccctgaggaagcccagctcctctgtcagccacacgcctgggccgacccggccgtggggctccagccagttgtgctcatgagcggactgtgccttctccctctgatccagcctttgccctcgctgtccccttttctgtgtcgtcaccagcccacttcccgtgactcctctaagcccagcttagagatggccataggttggtggctgtcatcccaacactgagccccagcagctgagggccaggctgagtccctggtgcccacaggctgccctggggggagactgcatggggctgagccctgccaggaccccgaggagaggtccaggcccttgggcttctgccaggccctgctgaggcctccctctctgtcctgtagcccgagggcaacatccttcgagaccggttcaagagcttccagaggaggaatatgatcgagcctcgagagagagccaagtaaggggcggccggggctgctgtggggcgagggcatctgggattggccccgggcactgattgctccattgtccctgctccaggttcaaacgcaagtacaaggtgaagctggtggagaagcgggcgttccgtgagatccagtgagtccacccggcttcggcgcaaggaagggagcccttctcccaccccgtggtgcccaccgagtcccagggccccttccaga

SEQ ID NO: 92070 - DNA, 1777 bp, Homo sapiens
gggttgggtgagcctgtatttcaccctggggactgggaaggtgttcagaatctaggagctgcggggccgggtgcggtggctcctgcctgtaatctcagcactttgggaggctggggcgggccgatcccctgaggttaggagttcgagaccagcctggccaacatggtgaaaatacaaaaattagctgggcgtggtgtaagaatccaggagccgcagggttttccttggagtgctgcgagggctgtgggtgagggtggtgggcacagggagtgggtggggaccttacgtgtgctgttcttctcctaatccagttctcctggttttcccccgtccccgtctctcgtatttgtggtctccttgtctcctctctcccctttttcccctcccccttctctgtctcttgcttggtgttggttttctgtgtgtctctgtgtgtccccgcgccaccccctgtgctgtgtcccaaaactctgcctggctggtgcctgtcttctctcttgagggcatctgtcacctcttctgcttggtcatctgtgttcctctttatttcttcctggccccatcttgctctctccccacaccgcctgtgtctaccctcctctccccgatcccccacttctccctctctcccctgggccccaatgtcttggactctcctaccagtggcgcttgaggctacaagtccaaggtaagcagagtggatgcccggggggcattcctgggagctggggaggggtagagtgcatattgggagggggctgactggtatgacccctgctgtgacctctcaccgcgttttcagtatcttcagctcaagaagaagttagaagatgagttccccggccgcctggacatcgtgagtcttgggatggggagaaagacttgagcacagccactgtgtcggtccgttaggcctggatggcactgcaggggggttaggtcagccctacgcccttcacccatgttctcatccccctgggaaggggagggtctccccaagaggacatcttagcccctccaacatctcccctaccccctttcctcagtgcggcgagggaactccccaggccaccgggttctttgaagtgatggtagccgggaagttgattcactctaagaaggtatgtctgtctgtccgtcctgcctggttttggggctagcatggggttggggctgaggttggtgtctcggtcccagctcaccccttccctcttcctcccctccctagaaaggcgatggctacgtggacacagaaagcaagtttctgaagttggtggccgccatcaaagccgccttggctcagggctaatgcgccctgaaggcagaggtgagggggcccactagacagggacaccaccctttggatcttctccctgccccatgctctgactccttggcccagggtggagagcctgggagatgggggggacatcacgtgtgtccccagagcgagcgggataaagttagacccggttggtggaggacaacaactgagatggggtcagaggtgtgcagggtgacagctgagatggtgatgggtcagagatatgcaggatgacagctgagatggggtcaaaggtatgcaggatgacagctgagatggtgatgggtcagaggtgtgcaggatgacagctgagatggtgatgggtcaaaggtatgcaggatgacggctgagatggtgatgggtcagaggtgtgcaggatgacggctgagatgctgatgagtcagaggtgtgcaggatgatggctgagatggtgatgggtcagaggtgtgcagg

SEQ ID NO: 92071 - DNA, 1050 bp, Homo sapiens
cctcaggtgatccacccgcctcggcctcccatagtgttgggattacatgtgtgagccaccgcgcccagccagaaaggtgttcaaatttgagtgtactgaattagaggcattggtggctctctctaatggaggtatctgtagctggtgtattgcagagagacacatcacagctgagatagaggctcatagagttttgagatcaattgcaaaatggaaagtactgaaaaagcccaggaattctgcataactaaatatatagcgatcctagagtcatgcaatcagttctgagacagatagaaacagaatattaagagggttttggaaagaggcatcagaaaaaaatggcggaaggtcaggattgtgttgtcccggaagccagtgaaaagctaacttccagacatctagcattaggagactagaggagaatataagtttcctgtgctagtattggaggctctagagacttagaaaatagctaggatggtttatcatggggcaagctgaggggccggctagagttctgctgctatgcgggagagtaagcgaacttagcaggtttggcctccaggggtggtggagcctttcaacccatgggttggtgagatgtagagatgtgaggctgggtgtcaaaagaggtcggctagaagactccaagcacccccatattttgtgaaacactcaccagttccttgacaaaaccattcaaaatattcttcccatgactttggtttcttaataaacttcatgtttttccagaaaaaataaccagacaccaaaacatctctgggatttctcatgagataaatcaccttaaatggaaaaacgggagaatgaaaaatcaatacagtcaatcctcactctttttgatcttcacaaaaatggagaaaaagccaattcctggataatgcctaataatatcaatggattcttttaacaaattacttactgcactcactaatcaaatttgatgtgcctatgaagtagtcactgcactaggaatatatcaatggaagaaggaagcatcgttccttccctctgggatattacagt

SEQ ID NO: 92072 - DNA, 1050 bp, Homo sapiens; identical to SEQ ID NO: 92071

SEQ ID NO: 92073 - DNA, 1053 bp, Homo sapiens
acacctctagtcctagctactcaggaggctggagcaggagaatcacttgaacctggggaggtggaggttgcagtgagccaagatcgcaccaatgcactccagcctgggtgacagaatgagactgtgtctcaaaataataataataataataattcacacacctataaacaccttccaggaaagtacaattctagaagcagtctgagccatgcaaggtcctggatatgccttgtccctcttgtgatcacccctctgccccatgggagatgcatgtggctgctgatatcaacacatatttacacacagtaagacgaagtgtgtacagagcccagtcctggccccggggcagtcaacctggatacaggcattgattgatgaacatgctgcttcccataggaacacctctgtgtcttttctgtggcaggaggcatttgttgaattcagattggctaattattttttagggcaaccaaaggcggttatctagtatataatatggctatacattctgattgcacttagaacctagttttctaagattctgggttagtgttttcaccctatccctggtttaaatctggctggggtaatctgtggaatggtctatatccttgaactcaaggacagttctgggagcagccacataggtgtcacctaatacggaatctcaggtctcaacaacacagacctgttgaaggagaatgcatttcagcaagatctccagatgacttataggcatatcagtgtttgaaaggcactgatcaaacacgtcttaaccattatgcactgaccttggccttggaactgaagaaagacttggggaataactggatggggaggtgggaggagaataaacgtggactctccgtttcactgagtgctgtatacccaatctcactctctacccagggtgatcgctcccagatgggcacagattggatccacttggcatcccccttggagtgcatcaggcagagaatctcagccaaccagtttgttcctggaaaaagaaggaaaaaaatatataaaatgtaccatctcagccggacatgg

SEQ ID NO: 92074 - DNA, 1053 bp, Homo sapiens; identical to SEQ ID NO: 92073

SEQ ID NO: 92075 - DNA, 1895 bp, Homo sapiens
atgatcttggctcactgccacctccatctcctgggttcaagtgattctcttggtcagcctcccgagtagctggaactacagacgtgcgccacagcgcctggctaattttttatttttagtagagacggggttttgccatgttggccaggctggtgtcgaactcctgacctcaggcaatccacctgccttgacctcccaaagtgctgggattacaggtatgagccaccatgcccagcctgtcaaccacttttaagcctacggtttcgtagtgttaagtgttaagtatattcccagtgctgctcaaccaatctccagaggatttttgtgttgcaaaaccgaaactctatgcagagccagcaccgactccccatttacccttctcttcagcccctggcagccgccagtgtactttctgtttctatggacttgatgactccaggtaccttatgtaagtggaatcacacactatttgtatttttgtgactggcttatttcatttagcataatgtccttgatgtttatctctgttgtatcatgcatcagaattttcttccttctcaaggatgaataacattccattatagctatataccacattttgtttattcactcacctgtcagtggatatctgggttgcttccatcttttggctatttgctgaaatccctcttattatgttcccattgctcttggcctctcagggccatgccacttccaatgtcttcagcctcaatcctcaccgcatccgcagtgctcttaccgccctccacccacagccccactcccagagacatatgatcctcatctttcagccccttgagattgcctggctcttttgtggttcctggccattgccctgatgattctcctatctgaaaatagccctccccccaagtaatttcatactcattctttgcatttccatttaaatgctatttcttctttcaggacatcattggtcatcctcagccatcctccctcccactgccaccaaacaaacacctgaatttgccttgggattcactcctgtggattctcctaataccttagattacccctctgaacactcatcctactgtgtaatttcctgactaaatccttttctctgattgtcaatggtattaggcattcctctcttccccttaaagcattgtacactgtctgacataaaggaagaactccaatcatgcactgaatggacaggaacacaaccacagcctttctcagttcacgattctgcctccttacctgatttggggtaagtcaatattattacatcttcatcccttatcacaaactcatcacgtacttttcttaaggtttcggatctgaaacccatagtagggaaagctatgccttcaaaccataagaaatcgtccgacatgatgatgacctcttcctgcgtggtgtgagggtttcaactgtagccaccgctggaggctgtggcagctacaggcagatcagcttttacagcaaggataaaacgatctttaaccttgtcccagcatgtcacatgtttgttgtaaagtttacttgctgataaagagaggtataatgtgacccatactcaaaagattgaagatgttgagcaatcatgaacttatctagagaccattttaggggtcatctgagcttgcgttcctgagagtgaactgcaagatcgaataacaaacacgaggacaaatattttttttgataatatgggtgaatttatttcttaaggtttgagtgcaaacttaaaaacaagaacaaagcttttcatcaagcataaacacaaaatctaaataatcctgcaatcgtgcattttaacagaaagtacaaatatgaatacattataatttgtaactgcatttaaaaattaaaatatgtctctccaaatccaaaagaccacacag

SEQ ID NO: 92076 - DNA, 1895 bp, Homo sapiens; identical to SEQ ID NO: 92075

SEQ ID NO: 92077 - DNA, 1071 bp, Homo sapiens
tttgtgtgtcaatgatgtatgggggatattcaagtcatgaggctttataagattcctgtgtcattcaggattcagtcaggagacagaaacgacacctgtaattcaaatggagaaaaatgtaatataaggatatattataaatggtgaaagggtattaactagaagggataaagagaatcttaagaaccctaaggaacagcagattgtaggaagaagccactacctgtaaggcagggagagggggagagagagagagagagagagagagagagagagagagagagactttagaatgtatgtgtgtgtgtgagagagagagactttagaatttatttgtgtgtgtgtgtgagagagacttcagaatttatttgtgtgtgtgtgagagagagactttagaatttatgtttgtgtaagagacagagagagactttagaatttatttttgtgtgtgtgagagagagactttagaatttatgtttgtgagagagagactttagaatttatgtttctgagagagacttttagaatttatgtttgtgagagagagactttagaatttatgtttgtgtgtgtgtgagagagagagagagactttagaatttatttttgttttattttatttttattttatttttgagatggagtctcactctgtcactcaggctggagtgcagtggcacgatcttggctcactgcaacctccgcctcctgggttcaagtggttctcctacctcagcctctggagtagctgagatcacaagtgcgcactaacacacccagctaattttcgtatttttagtagagactgggcttcaccatgttgtccaggctggtctcaaactcctgacctcaagtgatccacctacgtcagcctcccgaagtgctgggatcacaggcatgaacgactgcgcctggtcaactttagaatttatgagaccagtgtcttattcttctctttttcagatatgtgggttggttgttgttatcctatttctgtcccaacattgtatcatgatatgttggggaaaaggactaaaatgtgtatttttagttcagaagtctccaaataag

SEQ ID NO: 92078 - DNA, 1071 bp, Homo sapiens; identical to SEQ ID NO: 92077

SEQ ID NO: 92079 - DNA, 1071 bp, Homo sapiens; identical to SEQ ID NO: 92077

SEQ ID NO: 92080 - DNA, 1307 bp, Homo sapiens
gatccacccgcctcggcctcccaaagtgctgggattacaggggtgagccaccgcacccggccaacaggcagcatttcttgagcacttactgtgcccgggtactgttccaagcactttgtcaacttgtttaatccttatgacaacccatcgttcggccccgtcatgtggatcaggaaacagtccagagtggaggagggaggagactgagcagggggtcgctggggctggaccgcaggagtctccatcccgcttccgcaggtggatagtgacaagggcatctcccttcgcttccctcggtttattcgagtccgtgaagacaagcagccggagcaggccaccaccagtgctcaggtgaggtcctgggaagcaggggtgggccgcccagctgcttggccctaccagctttttagcgtggtggcctctctggaaccttgtggaggtgggagcagccagggagcttctgaccaccccgtcccaccctctctccgcaggtggcctgtttgtaccggaagcaaagtcagattcagaaccaacaaggcgaggactcaggctctgaccctgaagatacctactaagccctcgccctcctagggcctgggtacagggcatgagttggacggaccccagggttattattgcctttgctttttagcaaatctgctgtggcaggctgtggattttgagagtcaggggaggggtgtgtgtgtgagggggtggcttactccggagtctgggattcatcccgtcatttctttcaataaataattattggatagctactttgtgacagggtctgtgctgggctctgggggcaaagctgtcatgggtgtcacctgcatagcatgtagccatgtagccatggcctaggaactgccagagccagtgccagccatggaactgcctgcagtggtgggcgtcttctctatctgctctgtgcagtgtgaccgccactggccacctgcaatgcccgagcccttgacaggtggccagcatgacagaggatgcgaatttgttttgttttgttttgttttgattttgttttgagacagagtctcgctctgttgcccaggctggagtgcgatgatgagatctcagctcactgcaacctccaccttccgggttcaagtgattctcttgcctcagcctcccatgtagctgggattacaggaatgtgacaccacgcctggctaatttttgtatttttagtagagatggggtttcgccatgttggccaggctgatcttgaactcttggcctcaagcgatccaccctcctcagcccccctaagtgctgggattacaggcgtg

SEQ ID NO: 92081 - DNA, 1050 bp, Homo sapiens
cggaccctgacaccatctctgtcccactctttggttctctctctccattgccctctctctctacatctctgtccctgtcccactgtgtctctgtctccttcctccaggtctctggccctttctctgcctctttttgtctttaatgtcctgcctcagcccccagggcctttcatttctttccatctcccattcctcccaactcccacctttctcaactttttacttcaagggggtcttgtttcttttcccttctttcactttctgtttctctttctatttctgtttacttcaagggggtgtcttgtttcttttcccttatttcacttcctatttctgtttacttcaagggggtgcctgtttttttcccttcctccctctccccagccctccaacacttggccttgactttgagattccagaccctctgttcctctcttcctctgctcactgcaggcgctggtgctgcccagcccacgcccttacgtgcggatagatggcgctgtgattcccgaccactggctggaccccagcgctgtgtgggaggtgaagtgcgctgacctctccctctctcccatctaccctgctgcgcggggcctggtgagtggcagaggacctggccgtggccctgtgtgggattctgggcgggcacacagagagcagagtagggaggggaccttggctcacatctgctcttccaggtaaggatcaggaagatgagcttgcattttatttgagtgtcagataaaaagatcaaaacattttttctttaaaaatgggccgggcatgggggctcgtgcctgtaatcccagcactttgggagaccgaggcaggcagatcacttgaggtcaggagttcaaggccagcctggccaacatggtgaaaccccatctctaccaaaaatacaaaaattagccatgtgtgatggcgggtgcctgtagtcccagctacccaggaggctgaggcaggagaatcgcttgaacctgggaggcggaggttgcagtgagccgagatcacaccactgtactccatcctgggtgacaaagcaagact

SEQ ID NO: 92082 - DNA, 1030 bp, Homo sapiens
tttattttaagacggagtttcactctcattgcccaggctggagtgcaatggcacgatcttggctcactgcaacctccgcctcccgggttcaagcgattcccctgcctcagcctcccaagtagctgggattacaggcacacgccaccacgcccggctaattttgtatttttaatagagacggggtttctccatgttggtcagactggtctcgaactcccgacctcaggtgatccacccgcctcggcctcccaaaatgctgggattacaggcatgagccaccgtgcccggccccatttgttcttatttaaacctagaaacccttcccatgtccagtctcttcccaggggccatccttggggttccttctggaagttcccttcagacttacttctagtccctcctcagtccactgaggagcccctccccagcagtgagggccccgccttgggcgctcccccttctcatctcttgcctccccttctcccagctgaagaaggactaccttgatggcgtgggtgacaccctggacctggtggtgatcggcgcctacctgggccgggggaagcgggccggccggtacgggggcttcctgctggcctcctacgacgaggacagtgaggagctgcaggccatatgcaaggtcctggggaactggggctgatggcagaagcaggagggaaggagattagactcccgggggtatttcctattgcacaacccagaccgaggggtgctcacatccccctgtgaaggatccgttctccccagtttttatttactttttctggttctatgagcaactcttgcttcatatagaaaaacaggctgggatagaaagatgtcaggaatgtgtgtcagtgagagattgagattagctacaaatagtggtggctcacataagaaaagaatttttttgttatgaaatgagaagtgtggagggggcagtctgatgccattagggattcaggttcctcctctccccacatttttttttgtccccacattttttttttctgccatgtgcctctgg

SEQ ID NO: 92083 - DNA, 1052 bp, Homo sapiens
tcagtgaaaacttttggaattctaaggaaaggaggacttttttttttttttttaattatcttggggatgaggctggatgcagtggctcacgcctgtaatcccaacactttgggaggctgaggtgggtggatctcttgtgatgtgcacctgtagtcccagctactcgggaggccgacgcaagacagtcgcttgaattcaggaggcggaggctgcagtcagccaagatcgcaccaccgcactccagcctgggcgacagagcgagattccgtctcaaaaaaacaaaaacaaaaaacaaaactgatgagatgcccgtaaagtgttaattcaagctccagcaaggccgcagccccccgtctgatgctcctgaagtcaccgactctaaatggtgtcgggccctcttgccagtgactagccccatgctttaagctctcagaatccttctgacatcagggttcttccctctcaaggctttccacgaaccctgtcactagttgtgacccgcacatgtcctgttcgcctcacatttagggcttattgtctttattctcacaaagatgtctcatctctcttctccctgccggccctgcagtccctggtacgtgagcccctttcccggcgccggcagctgctccgggagaactttgtggagacagagggcgagtttgtcttcgccacctccctggacaccaaggacatcgagcagatcgccgagttcctggagcagtcagtgaaaggtgagggtgctcacttttctctcctgaggtctgcagcttgcgctgaccccggcctcccagcctgtccccagtcctggaccgtttgaccagaatcctgcctgctccggcgcttgtgagccagggcttcccaaggaccacgcttctgtgtctccctcagactcctgcgaggggctgatggtgaagaccctggatgttgatgccacctacgagatcgccaagagatcgcacaactggctcaaggtgattctcgacccccaactgggccttctccaccccgggtctggaggtctgtcccagctaggcagtggatttcgagcc

SEQ ID NO: 92084 - DNA, 1280 bp, Homo sapiens
ttcaagaccagcctggctctactaaaaatacaaaaattagccaggtgtggtggtgggcgcctgtaatcccagctccttgggaggctgaggcggaaggctctcttgaacccgggaggtggaggttgcattgagcagagattgcaccactgctctccagcctgggcgagactccgcctcaaaaaaaaatcagaatgagatctagagcataatgacatttaaacaaatcagcacccacatgcagcaaggtgcatgtgcctacatggggagaggtgtagggattggaaatgaagaagaaaatgatggtagggccttccagagcagggctgggaggtgctgttggaactgaggagatgattcgctcaagtctctgcaccagttcctcctccagagcttccagaaccttctaccagtgcaggtggggtcagaagagaaagctgaggccacatgaggggactcagctgatttcccctcccttctcccatcgtgacagatccacgccctggaaggcggggaggtgaagatcttcagcaggaatcaggaagacaacactgggaagtacccggacatcatcagccgcatccccaaggtgggcgtctgccacacacttgcactctgccagggtctgtggtcaggggtgcaaaggcctgaggcccatctaggccagtgtggcacagtgcggggtttattgggaggagatcaggttgcgtttggctgcaaatgacagagcactcagtcctgcgtggtgtaagcccatatgattttttctcacatctagaggtgggcaccccagcaccgacttggctgagcactgatgtccccctgaaccaagcttatcgctacctctatcccctgctgtccttggctggttggcttttagtgccaatgcttgtccccttagagtttcccaaacagatgtcattcttccagacagaaagagggaaaagggattctagcttgagttaacactttcctggacacctcccacccacaacccctcccccgccgtggactgcagctgggagtcactgtccagcactgggttccatggccaccctagtgcaacaaagcctcggaaagccagagtctaactctgcagcctctccagccaggaacgcggggaggaggagtcaggacgagtttggagggggccagcctgtggataggccccaagcctcagaaatagcagctcagagtcatacagggctgggcctcacaggccccagagttggggacttctctgcacccagtaggggtctcgtgcctgttcgaggagtccccta

SEQ ID NO: 92085 - DNA, 3551 bp, Homo sapiens
aggtgcagggactcgccacaagcacacacagctggagaaaattcatccaggccgcgagagaagggagacacgcagccacaactgtcaccctcgacacccccacccgcgctctcccctgaaggtcggcagctggagtccgtccgggctgaggcagccgagaaaggcgacgtggggctggtggccgagaacagccgcagcacccagaggctcatgctgccaccacctccgctcactgcctccggggtcttcagcaagttccgcgacatcgccaggctcactggcagtgctgtgagtggggcgggccgctcatcccggaccccagacatcttggggacctgaggccacgcgtgtgtcaggaaggcttctgggtagaccatcagctgggtcgcatcagtccttctcatggggtgcacagcttcctctcctccttcctgcacccaatcctaggggagtctcctcttcagagtctagcagacctaatgccatggctgccacatgacaggactcagtaaatacttcctggataaagggagagggaggcaaggaggagagctagctcgttcttactgccctaagagtgggcggccatgggagctgggacatggggatggggtgagggaaggagggcaggtattccaaaatgcagggcagcagcacggctggtggggtggaggtgtggtccctgccttcaccaggcactgacggctcttcccctgactctccagtccacagccaagaagatagacatcatcaaaggcctctttgtggcctgccgccactcagaagcccggttcatcgctaggtaagcgtgtgggcctgtgaggctacagagggggactgcaggctcggaggtgaaaggagggagggactggcagctggaatcatcacaaatgccctgaccatccttggatgagaaaagcatgagcaggaggcccagcccctaaagagtgggaagggacaccatttcctttcacaggccagcttctgtcccttggtagtgctgtctagagaaggcccctgggcccctgtgggtgaagcatgctgtgattgattggtgaggtctgcctcggcttgggcgcgggccctgcagcaggaagccagggtttgtttgccatgacagtgagagcaaatccattgagggctcacatcatggagcatttcttgggagccctgccctgtgccccgtgccttacctcatcagttcctaccagcaactctgtgagactggtcttgttaccctcacctccagtttatagaaggggaaatggagacatggggaggcaaactaagccacttgtctcctgccactggctcaaagcaaggaccatgctggggtcctgaccattacagtcaccagggcgggcgccaggctcagttctctccctgactcatcctcctcaagcctcgccaacccctcagggcagctgagatgggaggtgctggtgcacctacttgtgcccctccccagtctatgctagtgggcaggatcattactgcctggctcagtttcctcatctgtcacatggggctgtgtgatatctggggtcccttccaggctctgaagattcttctggtttttgaggagagggtctacatacatcaaggtcgaggagatcagagaagggaggaggcaagattggggaggtgcagacaagcccccttccctggcctgctctctccccaggtccctgagcggacggctgcgccttgggctggcagagcagtcggtgctggctgccctctcccaggcagtgagcctcacgcccccgggccaaggtgagctcctgtggcccgtctctgcatccctcgctggagttacctcaggcttcccccctcctcttcagaggcccatgcccgccccttccccagcgggcccctgccataccaggctcctctctcctgggtgggggggagggggcgtcttgggccgcggcatctgcattccttgccatacagcaaaccacccactgcaccctggtgtagccaaggatgtgggtgccttccaaagcctctggtgggtcttttcttagaattcccaccagccatggtggatgctgggaagggcaagacagcagaggccagaaagacgtggctggaggagcaaggcatgatcctgaagcagacgttctggtgagagctgggcagtgggtggagttgccaggggctgtgggcagagtgccagggtgggggtggagccagaggagcagtgggtggggccagtgaagtgacggacaggcatcacgagtgccggtcacggggtgactgagagcagaggtggtgatctagacaaggctggtgcttgacacaaggatggtgacaaagatcaggaaggtggcaaacagtgaagggtcagtgaccccaggagaggtatagaaagacgctggcagcggccaggcacagtggctcacgcctgtaatcccagcacttgggagcctgaagcaggcagatcacttgaggtcaggagtttgagaccagcctggccaacatggtgaaaccctgtctctactaaaaatacaaaaattagcctgtaatcccagctacttgggaaactgaggcacaagaatcatttgaacccaggagttggaggctgcagtgagctgagatcacgccactgcgttccagcctgggcaacagagtgagactgtcttaaaaaaaagaaagacgctgacagcaagggagggcagccggcaacatgaggtttctgagtgccagacagggctgtgcatgcagaaaggccttaagggacccagagaggagcaggtgactgacacatggtgaagggtcttgacagtcatggagaggacatccgtggagcggccacgagggctccagagagagccatgtggagggacctaggccagcagctgacccagggctggtgactccaagatcatgactgccccagagaggatgtcagaggcaggagggccgatggcagttccacagatggcctcagagcacctgctctgggccagggccccccactgggtgctgagcagagagtggtgaacaggcccgggcagcaagctcaactctgcctgcacgtggggctctatcagctgctgacctcaggcctaccccacaccagctacatcaaaatctttgtaggtggaacctagccttgaaaacctttgtctatttttattttgtttgagacggagtctcgccctgtcatccaggctggagtgcagcagcacaatctcagctcactgcaacttccgcctccagggttcaagtgattctcctgcctcagtctcctgagtagctgggactacaggcgcgtgccaccacccccagctaacttttatatttttagtaaagatgggatttcaccatgttggctaggctggtcttgaactcctgggctcaagtgatgcacccacctcggcctcccaaagtgctgggattacatgcctgtaggcatgagccaccatgcccggccaaaaacctttttttaaaaactgtattcttgagtggtctcctgtgtagccgagtagagaatcgctggtctcgtggtgacagatagggaacaggggcaaggccagactaag

SEQ ID NO: 92086 - DNA, 1005 bp, Homo sapiens
cttaggcaaaaaggggtcttttccagaaagggctattaccaatttcgtttcagagtcaagccacgaaccaaattccttcccaaagttagttctgcctatgcccaggactgaacaaggacagcttaaaggttagaagcaagatggaatcggttaggtgtgatttctttccactgtcataatttcctcagttacggttttgcaaaggcggtttcacctccagcaatctgtgattgtcctcatggctccaggccccagagcctgggactgttctgagccctttcctcttctttctccatttctttctagtgtccacccccttaaacccaccccaccccgacaccacactttgaccttgaggaaccacgtgttcatacccccgtcccctcctccaggctccggatggtggagacgctgagcaacttgctgcgctccgtggtggccctgtcgcctccagacctcctccctgtcctctacctcagcctcaaccaccttgggccaccccagcagggcctggagcttggcgtgggtgatggtgtccttctcaaggcagtggcccaggccacaggtaagggggactgtggttggagggaccagaaggacaggagctcagccagagaaaatgcagaggtcaggtggatcggagagatggtggagagaggctgtgaaacagggttgaggagaaggctgagagggaggagagcctgatggggacagatttgcaggggtgtgggagagaacacaggggcagcagttcaggtgagggaggaccaggcatgtgctgggacagggggtgtggggtgcagggaaggggagggctggggaaagatgctggaggcagagacagcaggatttgggggctgagatggaaggttggggcttagagaggtctgaaaggactttgactggagggattggaaggagtgggaggaaagaacatggtgtgtggggggccagcagcctgaaggggcccagccgccagtgctgggtggaaaggctggtgatgcg

SEQ ID NO: 92087 - DNA, 1017 bp, Homo sapiens
cccaacatgagtggagcatttcaggctgttcccagcactctgtttttttttttttttgagatggagtcttgctctgttgcccaggctggagtgcagtggcgcaatctcggctcacttgcagctccgcctcccaggttcacaccattctcctgcctcagcctcccgagtagctgggactacaggcacctgccaccatgcccaactaattttttgtgtgtgtgtttttagtagagatggggtttcactgtgttagccaggaagatcttgatctcctgacctcgtgatccgcccacctccgcctcccaaagtgctgggattacaggtgtgagccaccgcgcccggccctaattttgtatttgtaatagagatggggtttcactatgttggccaggctggtcttgaactcctgacctcaagtgatcggcccgcctcggcctcccaaaatgctgggattacaggcctgagccaccacacccggccctcttctgtattttgtaaggatgctttttggattcagagcctaccttcattcactatgctctcatcttaatctacaggtacatccgcaaagaccttctttccaaatgaggtcatgttgtgaggctctgagtggacctgaattttgggggggctgttccatccactgcaccatccaatggtggcttttgcctacaatgattactgagggatttccctgatgttggtttttgtatttcttctctgcaccttaaaaacctcggtaatgagacttctgtaggaaaaacccagcttctgtttctaatgaggccccctaagtttttcagtaacaaagccattctttccagctttgaagttttagacagaaacacggttttcgttttagaggtggtgcagcttggtggctgggagcacagtcctcaggcacacggccttggtgtacatctcagcttcatacttactcgctctgtgaccttgggcaagccacggactctttcggtgcctctgtttctttatccgtaaaatggaaataataatggt

SEQ ID NO: 92088 - DNA, 1003 bp, Homo sapiens
ccaggaggtggaggttgcagtgacctatggtcgcaccactgcactccagccttggccacagagcaagaactcccccgcctcagacaaagtaaaagataaaaagtattcatagctttcagaagtcataggtgtaaattaaatgttattaattaagttagacaaccaaactgagttacaggattttagaggctgaagttaccctctcagggtggtccaagtgtccatgaggcccctgtgttagaaacaacacttgccgggagaattttagggatacagagttgtatctgattttctgcagctgctgggaggagtgggaatattttcttctcatgacgatgagatttctttttaccactattcctaagtctcctatttcaggccaagtgctagaattccgctagttagcactgaggagtagacagcaggcctgagatctcagctcaaagctaacagaaaggaaaagggtaggtgtagttatatcttccatctgcagggtcagaatgatcttgggggtaaaaaaaaagaaaaaaaaagtctcagggtcaaagagtttgcatcaccgtctgagctctctcaccgcagaagcagagaccccgacggaaagcgtttcagagcctgaggtggccacgaagcaggaactgcaggaggaggaagagcagaccaagcctccccgcagagctcccaagacgctcagcagcttcttcagtgagtttcccttgctcaccccacctcccggggttgtacaggcaggaggctggtgagcctctctccagaggcctgagatgctgcgaagacccttcttcctttcctgctggttggaaagtcggccttgtctctaccagcctgtctcccatctccctgagcactggggtggtgctgggtgcagaatggatgggaggtgggggctaccggaaggagaaaagacccactgttttctgtcttcattcctagccccccggaagccagcagtcaaaaaagaagtgaaggaagaggagccaggggc

SEQ ID NO: 92089 - DNA, 1049 bp, Homo sapiens
aggctcaagcgattctcccacctcagcttcccgagtagctgggattacagacacaccaccacgcccagctaatttttgtatttttagtagagacagggtttcactatgttgaccaagctggtctcgaactcctgagctcacatgatctgcccacctcggcctcacaaagccctgggattacaggcgtgagccactgcgcccagcctgtattttgttcttaaataaccataattacttgtgggaaatgccttggatactctgtaacatcttaaacagtggaattcaattgaaaactgccaacgtcatttcctgttctatgttgatttttgtacagtacttgatttttatagcagcaacctatgaaaacccagctttgcagagatgcaatgtcattgcaaggaatgtgatttaatactgaaaactgaaatacctcgaactagtagttcacacactggccagcaggtgtcgctgggtttcctttgaaaaatctaaaatatcttgcagcgcccagtgagttccctgcatgttggtgaacccaccgaaaacagccataaagatctgatcgattgatcatctggggcctgcatgagattacaccaattgcagcctttaacgtcatttggttttttgtttctgcaaacaaataaaaggtccattttccagggcagatttaaatttggttaagatctgatttcttggccaggtgcagtggctcacgcctgtactcccagcagtttgggaggccgaagcgggtggatcacttgaggtcgggagttggagaccagcctggccaacatggtgaaaccccatccctaccaaaattataaaaattagctgggtatggtggcatgcgcctgtagtcccagctactcaggaggctgaggcatgagaatcccttgaaactgggaggtggaggttgcagtgagccgagattgtgccactgcactctagcctgggcgacagagggagactgtgtctcaaaaaaaaaagatttgatttcttattgacaatttttagtacaaattttattgtaaactacacttttagcc

SEQ ID NO: 92090 - DNA, 1060 bp, Homo sapiens
tgtaaatgctccagagtgacccccgagatgcgaggcagctggggtatttatacaccaactcctgccgatcgtggggtgagggcctctcctggggctagtttattccctgccacttccagacttctgaggttccggggaagctgtctggaacacttggaggcagttaagatctgaggggagcagtggggagctcaggggacctgctggaatcggtactgtgccaagtacattacatcattgtttactcgtggggattatttctattctgcagtcgtgagagagcaaagcacagagaaattaagtaacctgcccaaggtcacacagccaggaagcaggagggattgaagggtgcggcctgcactggggcagtgactgtgtgcaggcagagaaggggagagggcccagagccttccagaggctacatcagtgggtgtgagctctccgggatgggagcacacgagccagcgaggtcagatacaccaagccctttgcctccccagctcggaagcagctcccgaaacggaccattcaggaagtcctggaagagcagagtgaggacgaggacagagaagccaagaggaagaaggaggaggaaggtgagcccccagaaggagagaagtgtgtgtgtgtgtgtgtgtgtgtgtgtgaagccaagaggaaggaggaggaggaaggtgagcccccagaaggagaggtgtgtgtgtgtgtgtgtgtgtgtgtgtgtgtgtgaagccaagaggaaggaggaggaggaaggtgagcccccagaaggagaggtgtgtgtgtgtgtgtgtgtgtgtgtgtgtgtgtgtgtgtgtgtgtgtgtgtgttttggatctgcaagggcaggggcctgagagctcaggatgtttggaccctgccgatttgatgcctgtgtccaggcatccaggaattccacctaccaatatgggaacttttgttctgaaaacattgtgggatatatttgtttggacatcttaatttagtaataattcaggcacagtttcccatttttatttgctatttttatatttatttaatggaaactatttttcctcta

SEQ ID NO: 92091 - DNA, 1734 bp, Homo sapiens
ctccagcctgggcgacagaatgacaccctgtctcaataaataaataaataaaaataaaactatacgaagaggtgtacatcatttcccctgacatcccattgtgtagagctggccaacatagtgaaaccccgtctctactaaaaatacaaaaattagccaggcatggtagtgcaggcctgtagtcccagctacttgggaggctgaagcaggagaatcgaagattctgttactgtagaaaacagaagagctatgggggtccttgatgggaccatgatcctgcactggagggcgggatgatggcccaggtgagaagaggccacccctgagttagggctgagaccatagggtcagaaaggagggtagacagagaggtttcagtcccctctactctcaacttttggaaaatggagtccctccttcccccgctcactctagaactgttctttcctcttccagaagcctgccctggactgctcacaggtctccccgccccgtcctgccacatctcctgagaacaatgcttccctctctgacacctctcccatggacagttccccatcagggattccgaagcgtcgcacaggtgagaacacacgggcccctgccccttcagtcgcctgcctttctttttctcttttttttttttttttttttttttgagacatagtctcgctctgttgcctaggctggagtgcagtggcatgatctcggctcactgacctccgcctcccgggttcaaacgattctcctgccttagcctcctgagtagctgggactacaggagcccgccaccatgcctggctaatttttgtatttttagtagagacggggtttcactatgttggccaggctggtctcaaactcctgacctcgtgatccgcctgcctcagcctcccaaagtgctgggattacaggcgtgagccaccgcacccagccagtcgcctgcctttctccccacttggattcccatccaaggtagtcatccttacaacagctctggtcttagtgttgtggttaagagcacgggtccaccatccactggctgtatgacctgggacaaatgactgaccttctctgagcttaggttgctttatctgtagagatgatgataatgatagcacctaccgcacagaaatatctgagttagaagataacacgtgtacgctgctcagaactgggcccagccctcagtcggggctcagtcattgtgggtcattgtgactgtagttatgcgctgagatggaggcctcacagctcatgtgggaacacaagcgcggggccatggctcaagggagacttccagaagagaggctaaccaagctgagccctttaggacaaagaagaggcaacaagcaaaggaggaggggagcatgctaggcaaggggaacatagaaattgagaaggcctgggggctgctgagggcctggtgtgctggcgtgtagagcgcaggattggggatggtgagcaatgaggtgagaaggtcctggaaaaccagcttggggaacagcgtctttgtcctaagggggacttggaatgtttgctgtggggtaagaacagggcgagagacccattcgtaatgcggggcagtgtgagcccttgccgtccggtctagcctattgagcgctttagcgtggtgagtgtgacaggggagctgaatctttcatgttagatcctttcagttgaatttacatttgaaagctaatatgtgattcagtgcgtaaagactttgcactt

SEQ ID NO: 92092 - DNA, 1057 bp, Homo sapiens
ggaggcctcttatctttttctctgatttggagcttttattctgcaccagtaaatctcaccagcaaattattttggttcataaaaacaggagtttctttttgaaggggaaattcatgtttctgtttttttttttctttctttcttaaagaaagggttttatgtgtgtttagatctctgcacaaccaatcacctcaacaagtgtttggatttctgttccaggagcagctgacagacgaagaaaagtgctggacaggaagggagaattctgacgccaacatgcagcgaagtatcatgtgagcaccctcccttgcccctgagtctttccttctccaagtcctctgtttctttctctaaatctgtacttaaaaaaacaaacaaacaaacaaaaactcttacgttagattttgagttggaatttccaggagtcaagtagtatggaaaatgagccgtgggatatggaagacagtgtattgaacaacagtttttagttgcaaggagcagaaaccctaacgcagtggttctcagtcagcagcaattttgctccccagggaacatctggcagcgtctggagattttttttttttgagttggagtcttgctctgtcacccaggctggagtacagtggcgcaatctcggctcactgcaacctccgcctcatgagttcaagtgattctcctgcctcagcctcctgagtagctgggattataggcacgtgccaccacgcctggctaatttttgtatttttagtagagacggggtttcaccacgttggtcaggctggtctcaaactcctgacctcgtgatccgcccacctcggcctcccagagtgctgggatttcaggcgtgagccacggcgcccggccagtgtctggagatatttttggttgttacaacctagggacagagggtttgccattggcatctagtggctaaaagccaggcatgctgctaaacatccttcaattcataggacagcccccccaacaacacagaaccatcaggcccaacatgtcaatagtgtctaggttgagaaacctcgtgttaatgcagtccggc

SEQ ID NO: 92093 - DNA, 1114 bp, Homo sapiens
cactgcgggataaggggtgcggggagcaaggtgcgggatgcggagtatggggccctctttcttccaagacacagggctgctctgcttctgtggtttccacaggagctctctactgtccatgatcagatcaaccaagaagctccaggctcagcctcccggctggggccctcactctcactgtaggccaagcacagcgtctcccctgacatcttctcttctgggctccgcatctaaggatgacctgtcatcccgccagtcactggctagacccccagcccacccttcctgtcccacctctgtgccccctgctcaggccctcttcccagcctccagttggtcccttccagcccattccccattctacccagtcctgccctgcccctcctctgggcacagcctggcaccagggaccctgcttcccagcctcactggacacaatccttcccctcgaatctgcgcctcagctcctcctgcatgcttgcggcgcccccaccctgccatccctcgttctctgcctttgcctgtgctgttcccttggactgaaatgccctttcctcttgttgggctggccaacccctgctcacccctcaccctcagctcagaggctgcctgctctgggaagccttcccggatgtcccaggctggggtggtgcccctgtgggttcctccataccctgggctctactgtgaagccccttagcccagcaccaagcaggcccatggggcagcctggggagggatgttgaactggtgcccctgagatgcagcagcccgatcctgccctggagggagaggtgtggggtccctggacacaggcagtcggtctgtaatggaggcggcagctggcacagcaggagcccgaggctgcatctgctcgtccgcgagaggtgatgtccatcctgagccttgaggatgaggcagtgaacattttccaagaacacaccaggggtggtttggcttgtgcctgggcctggaggcctgagagagcaggacctgttcagggtaaaccggctttttcagcatgcgctgcattcacaggggaggagcaggaggtgacagggagggcctcgtgtgccgggccacggagcttggactctgagagcactggggagcc

SEQ ID NO: 92094 - DNA, 1125 bp, Homo sapiens
ttgtgccactgcactcccgcctgggtgacagagtgagacaatatctcaaaatagaaataaaaataaaaacagaaataaaaaatactaaaatctccccaaattccacattttagtgattttaaactgcagtttttccaaagtcatgttttgtcatctctgaaattgggatgtaatttacaggtggtggtgtgacatcatttaattggcaacgtattttgtttttagttgcttcataaaataatcaggtagagtcagtggcaccttagattctaggaaatatggtaaagatgacttctacgtgaatggcactgtgttagatcatgagcccttgtgcagtatacgacatggacaaccatatgtgacagccctgcctagatggtgaatggggataagtgggaaacgggggaattatttaggggcaggacatctgattctggtatcctgccctcaacactcctgcccatgttcacccgccactgcttccttcatccccccggcaggtgacagtaaatttggatcagtatgtctacattcacttctgggccctgggccagcgagtcgggcagatgcccctgaagtccagcgtgggctccaggcgtggcttcttcaccaagctgccccctgcggagaggtgaggcggcccttgttccccagctgcagcaagagggagcaaggttagagtcaagaggggactgacaggtcagtgtctggtttgggtgtctgggccccaggcgggaagttgagaaatgggaggcgtgactcatccaaatgctgtcttttcttctcaagggaaagtgagtactacacttgattcccaggggaagagaaaggatggggacagttctccccattttccaataaggaaaactgaggctcggagagggaggtccacattctgaagatgcggcacggccaggattccaacaaacaatctgcacgtccaataccagggatcgatggcgcgattgaaccgatcccctgtggttggacacagctgatccctggtttcttccccatgattactgagtcgcttttaagatggttgtgcgactgtagagccagagtgagcgtcctaggattggagggggctccccgggcagtgcagtcccgatcctgctcctgcct

SEQ ID NO: 92095 - DNA, 1039 bp, Homo sapiens
aggagttcaagaccagcctgggcaacacagtgaaacctcatctctattaaaatacaaaaaatatatatatatattacccgggcatggtggcgtgcgcctgtagtcccagctacttgggaggctgaggcaggagaattgcttgaacccgggaggtggaggttgcagtgagcggagaacgtgacactgcactccagcctggcaacagagcgagactctatctcaataaaataaataaataaataaataaataaatgaaagtatctggagagggatgtccttagatgtccctagaatccttcatgcagagacctatcccatctttttctctctgactctcctcttaggccttatatgaccccatcaaccctgacagggagaccctcgatcagccatcactaacggatccccagcgtctgtctaatgagcaggaggtgcttcgggctctggagcccctgctggcccaggccaacttctccccgctgtctgaggacaccctggcctacgcgctggtggtccaccaccctcaggatgaggtccaggtacttggctccctaggagaacaaaactcccaggaggcctctagggtggggcagagcctctgagaggcatgggctgctgggagttgtagtcctgagcctgggactgtggcccatatggcgcacttggtgaactcagagaaggggctacttttggctggatgcagtggctcaagcctgtaatcccagcagtttgggggtccaaggtgggtggatcacctgaggtcaagagttcaagaccagcctggccaacatggtgaaaccccatctctactaaaaatataaaaaattatccaggcatggtggcaggtgcctgtaatcccagctactggggaggctaaggcaggagaatctcttgaacccgggaggtggaagttgcagtgagctgagatcgtgccattgcactccagcctgggcaacaagagtgaaactccatctggaaaaaaaaaggaggtgctgctgtctcaggtcacttcactgccatctgttggaaaagtatcata

SEQ ID NO: 92096 - DNA, 1064 bp, Homo sapiens
gagcggagatcacgccactgctttttgcactccagcctgggcaacagagcgaaactgtttctttcttttcttttttcttttttttttttttgagatggagtctggctctgttgcctgggctggagtgcagtggtatgatctccactcactgcaaactccaccacccgggttcgagtgattctcctgcctcagcctcctcagtagctaggattacaggtgtgtgccactatgcctggctaattaagattgtttcaaagaaaaaaaatttacttaacttttctaagccctagttttgttatctcagagatgggacttgcagcacctactgtgagggctgttccttactatgagagtccatcagtgcctcaatagcatagggcctatagtggggtgctcaggaaaaggtggtgtcagcatttgctccgttgtcttgtttccccgtctgaccccttccttgtcctcccatctcccgcactgtgtctgggagttgagagctcctggctcctgtcacccaggggcacagtcgggccatgggagggcctcaccccttcgaagacccgcgtgatggtcttgggccttctcagaaactgcacggcttcgctgttggccagctcctggaggcttttggggatgtgcatggcagctgttttcctttggggccactgggaggtgggagccagggtgctgggcgctgcctgctgggcactgccgtccgggggcttcaggccagccctgggcttggctgctgtgggatgacacagatgggggatgccagtcaggggcacggggtggaagggctgttgggggccccaggattgggggacatggggtggggatggggggggtccccggaatggagttgtgtggggtgaggggactgctgagcctcttaggagtcagggtgtggggtgaatgggctgtcaggggccccagaagtcggggacgtaggatgggggtgcaggtgggtcccagggaatgaggttgtgtgtgctgagggggcttctgtgggccccaggagtggggggcataggatgggggtgctgggggtcccaggaatggggttg

SEQ ID NO: 92097 - DNA, 1100 bp, Homo sapiens
tcatgcctataatcccagcactttgggaggccaaggcaggaggactgcttgagcccaggagttcaagaccagcctgggcaacatagtgagatcccatctcttcaaaaaaattgaaaaattagctgggagtggtggcacacacctgtagtcccagctactttggggcttgaggcaggaggattgcttgatgccaggaggtcaaggctgtagagagctatgattgtaccactgcactccagtctgggctgcaaaacgagatgccatctcggaaaaaaaaaagaaactccaggccccgttactgaatgtgcgctgagtgaaggctgcccctcctggatgtggccctgttcccactattcccttaataggcgcttcacccactggggtttcctgcctggctcctacaggtaggaacgtttgtggcccgtgcctgagtcccccgcttaccactggggttctcctggaatgaaaactcctcctccccaaagatattctttgaaatatttgaagacaagggtctcccttgaatctcattcgcggactcagcaccccgttccttcactgactcctcacacgccatggtttttagtctttggtcaccatgaggagtgaaagggcttgggcttgagtgacagggctgggtccccttgttggcccttcctcttggtgctctctccacgggtggaagcattttctctctgaactttggtttcctcaactgtaagaggaggctccttgtgcctccctcccctggccagtgtggggactcaaggagtagtgacttgacaggacttagtgtgtaacaggcctgaagaaagtgcttcctggccgggcacggtggctcaggcctgtaatctcagcactttgggaggccgaggtgggaggatcacaaggtcaggagttcgacaccagcctgaccaacatggtgaaaccccgtctgtactgaaaatacaaaaattagccaggcgtggtggtgggcattacaggtgcgcacctgtaatgccagctactagggaggctgaggcagaagaattgcttgaacctggaaggcagaggttgcagtgagccaagattgcaccactgcactccagcctgggcgacac

SEQ ID NO: 92098 - DNA, 1712 bp, Homo sapiens
gaaagaattagttgggcatggtggctcatacctgtaatcccagcactttgggagactgaggcagggagatttcttaagcctaggagttccagagcaacatagcaagaccctgtcactataaaaaataaaaaaataaaaaaattagctgggcatggtggtgcacgcctgtggtcccagctccttgggaggctgaggtgggagaattgcttgaggaggtcaaggctgcatggagctgtgactatgccactgcactccagcctgggctacagagtgggaccttgtctcaaaaaaagaaagaaagaaaattgccagtagtgagaaagggtaggaaggaaagaaaccaggaatgtatctgtgagtcctgggggacctccctccctgtggatctgcccatctagcgtgcctgccctgctctggctgtgggaggctgtcccctccctgcaggggccccagcggtaatgccctccctgttttctctcctcacagtcctaaaggggaagaagttgagtttgccggcatagccccggtcctctccatctctctcctcggcagcagcgggaggcagaggaaggcggcagaagatgaagagctttcccatccaggggtgacttttttaagaacccacctcttgtgctccccatcccgcctcctgccgggtttcagggggacagtggaggatccaggtcttggggagctcaggacttgggctgtttgtagttttttgccttttagacaagaaaaaaaaatctttccactctttagtttttgattctgatgactcgtttttcttctactctgtggccccaatttttataaagtgtttttgagtgtcctatgggccggggcagggtccaagatcttttcccttccccaggcccctcggctccctcccagatcccacccccagccccactggttgccaaacactaaatctgccgacacccatctgccccacctcctgccatggccatgaaccgcgacccccactaaatttctagattggggatagggagaaagggaggcccaggaaggtctcccctgattttttttcatagtaatttttttccccagagtttgaattttttggtcttctcctggttttttggcaaattaggggggcccggggctcaagtgcgggaagggggctggcccgaggatcccatggctctcacaccatgtttttgtacagaactgatggttgaatctttgttctcttgaaataaacagaagaaaatgaaacctttcttttgctgctccttgccactctgtccctggtgtgtatggggtcccgcccccgcccctctttctgcttctgcttttgccttattgactatctgtaggcgacgaggcctaggaggagcaggaagaggagaaactgggtctcccaagactctcagctgtgcagttcctcgccgtgctgctgggaagaggttttggagagaatcttgaagagtcttcttaccttggcacagaacttgtctgatggttctccaaaccctcagggttgcagaggaccttcaggagaattggctgggcatggtggctcatgcctgtaatcccagcactttgggaggctgaggcgggcggatcacctgaggtcaggagtttgagaccagcctgaccaacatggcaaaaccccgtctctactaaaaatacaaaaaaaaattagctgggcgtggtggtgtgcccctgtagtcccagctactcaggag

SEQ ID NO: 92099 - DNA, 1050 bp, Homo sapiens
caagaggcagaggttgcagtgagccgagatcaccccatggcactccagcctgggtgacagagtgatactccatctcaaaaaaaaaaaaaagaaaaagaaaaaggaagggaaatttccaaggcaagattccaacccagcctgcctttcagagaggcgcaattgcaaagtgttcatgagaacggactgcgaatccttggttcgaatcattgctctgctgcttgctggctacatggtcttgggcgagtatcttaccttctctggtgtcagtttcctcatctgtagaataagtgtgctaatcataggatctcctcgccgggccatggtgatgattaaatcagaggtaccagtaactcgggcagaactgtgtctggcacttggcagcacctggatcaccttccttctctccaccttcgcggcacctgtaactgcaatgttgtcctctgccttttctcccgccctgtcccctcccacctcatcatgtccccggcctctctgcagatcctctggaccttctccatctacctggagtcagtggccatcttgccgcagctgttcatggtgagcaagaccggcgaggcggagaccatcaccagccactacttgtttgcgctaggcgtttaccgcacgctctatctcttcaactggatctggcgctaccatttcgagggcttcttcgacctcatcgccattgtggcaggcctggtccagacagtcctctactgcgatttcttctacctctatatcaccaaaggtagctggaatgtgggacggctggaagggaacctcctatttctgcagctcctgccctccctggggactggggtctccttacccctgtattatgcaaagaagggagcatttcttcgccgggtttctggggtggcaggcctaccatcctcctaggaattcagaccgttagcctctgcctccctaagggctaaggagtttctgtccttagcccccatgtcacttggagcgtaggccaggcagggcagggactcagcccactgaaattcattcatttattcatgcaacaaatgtattgagtac

SEQ ID NO: 92100 - DNA, 1343 bp, Homo sapiens
tcttcctttcttccttttcttccttttcttcctttctttcttttttcctttctctttcgacaaagtctcgctcggttgcccagactggaggcagtggcatgattctggctcactgcaacctccacctcccaggttcaagcgattctcctgcctcagcctcccgagtagctgagattgcagatgcccaccaccaagccaggttattttttgtatttttagtagagacagggtttcaacatattggccaggctggtctcgaattcctgacctcaggtgatccactctcctcagcctcccaaagtgctgggattacaggcatgagccaccgcgcccggctccaaatctgctagtttctattagcatgatcccgtgcatgtgacttgacctctctgtacctcggtttccacatttgtaaagttgtgatcaggtcattgtgagaatttactgagactttgcagcactgcctggtgtcaaaacacataaagactctagaatcagagtgtaaggatttggaccctgcctctaccatgtagcagctatgggattctgggcaaatcacataactaccctgtgcctcagtttcctcatctgtaaaatggagataatcagttcctatgtcatagggttcaaatgagaggttggtattaataaagcacagtatctgggatgaggtaggaagtgctgtgtcaatcaatgttcaatgactgaagtgtttagtcccatctctgatacttttacttttaaatgttcgctgttaatgatttttattccatggtgttttgctgggacctgtacaaactcctgggaggaattttgcgagagccagtgctaagtttgcgatctcttgcctcctggggcctggcaggaatcataaattcagggtaaccttttcttacctgtgcccactcctgccttataggaagataggcctgggtggccagatgtgctgatcttttcaacagaagccataattcaggagttttcaggcaagatgtctcattttaaaattttagccacagattcagactatatttcttttttttttttttttttcttttttgagatggactctcattctgtcgcccaggctggagtgcagtggcacgatcttggctcactgcaacctctgcctcccaggtcaagcgtttctcctgcctcagcctcccgagtagctgggattacaggtgcttgccaccacgcctggctaatttttgtgtttctagtagagatggggtttcaccatgttgacaggctggtcttgaactcctggtcttaagcaattctcccatctcagcttcccaaagtgctaggattacaggcatgagccaccgtgcctggccttc

SEQ ID NO: 92101 - DNA, 1048 bp, Homo sapiens
gaggggctgggcctggactcttgggtctgagggaggaggggctgggcctggactcctggatctgagggaggagggaatggggccctggactcctgggtctgagggaggaggggctgggggcctggactccagggtctgagggaggaggggttgggggcctggactcctgggtctgagggaggaggggctgggggcttggactcctggatctgagggaggaggggttgggggcctggactcctgggtctgagggaggaggggctgggggcttggactcctgggtctgagggaggaggggttgggggtctggactcctgcgtctgagggaggggcctggactccgggctctgagcctactggggcacaggcctgtgagttgaggccccttctcatcatccccctcctcaggtggtctacatagcctgctccttcaccacggtctggttgatttatagcaagttcaaagctacttacgatgggaaccatgacacgttcagagtggagttcctggtcgttcccacagccattctggcgttcctggtcaatcatgacttcacccctctggaggtaggcgccttgctgtgactccttatttggggggatggttgtggcagagtagctatgacaggagaccctctcacaggcttccttctgcagggtgtgcccaaactgccttattttaggatgcataagttcagtgcatgggctctggggtcagaggaaattaacacaacagcagcaagactcgctatgtgtcagtcactaccctaagcatttcacctacttacttttctcagcagccccactttacagatgaggaaactgaggcttagggattcttttttttctggagacaaagtctcgctctgttgcccagactggagtgcagtggcatgatctcggctcactgcaacccccgcctcccaggttcaagcaattatcctacctcagcctcccgagtagttgggaagacaggtgcacatcaccatgctctgctaatttttgtatttttagtccagacagggtttcacatgttgaccaggctggt

SEQ ID NO: 92102 - DNA, 1081 bp, Homo sapiens
gcctggactcctggatctgggggaggagggtctgggggcctggagtcctgggtctgagggaggaggctgggggcctggactcctgggtctgagggaggaggctgggggcctggactcctgggtctgagcgaggaggagctgggcctggactcctggatctgagggaggaggggctgggggtctggacttctgggtctgagggaggagaggctgggggtctggactcctgggtctgagggaggaggggctggggacccagacttctgggtttgacgaacgggctggggccttgagtcctgggtctaggggaggaagtaggtggggtatctttcttgtcttctgggggattggagttagagtgcctgaaagctgcaaaagctagcagctgagcctccgggtccctgcaggatttttcaagctcagagggcagtctctacatccctgcaagggctgaggctggtgtactggactgcgtctcttccagagacacagactgcctgggcgaaccggtgctggatttggcactttccgaaccctgcgaccctcccaagttcctatggggcagctttgggggtgcgtttagcgccgccacggcaaagcaggaggtgggcgatagggggcgccggggatccaggccccgccctcgggggcggagcctctcctcccggactcctccccctctcgctctcctccctcttcccggctccagctccgccgccagctccagcctttgctccccctcccaaagtcccctccccggagcggagcgcacctagggtccctcttccgtccccccagcccagctacccgttcagaccagcagcctcggggggcacccccccgccagcctgcctccctcccgctcagccctgccagggttccccagccatgaatctcttccgattcctgggagacctctcccacctcctcgccatcatcttgctactgctcaaaatctggaagtcccgctcgtgcgccggtgagaggcccaccagggctggcgaaggagagagattgcgggcgggggttgggggacgtcgcaggactcaggaagggtttgggggcactaggggcacaggtt

SEQ ID NO: 92103 - DNA, 1049 bp, Homo sapiens
agaccagcttggccaacatggtgaaaccctgtctctactaaaaatacaaaaattagctgggtgtggtggcatgtgcctgtaatcccagctactcagaaggctgaggcaggagaattgcttgaacccaggaggcagaggttgcagtgagtgaagatggtgccattgcactccagcctgggcaacagaggaagactctgtctcaaaaaaaaaaaaaaaaaaaaaaaaaggctggaggatagatttgtctggagctcacatgagaggttgtgactgaggacaggagccattaacatatccagcactgttcaataaaactttcagcaaagatgaagctgttctatagctgctctgtccgatttgaaagccacaagccacatgtggctgttgagtacttgacaagtggttagtgcacccagaaaactaagttttaaattctatttaacatttttttcctctggtccttgattcaggataaattttatttaattttaatttgaatagttatgagtggctaacagccaccctattggatagcatgggagacagtatttaaactcatgggcctggttgagatcaccagggagagaggaatagagaagagaacagtaaggcactcctagtgtttagaatttagaattctggctgaggaagaagggccagcaaaggaggcagaggaagaggtgacagagaggtaggaggaaaaccaaagaagggaaaggacactctgcaaagcttcttccagtagggaaataccatcagcaccctcattgcatgctgggagatgtagtctcctcactgccttcagggaaccagtccctctcagtggctgctgggggctgtagttcccttaccggatgctggttgtattaatgacagtgatgttagctgctggaacggatgaacccccaaatctcagtggatcacccaacaggaggttgtttctcattcatataaaatccaggccaggcacagtggctcacgcctgtaattccagcactttgggaggccaaagcgggtggatcatctgaggtcaggagttcaagaccagc

SEQ ID NO: 92104 - DNA, 1043 bp, Homo sapiens
cagcctggacttgattctgagagtagtggggagttcaccggaaatagtattccagtcaggggaaacgagcatatgcaaaaacccagaggggagagaaacttgggcagatggtgggaccacaatagttccaagcagatgaaggccacagaattaggagtcagagtgacaggccaggcgtggtggctcacgcctgtaatcccagcactttgggaggccgaggcgggcggatcacgaggtcaagagattgagaccatcctggccgacacagcaaaaccccgtctctactaaaaatacacaaattagctggacatggtggtgcacgcctgtaatcccagctactcgggaggctgaggcaggagaaccgcttgaacccaggagacggaggttgcagtgagctgagatcgtgccactgcactccagcctgggcaacagagtgagactctgactcaaaaaaaaaaaaaaaaaaaaaaaagcagtcggagtgtgggtggcaccaggcctttgccttcaatgcaggttgagaggcctggatctgttccacagcactggtgagccaggggtgggttatgagcaggagacgggtggcgtgagttttgggtatagaaagacgcctctgggacctggtggggaacagactggagtagagagattggaggctggaggccaggcaggaggctgggatgagggcctaggagggctgtggggaggcacagaagaagacagggcagagagagccccaggccaggaagaaggagacttggggaccgataggctgggtagcgggagggaggaaggcggctaagagtctagtccagtgactgggtggatgacatgagagacagtcagagtacccagggtgatgttgcatagtgaagatattgaggagtccagggacacccccggccatccccagccctgggcacttctaaccagaggaagagacatttgagctcagtctttaagacacatggagttggtcaaggctgggtacagcggctcgtgccagtaatcccagcactttgggaggtcaaagcaagtagatc

SEQ ID NO: 92105 - DNA, 1023 bp, Homo sapiens
cctgcctcagcctcccaaagttctgggagtacaggcgtgaggcaccgccccagcctgatccccgagtcttttgcttggctgagccataaccacgcactcccttgtccccagagccctacagccccgccgtgtgggtgatgatgttcgtcatgtgcctcactgtggtcgccgtcactgttttcatcttcgagtacctcagtcctgttggttacaaccgcagcctggccacgggcaagcgtgagtcccccttcctccatcccccgcctcggagatcccgaaccacagagacagagaactacatttcccagcagcccctggagggggggcggtcaagctagggcctctcgggaggtgccagatgccttgagggccactgggaattgtagttctttctttttttttttttcccttccttattgagaagggatttggggtccatgtccacgtcctggccccctgcaggccctggcggttcaaccttcaccattgggaaatccatctggctgctctgggccctggtgttcaataattcggtgcccgtggagaacccccggggaaccaccagcaaaatcatggtgctggtgtgggccttcttcgccgtcatcttcctcgccagctacacagccaacctggccgccttcatgatccaggaggagtacgtggatactgtgtctgggctcagtgaccgcaaggtgtgtgtgggcccagggctgggctggagctggggctggggctggaggtcacagagcttgtcatgtggtagattagaggggattcttgcggggggcgggggtgagaggggtggggggagggcgggaaggggtctcttcccaaggagaattccagaatggtagaatggaatgttgtggatgaagaaagaacacggttcacgatgagctatttaaaatattcctagggaagagggtgtccctgaatgttctaggggcagttgtgtcaaataggatattctagaaccagtgcttctctcaaactgtgaggaaggattaatttttgaaacttcta

SEQ ID NO: 92106 - DNA, 1471 bp, Homo sapiens
ctttggtaacatagtgagttatagaacttatctgatggggctggcatgaggtcaaatgaaataacatatagtgcctagaatagcacctggttgtaatatgaggtatgtattttctgttactattcaggaactgtttttggttgtggctgtttgttttgtttttgagtcatggtttcactcccattgcccaggctggagtgcagtggcgtgatcttggctcactgcaacctctgcctcccaggttcaagtgattctcctgcctcagcctcccgagtagctgggatcacaagtgcacaccaccatgcccagtaatttttgtatttttagtagaaatggagtctcattatgttggccaggctggtcttgaactcctgagctcaagtgatctgcccaccttcgcccccaaaatgctgggattataggcatgaggcactgtgtccagcctgtttatttgttttttgcttcaaagctaaaacatcttctgatcaggtagacttgtaagtacaatgatacggtatatgaagagcacttagagcagtacttggctgatagctggggctgtctgtttccatgaaattatttttactatgtttcagtactgttctagatgcagaggatttagcagcaagcaaaaggtctctggctccatcaacttacacactagtgggggaagggaacgagatgaaactaagtaaatgtgtaccatgtccaaaggtgttaactatcctggaaaaaatccaatgaagtaggggaagagggttagggtgctccaggagtggggtgctatttttaaacagtgtggttaggaaagtattctgtcataaaatgccatttgcatagatactcacaggtagtggggcagtgaaccctgtaaaagaatttgcaggcaaggaaaaacacaagttcaaaggccctggggtgagcttggcatgtttgaagagtttcaagtgaagcgggagtgtccagtctgtctggagcagaatgaacaaaagggagaatgacacaatttggggagcgggcacagagaagacattgttcagagccttgtcggccactgtaaggactccagcttttaattgggagacgttggagggtttcaggcagaggaaagacagggtctgacttctgttttaaagtggtccctctggctgctgtccttaaatatcaattgcagagaggtaagggtcggaggaaagaatcctgtggggagacttacggtattcaggggaaggatgacatcagtagtagtgtgacagcaatagacatcatgagaagggggttggaagtgagcttttttttttagatgagacagagtctcgcttttgtcgcccaggccggagcgcaatggtgcgatctcggctcactgcaacctctgactcctgggttcaagcgattctcctgcctcagcctcctaagtagctgggattacagccacccaccagcacgcccgactaatttttgcatttttagt

SEQ ID NO: 92107 - DNA, 1103 bp, Homo sapiens
ctgcatgctcaccacagccaccgcccatgatggggacgtcaatgtcatcagctggagccgccgggagcccttcctgctcagtggcggggatgatggggccctcaagatctgggaccttcggcagttcaaggtattttcccagccggacacctgggggctagagaagcttgctcccagcagcccctgggatttgtaggatttttcctccttgaatagttttacacaaccagagctggagagcccttagaactagactcctgcctcttcagggtacagaggaggaaactgaggctcagcaagaggaagggtggcgggtctccactcttggggtcactcactctaccaggggaacagctgacaagagatggaaggggctggggcagcagagactaggactctcatctgcctgtgggcagaagtacaggtgtctgtacggccagtgctgagagcttcagagagttgtagatttctagatgcaactgagaatcggggcccagcctgctcgttgtaggagaagactgaggcacagaaaggacaggagccgctgtgacatgacagccaagctagaggttgacattgtggagctgggagggtccctgtgcaggagaagttgcagcgtccggcatccctctggacaaagccgcagctttgtgtggctctgccttcccgggctgccatgatgtcatcctttttctcctccagtttgatcgtttctatagcgtcagccctggggaggaggctggagacggattccagcctcccaggcccaccaggtcacacagggcccagcttgttgaccattggaacttcagagcagcctctcctaatgagagagacgccaattgagcggggcctttgctgtagtgaaagtgctgtcattcttagtctttctttgggtcggcttccggggattgtgtttctgcctcctttgaggcctttgtagaatctgctgggagagctctgggagagccatgccctcctttttttctttttttttttttttttctttttttttgcgatggagttttgctcttgtttcccaggctggagtgcagtggcgcaatctcggctcactgcaacctcccgctcctgggttcaagcga

SEQ ID NO: 92108 - DNA, 1034 bp, Homo sapiens
aaacaggcaggcagagggaagagcaggggcgggggttttgctacctgagctgggaggggcttctttgcaggtgaatcacagttcccagcaacccctgggctggtcagccttcttagcagccagaattaccctgtgtccctttcctggactctgggcttgtgagggcttaaggggtggggccctggctgaaccctgaggctggagaagggttggggcttctgcctgggtcctccccagagtcaggctgaggcattcagagcccgttcctcccatcctctccctctagtctggttccccagtggccaccttcaagcagcacgtggcccccgtgacctccgtcgagtggcacccccaggacagcggggtctttgcagcctcgggtgcagaccaccagatcacacagtgggacctggcagtggagcgggaccctgaggcgggcgacgtggaggccgaccccggactggccgacctcccgcagcagctgctgttcgtgcaccagggcgagaccgagctgaaggagctgcactggcacccgcagtgcccagggctcctggtcagcacggcgctgtcaggcttcaccatcttccgcaccatcagcgtctgaggcgtcccactggctctgatcttgcttcctgcttggaaactgaagtcgaattgggctcccctggaaggggttcattcaggtctgttgactgagactggccggcctgtgggctgccgtgatggattctgtttgacgtattgttctctagaaggcctggctctgatccagtgacccctctcaccaaagaactcggtttaaccagggctctgtaagaccactcccacccagagacttgtgtggcctggtgtggcctgtgtgtcggattccttcctgtcagctgtgacccatttgacctgtgtccccagaacccagttttttgtttgtttgtttgagacggagtcttggtctgtcgcccaggctggagtgcagtagcacgatcttggctcactgcaacctccgcctcctgggttaaagtgattctctcagctca

SEQ ID NO: 92109 - DNA, 1013 bp, Homo sapiens
ccccaggttcagtgcctccaactctcaccccatccccattttatgcattttctcactggcttccatcctttcagagaaaccctctcagtctgtctgtctctgtctctgtctctctcccccatctctgtctctcccatctctctctgcctctctctgtcttcacaatttcatctccccatgtcgccatttcttaaaacatttcttttctccttttcgttttcccaattgccctgtccgcctctatcttctctgtccccctccatctaggtctctgtccccccctctctctgggtctctgtccccctctgtctctgagtctctatcctctcaaggtctctgttcccctctctctgggtctctgtcctctctcaaggtctctgtccctttctctctggatcaatgtccctttcctgctgccctctctgggtctctgtccccctctctctcagggtccctgtcctgcttggtccctgtactttttcttggggcaccctctcaacacccctcctcctgcctatctctgcatctctttgtctttctgtagtctctgctttccaacctgctgtccagcccccaccagtaggtggggagtggtggggaacacccctggtttcggaagagtgagagtgttgatttgggagggtgagggtggggcctgggggcggggcttcttggcctcagattagacagtgactttgacacgaagttgaagcaccttaagccctgtatctcctttatatggaaacattaagctgctctcgcaggtcaggtggaggatccctttccctcccgccctgcttttgctaggggaggggggtgccctgagcctgagtcgcagccagcctgggagctgggccatgttggccgcagatggccccctggtgaaggttcccgttggctttgggaagtagacaacgggtctgcctcacggggctgaggtgggactggaggatttcgagggcagaactctgggaaggaaagaaaggcttaggacccaaccagcattccccctg

SEQ ID NO: 92110 - DNA, 1028 bp, Homo sapiens
agctaggcatggtggcccgtgcctgtaatcccagctacttgggaggctgaggcaggcgaatcacttgaacctgggaggcagaggttgcagtgagctgaggttgcggtgagctgagattgtgccgctgcactccagcctggcgacaaagcacgactccgtctcaaaaaaaaaaagaaaagaaaagaaaaaagttaaaaaaaaaattacccaggagtggtggtgtgcacctgtagtaatcccagctactcaggaggttgagacaggagaatcgcttaaacttgggacgcggagattgcagtaagccaggatcatgccactgcactccagcttgggcgacagagcgagactctgtctccaaaaaaaaaaaaaaaaaaaaaatgcgtatcgttccacctatttgacagatgaggccactaagccccaccagaaagcatgcttggccgatgagctcatccattcctgttgcccctgacgtttctgccggtttcttgtcccagcaggttgggggcgcctgccccccactaggccaagtggagggggtccctccgtccaatgggcctggccagggccctacgccgcctcagcggcgccctggattcgggagacagccgggcgggcgatgaagaggaggccgggcccgggttgtgccgcaacgggtgggcgccggcaccggtgcagtcacccgtgggccggcgccgcggtcgcttcgtcaagaaagacgggcactgcaacgtgcgtttcgtaaacctgggtggccagggcgcgcgctacctgagcgacctgttcaccacatgcgtggacgtgcgctggcgctggatgtgcctgctcttctcctgctccttcctcgcctcctggctgctcttcggcctggccttctggctcattgcctcgctgcacggcgacctggccgccccgccaccgcccgcgccctgcttctcacacgtggccagcttcctggccgccttcctcttcgcgctggagacgcagacgtccatcggctacggcgtgcgcagcgtcaccgaggagtg

SEQ ID NO: 92111 - DNA, 1128 bp, Homo sapiens
acagccatcggggactacctgggggagaggtacggtcaccactcagctcctgtggggcccctccctcccaccccccagacccagctcctgccctcacactggcagctcacaggtggaacagccctgcagcctccccgcagaggggccctggcagatcagccttctgactggactgtgacagaatggactgacatgggctaggggagcctgcggccaaccgagagcatctggggatgtggggccttctggaattacctggcagttgtggggaagcatccatttatgtctgagaagggtagagaacatctctcaaggatcatgggagcttgagaaccgtgggtagaccatggctgtgcataggcactgggtggccatctgggagctgtggggaccgctgggcccttgtgggagcttaggagttgtgggggtcatttggaagcctagggtgcacaggactggacatcagatgattggaggccatctgtggacgtctgggaatcagggatttatagagatctggggtgcttgggaagcatctctggatgtctgggggatgtgggggctgtgtctggatacctggggagcatggggatcatttgagagaggtgacagtaggtagcatacatgtttgcggcatttctcccaactgtacaaaggtctggcctaagcagggttcccaagccagatattcctcccaagagtgtgttctgagcatcccccaccctgggggcaggcctgtgtgggagtccagcaggaaacttcaccctcggcagtgggcagctgtggtgcagtagagggggcacgacttccccagggcattgccctttgcccattcctgccccatcctttccaaactgtatgtgtctttgtcccatccttccagggaagaactgaacctggcagtgctccatgcttttgtggatctgcatgagttcaccgacctcaatctggtgcaggccctcaggtgagtgagggggaggggtttggaacgccaggaatgtacctgtcagggccttcctagttacaagtgacaaaccttactcaagaaaaaaacagaaacaagcaaaacagaaacaaaaactagggaactgagtgtgtcctgcaccataaaagttcagggttatggcc

SEQ ID NO: 92112 - DNA, 1031 bp, Homo sapiens
gcagaaagaggctatttctgtagggattcacaacactcccgtggccaatgcccattggtgagactggatcatgtgaccatacctgaaacaactgctgaggccggaaggtcgggattcctcgtggaccagttcctaacacagggactgagagtggggacaggctcccaccagccctggcatccattcctggcccctccccaacccaggcagtttctatggagctttcgcctacccggagaggcccagaaaattgaccggatgatggaggccttcgcccagcgatactgcctgtgcaaccctggggttttccagtccacaggtgcgggccccaaatcctgggtcctgggaaagaggagactggggcccagactcctaggtctgagggagggagggggctgggagctgggaatcctgggtcctggggaatgggggcactggggactgacatgcctgggtcgtcaccacctgccctgtccggtgcagacacgtgctatgtgctgtccttcgccgtcatcatgctcaacaccagtctccacaatcccaatgtccgggacaagccgggcctggagcgctttgtggccatgaaccggggcatcaacgagggcggggacctgcctgaggagctgctcagggtcagtcccccttccctgcccctcagccctgcccctcttcctgccacagacacccccgccccacctgtggtctcctagtgcccaagctgtctgccctcacccccaagatggtgcgatcatgccaactcgtgtgtgatctttttctctctctctgggtgcttctcttcttgactgtctctctcaggctttggccctgacaattttggcctgtctgtcttctctgtctctggctgttgggctttccggccctcgattggcctcattccccatctgtctgtttctctgaggacgtagccggctcctccacctatcaccagggcatctcttctttcctccgccacctcagcctccctccacttctctgcctttcacttccctctcctccccactacccctctc

SEQ ID NO: 92113 - DNA, 1047 bp, Homo sapiens
tgctctgcttctcacgcccctcccatctcccagaggccctgtccccctgttgagcccaggccccctcccaccccttccctttcagggggccgggtgaagacgtggaagcggcgctggtttatcctcacagacaactgcctctactactttgagtacaccacggtgagcgtgacccgacccgggctctggggtcctgggcggagtggctgggagcctggactcctggggctgagggaggtggggtggggtgaggacttggaagtctgagttctgtccaccttgcttcttcaggacaaggagccccgaggaatcatccccctggagaatctgagcatccgagaggtggacgacccccggaaaccggtaagaccctctctgtacaccttcctgccagggcggggcctcctctgcccagggctggttcttacctgcgcccttcctctctcgtccccagaactgctttgaactttacatccccaacaacaaggggcagctcatcaaagcctgcaaaactgaggcggacggccgagtggtggagggaaaccacatggtgtaccggatctcggcccccacgcaggaggagaaggacgagtggatcaagtccatccagtgagcctggactcctgggcctgatggaggaggggctggggcctggactcctgggtctgatggaggaggggcaggggcctggatgcctgggtctgatggaggaggggctggggcctggacgcctgggtctgacggaggaggggctggggcctggactcctgggtctgacggaggaggggcaggggcctggacacctgggtctgacggaggaggggccgggggcctggacccctgggtctgacggaggaggggccgggggcctggactcctgggtctgacggaggaggggccgggggcctggactcctgggtgtgagggaggaggggccgggggcctggactcctgggtctgagggaggaggggccgggggcctggactgctgggtctgagggaggaggggccgggggcctggactcctgggtctgagggaggaggggc

SEQ ID NO: 92114 - DNA, 1018 bp, Homo sapiens
agacccaggagtccagacccccatcccctcctccctcagacccaggagtccaggcccccatcccctcctccctcagacccaggagtccaggcccccatctcctcctccttgagacccaggagtccagacccccatcccctcctccctcagacccgggagtccaggcccccatcccctcctccctcagacccgggagtccaggcccccatcccctcctccctcagacccgggagtccaggcccccagcccctcctccctcagacccgggagtccaggcccccagcccctcctccctcagacccgggagtccaggcccccagcccctcctccctcagacccgggagtccaggcccccagcccctcctccctcagacccgggagtccaggcccccagcccctcctccctcagacccgggagtccaggcttcagcccctcctccctcacacccgggagtccaggcccccagcccctcctccctgagacccaggagtccaggcccccagcccctcctccctcagacccaggagtctaggccctggtctttcctccctaaggcccaggagtccaggcccccagcccctcctccctcagatccaggagttcaggcccagccccctcctccctcagacccagaagtcctgcccccagtcaccagcccttcctccctcagacccagaaagtccagctctcaccttccccccgctgccttggttcatgcagcacccacccaccctgtggcaggtgtctcaggatcacttcaagcaccaccaagtctcccagcaggacttattgggaagaagctaaaaccttatcctctctctccctttccccaatcccccaggactcacatgtgaccctaatgccgccatcaccttaactccgaggccagagtctacactacagcctccctaacagagggaaggggctgggttcccaccccttgctccttccctctccccgcatccagactacatcccgcaaatacaccagtgaacctggtaccaaggtgatggggga

SEQ ID NO: 92115 - DNA, 1001 bp, Homo sapiens
ccaacgactgggaccccctggacccaggagtgcccgcccctcaggccccccaggccccctccgaggtcccccagctggtgtccgagacctgggcctcccccctcttccctgcgccccggcccttcccagcccagtcctcagcgtcaggcagcttcctgctgagcggctgggaccccgagggccggggcgccggggagaccctggcgggagaccctgccgaggtcttgggggagcgggggaccgccccgtgggtggaagaagaagaggaggaggaggagggcagctccccaggggaagacagcagcagccttggaggtggcccaagccgccggggtcccctaccctgtcccctgtgcagccgcgagggggcctgctcctgcctgccactggagcggggggacgccgtagcaggctggggaggccaccctgctcttggctgcccccacccccccgaggacgactcctcgctgcgggcagagcggggctccctggccgacttgcccatggccccccccgcctcggccccccccgagtttctggaccccctcatgggggcggcggcgccccagtaccccgggcgggggccacctcccgctcccccccccccgccgccacctcctcgggcccccgcggacccggccgcgtcccccgaccccccttcggccgtggccagtcccggttcaggcctctcgtcgccgggccccaagccgggggacagcggctacgagaccgagacccctttttccccagagggagccttcccaggtgggggggcggccgaggaggaaggggtccctcggccgcgggctccccccgagccacccgacccaggagcgccccggccacctccagacccgggtccgctcccactcccggggccccgggagaagccgaccttcgtggttcaagtgagcacggaacagctgctgatgtccctgcgggaggatgtgacaaggaacctcctgggggagaagggggcgacagcccgggagacaggaccc

SEQ ID NO: 92116 - DNA, 1036 bp, Homo sapiens
agcctgggcgacagagtgagactccgtctcaaaaaaaataaaaaataaaaagagataaggaaataaatgcagaaagagagatggagtcagagagagacagggagagacaaggaaacaggaggagacaggcccctggtactaagaaaggcagcgccctttggccacgtgttcctttctctgctgctgtcagagaccctggctttggagggaaatccaggtgtgtggaggcggactggatggacagatagacaaaggccccccaagatgggcaaccaggggagaagcaggttggaagagccccagaacttggtggaaatgtgggggctctgggggagggcatccagctctgggggctggacctgggggtttgtggggcacagctagttagacccatgagccccagtggggctgggggaaccccgccactcagccctcaccccacttgtccctctgcccacagtgcagtttggctcctggttcgaccacattaagggctggcttcggatgaagggcaaagacaacttcctatttatcacctacgaggagctgcagcaggtgagtccccacctcctccaggtgcagcgtcccccccataccctctgctcacaccccacactctccccttcccgagggtctcaggacccctccgcttccccatgcaatgcgccagcccctggggatactgcaggaacagaacagaggccctgagcctgtgagcaagaccacagacaaaatccctaaaccacacagcaggctggcggggcagaggagctgaggagcaaaggcgagtgggaaggaagataaggaatggtcaggggcgagatttaacccaggagggttggccggacacagtggtagtggctcacacctgtaatcctaatgctttgggagcctgaggcgggaggaccccttgagcccaagaggtcaaggccacaatgagctatgatggtgccactgtactccggcctgggcagcagagcaaaaccctgtctcaaaagagagagagaaggccaggtgtggtggttcacacctgtaa

SEQ ID NO: 92117 - DNA, 1179 bp, Homo sapiens
ggagcagggtcccccattgacagggtagggaagggtttgccaagccttcggcctttaaggctgagcgagcaggcccagtggagaggcatcctggctggtctgcgggtgagagctgatgagcaggagaaactcgtgggggctgtcagatttggccagagacagatgctccaacaggcagatactgtgactgtcagtcggaagccattggcgtttgccagacagtggaaggagagggtcagttcgtcgtgctcttggccgggggcaggcaggcaacctgtcgtgcctttaaggacctttgggtgattagagacaggcaggcagcttgccgcctggaaatgatcaagtggtcagcctgaccaaattcaggacagctgaagggtctgactgggcactgtgtgactggtgggttggaggctgtcgtgtggctgagcagagatggccagctgatgggtcacacagttggggatggtgtcaggaggtcaacctgaccagcagagacggctggcaggaaggtcacggaaggccagccaggcatggtgccactgggtgcaggcaggtggcggatctgagtggcctgacacattggatggtcgcttatttgggcagcgtgattgtcagaacagtgtggcaggggctgctgcagggagccatttggacatctgcagggccccgccggaggcctcggatggccacgtagggtctgcctatcaggagaacccccagatgatcacagtccccagagacagccagacccccggggacccagcctctcacagtcagtcctcccacccgagtgaccccgatggcggcctcccagctggcggcgctggaaggagtggactccggtcccagggtgcccggggccagccccggctttctatattccgagggccagcggctggcactggaggctctgttgagcaagggcgcggaggcgttccagacctgcgtgcagcgcgaggagctgtggcccttcctcagtgcggatgaggttcagggcttggcagcggcagctgaagactggacagtggccaagcaggagcccagcgggatggcagagggagccaccaccaccgatgtggacgcgggcagcctgagctactggcctgggcagtcggagcagccggcgcccgtcctgcggctgggctggccagtggactctgcgtggaaaggcatcac

SEQ ID NO: 92118 - DNA, 1061 bp, Homo sapiens
gagagcacggtagacctgggagccgctgggtcttgtctgtctggaagggaggcaggacttggagctctgggagcaaccagggcatcaagggtttgtctcagccagtcgcgagcgtagagcttggactgttggttggaactgagtgtccatgggcagtgggcaagtctcctggtcctcctctccttctctttgtgaggtggaggtgtcctggtggcttcaggagattgccccaagtcataactgagttttatgtcaaaggctctgctgagggaggccctattgaacagtctgcatttttttttttatctggagctttccccagctggacctgaggagaggcctgtggggtttaaggggtgtggtgtgagtggggggtcccgttagagggcacagctgccctggcctggggatgcctcaagcggggctgaatgtaaacaccagaacaacttacgacgtacatcctccccaccctaagatccggaagatgaagcttcctggccgggaaaacaagacggccgtggttgtggggaccataactgatgatgtgcgggttcaggaggtacccaaactgaaggtgagctggcgggggctgggcagacccatcagacccttgctgtactgtgctgtgctgtgctgtgctgtgctgtgctgtgctggtccatcctcagtcttgccaccgctggtgaggcaagcatcctgcctgtctgagtggctttgaggattggtgtgggtcgtctctggcatggttgatggtggggtcccctgggcaagcttcttctggggcaagttgtaaactgttagtgctggcccctagagccagacagcctgggctcaagtctagactcctttgtcacctctgcacaggtctttttttggcccagcttccttgctgtagtttctagcataacaccagggatgtggtggtgaaagttccggaagtgttgagaactgctgctgtcagcccagggtgctccgggtagtaaacgatagtgttggttaccagggctctgctgcgccaaggcagtggagggtgagtcctggcagcccctgggtgaccacgc

SEQ ID NO: 92119 - DNA, 1008 bp, Homo sapiens
aactaagagtggctgcgggtccagccacctgggtcggaatcctggctctgccacttcctggctttgtaaacccagtcatatcagcctccgagtacctccacttggtcatctactaagtgggggcggtaggctatgactgacccatccctgctttcctggcccccagagtaggtccccagtatcgggaattgctccctccgggcagccgcagaccccctgccgccctccagcgtgcccctagcccaaaaccacggcggatggcagcggattatccagccccgaacgccgcaaagcgagctcaccatgatggcgcctcctgctcggccaggtccggaaagagagaacgggctggggtgggcggggaaagcctcaagcgagtggcgccgccgtgacgtcacatgggtgcgacgcggcgctctaccacgatccggacttctctgtggtgagttggacgactgactagccgggcgataacggcagagagcatagagcgcaggaacaagcgcaacgtccaagagggaagggccagcacgtcgggggcctctctggccctacccaggccgtgttctcgatagctttccggaagaaagggatctgggagcgagatgcgtgtagctagcacgatgcgtcgcgcggtgacgctctggcccgacgccgacggcctctcagtggctcccggaggacccggcgggcccagtgttggaggtgaggaggcggggctggcagggctagtcggggcatctggaaatttccgaccccacgcttcgggcgtttccttatcaggttcaccgctccctgatctcgcgctgcacttcgtaggcgcagccgctgcttgggaagtcctacttaaggtctaacccgagatgatcttgctgcacctcaatctatagcatcctgtattcccatcctttgagttccgcttctccttctcccccggcccctagatggcccttccctgacctagaaagagggagacagagtttcataggggaggcaaaatggagactc

SEQ ID NO: 92120 - DNA, 1025 bp, Homo sapiens
cccagagtgatgggtgccaacagaggtctagggcttccctggagttcagaggtggcatctaatcctgcctggggcccctaagggctggaagtaacctaatcctgggtaataggtgtttggggtgaggaaagtgggaaccacagctctgaactacagctcctcccacacatggggacaaagggcatttggtttcacacctaagccctgcctttgtctcagcagctaggagttggggcagggctgcatacctaggcctggccacatgagagccagcaggtcccaggggccagccctccaccaattccgttgggggctgatgaagggactgtttccaaggtggggggcctgggtcactggcctctgcagaccctaacctctctccacagagatcacccctgacctgctacctcggccgccccggttgcttctattggtcaatccctttgggggtcggggcctggcctggcagtggtgtaagaaccacgtgcttcccatgatctctgaagctgggctgtccttcaacctcatccagacaggtaagggccagtgagaatgggagctgggggctgggacagctgagtcctaagggagcaaagtggtgggtgggactcctgggtctatggggctggggtgggacagcctgcctaacagcccggtatcccacttcagaacgacagaaccacgcccgggagctggtccaggggctgagcctgagtgagtgggatggcatcgtcacggtctcgggagacgggctgctccatgaggtagagcaggagcaccctgcccctagccctgggccctgggggactatagagactgccaccaggacccaggcttctggtctcccaccctccaggtgctgaacgggctcctagatcgccctgactgggaggaagctgtgaagatgcctgtgggcatcctcccctgcggctcgggcaacgcgctggccggagcagtgaaccagcacggggggtaggttgaggataccacgaagggagggatgagcccctcctggggtgataggg

SEQ ID NO: 92121 - DNA, 1087 bp, Homo sapiens
cgacggcctggtgcacctgtgctgggtgcgtagcggcatctcgcgggctgcgctgctgcgccttttcttggccatggagcgtggtagccacttcagcctgggctgtccgcagctgggctacgccgcggcccgtgccttccgcctagagccgctcacaccacgcggcgtgctcacagtggacggggagcaggtggagtatgggccgctacaggcacagatgcaccctggcatcggtacactgctcactgggcctcctggctgcccggggcgggagccctgaaactaaacaagcttggtacccgccgggggcggggcctacattccaatggggcggagcctgagctagggggtgtggcctggctgctagagttgtggtggcaggggccctggccccgtctcaggattgcgctcgctttcatgggaccagacgtgatgctggaaggtgggcgtcgtcacggttaaagagaaatgggctcgtcccgagggtagtgcctgatcaatgagggcggggcctggcgtctgatctggggccgcccttacggggcagggctcagtcctgacgcttgccacctgctcctacccggccaggatggctgagggcggagtctattttacgcgtcgcccaatgacaggacctggaatgtactggctggggtaggcctcagtgagtcggccggtcagggcccgcagcctcgccccatccactccggtgcctccatttagctggccaatcagcccaggaggggcaggttccccggggccggcgctaggatttgcactaatgttcctctccccgcgggtgggggcggggaaattcatatcccctgttcgtctcatgcgcgtcctccgtccccaatctaaaaagcaattgaaaaggtctatgcaataaaggcagtcgcttcattcctctcagaccttctgcccttcctccatccgacagcccgcgggaggactcagactccagcacttccagcagcgcctgccctctatggacgacagcccggagctgcccacgggctgcagccagtatgccagggagctgccctcttcttccacaacagctggctctggggttctcaagatttat

SEQ ID NO: 92122 - DNA, 1072 bp, Homo sapiens
ccgtcccccaccttgtccagccttctcttgcagctcctctccccaacacattaataataatccagctgtgggataagagcgattaaaaaaaagaactacaactcccacggggctctggggcaggtaggcagcagaggggtaggctggtagcactggggcctgctgggagttgtagttccatctacagtggcttaagatgggtttgatcggctgggcgcggtggctcacgcttgaaatcccagcactttaggaggccgaggtgggtggattacctgtggtcaggagttcaagaccagcctggccaacttggtgaaacccgtctctgctaaacttggaaactattccaagattcttctaggacccagaattctggatctgagcccagtcctccctcagacccaggagtctaggtccctagcccctcctcccctgggatctgggagtccagaccacagcccactcagcagataccagccctgggatccagtctctatttctgactccttgtcctcctactccgaccccacccccagggcctcctttctggggcctggtgaatgcagcgtggagtctgtgtgctgtggggaagcggcagagccccgtggatgtggagctgaagagggttctttatgacccctttctgcccccattaaggctcagcactggaggagagaaggtaaggggcttggagggaggagctattgaacccactggggatgggcatgaatagaggctggggaatggggtgctgaggtaggagagcagccttgggggaggaggggacacccagtgggtggagaggaggctgcttacactgtaaaatggatcacccattcttcccatcccaagcatggtcccctagtctccccatctctgcagaagcaatgaaaagcagaacatttcctgtgccaggcagatttaaaaccttgataagcctctcatctcataaccaccccacaaaatgggtacaattattattattgttattattattattattattttgagatggagttttgctcttgttgcccaggctggagtgcaatgatgtgatctcagctcactgcaacct

SEQ ID NO: 92123 - DNA, 1074 bp, Homo sapiens
agcgccacggccagcaggatcccctggcagaactaccacctgaacgactggatggaggaggagtaccgccacatcccggggcgctgtgtccgcctcacgggctacccctgctcctggaccttctaccaccacctccgccaggagatcctccaggagttcaccctgcacgaccacgtgcgcgaggaggcccagaagttcctgcggggcctgcaggccaagtgggcagggcaggcgaccttcgtgggggtccacgtgcgccggggggactatgtccgtgtcatgccgcgcgtatggaagggggtgctggccgaccggctacctgcagcgggccctggactggttccgggcctgctgccgcctcccggtctttgtggtcaccagcgatgacatggcctggtgccgggagagcatcaacagctcccttggggacgtggtgttcgctggcaatggcctccagggctcacctgccaaggacttcgcactgctcacacagtgcaaccacaccatcatcaccgtgggcaccttcggggtctgggccgcgtacctcgcgggcggggacactgtctacctggccaacttcaccctgcccaactcccctttcaacgtggtctttaggccgtaagcggccttcctgccagagtgggtgggccttgcggctgaccttggacaggctggacagaacggcctctagccagccctgcatgtgcctggtcctcatcctgtgacccgaggggcagtgagtggggcgtgcggggcatggactcacggtccctcatgcagtttggatccaggcttatctacttcatagctgagtgagtttggacaactgactcaacctctgtgccttagtatgtcaaccacaaaatgcacaaaccacagaactaaacaccagtagcagctggtgggagctgagcaaattcgcttagagccagtgccttgtgaccgtgtgggaggtgtcggctgctcacatgtatgcagcacgtcaggaacactggcattgctttccaatggaaacgcagttttgccctctccttcctggcagcactggtagcacagagcccagatattttgcac

SEQ ID NO: 92124 - DNA, 1794 bp, Homo sapiens
tgggtctgtctctcccgttgggcctctgtctttctcactatcctcagggagggagaggtggaggtctgcagcagggcaaccctctggggacacgtgtctctgccaactgccctgcagggtgagttccgggtggtggagcgcacgatcaccatgaagcagttgctgcgggccctggaggagggccgcgtgcgggaagtctttggctcgggcaccgcttgccaggtctgcccagtgcaccgaatcctgtacaaagacagggtgaggcggggctgccattgtgggtgggagggaaggaggggaggggcttggtcctcaccgcaccttctgtcccagaacctccacattcccaccatggaaaatgggcctgagctgatcctccgcttccagaaggagctgaaggagatccaggtgagctgcagggagctggggaatgggctgggagcttgttccctggagaagttggtgtcccatgagcccctggactaacagccagcctccttcagtagtaccaggaacagataatggcctttcttattgaggccctggagagtgggctttctgtgctgctctgtggcctggaaaaccccttggggctaaatcaccctttcctgggagctcccggagccctggatatgtcttcagctttggaaaccccttcctgtgatcctctgcggctcctgggtgccctggtaggagaaaccccctctccgtgggcctctgaggcccctgggtgccctggtgggagaaactccctccctgtgatcctctgctgccccgggtgccctggtgggagaaaggccctttccatgaatcactgagaccttagccagccctctggccatctcagaggttggcctcccaagattccctggagccctgggctatccctttggccggagaaagcttcctcccatgagcctctggaccttggcccctctctggcaccagactgtttaatcccataaatctctgggggtattcccatcttctgggccaagatctctttcccaagaatctctgggctcctttcccagacctagagctacatttctgtaaacttttgtgcatcaggacctagaactacacatcctctgactatctgggctttctgagctgaaagtgactttttccaagagccttagaggcctggccataattcctgtcttcagaactacatctcccggaagcctctgcgccgccttagccttgattccccgttcccatcattgttggggccctctgggaagtggactacatttcccgtgagccgctggggcacagctccgtaggcactcggcctggaacaccccagggcctactgggagttgtagtgcagcttccacctcacgcactgcctccgttgttccgcagtacggaatcagagcccacgagtggatgttcccggtgtgaagctgcaggctgtgctccagatccaccgacccgtagcatctcgtcacgccagcactcgcctccctaccaatgactcacctgaagtgcaatacgaaataaaaggccagcgggcggcgtctgggtctctggcgcccccatgtggttgcgacactcccaaagccgtaagggccgacccaggcatcttggcccccagcccctcgtcgcgggttcaggtccgcccattactccttgtcgtgcggtcaaggatacaccttggccccgattccggatctctccgttctcaggccagacccctggtgctgccgttgatttttttttctctgtctttgctgcaattttgaaataaaatgccaaagaacacacattgtcgggcttcttcagtga

SEQ ID NO: 92125 - DNA, 1913 bp, Homo sapiens
cgtgtcctttgctttctagagtctccgtgtgtctctacctgtttgtctccctgtctatatctgtctctctttttctccatctctctgacccagctgctaaatctccccggtgctctcctcttggcctccatctttcagttgtctgtgtctttgtgtatctgtctctgtctgtcttggtgtctctcatgactgtctggagaagtctctgagcctccccacccgcgtgtccccgcagctgtttgagggcatgaaggcgttcaaaggcaaagaccagcaggtgcgcctcttccgcccctggctcaacatggaccggatgctgcgctcagccatgcgcctgtgcctgccggtgaggggtcccggtccaccggggtggggaggagggctggggccggggcagcaagggccccttgactcattcagaatcccacccagagtttcgacaagctggagttgctggagtgcatccgccggctcatcgaagtggacaaggactgggtccccgatgccgccggcaccagcctctatgtgcggcctgtgctcattgggaacgaggtgggcccaactccagggctgggaagctgggctgcgggggttggattctgcagggcaggggtggggtcctggaggcctgggcctggggacgggaagggactgggggcctggactcctgacgctgtccctttgcccgtcgcagccctcgctgggtgtcagccagcccacgcgcgcgctcctgttcgtcattctctgcccagtgggtgcctacttccctggaggctccgtgaccccggtctccctcctggccgacccagccttcatccgggcctgggtgggcggggtcggcaactacaagttaggtgggtaagtagcacccccatccccagaacgactggcgcactgggcgttggagacacagggaccagcgtgcgtgctttcggccatgcctctggatgtcacatgaaggtgacatcatcagcaccgtgcagggctcagtgctaagtgacctccctggtccctgaaaacaaaccatggaaggaaggaggaggggattatttttcagatggacaaaaaggctcacagatgggaaggcattgggtggaggtcagtggggaaaccaggactggtccctggaagcctccaggagtgaagcttacactcagctcattggcttctcgccccagaagcctcccctgatcccccaggctgggctgcgctccccatacccagctcccacagtcgtttgagcctccaaagcccctcacccccgtgtggactttctgtgtaaatctgtctcccagtggcctcagctcagcagggcaggaaggagacagctgggtctcctgggcaaccaaggcagagggtgggcactggcgtgttgggacaggaatgtggccccagctgggggtgcattcaggtcctttcagccacatcctgtgaggtctcctgagggccaggccctgtgctggcagaagctggggacacagatgagtcagccccgagccctgctctcctgggtctcccaggctggtgggagccccagtattcggagctgcatgttctctggtgaggtgacccagggcattgtgaaagccttcacagaggccagaggcggtggctcacgcctgtaatcccagcactttgggaggctgaggcgggcagatcacgaggtcaggagatcgagaccatcctgattaacacagtgaaaccccatctctactaaaaatacaaaaaaaaaaaaaaaaaattagccgggcttggtggcgggcgcctgtagtcgcagctactcaggaggctgaggcaggacaatggcgagaacccaggagacagagcttgcagtgagccgagatcgcgccactgcactccagcctgggcgacagagcgaaactccatctcaaaaaaaaaaaagaaaggtttcg

SEQ ID NO: 92126 - DNA, 1616 bp, Homo sapiens
ggccgggtgcaggtgaaggcagagttggacctcaagtctcagctctgggaattggactcaaggtcctattttcttggaatgaaagttgaaaaaaataagagatggggattgctgtgcttcccaaactcctatctgaagctttgcacctggattggaaatcgaggcagcgtctcatggtcaaagtgacagatgctgcaggctggctgagacgatcccttctgactgtgcgatgtcaaacagcagcagcgtttcccagagtctatgatttcagagaacaaggtttctcagtgaggaaggaaacagccaaagaaaggggtcattacaagccttcacagctgcggtgtaaccttgggagaactgtctgttaactttacacctgactttatttgagtctcttatcctagctgatgaatgtcagggcagaatttcacttttttcggctcttagtgactgatagggatagtcctgggatacctggggtatgtgggcaatctgggctttagtggtgacactcctggactgtggtggggcagtactgggctttgacaggtccacttgggactgatgtggaccgtctcatcatggcacagttctggtgtcatagaatggccctgaactcatgatgggacattcctaggctctgatgaagatagagatatcctgtaatggagataattgggctgagtcctcagctgtgatggggacagtcccggggtgtggagaggacagtgctggaccatggtagggacagtctggaaggtactggcctagacagcaacatagggatagtcctggggattgaaaaagacaacaatgggattttttttttttttttaatttcagacctggtgaataggaaataagccctgatatttggcagagacaatgctggttataatggggaaaagtgctgggctttggataggggacattcctgagctgtttgggacagtacttggctctgctggggaccagttctgataagttacaggcacaatctggacttgtgatgtggagcatcttgggccatcatagaacagccctggtctgtgatgggggagagtcctgggctataaagggggcagttctagacgtgatggggtcatgtgtgggctgtgacaagggcagactgcggtatgatggggtctctccggggccgtgatatggggacagtcctggagtatggagggcactgctgggctttgacagtgacactcctggtctttgatggtgatactcctgggctgtatgggacataatggaggttctatcacattatagagacctgccctgtgaacccccaaacgtactttatttctttgtctcgtcttttctttttgaccgagtcttgctctgttgctcaggctggagtgccgtggcacgatctcggctcactgtaacctccgcctcatgggttcaagtgactgtggtgcctcagcctcccgagtagatgggctcaagcgatccacctgcctcagattacaggcatgagccaccatgctggtcttttttttttttttttttttttttttttttgagagacactctatcactcatgctggagtgtagcagtgtgatcgtagctcaccacagccttgaccagtaggtcaaggtga

SEQ ID NO: 92127 - DNA, 1005 bp, Homo sapiens
ggaagtcaccaagaacgcaccggaggtccttgcccgccctggaaaacgccctctgcggtgaaggagaggtgagaggccagggttcccatactcttgggtcctagggaggatgggggccagagggctggaaaactgggtcccggaggaggatgcactgggtgccagtactttaggtcctgggaaaagaggaggctgggaccctggactcttgggtctgggggaggaggcggccgagatcccggattcctgagtgtgagagaggagcgtgttgggagccaggacccctgggtctgagggcccagactcctgtgtcggaggaagggaaggccggaggcctggaatcctggggcctgggtaacaaaatgcttgtgtcttgattcttggaagtgggggcggcgctgggggcccgaactcctggttccaggggaggaagaggcttgggacagacattatgcattatccagccctccatcccccacagaccacactgccatgcctccctctgggccccgaggaaccctccttctgttgccgctgctgctgctgctcctgcttcgcgccgtgctggctgtccccctggagcgaggggcgcccaacaaggaggagacccctgcgactgagagtcccgtgagtggccctgccctgctatccagccaggtgtttgcagtggtactacagctcctgcagaccccggtgcccgtagggcggatgctccagtgacttcctggccctacagttgtagcttgttttttgcccaccattcctcccagcagcaggggtttgacttggtgaaaaactggaggtccctgactctgaggtgtggaaaatctgcatcacgccccaactaaacgtctgtttttttaagattctctccacccaagaaggaatttgaaaacaaacaaacaaaactacatttcccagtagcaccatgttgctagttcccagtagcagttgatgttggctagctggggtattctgacttcatggtgctcttgggagttgtag

SEQ ID NO: 92128 - DNA, 1247 bp, Homo sapiens
ctaggcagtggccctagcaacgggtctagtggggtactaaagcctgggggccaccgttccaccgcgggagacccgtagttacctgtcctctgataacagaccccacatcagcccaaaatttcttcaccagggaccttacacatcccgtcctcggtcccctgagataccttgctatcctcttcccttcagatatcaacagtgatggtgtcctggatgagcaggagctggaggcactcttcaccaaggaggtgagcatcttggaagcctcgggcacctggagggacgcccaaatcagccacttgtttcctcctgcagtccccttaaatccccctggatgggagctcagtgaaaactacaactcccatcagcccctggggcaaaaacggctcccaggagtggtagcgtgcccaaaggactgctgggagttgaagttgtcgggaatgagctcgctggggacctctcaatgctgtctgcctctcgcttgctcctgcagctggagaaagtgtacgacccaaagaatgaggaggacgacatgcgggagatggaggaggagcgactgcgcatgcgggagcatgtgatgaagaatgtgaggtgggggccaggcgggggagaggacgggcccccagctctgtcactcacccttatctggctccccaggtggacaccaaccaggaccgcctcgtgaccctggaggagttcctcgcatccactcagaggaaggagtttggggacaccggggagggctgggaggtgagaacatgggggatactcggggtcctgaacctctctctcttctagccatgacctttctttcagaatcttaggccccttctctttctctctgggtccccgtccattctcctgggtcactgcatctctatctctgggtctctgttttcccctgtctctaggactcttatttatttatttatttatttatttatttatttatttattctgagacggagtctcactccatcgcccaggctgcagtgcagtggcacgatctcggctcactgcagcctccacctcccaggttcaagcaattctcctggctcatcctcttgagtagctgggattataggtgcgtgccaccacacccagctgatttttgtatttttagtagaggcaggatttcaccatgttggccaggctggtctcaaactcctgacctcaggttatccacccaccttggcctcccaaagtgctgggattagaggtgtgatttttttttttttttttttttt

SEQ ID NO: 92129 - DNA, 2048 bp, Homo sapiens
ctgtgcgatctccaagcactgaggggcagaaactcccggatcgggcgctgccagcctccagtcccctccgtcctcggaggttcctggctctctgatccccgtgtcccgatccctgcctctctggcgctctcggaccctcgagaaccaggggatctcggaagccaagcccccgggcaggcccgggcttgtcgcccgcaccacttcctgcctctggcactggtgggaggggcgggtctcgcctctgccccctcaggccaggggtctggatgcatatagcgttcccctagcctctttccccggggagaatgtaggatacaggcccagcctcctggcctttctccatcagggactcagttgtctgggcccccccgtcactttatctgctagggtcccagaagtccagggtccccagctctgtcctccctcaggggccgtgagtctccacagtctcctgatcccctagaacccaagagtccaggtacctcttcccttcctttctcctctagggcccaccagctctgagcagatcatgaagacaggggcccttttgcttcaggggtgagtttgaggtctgattattgtggcacagatttgaggagtgacaccccgttctgattctgcaccctcactccatccccactctagtttcatccaggatcgagcagggcgaatggggggggaggcacccgagctggccctggacccggtgcctcaggatgcgtccaccaagaagctgagcgagtgtctcaagcgcatcggggacgaactggacagtaacatggagctgcagaggtgtgggcccctgaggacccagaagtccagccactgggctccttcaggacacaggactctcagccccgcattctcctcctcccctaagaactaggagtctgggccccacaactcagcgcaaacattccggactcccagccctcctctctgccaggatcttaaaaccctccttcagggagtcatttttcccaccttcctaaatgtctgtcttgtccccttcccttgtcccccgttggcctgttgcttttcatttcagcctggcttggggctcagtctccttatctttagtgtgcggtggatgcgggaattttccaccatcagcctgatgcctgctccccggcactggttctcctctctcctgcaggatgattgccgccgtggacacagactccccccgagaggtctttttccgagtggcagctgacatgttttctgacggcaacttcaactggggccgggttgtcgcccttttctactttgccagcaaactggtgctcaaggtgggcagctgcagggcagtgagcccagggatgctccccctcagatctgtgaggacctggggatcgtggtatcaaccccctgcagtggcccagtgaccacagagggcatggagagagatggctgtgcactgggtgtctgctccttcttttattcattcaacaagcatttactggacctgctatgtgccaggcctatacctggcacctgggacacagcactgtacaaagcaggctacatccctgctctcagggagttcacgtgcaggggtgaagtaaagtgggcagtgtgatttagcagagtggtcaggaaagatttctattttttttttttttttttttgagatggagttttgctcttgttgcccaggcttgagtgcaatggcatgatcttggttcactgcaacctctgcctcccaggttcaagcgattctcctgcctcagcttcctgagtagctgggattatgggtgtgcaccattatccctggctttttttttttttttttttttttttgtatttttagtagagacgggtttcaccatgttggtcaggctggtcttgaactcctgacctcaagtgatccacctgccttggcctcccaaagtgctgggattacaggcatgagccaccgcaacaagccaggaaagacttctaagggcaggtgacatcaaagagcaggtgacattaaagccaaagctagaatgataagaagcatgcagtgatctatagtgatcggggggaagaggcatctggtagag

SEQ ID NO: 92130 - DNA, 1860 bp, Homo sapiens
aggagctgggattacaggtgcctgccaccacacccagctaatttttgtatttatttattttgagatggagttttgctcttgttgcccaggctggagtgcaatggcgcaacctcggctcactgcaacctccgcctcccgggttcaagcaattctcctgcctcagactcccaagtagctgggattacaggcatgtgccaccacgcccggctaattttgtatttttagtagagatggcattactccgtattggtcaggctggtcttgaactcccgacctcaagtgatccgcctgccttggcctcccaaagtgctgggattacaggcatgagccgccgcacctggccatgtttacaatttttgaagccgacttcaattgtgggtggcagaaatctttgaggggaggcaaagaattgacaaaggaggtttggggccactatctccaggcagtggggacaaggttcagtccctaacgcccactccactccccacaggccctgtgcaccaaggtgccggaactgatcagaaccatcatgggctggacattggacttcctccgggagcggctgttgggctggatccaagaccagggtggttgggtgagactcctcaagcctcctcacccccaccaccgcgccctcaccaccgcccctgccccaccgtccctgccccccgccactcctctgggaccctgggccttctggagcaggtcacagtggtgccctctccccatcttcagatcatcagatgtggtctataatgcgttttccttacgtgtctgatcaatccccgattcatctaccctgctgacctcccagtgacccctgacctcactgtgaccttgacttgattagtgccttctgccctccctggagcctccactgcctctggaattgctcaagttcattgatgaccctctgaccctagctctttcctttttttttttttccccactgagaaggggtctcgctatgttgcccaggttggtctcgaactcctggcctcaagcgatcctcccgcctcagcctctcaaagtgctgggattacaggtgtgagccaccatgcctggcctgagtccagctctttaatgcccgttcatctcagtcccctgcccgcaatcctgccttctggcctcctccgtccctgatcccgcctctgcctgcccaggggctgcccctggccgagtcactgaagcgactgatgtccctgtctccaggacggcctcctctcctactttgggacgcccacgtggcagaccgtgaccatctttgtggcgggagtgctcaccgcctcactcaccatctggaagaagatgggctgaggcccccagctgccttggactgtgtttttcctccataaattatggcatttttctgggaggggtggggattgggggacgtgggcatttttcttacttttgtaattattggggggtgtggggaagagtggtcttgagggggtaataaacctccttcgggacacacttcggcatctgagtcactgggcctctgccccgctccccggcacgtcaggagagcaggccctgtccgctgccccacgccgggcccgccgtctgctggcctagagatacctgcttgggccactcagggacgtggggctctctgcactcacttgacatctttttctggggtgccctgtggggtctgtgggttagggatgagttggtcctgggcctgacctgcaggagctcacgggaaaggaaaagaagggagctcacgggaaaggaaaagggagctcacgggaaacgagggtgataggtggtacatctgtcgcagcccaggatgatctgtgcgggacagaggcagcggcctgtgaggcccaagcaggcgtgtgggtaagggaa

SEQ ID NO: 92131 - DNA, 1123 bp, Homo sapiens
tccccttctctctgagtccctgtcccccctctctctgggtctctgtacccccttctctggatctctgtccccacctctctctggatctctgtcccccactctggatttctgtcccctcccgccgggtccctctgggtctctatcccccccacccctgggtctctgtacctccctgcctctgtccccccccacctctgtccccccctctctctgggtctcttttcccctccctctgggtctctgccctcctctctctaggtctgtccccctcccctctctctcagggtctctgtacccctctgtctccgggtctgttttcccctctctctgggtctctgtccccctctctctcagggtctctgtctgagtctctttttctctgggcctctgtctccccaccccacgttctctatggtcttcagatcctgtctctctcagcccctcctctccctccacctatgggccccaaggcccctctcggccgactaaaggtctctgggctgaggtatgacatttggtaaatgagtaactcgggccccacagtcaacggggtgctttggacggctgcccctcctccatggactcttcccagagaccccaagtcaggggagagagaggggcagaggatcaatgagtgtacactgagccaccacccagagtgaggggacaatatggccacaggcaggatcccagaaaaaaaaaaattatgggaaccaaaaagacacggagacaaagcacacagccggcttccaacaaggggggaccttggggtagggggcccgatttgggtctgagccaggtctagttctgagggtcccaccaaaaaagtcggggagtgccaaggggatgaggtcagcgagtggccccacccccatccgtccccgcgggggccccttcccgcgctgagctcagcatgactcagcagtcgctgcctgcaacaaggaccccagataccggcctggcggggcatctgcagatcccctcggtcaggggctgccccgcctgggctgttcggagcagctcctctgtagggcagggcctgacctcaccccacaccccagtggcttcagctccctgcccagcgcacgggctgcctccatcagggcacttaagtagagtcaag

SEQ ID NO: 92132 - DNA, 2177 bp, Homo sapiens
ctcggaaaccccagaatcttactttcccgaggcaccccaggaccccagggtcatcagttcacagggctgttagtgctcccataaaactctagcctcccagagggaccccagcccccaccctcccgcccacgaacccctgcatttccagaatcagccccagggccccaacccccccaagcccccatttcacaacacgctggcgctacaggcgcgtgacttccccttgctttggggcggggggctgagactcctatgtgctccggattggtcaggcacggccttcggccccgcctcctgccaccgcagattggccgctagccctccccgagcgccctgcctccgagggccggcgcaccataaaagaagccgccctagccacgtcccctcgcagttcggcggtcccgcgggtctgtctcttgcttcaacagtgtttggacggaacagatccggggactctcttccagcctccgaccgccctccgatttcctctccgcttgcaacctccgggaccatcttctcggccatctcctgcttctgggacctgccagcaccgtttttgtggttagctccttcttgccaaccaaccatgagctcccagattcgtcagaattattccaccgacgtggaggcagccgtcaacagcctggtcaatttgtacctgcaggcctcctacacctacctctctctggtgagtccccaggacgcccctggccctaatttcctccagctgcgcacctccggccctcactgcacgcgccagccttctttgtgcggtcgggtaaacagagggcggagtccccttggcctcgcctcccgctaaccattgttgcctccatctcttcccgtagggcttctatttcgaccgcgatgatgtggctctggaaggcgtgagccacttcttccgcgaattggccgaggagaagcgcgagggctacgagcgtctcctgaagatgcaaaaccagcgtggcggccgcgctctcttccaggacatcaaggtaactagtgtgtgggtaatggactacatctcccagcaggccgtgcgcgcgaggagccttgatttgagggcgtaggtgtcgcgtgggcttctgggagattgagttcggtcttgtgagccctcttaaccgctggaaatagaggcgcacctcgtgcagtgcccacaacacgcggcagtccacaccgctgcgtggtcttagggacgtatagctgtaagagctaggacagggtgcggagagtgataaatacaagctgtcacatgtctttgtggcctgggcctctgacccccaacgactcttgggaaatgtaggtttagttctatgtgccgagtgtgtgtattctgagccatttctcccttctatatagaagccagctgaagatgagtggggtaaaaccccagacgccatgaaagctgccatggccctggagaaaaagctgaaccaggcccttttggatcttcatgccctgggttctgcccgcacggacccccatgtacgtacccgctgcatccatggctacccaaccatacccctcaagcctctgctccctttgggcaaatttccttcagagcctcatttcacacctgtcacattttaatctgcaactggctgctctctccccctcttttccagggattgggtttctaatttctccctcttctctctcagctctgtgacttcctggagactcacttcctagatgaggaagtgaagcttatcaagaagatgggtgaccacctgaccaacctccacaggctgggtggcccggaggctgggctgggcgagtatctcttcgaaaggctcactctcaagcacgactaagagccttctgagcccagcgacttctgaagggccccttgcaaagtaatagggcttctgcctaagcctctccctccagccaataggcagctttcttaactatcctaacaagccttggaccaaatggaaataaagctttttgatgcagctggtggttttgtgtgtggtgtggaagatgaggtgggatctgttctcataaagcttctggctgggttgggatgccagtgaaagaggagttggccccatctcccattttcttaactgtcctaagacaagaggctatctgggtagtgttgaacctgagggttctctgcttgcctggctgttaactgtccctcccagatggtagagatagactccagggag

SEQ ID NO: 92133 - DNA, 1038 bp, Homo sapiens
cctaacagcatggtctaggggataaaactccagatttgagagagagctgactgggagataggaggcctgagcggcggtgggaggacctgaggatctggctgcttaagaataaagatgggacgggctggagactgtaatgaatgcctgggctttgaaggagctgagggcctgagctattagttcctaggagtagaggagcccatggcctgggacacatgcgtactggaataggggaaggctgggaagtcctaagttagtcagaggctgggccctaggatgggaggggctaggagcctgcatttctgtgtcttgggcttcagaaagctgaggttctggccttggagaaggctggggctgaaatccccaggaacaagccaatctcacacctcaaagagcagggtctggggggttgctttgctgggtcttggaggagaaagggactgtgtctcccaggaggagagggggcccgtgaacacccagccgggtatcgccagggcctgggctccaggatgggaggaggctgggggctggggctcctgggtctgggatagggtcatgggagaggcagagccctgcatgctggtgtccctagtcagggagaggaaattgggaggcaggtcagcaaggtccctgggggcagggaatgaccatgcaggcttctcttgggcaatggtgagaagctggattggccatgagggggtctccctcactgggttttggagcctggctgcgatttaaacccagctcctgtgagctgggaactcgggaacctgagtccgggtagtcagtcctcagctctgccatccttagagccccagtgcctaattccttcagaccaaggggtcccggcacccagccccttctctctcagacccagaagtctagcctgagccccctcctccttcagggtcctgaccccagcccccttctcccttagacccaggaggactgccctccagccctcgtgttcccctcatccaagcttccaacccctactccaaactatgggctcccagtcccctcttccccctgagctag

SEQ ID NO: 92134 - DNA, 1038 bp, Homo sapiens
atgggagccgaggcagtctgccttcatcacttgtagctatcgtgtgggctccttggccttcgtccctggtccccttcgtccagctctgaggctaaacagctcgtagaggctgggagactgaggtgtggcgaggttctagggtgtaccctctgggcaatgtgggattctaagccaggcctgccggagcaacctgccctgcctggcttctcactcactgtctgcctcatggctgaaccccgctctccagttccccctccccagcgctctgctcagctcggagccaagtccttacatgtaggatggcactgaaccctctttcctggggtgggagaaaagctagtttgccacagagcaggtgtcggggacctggtgccagagcggcttcacctacacagactgcctccttcccaggcatggcgcaggccctgggccctgacacgccattcacagccatcgccggcagtgaaatcttctccctggagatgagcaagaccgaggcgctgacgcaggccttccggcggtccatcggcgttcgcatcaagtaagcgggggacccgaggcgggtgccagaccccagagcctgggagcaaccccgcaccccgggcggctcgtcctttgtcccagagctcatggaaggttgtgattcccgagggtccaggtgtcaggctgtctcctcagatctgctctctggctagggaggagacggagatcatcgaaggggaggtggtggagatccagattgatcgaccagcaacagggacggtgagtctgtgtgagtctgtaccctgctgaggccacctccagcgccagggttggagagagtagatatcaggtctgcactgaggtcagaatcccatggaatgttctagctgcagactagagccatgtacatgcctacagtaggaggtcagttaacttgacaatggcttatccccttatgaaggacattatgggcaatagaaactgaggcggtaaaataatgagagagatctgttagtgagttcccaacagacctcaaaacccaacagacttcaaaac

SEQ ID NO: 92135 - DNA, 1043 bp, Homo sapiens
ccctgcacgagatcgacgtcatcaactctcgcacccagggcttcctggcgctcttctcaggtgaggcccctcctgccctgccctgccctgccctgccccaggcctagcagcctccctcgggctccctctgttcctgagctccgagtgtggcccacctgctccacgctgtttcctgtaactccggcccgtggctgcctctgttctccacctgcaagtccgctccgtccccacccctgctggtgctgtgatgggtgtggccctgccctctcccctcctgtgttctctgcctctgttcctcctctttggggatgtttcaggctcctcatccctccttgctttgctccccttcctccatccctggcatcatccttctctgtcttagccacactctggccctggaacccgcctcctctctggcttccctgatgcaacctgtgcctcccataggtgacacaggggagatcaagtcagaagtccgtgagcagatcaatgccaaggtggctgagtggcgcgaggagggcaaggcggagatcatccctggagtgaggacccaggacatggccggggcgggtggtggggtggaggtgggccggggaagtggggacgcgggtggtgactctcacacacaccccaatccaaggtgctgttcatcgacgaggtccacatgctggacatcgagagcttctccttcctcaaccgggccctggagagtgacatggcgcctgtcctgatcatggccaccaaccgtggcatcacgcggtgagccggctacaggggcctctggggaaaacaggatgctctgggcagtgggtgtggtcagagggtcaatgggagcctgtgttgacaccgggtcagggagggacgcgtgactgcagtgtgcgctctttgcttacaaaaggcgggtgggaggcagctctgcttcccgaggaagcccagagactgtgttcttgctgcctttctgtcttgctgctcctttagcccccaaggctgcagtcttcaaactgcgtgccgaggcaccccagggtgctgcaggaaactcacag

SEQ ID NO: 92136 - DNA, 1058 bp, Homo sapiens
gaagcagcagcgaatggcaatgggttgtgttgtgttaatgaagactcaattggttcatattactctgagttgtgcaaagctcatggagccttttggggtagtgttgagataggtttggtcgtatcattttgtgagtttcctaggtcagtgttgggtttggttgggttgtgagtctgggatagtgtggtccagctgcattgtgtaggattctgtggtttggtgggtcccctagggccatgttgggtcaagttagatggtcccccatggcattgttgagatcgaatgtgtgtggtgttaagtttcgttgagacatggtggaaattgtgtagctctgtgattcttccaggggcatgttattttaggttctgtgaacttgcgagtcatgtagaaatgtgaagagtccagtggtagaatttgagctttctaggtcacattgggttaagtttgtatgaccaaatgaatcttgtagggttctgttgggcttaactgtgtagaggtgtgtggctggacatttttcgtggccacagcgagttgagttgtgttgaattgtacaaccatatgagccttgtaaggccagttcagttgggtcatgccactgtttgagtctcatagggccatgctgaattgagttccattgagttgtgtcactatgtgagtcctacaggaagttgggttgagttggactgtgcgaacgagttccatagggccacatcgggctgttttgcatttagtggtagcaccaggacccaaaggaaatagcagtggggaagcatcatgtatctgggagcatgcagtggcgagggctctgggaggtgtgccgagctggctccccagctcgctgtagggggcgggactggattctgtatccatgggattgggtgttcatccagaggcgactgggtaaattaggaagaggtggatgctcctcctgtttaccccacatccacttcattgtgctgttcactcccattctcccctacagttttatgctcagacatggaggtcagagccacaagggaaaggggagagggggagaaaactgtactctgtccagacat

SEQ ID NO: 92137 - DNA, 1521 bp, Homo sapiens
cctagcagcagaagactttgctttaatcacgtgctgtacccccaaagcccagacagtgcctagcacacacgagatgctcgatgaatagttattgattgaatagattagacatcaacgcaatcaggctgttcacctagggactctttgctaggcggcggagaggtacgttacagttctctacgcaaaacgcatgcgcgaaagatccgggaagtgtgatcggaaaggggcggagcatcagggagagtctcgcggacataggcggttcggcgcggaaagcgggaggtggaggggcggcttggggcaagcgcgcgcgcgcagtgcagaagccagccccccgcggctgaggtactcaaggtgcccaaaggcggggtagtgacctcgcgcgtgcgctgtgcccgcggcagcgccgggtcctagtgtgtgggttgttgttggcaccgcacggcgcgtgcgcagtgaggacggcggagggatttgcggccgggacccaccccctgctccagtcgctatcggaggccgcgcgggtggctgagcagcggcctggtgcgctcgcttagcgggcgacggaatcagacggacgtggacgcccccggagtggaagccgaagcaggagttgttgttgctgaggggctgccgcagccgccgcgagcctccggacagacgccagagcgaggagggcgctacgcggtgagtgagtgtgactgagtggcccgacggggtgcggggccgctacccagaagccccagcggtgggcccggtcctcttccccgcggccaggcccctttcccgcgtccccgccacaggtcccttctgcatccctttcccggaccccgaaatctctgggcacccacgcccgcttcccacagcgccctcgtggttccctacccacaggcccttgcggtgtgtggccttttttctttttcgtttgtctatgttgtcctggacccttacccataattcctttcgctttttgcggggtccaggtctgttacccacaagcacttggttttggggcttcgctccttatgtttctctttctttgcttggaaacttccgatccccaggaccctgcaaactgcatctcgtaatttgccctccacggcacgggacgagcagccacagctgctctgggcctccctcctcgggtccttgatttccccagaaattcccagggaacctctccgccccacagctcgtgtcagaggactctgagacttcactcttcaggaacccttttccagccgttatttttgttttctttaccggcctttcacctccacccccaccaagacgtacccttttctccgcaacacaggactgttctctgcccttacagagcctgttttaattccgagacttttctcctgtctttcttattttgagagtcaaggagtaacaggggctttctctgtgcagacccgatctaacctaaggctgtcctgcttctgctctcagacttggcaagatgacccagttcctgccgcccaaccttctggccctctttgccccccgtgaccctat

SEQ ID NO: 92138 - DNA, 1047 bp, Homo sapiens
agaacaagactgtctcaaaaaaaaaaaaaaaaaaaaagtggggttgatagtacaccttttgtagaatttttgtgaaaattcagtgagtagtggttgaggattcatgcctaacccacaccatttatcagctctgactttgggcaaatgttgtatcctcttaatgcattggtttctttatctttagcaaggggatagtggtagcacccttataatgttggtggagaattaaatggcaaactgtatgtcagggggcttggcaccaagcagtcagcacatgtcagcctttgttactctgtttactacttttattgttaataagatgatgttcataaaggcttagcacccagtattgagtattggagggcttaaaactgcagatggggatcttagctctgcacctttgggataaataggaatgaatgacttaggctcctggacctctgtgtttttatttgtgaaatgggatgacaagggtcatctcttaggtgcatcagagcacacctgagaaaagctggcacacagtcggaagttacaagaagaacgttctagcattgggtaggtaagggcagctggaggcgagggagttgcagagcagaatttcgtagataacagaaaggtatgtcttcagtgggatttgccacccttggtgaacccgcacttgagagatattactggccaattaacttaatgggcacaggcgggtggtaggtgccctttgatgatgcaggtcatgtgccagttaccatttatttatttatgagacagttttgctctgttgcccaggctggagtgcagtggcgtgattttagccaactgcagcctccggttcaagcagttctcctgcctcagcctctcaagtagctgggattacaggcatgcaccaccacgcctggctaattttgtatttttagtagagatggggtttcaccatgtaggccaggctggtttcgaacccctaacctcaggtgatccaccccccttggcctcccagagtgctgggattacaggtgtgagccaccatgcctgggagccaggtacttttttttt

SEQ ID NO: 92139 - DNA, 1023 bp, Homo sapiens
tttttttttttgagatggagtatcgctctgttgcccaggctggagtgcagtggcgtgatctaggctcactgcaacttccacctcccgggttcaaaggattctcctgcctcagcctcctgagtagctgggattacaggcacgcgctaccatgcctggctaatttttgtattttttgtaaagacggggtttcaccatgttggtcaggatggtctcaaactcctgaccttgtgatctgtctgccttggcctcccaaagtgctgggattacaggcatgagccactgcaccctaccagccagttcctatttaatgtgtggttgatgagacctttaagagctgccttggccctcagagggtgtgcagttgtgggctttggagccctgttctgtcagcttatgttgctttaggcctggtcatcctcactggcactcataagcagggccctgccatcactccactcccatcacatcctctggcactttgttcaatgtgagtgatacttggagctgtgagaagcaatgtctttcctaaatatggaagacagggtgtttcctaaatactataaagctagatgtcacctgtaccagtgcttttcaaactgtctttggtgaaggacagatactgtttccaatctgtttgcttttgataaatatgatagaattactttttaaagaaagatctacagtcaggagttcaagaccagccaggccaacatggtgaaaccctgtctctactaaaaatgcaaaaactagccaacatgctgtcgtgtgcctgtaatcccaggtactcactcaggaggcttaggcaggagaaccgcttgaacgattctagtcagttgctgggttccttttagagagacgggcacaggggggaaagcagggcttagaatcgcttgaacctgggaagcggaggttgcagtgagcccagatcgcgccattgcacaccagcctgggcaacagaccacaacttcgtctcagaaaaaaaaaagacctacagaataaaagaccaaatttgtattaagagtc

SEQ ID NO: 92140 - DNA, 1028 bp, Homo sapiens
gagcgcatggagaggaaagtatgtcatttttgcttcctgaccccctgttttaccactgtctccagatgatccttgacactagggcacttctatctgcattcacttctccacctcccctttctcctgacagagacgggaaaagattgagcggcgacagcaagaagtggagacagagcttaaaatgtgtaagtctctcatccaccatttggctctctcctctcccaaaccctctgtattcttcccaggtcatacccaggaccctgctgtctccctaaggcctgtgttgtggggaacagggttgttagttcatttgtttagcccctgccacttcacaagcactgtttttggtttaggcttttcagcagcagaacatagggtaaaagttggcaggaagggagacccctggtaccttgggctcctcctgcatgggaggacagttaaggggctcccacaacccagctgggtgtcacaggctgaagtggtgggttgtgggatagtggtctgtcctggctctaaccttaggtccccaacccttgggctgaggatgttccatcccctccacatagaggaggaattggagtacaagacaggtgtgttgttgccattaaccaaactcataagagggtcagatgtcaacctccagtggctctttattctgaaagtgaaaactgtacagtcacaggcagcatagcagtgtttcactcagcaggggaccgtggatgtgatggtgatcctataagattatatcatattttgccaggcactgtggctcacgctgtaatcccagtactttgggaggccgaggcaggcggatcatgaggtcaggagttcgagaccagcctggccagcgtggtgaaatcctgtctctactaaaagtacaaaaattagctgggcgtggtggcgagcgtctgtaatcccagctactcgggagactgaggcaggagaatctcctgaacccagaaggcggaggttgcagtgagccgggatcgcgtcggctcactgcaacccagcctgggcaacaagcaaaa

SEQ ID NO: 92141 - DNA, 1620 bp, Homo sapiens
tgcagtgagccgagatcacgccattgcactccagcctgggtgacagaacaagattccatctcaaaaaaaaaaaaaacaaaaaaaaaaacagttccaggccaggcacggaggctcatgcctgttgtccagcactttgggaggctgaggcaggcagatcacatgaggtcaggagttcaagaccagcctggccaacatggtgaaaccccatctctactaaaaataccaaaacaaaaacaaaaacaaaaacaaaacaaaacctagccaggcattgtagtgggctcctgtaatcccagctactcgggaggctgaggctggagaattgcttgaacccgggaggcggagtttgcagtgagcagagatagcgccattacactccagcccgggcaataagagcaagactccttctcaaaaaacaaacaagtaagttccaattgggcgaacaaaaaagttccaattgaggaatttgaacactggatcatagatgaggttaaggaattagtaaatgttaactctaagatgtaatagtggcactgtggttatgatgtttaaaagcctttgttagagaccaaaatggtgtgctatctggaatttcatttaaaataatccagccggtcgtggtggttcacgcctgtaatcccagcactctgggaggctgaggtgggaggattacttgagtgatccaggttcgagtggtgaatatggtgaaaccctgtctcaactgaaaatataaaaattatctgggtgtggtagcaggggcctctaattgcaactacttgggaggctgaggcaggagaatcacttgaactcaggaggcagaggttggggtgagctgaggtcatgccactgcactccagccggggtgacagagcaagactccgtctcaaaaaaatgcagtgggctgtgggaggatagggatgaaacaagtccgtccacgtgttgataatggaagcgggctcatgggagttcgttatactgctctgcctccattaaatgcttgaacttctccataatagaaaagaaataaaagaatggatcaagttcagtagggtttctgtgcccttgagagcctccactcatagctatagaagcttgctgtgccttgtcacaatgaacagctcccgtcaaggggacggtgcctccttgctgagcgcttgtacttggtgttactgactttctcacagcttccaagtgcagcaggggttgctactcccatttttaagataaagaaatggaggcttgttgaggcaagcacgcttccaaagagtgagagttccaagatgggacctcgagtacctcaaagcctaattcccaactccacgacccacttccgttgagtctctgctctgggctgctacttagatgagccctcaaccagtgatgtcctgagggagagctgccgtcagggcgctgcacgcatacgctggctgtggggcgctgcccggcattgggtctgtgctaccttctttgagcttttgttctctatcttcaggacttgggggtaccattgctttgctgcatttgctttttacctttagtcacatttgtggcccccccaccccgggtaagcaagtgctccagggaactcacacagtgtgctggggtggtttccctctggctgcc

SEQ ID NO: 92142 - DNA, 1432 bp, Homo sapiens
atgaaattggtttcttaggagattcctggctcttttctttggagattgttattccttagtagccaggtagaacagtttgcctcacagtagtgaggctggagtgagaatctgatctgacgctagtcagttcctgggttcctttttagagacacagggcacagacaggaaagcagagcttacttagtgtttgctttcctggctctcattcttagccttggggcagcttggtctcaggttttcctgtgggctgtagttgcagtctgtgtccagtaggtggcagtgtggccctgcctacaggagggagctcagaacctgggggcatcagctgcatctccagggaggcccagttgggctattactgtttggatcaccttgcatctgggagcgatagggcccttagggtttatgtaggtctgaaatggcagttgggcctgcccacatcctgtcagcttgaagtcagccttacctcctctcctcagcagcctggattatctctcagccactctgataaagcccactgtgcctcagagaaacaggttcagagaggggcgtccctgaggttgccaggtcaccacccatgttcctccagttaggggcctctcccaatgccaccgttttcttcttggcctctgcccatcgtatttgttttgctacctgagaccatggacaccttcaacttataaaattcctttcttcctgcacaggggaccctcacaatgatcccaatgctcagggggatgccttcaagactctcttcgtggcgagagtggtaagtccccagctcctagctcctggaaccccacgctgctgagagcctgggtctggcacaaaggtcaaataggctaggtacaggggaatgttccaggggctgtgggacagctctgttctcccatttaacgtcatatccatctccttgtagaattatgacacaacagaatccaagctccggagagagtttgaggtgtacggacctatcaaaagagtaagtggagtgggtcagggtgtttgaattgggggtgcatggaggaggggctgtatcctgagagggagggagagaggtcccagccctgagcatggctcacaccatttcagggcctggatttatgcatcctgactgtatctccatgcagcagaccttgggcagcagaagtaaaatgagaagtaatgactgctggtggttggttgagagcaggggttggcaaactacagacttaaagttttcctgctgctcagccaggcaggtctgtttgtttacacattgtctttggctgctactgttgtaaggcagggttggattgttgcaacagtatacggccgtccaagctggaaatatctactctctgggtcttggcagaatacctatgctgagtcccgttttagaggaaggctttgttttaccaatcttcttttaagtcactgaagtgctctgtgt

SEQ ID NO: 92143 - DNA, 4324 bp, Homo sapiens
cggcctggcattggggcgcttgatgaccccgggcctgcccacctttgtggcttcatctcctgggactctctgtcatcagtacatgagccagccctgccgaagcgcatccccagcctcctgccctcctgcccccgggcccttggacctctggagttactgctattccacctgacaggctgacacctcactgtcttccttcatctctcttctttctttaggtcttagcttaagtgtcattttctccaggaagccgcctctgtgtcctctgctcctgccattagaacataagtcactcagggctcttgaaggacagagagggtctgaggcctcatccggcccagggcctggtgtgcaggctgttgtggggttggtggggcggagccgccctgtggcaggactcacccctgtccccatgtgccccacagatacacatggtctacagtaagcggtcaggaaagccccgtggctatgccttcatcgagtacgaacacgagcgagacatgcactgtgagtacctcccgccgagccctgccctctgacctgctctcacttctctgctgccccagcccctcccagtctgtcccctcccccaccctgccacacctgacattagcgatgtctcttctcctcctccctctgtttctgatgtatcttttttttttttatatacgtgttttttaaaaaacaaaaaccaaatcccccacaacgtgtgtgtgtgtgtgaacctggggaggtaagtgtcacacgttgaacctcaggggcaaagagggaactgggtggggggctggggccagctggaggtggggggaggggtcggattttgggggaacctcccccattccccccactgaagttgggggtggccaggttgcaatgaggactggcctttgaacctgccctctcttccccccccagtagaactggggctgggccacccgaccctccgcttccccaaccctggccccccaccctgttcctcagcgggcagtggggtgataggcatgttgagcgcctgcccctacagttccaaagccccctttgaggctgccgcggcgtccacatgggcagggatgggtgggggagggtgggcagggctgcggcgtgtccaggggccgccgtattaattgactgttcttattgtcactgcagccaccacgcagctggcttgcagctgatgcttacgctccccttacaacacctcagtgtatggttggtataagggtttgtatcatgggtaagatcactcagcaccgcacaccagcccagcttagccaggcagctcaggagcagcgaggcgcccctcctcccaccccagtcgcccccgtagcctccccgcacccatggccctttccttgtttgggtgccctttgtccctcctgccccgatccgtatgctctctgagaatcttgctgatcccaggaggggaaggatgaacctggtgggaaaggcggcggcctctccgcttgggttccacccagcctctgatgacccggcttcgtgatgtcagcggcgaggtggcaggaacaccgagggcagggctccaggccagggctccactggagcccttcagccttccctccctgcccccgtgctttctatggggctgctactgtgctggccctggagagtctttttggctgctagttttggggtgctctgccccctttctgtcttccttactgtggttgaggcctcccgagggggctggctgtggtgtccagcagctctccagaggtggtcaggagctccctaaagtgcatggaattggggcttggggtgtgggagggaccaaggggtaggctgctagcagctgaaggtgtcgtaggtttttactaaagaaccttccactgtctagagacttgagagagggaaagagagagagaggcctagacgaacacaatcacatgttttctttgctgttcctcccgggatgggcctgttttggggtttgggactctgaacccgagcggggttccttcgcttgactttgatcctggtccttaaatgcctttccccactcccctcccgtgggttcaggggccaagcggcccctcctcagagcacgggcagcaccgtctcctggacccctgtgtgccagcctctgcagacgcagctggtgggagggagcatggatttggaggtggagaagtcactcctggtcctcggagggggtgggctgtgtgcctagttcagtgtgactcggggattggtgagggcggacaggtttctgaggcctccctagccttctttgtaaattcacacgagatagtccagggctttccagcgcccagcttggatgataatcctcgtctcccccactctaaggcctccttgagatttctttggggtctaccacgtcctctgcctgtctccaggtggtacaggagatgtggttcctctccctctcctggctccctagaaccccccacttcccctccctgtagctttagctgaccccgtggtggtgggtgtggggtctgtgcgcgtgctcaggtaagcttgggggctccaggtaagcggtcccgtgtcccccccccgggaagcccgcctcctcgccaggcccccaggagttgccgagccccccccatcccgctcggtttggacacccgcaaggccggcatcggtaaatggcacctttttctcttcctctggttgttatttgggggggagcgggctggggcggggcagggtattacggttggttgaggacagccccctaggccagggctgggtgggggaacggggactttttggccttcatgacagccccacgttgatcacaggccagggcctcaggcttgccttctgctacgcgctgcccgagagcagcagtgagcctctcccccgtctcccctctacgactcccctttcctggcaggctcaggctggggtgcgctcccagcacgtgttgagccgggggtgtggagggcgagatggggcagggctggggggaggcagagtcagtcgtctcaggtaaggcagggattttcagtagcaccgcacggctccccatgcttcctccactgcccctctcccctgctgcaggggccccgccaggccccctgggagtgtataacccgcctctctgctccctgccatttcctgaagatttctcccacccccttctggttcattttctgttctgatgtctgttccccccacactcacccccctccaaaaaaaacaaaaacagaaaaaaccggtgtggtctggggtgcggagcgtcccagctgggcctcctgccccggcttggtgtctcagggtgcatgcttggggttgtggaggagccccctcccccacagcagagtccagcgtggagttaaccttcagtttctttgcagcgattttggccgccctggcgggagggggctgttccatcatgtgggagaggaagggccggggagcctagggggtggcgggtgagggtggacgtctcccccgaccaggagtggttggggcgctgagaggaagcagacgctgagatggagcaggcccttcaccggtttgggagagggttggtctggctgtcagttgcctggctgtctgttgggcgtgtgcgtgtgcgtgatgatggggacacggggcggggattctgtagagctgggcctgtcctgactagaggaccctctggggactcctctcccctccccctccccacatctgttacagccgcttacaaacacgcagatggcaagaagattgatggcaggagggtccttgtggacgtggagaggggccgaaccgtgaagggctggaggccccggcggctaggtgagcacatcctgccttcgacgggctctcgggggccctgggcctggtggccttgttctcccttctctgctgctttctgcttctctgtctcctgccggcccacctctcccatcgcgtcctcatctccggcttctctctcttgtggccatcacatttctgacagctgcctgcctcctcgttctgggttactgtgaggagcaggggcaccagcctggagaggcctgagcccacatgctggcgtccgcccttgctagctgggggtccccttttcctgcctcattgtactcctcttagtggaaataaccccgagttcactgagctcagtgtactgggcgcccagcttggcagtgacgcatgctggggttgtaaatgtcactcgctcatctgcttctgctgcttgctgttgctcttgttcactcttttactgattcagcaagtacctattggatcaccagctgtgtgccgggcttctagttgagcaacacagaggcagcctctgccctctgagcctcctgcattcggtctcctcattgtcatttgctgtctcaggcaa

SEQ ID NO: 92144 - DNA, 1855 bp, Homo sapiens
ctgggacacgcagccaagagccgcggctcagacgctagcagggcccgctcttgctgcctctaccaccagttgacgaggagtttggaccttaggctgggggacgccagcaaaggcttctaagcagatcacatttttgggtggaaagatcattggcttcgggtttctgtgagggcgaggatgattggaagggagggttttgaggaggctgtgaagtgcgctatggttaagatgatgcgctttggggccagacatgggttccagtaacggctgttgcctagcgaacgctttgtgtgagttaattagagaagacgtggctgtcttgtgatgggagtgcgcgggatgaactgcacggggggacccggccctgtgaacactaagccaggggctgccttcctgccctttgctcttggagtcggctcatttctgctcctccgggccctgtccctgcccagattcaccctctgtccgtctgccctgccccaggaggaggcctcggtggtaccagaagaggaggggctgatgtgaacatccggcattcaggccgcgatgacacctcccgctacgatgagaggtaagattgggcgaccggtgtcctggggtggggggcggtcacggggggagcccagccacacaggtctgcccacctcatccaggcccggcccctccccgcttccgcacagggaccgggaccgggaccgtgagcgggagcgcagagagcggagccgggagcgagacaaggagcgagaacggcgacgctcccgctcccgggaccggcggaggcgctcacggagtcgcgacaaggaggagcggaggcgctccagggagcggagcaaggacaaggaccgggaccggaagcggcgaagcagccggagtcgggagcgggcccggcgggagcgggagcgcaaggaggagctgcgtggcggcggtggcgacatggcggagccctccgaggcgggtgacgcgccccctgatgatgggcctccaggggagctcgggcctgacggccctgacggtccagaggaaaagggccgggatcgtgaccgggagcgacggcggagccaccggagcgagcgcgagcggcgccgggaccgggatcgtgaccgtgaccgtgaccgcgagcacaaacggggggagcggggcagtgagcggggcagggatgaggcccgaggtgggggcggtggccaggacaacgggctggagggtctgggcaacgacagccgagacatgtacatggagtctgagggcggcgacggctacctggctccggagaatgggtatttgatggaggctgcgccggagtgaagaggtcgtcctctccatctgctgtgtttggacgcgttcctgcccagccccttgctgtcatcccctcccccaaccttggccacttgagtttgtcctccaagggtaggtgtctcatttgttctggccccttggatttaaaaataaaattaatttcctgttgatagtgggcacctcggtttcttcctcactgctctgttttccccagaaggttgttcctgacttgatagccctgcttggtttggtttccagggtgtacttaaaacttgagcgttaggacatgaggctggctctgcccagtagccagagctgttgaaagtggggtgaggcggcctctcgggctccttgtctcccttgtgtttttcacccttttttctttttcatctctgccacacattcctcagggctgaccatacccctgtcttggtggggggctgggaattaggagggggcttgattactcaggggaagccgcagttttgaatatgcaagggaagctaccatctgcaagggagagcggcacacagggtgaggaaaggcagaatacactgggcac

SEQ ID NO: 92145 - DNA, 1050 bp, Homo sapiens
ttctcctccatctgccactttggcattctaagcttgttctaggctctctcttcttctggagccttcagcctagaaatgtccttatttccagaacagcccccctcctttgccagcctcagtctttattccaggaaatgctcaattctcaacatgcatccttttgatccctccccctccccgccctatagacacttgtaagttccaagcaaactcttagacacatgataaaaccaaggatgtgactcctgctatattcttttttaaaaatgtaattaaatttttaaaaaatctatttatttatttattttgagaccaggttatgagactggttaatttttgtatttttttgtagagacagggtttcaccatgtttcccaggctggtctcaaacccctgggctcgagtgatcctcccaccttggcctcccatagtgctgggattacaggcatgagccaccgcgcctggccccctgctatattctgtgttataccttcatccctagcaggctctgagttctagattttatctgctgactatgtttgttatgtgttgcattaggtatattaatgggtgtcattatgtatgtggggttctggggtgacctggacactaagttattgggttgctcttggctggttctagattataggcttcagaacttagttctagattacttaggcctatgagcggttcttaccccaagccattgaaagcgtggaagcatacgtctattccccaccctgtactgtgtgtagtaaccttctaggttctatgtccagccttgctgtgttttttatttccttctcggtcaatttaaggctctggaacaggctccccaaaacatctgtgttgcatcgtcagagtgggttgctggttttagatatcatgttggggctgggcgcggtggctcatgcctataatctcagcactttgggaggccgaggcgggtggatcacgaggtcaggagattgagctcatcctggctaacatggtgaaacccgtctctactaaacatacaaaaaataattagccgggcgtggcggcacgagc

SEQ ID NO: 92146 - DNA, 1068 bp, Homo sapiens
tgggaggtggaagttgcagtaagccgagatccgtaccactgcactccagccagagtgctggttgctcatgcctgtaatcccagcactttgggagaccaaggcaggcacatcacctgaggtcaggagttcaagactagcctggccaacatcgtgaaacccccgtctctactgaaaatacaaaaattagccaggcatggcagcgggtgcctgtaatcccagctacttgagaggttgaggcaggagaatcgtttgaacccaggaggtggaggttgcagtgagccgagatcgcaccactgcactctagcctgggtgacggagcaagactctctctctcaaaaaaaaaaaaaaaaaaaaaaaaaaaaaagaaagagagagagagaaccttcatctgggattttaagcctggatagccgcaggggctattgggaaatgtagccccaccacgtgggctaccagatgagggtccatctcccataagaagttgaagcacttcttttggggttctaggcctctggtaccctggtagctcttgagaggtgttgccttctaggtagaagggatccttatttcccatgagaccccaggacacttgctgtttgattctaagtctgctctatgccagaaattagtgagaaatccaaggcctgggttttgaggagagggctggagtggagacttcacatcccacaggcctcagatcctctgaacctggaggatctgagcctgcagtgtcctagaagctcatgggaggtgtagcatcaccattttaactcgcaggtaggtggcagggacttaagatgggctagtcctgggagctcttagcgggtgtgacaccaccattctgactcccatgtcagggcactttgtttcccagggaacaagggggttccccgtcctctcccccaggggctcgcagtccacggggccctttgctacctccgcaggcgctggcgcagcgggaagatatggaggagcggattacaacactggagaagcgctacctgagcgcccagcgggaggccacgtctctgcacgacgccaacgacaaactggagaacgagttagcta

SEQ ID NO: 92147 - DNA, 1040 bp, Homo sapiens
agaattcccattgccccaccaggcctttctggcccattgtgctcccagattccctctcccgctgtctgctgcggcccctcacccagtttcccctatttccctcctcaggctgatccaagaggagaaggagacaacagaacagagggcagaggagctggagagtcgggtgtccagctctggcttggactcgttgggccgctaccgcagcagctgctccctgcccccctccctcaccacctctacccttgccagcccctcccctcccagctctggccactcaacaccccgcctggcaccccctagccctgcccgtgagggcaccgacaaggctgtgagtgctctgaagtctccccagcctagtagggggatggggagaggtcagaggcagggctccccagtgtacagcaacaataacccctcacaccagtggttttccaaagcaacctcagctttccctaaaggttcaaactcaaagggcaaaggggaggctgagtcactgggatcttgaaccctaactttcactttagtcagatctggtctacttttatttctcatgcgtcaagtttctgcataggattttaaaaagtttctggctgggtgcggtggctcacgcctgtaatcccagcacttcgggaggccaaggtgggcagatcacttgaggtcaggagttcgagacccacctggccaacatggtgaaacccccacctctactaaaaatacaaaaattagcctggcctggtggcacgtgcctgtaattccagttactcgggaggctgatgcaggagaatcaattgaacccaagaggcagagtttgcagtgagttgaaattgtgccactgcactccaacctgggagacagagtgaaactgtgtctcaaaaaaaaaaaaagtttctgtgacaacatgcattggagaactacaaattagatcctcagaattgacctttgagggagacaaagagatattggccctattttactcccttaaattcagctttcctgcttccagaacctgtaactcattagctttctttgaggcctga

SEQ ID NO: 92148 - DNA, 1078 bp, Homo sapiens
tgacagcttctatcctggccccttcacccttacaggcatgaactcctggaggaggcctgccgccagggcctaccttttgctgcctgggacgggcccaccgtggtgtcctggctggaggtactggggcccagaaatgccctgactgttggtccccaacccctctgacagccccactggtaggggctgcctggtcctcctggcgcaccctgcttctagcccagaggtgggggtggccatgggcctggcaggtgaggacccaggagggctcgggcttcctgttcacctaaacagtttctttctccttctccttctgcccctgccactctggccttgcccacctgggtcatggtctcctgtcgttctctctactctctctttctggattctctgtctctatttttcggcaccattcccatctctgaccacgcttttgtcattccccatatttctcctcatgtctccgatcgccctgccgatgtctccctgtctccggcttcctgtctctccccaccctctatttctctctctctatttctttctctctctctctctttctctctccctctccctcttcccccacccgccccccgccccccgtttctctccctatttgtctccctcggactctccctcatctcgtccacgtctcttttccctgtcctgtttcttctccttgcgaactttcccacgtctctgtttcgctccccacccccttgcctttccccacctccctgttcccccatctctccgattttctcctcctctgtccctctgtcccctctgtccctctgtccctccgctgcagctgtgggtgggcatgcctgcctggtatgtggccgcctgccgggccaatgtcaagagcggtgccatcatggccaacctgtcagacacggagatccagcgcgagatcggcatcagcaacccgctgcaccgactcaagctacgcctcgccatccaggagatggtctcgctcacctcgccctcagcccccgcctcctcccgcactgtgagtgtccggcggccaattccagccttcgcttcctcagagccccgcctcttgccctcagtctagccaatc

SEQ ID NO: 92149 - DNA, 1068 bp, Homo sapiens
ctgtccccctctctctgtggatctctgtccccctctctctgggtctctgttcccctctctctgtgggtctctgtccccctctctctgtggatctctgtccccctctctctgggtctctgttcccctctctctgtgggtctctgtccccctctctctctgggtctctgttcccctctctctgggtctctgtccccctctctcagggtctctgtccccctctgtctcagagtctctgtccccctctctctgggtctctgtcccctctccctgggtctctgtacccctctccgtgggtctctgtcccctctccctgggtctctgtccccccatccctgggtctctgtccccccctctctgggtctctgtccccctctctctgggtctctgtcctcctctctctctgggtctctgttcccctctctctgggtctctgtccccctctctctgggtctctgtccccgtctctctgggtctctgtccccctctctctgggtctctgtcctcctctctctctgggtctctgttcccctctctctgggtctctgtccccctctctctgggtctctgtccccgtctctctgggtctctgtccccctctctctgggtctctgtccccctctctctgggtctctgtcccctctccctgggtctctgtccccctctccgtgggtctctgtcccctctccctgggtctctgtccccccctccctgggtctctgtccccccctctctgggtctctgtccccccctctctgggtctctgtcctcctctccctgggtctctgtccccctctctctgtgggtctctgtcccactctctctgggtctctgtcccactctctctgggtctctgtcccctctccctgggtctctgtccccctctctctgtgggtctctgtccccctctctctctgtctatccctgggtccctgctgccccaccttctgattctctgtcccctaagtctttgtctccccctctttgggttaaattgtcccctccctgtctggcatcctcctttctgagtctgttccctctccgccactggcccccaactccttctgttcc

SEQ ID NO: 92150 - DNA, 1067 bp, Homo sapiens
ccagactcaggagtctcgacccccatgccctggaccctggaacctggaccctcccatccccctcctccgtctgacccaggaatctgggtgtccagcgccctcctctctgggagcctggaggcgaggtccccagctccgcgctcccgcagaccctggtccggcgctcacctgctccttctccggcaccaccatgctgccgcggccgccgcaacctcctgcagcccagggccccggcgctccctccgccggctctgcttccagacccgcccagagcaaaccggatcctccactttccagcctagcctggggcggggcgaggtctggggggcggggagtcttggagacgccaaagcgggaggcggggagagggcgggtcccaggccgcgataaggggacagagggacagcgacctggggggtgcagaggtccgggccggggggagagagacacacaggggagactccaagggcaagcgcgagatgggaacagaaggagttgggggccagtggcggagagggaacagactcagaaaggaggatgccagacagggaggggacaatttaacccaaagagggggagacaaagacttaggggacagagaatcagaaggtggggcagcagggacccagggatagacagagagagagggggacagagacccacagagagagggggacagagacccagggagaggggacagagacccagagagagtgggacagagacccagagagagtgggacagagacccacagagagagggggacagagacccagggagaggaggacagagacccagagagggggggacagagacccagagagggggggacagagacccagggagggggggacagagacccagggagaggggacagagacccacggagagggggacagagacccagggagaggggacagagacccagagagagggggacagagacccagagagagggggacagagacccagagagacggggacagagacccagagagagggggacagagacccagagagaggggaacagagacccagagagagaggaggacagagacccagagaga

SEQ ID NO: 92151 - DNA, 1079 bp, Homo sapiens
cgggagggcgctgggggcccggactcctgtgtccgtggggagcgcacggggtgggtggctctgtgtcccataggacagaactgggtgccctctcaccccacttccacccctacatttgttcctgtccccagagctggatccccaagatcttcaagaagaagacctgcacgacgttcatagttgactccacagatccggggtgaggagttcgcccctggactgaccccagagggtccgcggcccgctgaccccgcccgcggatggtcacgccccagccctgctccttccccattcctggactcggggaccttcccaagggcgttccttgccgacgctctccctctaggagcgtttgggtctgtgtagacacccctcattccccattcgccattctcccgctcagggtcagtgtagacgctccagggctcggttctgcttctttcctccccgatgtctcttctatgtgcttctgtctcttcgtgtcactttctgtgtctctgtctttcccttttgggtatttctgtttcattcattcattcattcattcattcattcattcatccatccatgcaagaaaccctcactcagcgctcccaaggtccctttagcctaattcaacggccctgccagggttccaatttcccctgggacacgtgctgtgtggcttcgggcaaatcatttcacctctctgggtcccgtttctcatctgggcatcaaaagaggcttgatctcctggggttattatgagaattaaacaagttaatgcttgtgatattcctggcacagcgcccagcacaggacgctgggaaatatctgcagctcccactgggaggtggcaattattaccgcgggcgggccctgtcttggtggccggggacaccaattgagctagatagggtgtgtgcgtccgcgaggagctcccgcccttcagtgacggcctctcaagcggatccaggctttctagtttttttttttttttttttttttttgagacggtgtctcgctctgtcccccaggctggagtgcagtggcgcgatctcggctcactgcaagctccgcctcccgggttcacgccgttt

SEQ ID NO: 92152 - DNA, 1049 bp, Homo sapiens
ggctggtgcgggctgcccagagcacaggtgaccgagggtgggtgggggctgtctcctgggcctcggcctgcctgccatctcccccacgactgtgggtggcctcccccgccgcccagtgtgtgtgtgtgtctctgtcttattctttgtttctctccccctgcctctgcatgttcctcggcgtctgtgtaggagcctggattgtcactgggggtctgcacacgggcatcggccggcatgttggtgtggctgtacgggaccatcagatggccagcactgggggcaccaaggtggtggccatgggtgtggccccctggggtgtggtccggaatagagacaccctcatcaaccccaaggtgtgacccagggacttggaaaagggggctggaggcctggactcctgggtctgagggaggaggaggggctcgtgtttgtccttctggccccgatgaggagacgccctggtctggccatttttcccctagggctcgttccctgcgaggtaccggtggcgcggtgacccggaggacggggtccagtttcccctggactacaactactcggccttcttcctggtggacgacggcacacacggctgcctggggggcgagaaccgcttccgcttgcgcctggagtcctacatctcacagcagaagacgggcgtgggaggtgagtggtcgaacccatgacccacaacccacgacccacaacctgcaaccccagcgctcaggatcccagtagtttggtctggtcgagatttggggaattacctatggttaagtgtctttccccgtcattattcatggttttaaaaacttctgtctgagagtgagttagctcacatcagtaatcccaacactttgggaggccgaggtaggaggattgcttgaggccagtaattcaagaccagcctgggtaacagagcaagaccttgtctctaccaataataataataataataataataaagaataaaaaataaattagccaggtgtggtgtcgtgtgcctgtaatcccagctacttgggaggctaaggtgagagaactgcttg

SEQ ID NO: 92153 - DNA, 1118 bp, Homo sapiens
gcctctctgccttcttagacgcccctcaaccctgccttccattatggcctgtccagccttcccttaattgtccatccatctctgtccatctgccccatcttgtttcctctctccccacccatccatctgtctatccatccatccaccctgtacctccatctatccattcatccattcattcatccatctacttatccatccatccatccatttgtccatccatccatttatccatccatccatccatccatccatccatccatctgtccatccatccatccatccatccatccatccatctgtccattcatccatccatccattcatctgtccatccatccatctacctatccattcatccatacatccatccatctacctatccattcatccatccatccatccatctatccatccatccatctgtccatccattcatctgtccatccatccatctacctatccgttcatccatccatccctctgtccatccatccatccctctgtccatccatccatccctctgtccatccatccatccatccatccatccatccatccatctgcccatccatccatctgtccatccatccatctacctatccattcatccatccatccacccatccatccatccatccatccatccatccatccatccatccatccatccgtccctcatacccttgcccatctcttgtccttaacctttgagctaatctcttcccctattcatcccaccctgccagtccttccatctcgaagcttccctcatggacgccctgctgaatgaccggcctgagttcgtgcgcttgctcatttcccacggcctcagcctgggccacttcctgaccccgatgcgcctggcccaactctacagcgcggcgccctccaactcgctcatccgcaaccttttggaccaggcgtcccacagcgcaggcaccaaagccccagccctaaaagggggagctgcggagctccggccccctgacgtggggcatgtgctgaggatgctgctggggaagatgtgcgcgccgaggtacccctccgggggcgcctgggaccctcacccaggccagggcttcggggagagcgtaaggaccgggcaaagctggggg

SEQ ID NO: 92154 - DNA, 1062 bp, Homo sapiens
aacagaattccttcccaaagttagttcagcctatgcccaggaatgagcgaggacagcttaagggttagaagcaagatggagtcggttaggtctgatttctttcattgtcataattttctcagttatcatttttgcaaaggtggtttcacttcagcctcccaacgtgctgggattatagtcgtgagccactttacccagcctccaactgcttcttgacctgtctgtgactgctgaattgattctaactgcagcccagcccctgacttgcatccctggtctctgaaccacctgacttctggcattttcaactgactttcagtttcttccagatccatctccaaacattacttcatccttggcctctgatgaccccagttagtttctgacctctgactctgttccttcccttgacttcaggcttcctccccctctatgaaccctctttgacgcatccgtgccctctttgtctctccagggttccaatgcagtttcctcagctcttggggcctgtttgctgctccgggtgatggcacgcctggagcctgacgctgaggaggcagcacggaggaaagacctggcgttcaagtttgaggggatgggcgttggtgcgtggggcacggtgcctgggagcagggacgggggctgccgccagagggggatgtgcaactccgcactcctcacatatccctgcgccatccccttaaattcccttacctctcccttcacaccctcaccctactccttcccatccctgtcacataactaactcctctgccccagacctctttggcgagtgctatcgcagcagtgaggtgagggctgcccgcctcctcctccgtcgctgcccgctctggggggatgccacttgcctccagctggccatgcaagctgacgcccgtgccttctttgcccaggatggggtacaggtgagtatctgcgacaccaacatcccaaacagtctccaagtggactctgggaagtatggggatgagcccctgccattgggaacatctatggtcttgaccagccactctccctggagatcccccagaaagtctctct

SEQ ID NO: 92155 - DNA, 1019 bp, Homo sapiens
ttttttggacataaacaaactttggtctaggaaatctcacccttcctataggaaatcatctgccttgggaagccctacttgctcccacagtctctccgatcctgacaagttgacattttggaaacattatcaatatttttagtttaaatctgacaggggctcagagtcccactttagtacaggaagttgtgcccaacaggaagtcccatcctcatctgttggaatggtttggctgacatttcaaacagctacccagagtcccttgctgtggatagtggttaaactcatggattccagctctaccacatacaaactgtgtttctttgggccgtttccttaacctctctgtgcctcatgtgtaccaaggaggagatactagtacccacccccttatgtgtcaagggttcggtggactaatctacataaagtgcttagccctgtatctgccatatggtgtcaatttaagtgttgactgtttactgccaaaacctggcctaagttgtctttgcctttcaccaccgtttccctacctcaatagttgtggctgtgacattgggcacttgctctgtactctggagctgcagtccaacccttgctgggcgtcttagggacggggctgtgggggagatttggatcctaatccttcccaccccccacagtctctgctgacacagaagtggtggggagatatggccagcactacacccatctgggccctggttctcgccttcttttgccctccactcatctacacccgcctcatcaccttcaggtcagtaccctggggtgagagtggtggggatgggggcggggtgctcagtttctccttcctgccccctctgcccacctttcttccctcatcggcccattgtgtcccttccctaggaatgggactctctgtccctccactaagggagtgctgtgggaggtgagttttgggggggatcctccctgtggtatctctagtggcagttactctgcctttctggccatggctctgggggaaggtccctttggga

SEQ ID NO: 92156 - DNA, 1094 bp, Homo sapiens
agcgattctcccgcctcagcctcccgagtatgtgggactactggcatgcgccaccagacccggctaatttttgtatttttagtagagacagggtttcaccatgttggccaggctggtctcgaactccctacctcaggtgatctgcccgccttaactcccaaagtgctgcgattacaggcgtgagccaccgcgcccgatccgggtatatttttaaaatattttttgtagagatgaggttttgccatgttggccaggctggtctccaactcctcggctcaagcgatcaatccacctcttgaccggagatttcagaggtcagaggttagatacaagagtcaaaacccaagaaattagctctgggcagactgagtttcgggtcaggcagggtgagatgtgccaagccaaaagtctcgatgatggtggagatcaggactcagaggtcagagtgaggcctcctcccttctcttctcttcccccacaggacggcggacccagccgagaagacgccgctgggggtcccgcgccagtcgggccgtccgggttgctgcgggggccgctgcggggggcgccggtgcctacgccgctggttccacttctggggcgcgccggtgaccatcttcatgggcaacgtggtcagctacctgctgttcctgctgcttttctcgcgggtgctgctcgtggatttccagccggcgccgcccggctccctggagctgctgctctatttctgggctttcacgctgctgtgcgaggaactgcgccagggcctgagcggaggcgggggcagcctcgccagcgggggccccgggcctggccatgcctcactgagccagcgcctgcgcctctacctcgccgacagctggaaccagtgcgacctagtggctctcacctgcttcctcctgggcgtgggctgccggtgagtgccccggggccttggaaccctggcccctggccacctctcatccttcctgcccactcccggggtctccactcccggcttccccgcagctgggcagcaggtcaagccaaccctgctgattgagaacccctcttaggaaagtcgggcatgacgattgccccagggtaattggctg

SEQ ID NO: 92157 - DNA, 1030 bp, Homo sapiens
gaggatgcaaaataggggtagaatttttattttccccataggaattattgatgtttactggccgtttgaacgtcctctgtgaattgtacgtggtatcctttatctggcttccttccttttgcgtattagtttgtaaggactctatatgttttgccttttataggttggacagatattccggcagtttttccagcttgattcttacagggaccagctctttgctaaggccatcgttcattcagtcattacttaataggcgcagccattttaaaaatgggtgccagggccctgcatggaccagcttggtactgaataaatttgagtaaaccccgggtgactgggagggtcctggtcctgcccggtggaggctgcagcttcctctgaaggatggcattgggaagacttccattttccttggcgtcttgtgacacttgacccttgtggcatctccccacaccccaggctgaccccgggtttgtaccacctgggccgcactgtcctctgcatcgacttcatggttttcacggtgcggctgcttcacatcttcacggtcaacaaacagctggggcccaagatcgtcatcgtgagcaagatggtgaggcaggggcggggccaaagtgggcggggacatagggaaaggggtggggccagggagggagtggtccgtggagaaggggcgtgactttggggagcaatggggcgtgtttttgggatataggggtggggccagagtaggaaagggcggggccagactcagccacatctccccacagatgaaggacgtgttcttcttcctcttcttcctcggcgtgtggctggtagcctatggcgtggccacggaggggctcctgaggccacgggacagtgacttcccaagtatcctgcgccgcgtcttctaccgtccctacctgcagatcttcgggcagattccccaggaggacatggacggtaggggggatgacggcctgacagccttcctctgagtctctgtccccgctccctgggtctctgtcctcctggctctaagaaa

SEQ ID NO: 92158 - DNA, 1096 bp, Homo sapiens
attttgtttctaagagaagttactatttattgttaattagatggggaggaaagtctttgaagaggaacctgtactttactttttacatggagttttgctcttgttgcccaggctggagtgcaatggcacgatctcagctcactgcaacctccacctcccagatcgaagcgattctcctatctcagcctcccgagtagctgggactacaggcgcgtgccaccacgcctggctaacagttttgtgtttttagtagagatggggtttcatcacattggtcaggctagtctcaaactccccacctcaggtgatccggccatctcagcctcccaaaagtgctgggattacaggcgtgagccaccgcgcccggcagtcttcctgtctttcttaggtctctgtccccctcaccccatctctgaatgtctctcttcacagtggccctcatggagcacagcaactgctcgtcggagcccggcttctgggcacaccctcctggggcccaggcgggcacctgcgtctcccagtatgccaactggctggtggtgctgctcctcgtcatcttcctgctcgtggccaacatcctgctggtcaacttgctcattgccatgttcaggtgaggcctgactgctctctgatctgaccccacccagcatgacccgtggccctctcatgactcttgaaccccgtctaatgaattctgtttttagtccctgaactctgatccaatctaatgctgccttctccccaaacccaaccagaccctgcttgtaatttggactttggactgatcctctccctgagcccaggttgaacttccttatttgtatttttttgagacagggtctcactctgtcgccaaggctagagtgtggtgatgtgatcgtagcttactgcagcctcgacctcctggactcaagcaatcctcctgccttcgccccataagtagctgggactacttaaaattagccaggccagcaggcctgcctaatttaaaaaaatttttggagagaggggtctcactatgttgtccatgctagtctcgagctcctggactcaagtgatcctccctcctcagcctcccaaagtgctgggataatct

SEQ ID NO: 92159 - DNA, 1048 bp, Homo sapiens
cgtgataccatcccaacttgacctctgacatctgacccttggcccttctaaactgactttttttttttttttttttttttgagatggagtcttactctgtctcccaggctggagtgcagtggcacgatctcagctcactgcaacctccacctcctgggttcaagcgattctcctgcctcagcctccccagtagctgggattacaggtgcccaccaccacgcctggctaatttttgtatttttagtagagatggggcttcaccatgttagccaggctggtctcgaactcctgacctgaggtgatccgcccactccggcctcccaaagtgctgggactacaggcgtgaccaaacgcccttggctctaacctgacttctaatcgcatcctgtaacctctgactttagtgatcttgacttctgtctgctgctatagactgaacaattattgcctggcatctaaccttcgtccttgcccctggctgggccctgacctcaagtgacctttgacctctggcctttgcagttacacattcggcaaagtacagggcaacagcgatctctactggaaggcgcagcgttaccgcctcatccgggaattccactctcggcccgcgctggccccgccctttatcgtcatctcccacttgcgcctcctgctcaggcaattgtgcaggcgaccccggagcccccagccgtcctccccggccctcgagcatttccgtaagaacagagcttggcttaaaaaggagaaatataggggaccgggagcctggaaggcgaggggaagggggcatgccccaaatgactaacgggcgtggcttaggtagcgaggggcggggtttaagcaacaaggggcggagcttaagcactgaggggcagtgcttacgggtgaggggcggggcatgttctcgaatcaccaggggctgggtctgggatagcgtgcgtgttctgagggtgtcggaaggggcagctgggattgggaaggggcgtggcctgagccctttgactccgcccgcccctgcaggggtttacctttctaaggaagccga

SEQ ID NO: 92160 - DNA, 1010 bp, Homo sapiens
tgggggtgggtgggctgcgggtgcccccggtaagaggccctcccttctcagggtggacttggcactgaaacagctgggacacatccgcgagtacgaacagcgcctgaaagtgctggagcgggaggtgaggccttggggcctggctgggggactgtggcaggggtcccatctcccgctctgacattcctcccattccgcaggtccagcagtgtagccgcgtcctggggtgggtggccgaggccctgagccgctctgccttgctgcccccaggtgggccgccaccccctgacctgcctgggtccaaaggtcagtgtgtagcatcagcctgtgcatctccagcctctgttcctgtatttttgcgtgtttttctctctcggcacctttccagtgtccctgggtcactctcttggtctcctttgagccttttgtactctcgccttcgtctttcttcttttttgccagtctcccagtttttctgtctctccccttccctgccaatcacctgctctctcttttctctcttcccccagactgagccctgctggcggacttcaaggagaagcccccacaggggattttgctcctagagtaaggctcatctgggcctcggcccccgcacctggtggccttgtccttgaggtgagccccatgtccatctgggccactgtcaggaccacctttgggagtgtcatccttacaaaccacagcatgcccggctcctcccagaaccagtcccagcctgggaggatcaaggcctggatcccgggccgttatccatctggaggctgcagggtccttggggtaacagggaccacagacccctcaccactcacagattcctcacactggggaaataaagccatttcagaggaatcgtgtccggaggcttgattcctgggggagctggtgggtgtctagatccaggatgggagctggagctggggtgttgggtttggggttcttggtggatttgctgctgtaattcagatattttggagtccgtttcctcc

SEQ ID NO: 92161 - DNA, 1051 bp, Homo sapiens
ccagcgagcgtggggcccagcatcacatttaccgcctggtcagggactgaagggggaccccaaaactggctcaccccccagaacaccctcctcccagggagggtcctccagctcacctcatgcttcttatttggggagagggctgtgatgtaaaggggttgacctcagaggcctaagcaactggggccatcccccccattagaggggcccccaaaacttggttggagagctgaacaggctgggactgaggaaaggataaaccccgatattgggacctcacagtgggtgtctgaaaggacagatcactccggagtatcagggattgtggggacaggagtgagacaaccccccaggtacagcactggcttttcttttcagcccctgacaggccacccccactcctctgcatgtcttggagagcgctagttacacattggcttgtcccctttactttttcccagccacccctccccctgaaatttctgcccctctctaccaccctcactccatgacctgtgagatcacaaagtgaagatgaaccctttctgtgcaggagcagagccaggtgggccctggacattttttttttttttaatataacgagatatttataagtgggtgctagggtcttgactttatctccgctgcacaagcagtgtgttgaactttctaatctcatccctctcctaagtgagccctgagctagacggtttccttcctcccctctcaaagtttgtttgtttgtgttctgacagaggataaagctattttaccaaaaacgcaggggatttatttgaggtttgggtgaaaaataatcttgtgggtggtggtaggccgacagatggggacaggaagctgtggacgaaagccccaggtcccgtgggagaggtgacagcagcaggggcacgcagccacgtgggtccccaggggaatgtgaaggcggagggctccaggcgaactggggattaaacaaatatttacaggcagcagggaagtgcccagcgcacgtgacgggggcggggcgggactttggggagggcggggcctaacg

SEQ ID NO: 92162 - DNA, 1010 bp, Homo sapiens
ggctaggggtgtatttctcagcccagagaggaactgatggatccaggctaggcattggttgggtagtgtggctgcaggacggtgaggcaggagtgttgacggtattgtcagagaaagagtgtagtgagggccgagtgtggtggctcacgcctgtaatcccagcactttgggaggctgaggcgggtggatcacgaggtcaggagatcgagaccattctggccaacatggtgaaaccccgtctctactaaaaacaccaaaaaaaaaaaaacaaaaaacaattagctgggcgtggtggcaggcacctgtagtcccagctactcaggagggtgaggcaggagaatcacttgaacccaggaggcagaggttgcattgagccaagattgtgccactgtactccagcctgggcaatagagcgagactccagctcaaaaaaaaaaaaaagagtgcagtgacaggctgtgtgggatctagactggaagagaaggaaggtcactggggagctgctgctgaatggggatacgggaagcatcagatcaagtacctgggggctgagggttttgcaggggggttgcttagctggaaggtagggggctgggcaggcactgccctgacgctggggtttccgctttcatggagctgttagtcaaatgggggaaatgagcgttcatcaaatcatcacctgcataaacagaaaatcgaagaatgtgtgaggtgctgtgaagaaccacagcaggttctggggtggaggagaaagttctaggggtttctctgagaagataacattgaaggccgggtaggacttagccaggtgaagaatgggagtgggaggcccggcatggtggcccgcatctgtaatcccagcactttgggaggccaaggagggcagatcacttgaggtcaggagttcgagaccagcctgtccagcatagtaaaaccccatctctacctaaaatgcaaaaaatagccaggcatggtgatgtgcgcctgtaatcccagctactccggagcct

SEQ ID NO: 92163 - DNA, 1643 bp, Homo sapiens
acccgtaattcatacccgaacctttagccttcatggccctcggcattactctagggtaatcattgtgacttcatcacaattgagttcctctggaaactctgagaacactcccatcctcagctttccaagaaatccagctccttctcctccctcagactcaggagtccagaccccagccccttctccctcacacccaggagtccaggcctccagcccccgctccctcagacccaggagtccaggccccagatcctcctccctcagtcctaggagtccgggccccagcccctcctccctcagactcaggagttcaggccccagatcctcctccctcagacccaggaataccccccagctcctcttccctcagacccaggagtccaggtccccagcccctcctccctcagacccagtggtccagagtcccagccctctcagcttcaagtcccttgagggtggggtttgggggaagcttgctgagttctgtgttcctccaggcccagatgggggaaccccgggctggggccgccctggacgatggcagcggctggacgggcagtgaggaaggcagtgaggagggtaccggcggcagtgagggggctgggggtgacgggggcccggatgcagagggggtgtggagcccagacattgagcagagcttccaggaggccctggccatctatccaccctgcggccgccggaaaataattttgtctgatgaaggcaagatgtatggtgagtctacttctgtcttttgccctggcccccactgatgaataatgacagtaaccaaggtttatggagcactctgaagtaggagctagcatcaccatttgcacagatgaggaaactgaggcacagctaggttaagtgatttgcttatggtcgcacagagccagtgcgtgatggagctgggatttgaacccaagcagtctggcttccacgtagctgaggggaccggcagcccacttgctgcagacctttggggacccatgctgctttcttcttccctggtgtccatgctgtggggaagttctgttgaaagtctaactaactctgttccgtctttgaatcttcaggtcggaatgaactgatcgcccgctacatcaagctgagaacggggaagacccgaactcgaaaacaggtctcggaatggacttgtgggcttctgtctgggatgggccggtcttcttagggtcatcctcgcatgggcaggttcaggttcaaggaagaagctgcttcctgtgcgttcatctgtcttctcggcatgtgtgttagtccgtttgtattgctataaagaattacccgaggctgggttatttatgtatttgtttattttttgaaatggagtctagctctgttgcccaggccggagtgcagtggcgcgatcttggctcactgcaacctctgcctcccgggttcaagcaattctcctgtctcagcctcccgagtagcagggattacagacatgcactaccatgcctgggtaattttgtatttttagtagagatggggtttcaccatgttgtccaggctggtctcgaactcctgacctcaggtgatccactcacctcagccccccaaagtgctgggattgctgggattacaggcgtgagctactgtgcctggcaaggctggataat

SEQ ID NO: 92164 - DNA, 1215 bp, Homo sapiens
tccccagccccaggccgggaggtaggaaggcgccggcgggagtcggggatcctgctttggggtgtgtgagttggggtggggagttgcttcttaggaggtgaggcgtgcgtttgcgggaccgtctctgaatggttcgcagccctctttttgcccgggggcccgaatttgctcccgtgaccgagcctcagtgaggagtgggaactctggccggagttagggtgcctgcggctgggtctgagtttgggcgtgcgcgcaggagcgggtgcgggccaagggcgctggcggggtgtggggcgtgcgtctgcggcggtgtcactttggagtgagaaggaccccttgtgtaatctggggggcatttggtccttcttacggagaagggagggcctctggggtggccgaggggaggttacggggctttctggatcttaagtcttgcctctttggaggtttagggtctggggcgggaaattagggggacctttcttacccggctccaccgtccctttgtctggccacatggggaagggctgggctgggattttggcctacgggggtcctgaacgccgcagcgccactgggcttggctggggtctttgtctgctatggtcggcgggaggaggggaataggggcctggactctggggtcctgggaaagctgtggaggacatggagcctccggggaggcgggatctgactgtattggaaaaagttttccctgttcccggcctccggaaagtcactgggaacttgagttggatcagagcccacggcgcacgggggaggggaggggcggggcccggtgccggaggggagtcgccctggccggcaagcccctcccctgatgggggttgtgggaagctgggggaggggacgcctgggccctttgttctggctcttctgatggcagggcgcccctgtcccccagcttgtggttctgtgggtctctcctggtctcggcctcagctgctgccctgagtctctgtccctgccctttctaggtctccgtctccctttctctgggtctctgttgccctctctctgagcctctgtccccctctctctgagtctgtgtccccctctctctgggtctctggtcccctctctctctgggtctctgtccctctctctctgggtctctgtccccctctctctgggtctctgtcaccctctctctctgggtctctgtctccctctctgggcctctggacccctctc

SEQ ID NO: 92165 - DNA, 1018 bp, Homo sapiens
accccgcacccagagtctcctgagacccccaaagctgactcactcacaacctcaatatcagaatccctggacatgcccaaaactaacctctccaaaatggcacacccagagtcttctgagacccccacacctggcccaactgaaatgccacacccaggatcccctgagacccccaaacctaacttctccaaaacttcacgcccagaatttcctgagaccccaaacactgaccttatgcaaactacaccccaagaatccccagagattctgcagcttaatgccactgaagtctcacaggcagaactccccgagacctcaaacactaaccctaccaagacccctgaccccaaatccccagaaaagcatgacctcaactccactgagaccccaaactctgaatttctccaagctctccatcctgacccttctaaaaccccccacccagaatcccatgtgacccacaatcccagccccaccgaaatttcccaaacagaattccccacaacctactaccaaaatgcaacagatgtacccaggacctccgaccctcaaatctccactagtctctacccagaaacacctgtgcccttcaaggatgacgccactgctctaaatgagctgtccctgaatcccaaaccaggaacacctgcagccatccagcccgactccccaaaattgcccacttcagattctccaggaatggttgagctgaaggccccccagaactctggccctaaggagtccaacgtccctcctccctcagcccggattgcaggtccccctgctcttccagggcgccccagtcagttggcccctgccactctgcgggcaccccagaggcacagccgaggtgagggagtcaacaccatcatcgtggtggagcgagtgaaggagaccggtgaggggcaggagccggactcctgagtctgagggaggggctgggggcctggactcctgggtccgagggaggaggggctgggggcctggactcctgggtgcgagggaggaggggctgggg

SEQ ID NO: 92166 - DNA, 1050 bp, Homo sapiens
ttctctccctgagtttcattccctaaccccgattttcttccctctggcttccgccccccacagttatatttcacacaccccgccagtgccagctgcgaccccatagtctccccattgtgttatttctctgctcctctgggatctgtccgcgctctgagttcttccctagctccgggggatccattcctctatttgagttctgtctccaccccctgagatctgtcccgccccctaaattgtgatccgcaccccctggcatcctcacccgccctctgaatttgtctcctcccctaggatctgtcgctgacctgagttctgcccccgccctctgagttctctccccaccgttggagttgtgtccccttctcctaggatctgtccctggctctgttcccgccctctcagttctgtccttgccccctggaatctgttcctgccatctgagttctaccccttccccacaggatctatctctgccccctggaatctgtccccacccaccgagttctggcctccgtccctgggatctgtccccgccctctgtgttctacccctgccccatgggatctgtccccgcccacccagttctccccgccccctggatctctccctaccctcccagtcttgccccggccccatgggatctgtccccgccctccgacttctgaccctcgccactgggatctgtcctcgacctcccagtcctgcctccgcccccggaatctgaccccgcccaccgagctctggcctccgcccctgagatctgtccccgccctcccagtcttgcccctgccccatgggatctgtcccccgcccaccgcctccgcctctgggatctgtccctgccctcccagtcctgctcccacccccggaatctgtccccgcccaccgaactctgtctccacgccggaattccagcgccgccccgttgggtagagcccggcccttccctgtcctgggcccgcagacagggtcccgccccgctcctgtcctcagaccagcccatctcccggcgctgagtccacctccagatccaggccccaggagggt

SEQ ID NO: 92167 - DNA, 1036 bp, Homo sapiens
tcgctggagtacggaccggtgccggagagccacgcatgcgcactggtgagagtctgcccggccggcgctgctcgctgcgttccccaggcctgggcgcccggtttttcgcggggagtcccgtcatccactgcggtagctcagccgctccgcctctcttagtccccgtgattcccgccgcccaataggatcgcgccctgtaggacgctcccttgagccttggcggtggcagccttttagtctgttccggtcttccccactggttctcttgccccttgatcctgaactcctcgtagtgtttccgcggttttcctgaactcctctagacgctctcgtgattcctcagggtcccctcagaacctgacgccacccaccagaccccttaggattcctgtgaggctccagtgacccacaacccccattgtctttccacgactcttcaaaacatcctatggcttccatgggcctccagagcaccccagacctcctgagggactcccttcatccctttgattacccagagaccttcagaacttccatggagcccccgtgatcccataggacccctcaatactcgtggggttcatgtgacctcatcggaactctcaggagcctagaatacatcaggacttccggtttgggttgggttttttttttgtttttttttttgagccagggtctcactctgtcgcccaaactgaagtgcactggcgctatcacaccactgcagcctcaacctcctgggctcaagccatcctctcacctcagccccccaagtaactgggaccagagacgcgcgccaccactctcagctaatatttgtactttttctagagacaaggtttcagcatgttggccaggctggtctcgaactcctggcctcaagtgatccacccacctcgacttcccaaagtgctgggattacaggcgtgagctactgcacccagccacatcaggacttcctgtaattacttatggcccctcacaataccctcacggggctcctatgatctctctagctctcagaatgtcccatagg

SEQ ID NO: 92168 - DNA, 1052 bp, Homo sapiens
taatgtcatctgatgcccagttcatgttcaaatatccctgactttctcacagatgtctctctccctgtgggcgtttgagtttggaacttctaagtaacttttttgctttaaagagaaaggagaagccaggcacagtggctcatgcttgtaatcccagcactttgggaggccgaggcgagtggatcacctgaggccaggagttcgagaccagcctggccaacatggtaaaaacccatctctactagaaatatataaattagctgggcatggtggcggccgcctgtaatcccagctacttgggaggctgaggtaggagaatcacgtgaacccaggaggcggaggttgcagtgagctgagatcgcaccattgcactccagcctgggagacaagagcaagactccatctcaaaaaaaaaaaagaaagaagggccagtaagagaaaaatcaggaatatgtgacatcagagatgctaggggagtctgtagaaggagcaagtgagcagtgtgctttggatttagcatcagggaagacgtgaccaggatgagaaagaaatatggaggagaagtccgggcgcagtggctcacgcctgtaatctcagcactttgggaggccgaggcgggcggatcacgaggtcaggagatcaagaccatcctggctaacacagtgaaaccccatctctactaaaaatacaaaaaaattagccaggcgtggtggcaggcgcatgtagtcccagctactcgggagcctgaggcaggagaatggcgtgaatccaggaggcggaccttgcagtgagcagagatcgcgccactgcactccagcctgggtgacagagcaagactctgtctcaaacaaaaaaaaaaaaaagaaagaaagaaatatggaggagatgtggtgagtgagatgtggtaaaaaaattttttttctttgagacagagccttgctctgttactcaggctggagtgcagtggcgtgatcttggcttactacagcctctacctcctgggctcaagtgatcctcccacctcagactcccaggtagctgggactacaggc

SEQ ID NO: 92169 - DNA, 1877 bp, Homo sapiens
tcctcccgaacccctttccaaactgtctctacctcccccaggcctggctggacacccaggaccggtgcttgggccactatgtgaatgggaagtggttaaagcctgaacacagaaattcagtgccttgccaggatcccatcacaggtacgagatgtcccccagtcattagtggaagggaggtatctgtgccctctagccctacccaccaacacccattccccttgcctagggccctgagggcaggaaacagctggtggtgggagatgggctgcgatgtctggttccttctgaaaccagtcaccctaattatggttccgggtctctgtggaggctttgtgagactgctgtctgttaaaatagcttccttgccctggaggtgatcatagccgtgacccagcagagaatggggaccagctttacactcttgggctgatccaggctccgaaaatctcagccccctccagatatgacatgggctactcctcccatctgagtccccccacttttctccccaggagagaacttggccagttgcctgcaggcacaggccgaggatgtggctgcagccgtggaggcagccaggatggcatttaagggctggagtgcgcaccccggcgtcgtccgggcccagcacctgaccaggtgatgcagctgaggtgtggaccccgggaggcggggaaccccagcatccactcgagaccatgggaacaaaggctatttcccaagatcccactgaattaatttgcagctaaggctcagattcccagtatgtgctggaggcagtcgtggctgaaacatgcatccgttgtccactattcactgggactagaagccacaaagcctctatttcccaggacattcttggagtgcattggggctcagttcactggggctggtgaagcccctaaatccatttcctagccgcttgcggggaagctagagacaaaaattccatttcccaaaacgcaattgaggttagaagctaagactcaatttcccaaaagcttcagggatttccggcggccaagacctttacacagcatcctcagggtttgtgtttccatgactataattctcataaatcttcactgccctctgccccaggtaaatggtggggatgcctcaggggctcatggggattgtagtccaggtatataggagcagcccaggactctgcaaggctgagggccgttggaaaatgagcaccctcttgctttctcgacaggctggccgaggtgatccagaagcaccagcggctgctgtggaccctggaatccctggtgactgggcgggctgttcgagaggttcgagacggggacgtccagctggcccagcagctgctccactaccatgcaatccaggcatccacccaggaggaggcactggcaggctgggagcccatgggtgagaccctggagtccctagccctatcctcccacatgactcagcagtgctagctccagtcccctcattctttttcttttagacagagtttcgctcttgtcgcccaggccggagtgcagtggcgcaatcttggctcactataacctccgcctcccgggttcaagtgattctcctgcctcagcctcctgagtagctggaattacaggcacccaccaccacacctggctaattgttatatttttattagagaagaggggtctcatcatgttggtcaggctggtctcaaactcctaacctcagatgattcacctgccttggcatcccaaagtgctgggattacaggcatgagccaccgtgcccggtcccctcattctttttcttttgtttttgtttttgtttttttctttttcagacagggtctttctctgtcaccctggctggagtacagtggtgcaattatagctcactgatac

SEQ ID NO: 92170 - DNA, 1021 bp, Homo sapiens
aggggctggagtctggactcctgggtctgagggaggaggggctgggcctggactccggggtctgagggaggaggggctgggggcctggactcctgagtctgagggaggaggggctggagtctggactcctgggtctgagggaggaggggctgggggtccagattcctgggtctgagggaggaggggctgggcctggactcctgggcctttgagctgccccacttccccaggctgcaccgtggtggccctcgtgcccccggcctccccggcgcccctcctcctggcccagctggcgggggagctgggccccttcccgggaatcctgaatgtcctcagtggccctgcgtccctggtgcccatcctggcctcccagcctggaatccggaaggtggccttctgcggagccccggaggtaccttcgggacaggggtcgtggcggaacgcggctgggggccgcaaggctcctcctgcggctgaactggggggggtccctaggaagggcgtgcccttcgacggagcctggcgggagagtgtgcggagctgggcctggcgctggggacggagtcgctgctgctgctgacggacacggcggacgtagactcggccgtggagggtgtcgtggacgccgcctggtccgaccgcggcccggtgagacccgtgcgctcccgtctcctcataccctggaggccgttggtgtctgtctccagtcttcggggtcccgagtctctgttcattttattttattttattttatttattttgagacggagtttcactcttgtcgcccaggctggggtgcagcggcgcgattttggctcaccgcaacctctgcctcccaggttcagcctgggagtagctgcctcagcctcccgagtagctgggattacaggcgggcaccaccatgcctggctaatttatgtatttttagtagagacggggtttcaccatgttggccaggctggtctcgaactcctgacctcaggtgatccgcccacctcggcctcccaaagtgctgggactg

SEQ ID NO: 92171 - DNA, 2531 bp, Homo sapiens
accctgtctcaaaaccaaatcctacagtttattagttacaaggtcttgtaactgggtagtcagtgggcagagccttgctggtcttcgttcaaatccaattgctttgcaaaatacaatctgagcataaaatactcatagaagaactcagatatgaggggagtttgggcctcttaaactgctcactcactgatcctgaggcagccttgctttctcagtccctgttcctcatctgtagaacggggctccgtgcatagttcccagctctgatggctgggtgcaaggcacgctgttggcacggtaggacaaaagaagggaatgcttgcttgtgaggacaatcaaaggctgtccttgtctctgagtccttttgcccttgtctcccacaggtcctggtgcttgatggtcgaggccatctcctgggccgcctggcggccatcgtggctaaacaggtactgctgggtaagtcgctgctcgtggcccctctgtcatgggcccccgctggaggtcagtgatgagcaacattcaccatctttcgtttgagtctcacggccatgagatcaaccccatgcaccgctctgagacctgccagccactcttccccagggttggggactccaggctcaagaagtaattatgtattaggctagtttttcatttaaacaggaacttagctctggcaagtactgcgctgtgtctggagggtgactgcataggcagtggtgggaccctcaggcggctcggccctgctaagcctttccctccctctaggccggaaggtggtggtcgtacgctgtgaaggcatcaacatttctggcaatttctacagaaacaagtgtaagttaggacctgggaggagcactggagagggtctccctgtggggtgttgaggctctgaaagcaattgcagccgtgttgggagaggctacttggggtttctgagaaggcccttggaagtggggttttgggggtgctggtagactgggcaggcctcacactctcccctctccctagtgaagtacctggctttcctccgcaagcggatgaacaccaacccttcccgaggcccctaccacttccgggcccccagccgcatcttctggcggaccgtgcgaggtgagcagagcgtggggactgcaggtggtgacgggcaggcggccggtgatgagaacttctcccactcacattcgagtttcccgaccatgagatgactccacatgcactaccatctgaggccaccccatgggcccacctcagtggggtgggtgggcatccttatgaggccctctgactgggcctgctatctgtcacccaacaggtatgctgccccacaaaaccaagcgaggccaggccgctctggaccgtctcaaggtgtttgacggcatcccaccgccctacgacaaggtgagctatgccaaaccccacaggcagcggccttacctgtggcgtccatgatgttccgcaactacctacattgtttgatcctcatgaaagcagcactggctgagacgccagtccagccgacctccttccctgtctgtccctcccgggctcttaagcccctctctttctctaacagaaaaagcggatggtggttcctgctgccctcaaggtcgtgcgtctgaagcctacaagaaaggtgagtcccagcttacgctgcaccatctacttgggagatttcaggcctgctgagggacctggggacctggagcctggcagatgatgtccttatctcacgatggtctgcggatgtccctgtgggaatggcgacaatgccaatggcttagctgatgccaggaggcttgggtgggtgcttttctaacaggcctgcagagaacagttgcattatgatatgcccagctgtcagtcacctcccagctctcaacagctccggctcttcagggtgtgggggcttagatatccttacaacttcatttgttcaccccccccccccccccccgcagtttgcctatctggggcgcctggctcacgaggttggctggaagtaccaggcagtgacagccaccctggaggagaagaggaaagagaaagccaagatccactaccggaagaagaaacagctcatggtgaggccaggggctggtgctgaggggggcatctcactcctggacaggcctggcaggtgccttgctcacagagtactcttaactggcaaaggaccagccggggttggggtgggatgcagtccatgtaatgagggcaatgcaacccctcctgaccaccaccacctgcacttattcttggcagaggctacggaaacaggccgagaagaacgtggagaagaaaattgacaaatacacagaggtcctcaagacccacggactcctggtctgagcccaataaagactgttaattcctcatgcgttgcctgcccttcctccattgttgccctggaatgtacgggacccaggggcagcagcagtccaggtgccacaggcagccctgggacataggaagctgggagcaaggaaagggtcttagtcactgcctcccgaagttgcttgaaagcactcgga

SEQ ID NO: 92172 - DNA, 2576 bp, Homo sapiens
tgttgggattacaggcgtgagccaccgcgctaggccgagagtaactttcactgcacctctgaaagttcgtgggcagctcctgcccctaacaaagatggcgacgccgccacacatgctcctagcactccccggccgcccacccttcaaaaagatggcagccgcctcatccggtttgaaggctgaacgaacagagccacgcggtatccaaatcccacgggagcctacgccacgccgaaacaggatggactccgtacgactctcgcgataatacgggcgggctgaaggctggtcacatcttccctgcctaaataatcgcgcccggcgttgtggggcctaagactctcgcgagacaccgtctagcacttcccgcccgtcagtccttcacagtgcccgaatcgcccgctggtttaagtgcagcctgtcaatcagagcagctctcgaggccccgcccaaggccgtgctgcgtttctccttacgtcacttcctctccagcccctgcgtaatcgataaggaaacccggacgctgctgcccctttctttttttcaggcggccgggaagatggcggacattcaggtgcggactcggggttggatgccagggtgcggggtccgccttggccttcaggggcgcgtccgggagggcagagcccggcggccaagttcgggggttaattccgggcgtccgtgattattttctagagattaactggagtggagggcgcttgcttttgtttctagatgagtgcttcctaattcctgggggctcctggcgttaatggaggctcaagcgttttaggacttaccttcttaaaaaccaagtttaagaaggtttttttggagttctccggtcttcaggggtaattctgtggaaacggactcctaagggctaatccagggagcctgccgtctggtatttaattctgaatccttatgtactacataaggagtgaatcctgggtgggcgatcttgggtcttggagaatgatcctcgctgaaaggtgtccagggtgtgagagggttgatcctggtttagaggatgaattttgcaatccctgagaggccttctggagtatataaattgaaataacctcgggcttagatctgagtatgaattacaggtaaggtcagggtggtcatgtcttagagggtgattctggggcaccaggccttggacgccggcgctttgcaagtaaatgtagagcatggggtctgggaggttctgggaaggtctctagggctggttggctgccggcttcaaacttagcagctcatcagttttctcctcataatctgtagactgagcgtgcctaccaaaagcagccgaccatctttcaaaacaagaagagggtcctgctgggagaaactggcaaggagaagctcccgcggtactacaagaacatcggtctgggcttcaagacacccaaggaggtgcggggaacctcagaagaaagaaggggaacctggcgttcctgcacgtgtgcccacgacgagttgccctgcctgcatctaagtggcttctggggctgctgggaattgtagttgcttccctgaggccacgcccctggctcttttaaggaaccgcccgcccaaggctcactcctttatctttcctatcctttcaggctattgagggcacctacattgacaagaaatgccccttcactggtaatgtgtccattcgagggcggatcctctctggtaagtgcgggagttactggtgtctggggcctgaaatactgaaagaagggtcttggggcccagactcctgggtcctgggtgagaggggtggttaggaatgcaaacttgtaggtccaggtacattggcagatgatgtttgttttcacgatggtcttcagatgcccacgtgggcactgctgagaaagccacttggtaaaactgatgccggaaatggggctttttgggatccctgctcagctgcttctgagtcccagcatgccctgggttacctatggccctctttcccatgggacctgacctatgatcggcccccgctcctaggcgtggtgaccaagatgaagatgcagaggaccattgtcatccgccgagactatctgcactacatccgcaagtacaaccgcttcgagaagcgccacaagaacatgtctgtacacctgtccccctgcttcaggtgagcgcagtggcccatcaggttgctcaggccacgctctctcagccttcagattccagatcggaccaatttaaggccaactgagggagggaaagactgaggtggcatctctgggaagccccagaatctcaggatttgtatatcatatgttcttcagaatcaaagcgttctacagggtgaatatctctacctgaaatgcttggaaccagattttggaatgttctcgcatacatagtgagatgttttggggatgtgacataggtctaaacaagaagctcatttgtttcatatacaccttattcacatagcctgaaagtagtcttacgcagtgcgttttataattctgtgtgaaacaaagtttgcgtacattgaaccattggaaagcaaaggtgtcacgctggtattgaagaagtttcagattctagcc

SEQ ID NO: 92173 - DNA, 1118 bp, Homo sapiens
ttagttagagcttatcacgtaccaggtgtggtgtgagatgtttggggttcagtggtgagccaggaacaaagtcctgctccctcagagggcaccttcaagcagtgtgggtgccagatgacagccaagtataaccagaatggggatgtgggcagctgatattggtggccctctgggcggggaggatcttgggagcaaggtgaggagtcctgtgggtggagaggagggtggcccaaactgatgctgagcgataagggacctgtggttgtcagtgctgcaggatccccctgctgctctgctggggaagggtggtgaggctgctgacaacttgggggcctccagtttgcttgtgaaatggagctcgtccaccccagcggtcctcggaggggtggtggcctgctctgtgtacagcgttgagcttggtgcttggcacaaaacttgtacgaaaggaggggacaggttgaattggcgagtagagcttggttggggtttggtggagccgaagcagagagcctttagcctggtgaaggggagggagggcctcctggggtctgctggggtggcccctcctgaggacatggccctacctgcctccacagggacgtccagatcggtgacatcgtcacagtgggcgagtgccggcctctgagcaagacagtgcgcttcaacgtgctcaaggtcaccaaggctgccggcaccaagaagcagttccagaagttctgaggctggacatcggcccgctccccacaatgaaataaagttattttctcattcccaggccagacttgggatcttccgcgcctttaccagagcattggtgggggtgggggtgtgcctcggggaattgggcagagctgctgtcagagaggctgcctgcccatgtctgtgggtgaggacagtggagcctgaactgagatgcctgccttcccctgggtctccttctttggtccttgtcaccttttcggtgtctgaataaggctgattacctggcgttgcgctgtccccccgccccctccggtctctggggaggaagtgagtgacggcggaggcccctgggtcctccaggccctggtctgtctctttcctgaccacctcgggtggggaggggaagaagctgcagc

SEQ ID NO: 92174 - DNA, 1049 bp, Homo sapiens
gcaagtggcatcatgaggctcccctggagcctgttcagtggtaccggggcccaggctgctgggaaggaagtgggcaggaagcgtccggagacggcccaatacacacaggccgcagagatgggggccttgagaggaacaggacaggacacacggtggcccagggttgtggcacatggggaggaggggttttgcagagctggggagagcacagaccaccgcgagaggcaggtacaatagaaacaggtgtactttgcgcatcacacagaggtggggacgacaggcatggggtgggggcggtgaggcaggagcgcaccagaggatatgtgggacccgaaggggagagacgcataaaagccgcagcagagatgggagtacagggaggggaggtcccaatgcccgctcacctcaccccttggggcctgccggtgccggggtccccaggtccctgtcccccaggcctgtaccagggtctgagcccagcactggtacaagggttgggagacagggccatggggagaggagccgccgctgccgctgctgcctcggggacgctgcctccccgtgggcccagtccctgccttatacccaggtccagggagggcgggggttcctgccagaggaagtggggccgcatcaaagagggcaggaaggggcagggacaggttggggggacgccaccctgagtcgcagaaactgcacacccactccaccctatgctgggggcagtagagaaccagcaaggggcaaagagggagtgtggactccagagggaggggacggagacccagaggggaataggaggttgcggccccctcccctcagccgcaggtgtttccgttcgggtggggctgctgtgtttacaacaacagcccggctccccggtttcctccctgattgttggggcgtctccttggcaccccatcacgtcaggtggtgtgctgaggtcagagtgtgtgctggggaaggacctctgctgggcctgctggattgcaaagagcaagtttaaaagaccccctcggacctcttgacaggccttccacctgaagagt

SEQ ID NO: 92175 - DNA, 1057 bp, Homo sapiens
gggcctggattcctgggtctgagagaggagggactgggggtctggacgctgggtctgagggaggagggaggaggggccgggggggcctggactcctgggtccgagggaggaggggttgggggcccggactcctgggtccgagggtagagcggttgggggcccggactcctgggtccgagggtagagcggttgggggcccggactcctgggtccgagggaagagcggttgggggcctggactccggggtctgagggaggaggggctggggcctgaggggggcggaaggggcgtggcggagctcggggccgggactctcagcctatcaagtgtctgtaattaattaaccaactgagatccagttcaggggtgaaagttcttcaggtacgaggagggcattgttgtcagtctggaccgagcccgcagagcccctcctcggcgtcctggtcccggccgtgcccgcggtgtcccgggaggaaggggcgggccgggggtcgggaggagtcacgtgccccctcccgccccaggtcgtcctctcagcatgggggtcccgcggcctcagccctgggcgctggggctcctgctctttctccttcctgggagcctgggcgcaggtgagggccgctccgggccagggccctgctgcaggcgggcggcgggaggcggccccaggcaggcaggggcgaagccagcgggacccgagttccccgcgagcccctggcgctgccttctccgctcaattaactttctcaacgtctcctgctgggcctgaggctgggaaccacctgtcgcctcttgtgtctgtttccctctctctctctgggtctctgtccccctctctttctgggtctcttgtctctctctctctgggtctctgtccccccccccccgggtttctgtcccctctctctgaatctgtccccctccctccataatagattcttctccctccctgggtatctgtcccactgcagtctagttccccgcccgtgtgctcccttcagctctgtttctgtctgcagaaagccacctctccctcctgtaccaccttaccgcggt

SEQ ID NO: 92176 - DNA, 1050 bp, Homo sapiens
gagcctgcctgacctctcgctggccacaactatgccctgcaccttgcgtgggatgtgcgccacgtctgtctctgtaattccccctggcaggtctgggacccccctgagactccgtcagaagattcggtcctccccataggtggctttacctctaagcatcccgccctcttttcccccatcgcccgccctttttgagcccgaaagcttgcagccaacttccaactccctgtcctgtcctaggtaacccctccaccccgccattctcctatcccgtgtctgtccccatccctgtgacccctgacccctggcctttgccactccccagggaccgatgatgtggcgaccatcagttctgctgcttctgttgctactgaggcacggggcccaggggaagccatccccagacgcaggccctcatggccaggggagggtgcaccaggcggcccccctgagcgacgctccccatgatgacgcccacgggaacttccagtacgaccatgaggctttcctgggacgggaagtggccaaggaattcgaccaactcaccccagaggaaagccaggcccgtctggggtaagagagacattcggttggggcgtgtccagaggtggggcttaggagagagacgcgggggtatcgacaggggtcagagaaatggcgtggactgaacttcatttctttgtgagaaatgaaattctaccttctatccttgggaaaaagaaattaagttaaaattgaggcctaaagaggacctttgagaccgggcgtggtggctcatgcctgtaatcccagcactttgggaggccaaggcaggccgatcacttgaggtcaggagttcgagaacagcctggccaacatggtgaaatcccgtctctactaaaaatacaaaattaggcaggcgtggtggtgggcacctgtaatcccagctactcgggaggctgaggcaggagaatcgcttgaacctgggaggtggaggttgcagtgagccaaaattgcaccactgccctccagtcagggcgacaaagtgagactccgtctaaaaaacaacaa

SEQ ID NO: 92177 - DNA, 1068 bp, Homo sapiens
ctggtaagggggaggggcatggggcgggtcggggcctgagacagcgggggatcgggggtgtggccgtggctgtctgggttcagagtcaatcttgcaacagggcccccttggcaagggtcacagtgcgacgccgcgctccccttcaccaccccagctcggcccagcgagaggtgcagcacgtgcaggccgagggcggggccggcgcggagagggtggccctgcatcgtagtaggtccctcccccgcagtgctcccagcaggcccgctcgttctggagaagggcgtgactcgacctgggggtggaccctaggctgaggggtagggtcctccggtgggcttggtcccgaaattgacccgcgcccctccccagttagcccgcggaccgtggactgtattttcagccccggatccgaagtgtcccagggggcgtggcccgtgcgaggggcggggcctgggggcgggaccagagcctgacgtgtgcccgccccggcttctaggcggatcgtggaccgcatggaccgcgcgggggacggcgacggctgggtgtcgctggccgagcttcgcgcgtggatcgcgcacacgcagcagcggcacatacgggactcggtgagcgcggcctgggacacgtacgacacggaccgcgacgggcgtgtgggttgggaggagctgcgcaacgccacctatggccactacgcgcccggtacgcggcgagcccccgaccctgctccccatacaccgtgaccctgaccttctggaccgcctcattctgagaaccctgaacccatttacccggagtccctggcccctaaccaggctctacccacttttaggagcccataactgtgagatcttcagtttctcacctctggcttctcttttttgtttttcgtctgcttatttttctggtatttagctgcatgctaaaaacgatctttttttcaaacatgaagtcacaattaggtgctaaaagccactgaacgcacccaaacagggacttgaaacctgggccctcaaattaaaagtccaatgctctaccaactaagctacccaggttcccttcagggctttc

SEQ ID NO: 92178 - DNA, 1026 bp, Homo sapiens
ctcacggcaacctccgcttcctgggttcaatcgactcttgtgcctcagactcccgagtagctgggattacaggcgtgccccaccatgcccggctaagtatttttttggtagagatggggtttcgccatgttggccaggctggtctcaaactcctgacctcaagtgatctgccagcttcagcctcccaaagtgctgctattacaggcgtgagccactgcatccagcctactgatatatacttattaactccacagaaatctttgtaccccagtaggatttactttgtctttgttttaacctgcttggcgtttcctccattaaagctcatctcactgagacctgtccttccccaggtgaagaatttcatgacgtggaggatgcagagacctacaaaaagatgctggctcgggacgagcggcgtttccgggtggccgaccaggatggggactcgatggccactcgagaggagctgacagccttcctgcaccccgaggagttccctcacatgcgggacatcgtgattgctgtgagtggcggctggggaaccctgtcccccacacccttccggggacccaggcttccggttcaggtcctgcttcccagcaccgacctgggggcaggcagtcacctggttctccagcatcttgccggggaagccaggccgcaaacacaggtcagaggacggtgacctttcccacctccactctcagtcccctggggtctgatctctcctcgtctggccttcccctccctgtgctcgcatttggggtccaggcccccagccttccctcagacagccactgtgccccaccttatacaatttcttttctttcttttttttttttgagacatagtctccctcggttgcccaggctggaaagcagtggtgcgatctcagctcactgcaacctccgcctcccgggttcaagcaattctcctgcctcagcgtcccgagtagctgggattacaggggcgcaccaccacacctggctaatttttagtagagacagggtttcttcatgttgg

SEQ ID NO: 92179 - DNA, 1043 bp, Homo sapiens
ttatagtgaatgagtttggatataaattggggaacaaaagtcgttttgctccagaagggcacaaaaacaaggagcggaggtgtccagtgtgtcagaagaagccccaaagtgcaccatgttcacacataaagcagaggtaggttctaggctctgctaaacataaaggagcttctccccttggagggtgtttgctggggcttgagcaagttattagggacccaggacagctccccttgtgagcaacaaacctgtgcactgctggacattagggcctctgggctctggccccgtaaatgcaggtggtgcctgtttgatgataacatcccagaaagcccgcaaatttcccacatgccacctgttgagactgctctactgcctgcctcccacagctgcccggagctaaatttccaagagaacctctcactcttaccccaggggtccagcctcccccaggagccagggtcatcggcccccagcctcaatgcccctttctcctccaggaaaccctggaggacctggacagaaacaaagatggctatgtccaggtggaggagtacatcggtgagtgggccccaatttcttcttgggatgcctgtcctctctcaggcatgggcagggttggtgggggtagccggaggtacatcacccatcatcagagaacagtggccctcagacatgggggcaggggcactcactgcttgagttcatttagccacccaacatttattgagcacctactctataccagacacaaaaagcatctattgagcacctgctgtgtgtcacgcccaggatacacttactgagcacctactgcatatgggtggttgcgcctacagcagacaataacacagacaaatcccttcttgggggtctggagtttctacaaaatcaaggctcaggggctatgtttagttgagaatgggggtcaggaagctggtcttgaacctgcgcctgcacagcaaacactgtttcctgttacatgggatgttgggggatcctcacaataccccctgagttctgagttctccctgggcccctgc

SEQ ID NO: 92180 - DNA, 1016 bp, Homo sapiens
agcccctggtggaagccaaccacctgctgcacgagagcgacacggacaaggtgcagtgacggggcctcggcaggagcgaggagcgggtgggcattgcgggccagactccagaaaggagcaagacctgggcctggagctcagggtcccttttaggtgggataaaaaaagagggacagagagagggaggaaaagagagggcacggagccccagaaagagagggggacagagacccagagacccaaagagagaaggacagggaccaagacggggacagattcagagagaaagggacagaggcccagagaacaagggtcccagagacttcgggacacgcttggatgcagggagggcttttgaaagcagggccgtgttgtcccctctgaaccctgaccctccctccaggatgggcggctgagcaaagcggaaatcctgggtaattggaacatgtttgtgggcagtcaggccaccaactatggcgaggacctgacccggcaccacgatgagctgtgagcaccgcgcacctgccacagcctcagaggcccgcacaatgaccggaggaggggccgctgtggtctggccccctccctgtccaggccccgcaggaggcagatgcagtcccaggcatcctcctgcccctgggctctcagggaccccctgggtcggcttctgtccctgtcacacccccaaccccagggaggggctgtcatagtcccagaggataagcaatacctatttctgactgagtctcccagcccagacccagggacccttggccccaagctcagctctaagaaccgccccaacccctccagctccaaatctgagcctccaccacatagactgaaactcccctggccccagccctctcctgcctggcctggcctgggacacctcctctctgccaggaggcaataaaagccagcgccgggaccttgtgtgtctgtctgttgtctgcctgtctctatgaagggtaagggggccctggagatggtttgggggctgtgactgggagttg

SEQ ID NO: 92181 - DNA, 1042 bp, Homo sapiens
tcatcacccgcagcgagcgctacgtgtgtgccgtgacccgcgacagcctgagcaacgccaccccctgcgctgtgctgcggccctcgtgagtcacctgggaggggagggaagggaccactcgggaacctgcggggcggtccggctttggggccagtaggtccccaggaaggcccctgatcagagtctcccgccttcggcctcaccgtagtggggctgtggtcaccctcgaatgcgtggagaagctgattcggaaggacatggtggaccctgtgactggagacaaactcacagaccgcgacatcatcgtgctgcagcgggtaagagtcccacccctccccttcccccagcactccaaggccccgcccctccccttcaccccctccaaggcttcgtcccctccccttcccccaactctccaaggccccgccttcttctctgctctgtaaggccgccccccccccccgctttctcctgcaaggccccgcccttccccccctccgctctcctaggccccgcctcctccttccttttcaaggccccgccccttccctgcctccagccctccacggctccaccccctccacacgctccctcccaaggctcctcccctgccactctctaccctcttctctgcgccctgcgccctgtccatccgtacccactgcggtcgcctcgccccctccccaactcctactccttagccagcaacccgcttcaccttgacccgcttaggaatccccactaccacctggagccccactggtcacccccgggccggcctctacctcgtccttctctctacctcccccagggcggtaccggcttcgcgggctccggagtgaagctgcaagcggagaaatcacggccggtgatgcaggcctgagtgtgtgcgggagaccaaataaaccggcttgggtgcgcaacgacgtggcgccttcattcgcggcgtgggcgccccggggacagggcaggcgaggatgcagggccgtgcaaacagtgctcctacagcgcacgctggagtttgaaagagcgggctaagcat

SEQ ID NO: 92182 - DNA, 1712 bp, Homo sapiens
ccagccttgagccaatcactgggctggtccacgccttggcctcagtcagagcttacagatatgagaggggaagggaaggtggagtggattcatcaacaatagtggcccccttggtgtctttttttttcccctccattaaatggcacagccaccaccctagctaatctgaagtagtggctagaatttgaactctggtctctcaccctcttacctccaaacaaagagttttgttgttaaaggtgctattttcacatataaatgagtctaggtgagtctggaaggaggacttcctggaggaggcctggcgaccacatgccctccctctcttccacctcaccccccttctccgcctccgctttcccatcaaggggggcagatcagctctgagggctgcagaggtcttccctgtgctgcctgcctccggtaaccacagtcctgccactgtcccttcctccctaggatgacgcggcatggcaagaactgcaccgcaggggccgtctacacctaccacgagaagaagaaggacacaggtgcagggctggggtgggaagaggcgggacatggctgtgtcttggagtcaccctctcccctcgtgccccaggttttgcttcctctgtccctgtctctctcccgcccccgatatacactgatggccatgaccatgtaaacaacagctgggtgatcccatgaccccatgtggcccggcactgtgttctctgccttctgcgcatgaactcactcctcccaacagagtgtcagggagggtgctcttgttaccccatgttccagaggaagaaactgaggcccaaagagggacaggcacttgagcttggtcacagtcagaagggtggaggggagtcagccgtcagcccctccaccaagctgccactcagtgaccaggcctgtctgcctctcaccctccagggttgacaactccctgtgggttcagcccgtggccccagcacacaggcagcggctcccaactgcctgtttctctctgagtcccccacccccaccaccgcgttgtctctgtgcctctctctggggctttggagacggacatgtctcctgttgctccgcccctccatcactctgcccatctctgtccccagcggcctcgggctatgggacccagaacattcgactgagccgggatgccgtgaaggacttcgactgctgttgtctctccctgcagccttgccacgatcctgttgtcacgtgagctgggaacagggatgggtaggtctgggtggggagagcaagggaaccgccaggaggaggctgtgtgcgtgggtctggccacctgcacagccagggaaccctggatgagcagtttatcctcagagcctctgtattctcacatgggacatgggcatgatcctagcatctgtttcatagtgtggaacatatggaaaggaacatacttctaatggggtgtagggctctcagagcattgccgaggccatcggagcagctcacctttggacacttcccatgacctacctctgatggtagggcaaaggcttaacaggtgctgagtccaggcactaaatacgtgctcaattagtggtatattttgtagaagacagtaattaatgatcagggcccccaaggccaccttcaggtttcttttttttttttgagacagagtcttcactttgttgcccaggctggagtgcaatggggacatcttggctcactgatatcccagg

SEQ ID NO: 92183 - DNA, 1042 bp, Homo sapiens
actgtgccactgcactccagcctggctgacagagcgagactccatgtcaaaaaaaaaaaaaagtaaaatgagtttatataggtaaacagtatctggcacagaatacaggctgtgtaagtggctgctattattgccattcgtggaccacagaggccagtcagagaggcactgcctcattacccagggactaaggcccttgtcagctgtaacaaacctggttctaggtgtctggaaaatatgaggggccacccctctctgctgctgctatatatggcattaaccacctgcctggatacttcacccagtgaggagacagaccaaggtgagtgtttgggggaagtggcatccagacacttggcgttggcctccccctgactcaggaatgtttctagtccttcctcttccaggagtccaggacccagccccttcctccttcagacccaggaatctggattcccagcccctgctccttcctccaggaccccactgctttccatccccctatgactccagccctagggaccctccatttttctgtccctcatgtctttgggtccagaagtcttcctgggtcccccagaggcccagagcttcctgagtagccatacccggattccaagagccaaccactgggacctggagctgctcacaccagggaacctggaacgggagtgtctggaagagaggtgttcctgggaagaggccagggagtattttgaggacaacactctcacggtgagggcctcgagaccctggagtttcgggccctctctcttctctatacctgtggggaggttgcaggggtaggttctggccttcagctccctcctccttggtgtctcagaaatcaggatgggctagtttgggggtgtgaacctcccagctgaattcctgctttttccccttcttttccactccttccccctcaaggagcgcttttgggagagctacatctacaatggcaaaggaggtgagtgaggggctgaagccatcttgttctgtgcagctaaggtagtcccttcccagcgaggccaaaccaacg

SEQ ID NO: 92184 - DNA, 1063 bp, Homo sapiens
ttctgaaccctcccacttagctcaatcctttctgacacgttctctggtctttcttagacttcattgtcccatcctttcctcttccttgctggaaatatccaaatttggtctccctcccagccttactgaggactctgttcttttgctcctggctctttcgcttctagatttttctacacttttgtctaccatttcctacctgggccccctgtccttatgactggattgccccttgtcttgctttactgtctcacctttcccccttccctcccctcattcatgtctcattagcttggttctatccatcttgtttttgaatttgcccttttctctcccatcccctccttttcctgatccaacttgcttttggcctcttccctttctctcttgactgtatcctacccacccccacctggctgactataacccctgtccccggccaggcctctctggactcttcgacactggcctccaccacgcgggctcagcagggcccgacgcctccgtcatgaaccttatctcggccctggaatcccggggcccccagcctggcccctccgcctcctctctcctctcccagttccgcagtccttcctggcaaacaggtaagcccagcgccggccctgcagggccagggtgggactggctcgctgttctctctgacgcgcggtcttcctcatctccagccatgcacacgccaggccccacggagctcttcatctcgggtgccctgccgggttccagcacctttccgtcctcatctgccctgtcggcttaccaacacccggcttccttcggcagccgccccttcccagtgccctcgtccctcagcctccaggaccccccattcagccctccagctaacgggctcctgtcccctcatgacgtgctgcacctgaagccctcgcaggcacccacggtgccctcttcactgggcttcgagcgcctggcagggggcggtgtcttggggccagctggtctcggtccagcccagacccccccttaccgccctggccccccagacccaccaccacctcctcgccacctcccaactcagttcaac

SEQ ID NO: 92185 - DNA, 1031 bp, Homo sapiens
ctcttgcaggcgcccagccctcctcggacctcaggggcggacggcttggtgggcgaggacggggcagcagatgcctctaagggacttggggggagtggcggggccgggggaccaccgggtacaccctacgagttggccaaggaagacccccagaggtaccacctgcagagtgtcatccgcaccagtgccagcctggatgagggtgccactgcggcactggagctgggcctggggaggctgaaggagaagaagaaagggccagagcggggtggcgagacccccgaggggctggccacctctgttgtccactacggggcaggcgccaaggagctgggggccttcttgcaaaagagccctccgcccccacctcccacggcccagtctacccagcccactccccatggcctccttctggaggccgggggccctgacctcccactggtgctgcctccgcctcccccccagctgctcccctcggtcctcagccatgcccccagtccctctcccagcgcctccaaagtcggcgtccacctccttgagccagccacccgcgatggggcaccccagccacctccaccgccacccccgcctccaccacccatgcccctgcagctcgaggcccacctccgcagccatggcctggagcccgcggcccccagcccccgcctgcgacccgaggagagcctggatccgccaggcgccatgcaggaattgctcggggctctggagccgctgcccccggcgcctggggatactggcgtaggcccaccaaactcggagggcaaggatcccgcaggcgcctaccgcagccccagcccgcaaggcaccaaggcgccgcgtttcgtgccgctcacctccatctgcttccctgactccttgctccaagacgaggagcgcagcttcttccccaccatggaggagatgttcggtggaggggccgcggacgactacggcaaggccgggccacctgaggacgagggggaccccaaggctggcgctgggccaccccccggcccccctgcttatgatcc

SEQ ID NO: 92186 - DNA, 1676 bp, Homo sapiens
ttcgagaccagcctggtcagcgtagtgagaccctggtctctattaaaaacacaaaaatttagccaggtgtggctgcgtgtacctacagtcccagctactcaagaggttgaggtgggaggatctcttgagcccaggagttcaaggctgcagggagctatgattgcatcactgtggcctgggccacagagtgagaccctgtctcaagagataaaggaaattctgggtttagggagagaggcaggaggttggagcttacgctggtttgaaactcctgacctcaagtgatttgcctgcctcagtctcccaaggtgctgggattacaggcacgagccacctcacccggtctgcttgcttttagtttctatatcccaaaggatgggcattcagggatcctacattcctgggtctcatgggaagcgggtctagggacctgaactgggctgtaagtgaagaggctcagtgagtccaagttcctggtcttctgagggaggaactccagtcttgtcctcctagaatctaagacaaggggtctgcaggtttgaattctataaattcacaggctgagcacctgtaaatttggatttttgggggctgagggaggatgggactgggggcccaggctactgggccctcacggcccgccactcccatgtctagatcaagctgtctgtgcccaaggctggcgagggtctgggaacctcatcgggtgatgccatatcaggcactgaccacaacagcctggactcgagcctgactcgggagaagatcgaggccaagattaaggaggtggaggagaagcagccggagatgaagtcgggtttcatggcctccttcttggacttcctcaagtcaggcaagcgccacccaccactctaccaggcgggcctgacgcctccgctcagccctcccaagagtgtgccaccctctgtgccagcccgaggcctgcagccccagccccctgccacccctgctgtgccacatcccccaccttccggagcctttgggcttgggggcgccctggaggctgcagagagtgagggtctggggcttggctgcccttcaccctgcaagcggcttgatgaggagctgaagcggaacctcgagacgctgccctccttctcctcggatgaggaagactctgtcgccaagaaccgagacctgcaggagagcatctcctccgccatctctgccctcgatgacccaccccttgctgggccaaaagacacttccaccccagatgggccgcccttggcccccgcggctgcagttccagggccaccccctcttccggggctccccagtgccaacagcaatggcactcccggtgagctctgggcaggtggtctgggagtagagcttaaaggttattatgatcactaggtaacagttgtgcaggttacgcactgtttaagagacaccattcacatacatggtgtaagcttgcgtgtttatgaagggactttcctgattacacaagcattttgaggaaggtctatctttttctaattcactcagaggtgctaagtggactaggaggggccccaaggcagacactggagaatgcagggagacagggcaggtgataagttacagggacaggacaggggctactcaggttctgaatggtgggaggtgtgggaactgaggagggctctgagtcaactgtgtgtgaaggt

SEQ ID NO: 92187 - DNA, 1606 bp, Homo sapiens
ggctcactgcaacctctgccttccgctcaccgcaacctctgccttccaggttcaagtgattctcctgcctcagcctcccgagtagctgggactacaggcgcgcaccaccatgcccagctaatttttgtatttttagtagagacggggtttcaccatgttggccagactggtctcgaactcctgacctcaagtgatccacccacctcagcctcccaaagtgctgggattacaggcatgagccaccatgcctgccctctgtgaggttcttaaaaagcctgaagaagggagctggcagacaggggagaggttagcagtctgcatactggtgagcaggccaaggaaaggacaaagatggtcctggagggaggaggatgaggccttggaggaagaggaggtgaggaagtagagttagggaggtgatgatttaggagttgggagggtcattcaggaagaggagttaagaaccagacaagggctttaagaccacaaagagacattccaggactgagaaggggattagggataggagacaggtctcctttgcagccgcaggagccagagtaggtctctggagagactctgatagggtagaagggacactgggagctgagtggtagttacagaggggcttttggtatagaaagcagtgtttaaaggacaagaggaaaggtgccaggaatgatgaataacatccaggcctgatgtccctgtctcccccagagcccccgctgctggaggagaaacccccacccactccacctcctgccccgactcctcagcctcagcctccgccaccccctccgccgccacagccagccctgccctcgccacccccgctggtggcccccacgcccagctcaccaccgccaccgccgctgccgccgccacctccaccagccatgccctcgcctccaccaccacccccaccagccgctgccccactggctgctcctcctgaggagcccgccgccccgtctcccgaagaccccgagctgccggacacccggcccctgcatctggccaaaaagcaggagacggcggcagtgtgtggggagacggacgaggaggccggcgagagtggcggagagggcatcttccgggaacgggacgagttcgtcatccgtgctgaggacatcccttccctcaaggtgagtcccagccttctccagaaactgggcctgatgggtttggtcacctgtttgttgagtgcccgctggatgacaggcttgtgctgagacctgcagatccagtcgtggccgggccgccctggaatttgcagtcctatggggctgatagaggtgtcgaggacctgcgggcctcagaggtgttatttgcgtttgtgtctgtacatgcattacctgtatataaggtaaagcgattgttaacgcgtatgtgtctatatgtgcgttacctgtatataaggtgaaccgcttgttaatgtttatgcagataccctgctgtgggtggtagaggaccagtactgtacaagcagatgaggctctggccctagggagcttctagtttaatggaaccagccagagaggcgggctgctttgccatttatggcacaatggtggaaatgtgtcattgacatagactacctgca

SEQ ID NO: 92188 - DNA, 1681 bp, Homo sapiens
tggtctccctgggacactgacatctgacaccccaggccccatgccccagccccttccctccccagaggccggtgtgccaccctccccagtgccatgtttgacccctgcagaccctggccatcgagggcggcgccgaggacctgggccaggaggaggtggtccagcagtgcatgcggaaccagccgtggctggaacagctctttgactccttcagtgacctgctggcccaagcacaggcccacagccgctgcgggtgaccccgccccagcttgtgaggggggcgcctcctccatgaaccgagaattgggacagaaccgtgtcctcaggagctaacacctgggctccatcgccggggaaagggggtcatgggtcagggtgtgtctgtgctgccccctccagggcagggttcaaagtccgactccccccctctcccaagccccctccactccctccccattcctcccactgttcggtgtacagagaaattatttatatatatgtataaatgtctatttagtaacggtttccctctccccttgccccgaccccccctccacagccacagcccccgccccctccaccttgtacataatgtataggaaaagtctatgtatggctggggggggtggggtggcttcagagagctgggggaccccttccccccaagtcccccctgcaggccaagatctttgctaaaggccattccctccgcagggcatttggcgtcgggtgggaggggaaaacgcatcttgttaattatttttaatcttatttattgtacatacctggggcaggggcttggggaggtggaggggggagaagggtcccctctctctgcccctcccactccttttctacggcgatttgtctgtgtctggcccccacccactgcccatcccccattgttgtctggatgtggttctattttttatcggtctcctttcccctcctccccgttctcgcccccgccccaccccctgctcccactaccctttgtctcttgctctttcttgggcttctgtacaactcaacttgtatacactgtgtacacacaaccagccaaacgaaaacccaacggcaaacactttaccggcaggctggagtgcctctgtcctgcggcgctggagtgggtggcagtggtagcaggggcagaggttctggaacgggactttcccagagccctgggcagtggggggcctgaggctggcatatgttctgtgtccccgcacagcagagtatcccaccctgaaatttaatgacttcagacaacaaatatttatcactggggggtttcttttgttttttagctaaagacagggtctcgctctgtcacctaggctggagtgcagtggcatgatcatagctcactgcagcctccaactccctggctcaagcgatcctcctgcctcagcctcccaaagtgacgggattacaggcaagtgccactgtgcctggccctgtgttctttatgttacccaggctggccttgaacttctgggcttaaaagatcctcctgccccagtctcaagtagttggcattacgggtgcatgccactacacccagttcaaatcctgtagtgttttgttttggtttttttttttgagacagagtctcgctctgtcacccagcctggagtgcagtggttcgatcttggctcatgcaacctcagcctccccggtt

SEQ ID NO: 92189 - DNA, 1117 bp, Homo sapiens
ggtgccagatgccccgcacagttgcgcccctcctttccctgctcccatcacttcccccacaacgatttccacacagaactcatccatctggcaaaggctctggggatttccaggctttggggttccgcctgcctctgccgggaacaccctgacttccctgcctgcccactcctggttatctaaggcatagcagggcaagtgcccacgaagcctgcccccatcccttacttagaagacaccaagcccctgcggcatctccctccataatctctcaggagctcttcctctttgagttctcacagtgggtcacctctcctagagtatccagcctgcctgtctgtctctctggctgcggtcaccctgagtgcagggacctgactcccccgtgtcccccctacccccaggtcccccgatcagaagcctctgccttcggcgcctcccaccacgtggcctactttgaggcctcggccaaactgcgtctcaacgtggacgaggcttttgagcagctggtgcgggctgtccggtgagccaagtccccttcctgtcgtccttgtccccagcccttccactccaaactcactggcgttttcccacaggaaataccaggaacaagagctcccaccgagccctcccagtgcccccaggaagaagggcgggggctgcccctgcgtcctcctgtagcccaggcaagagagaagcaaccaccacaagctctcgggactagctgccttcgcaccttgctgtgtgacctgaggccctcactgagcctcaatttcctcatctgggtctcccaggacacatcacatacccacccttacttcctggcctcttctgggctactgccactgtgtgccttctgccaacgcctcctgtccccacctaagcctggtgggggtgaggggctccgggtcactgctgtatataactcccctcccccagaaaaataaatgtcactgccaacgtcaggaggtgctttctaaaaaggtaatgagggtcgggcactgtggctcactcctgtaatcgcagcattttgggaggccaatgcgggaggaccgcttgagtccaggagtttttgaccagcctgggcagcatagcgagacccccatctcttaaaaaa

SEQ ID NO: 92190 - DNA, 1108 bp, Homo sapiens
tgagatgttaaaagcggaggccagggaggcctccctttgacataagaggcacctgagacccagaaaaaaggaagagaattgctcctagtccctggggtgtctgtgctgggtccagcgcccacccaagcacagggtggagtgggaggaggtggaggagaggaggggtgccagaggggatgctgagggagatagtgtggggcccttgaggtcttcatgtctatcctctacttccatcctttctcccgggacctccactccaaactctcccccctggacccccaggtgaccatggaggaagaagatgagtctcgagggaagacagaggagtcgggggaggatcggggcgatggtccgccagacagagaccccacgctttctccttctgcctttatcctggtgaggctgctgggctcctggcactgagggatggaggagctgggcatccacactccaggggcctgactccagggcctgaggcaggggcgctggactcttggctcccttgaagcacttgagtctagctgtcagtgtctgggatgtctgtctcccaaggggcagaggttgcaaagcatctgcctgggtcctctgacgcttggttcttccccccttccccagcgagccatccagcaggctgtgggaagctccctgcagggggacctgcccaatgataaaggtatggcggcttccggttccttttagcccctgccccctctctgcattctttatcctaatgtcattcatacaagcttttctgaagcctcctgggtgccacccttgtgctggcatggggagccaaaaatgggcagacaccctgtagctgccttggaagggcctagtgtgcagtggaagggagacaggcacagtgctgggagagggcaggaggcccacttgagctagcatggtgggagacgggtcagggcaccttccccgagcagggacagtgaacggctctctaaggacctagaagagtctaaggacctaggattagagggaagcctgatcagctgcagcaggcctacagcacgggtgcagcggcgaggggctgcgctgggcttccttggggctggcatgcaggagggtgtgagtggggttgggggaggcaggagag

SEQ ID NO: 92191 - DNA, 1102 bp, Homo sapiens
aggtgtccaggtgaggttcaccagctcctgtcctgtcacctctcccatcttcatgttgtcacctctctgcctcctgcagtgactgcacttctcttcaagatggaagaagccaacctggcgagccgagcgaaggcccaggagctgatccaggccaccaaccaggtgggctcccctgggggagagtccctgccgccccttcttttgtccattgcctcgggttaggagaggaaccgcgggcctggcagctctggggcaaggtatcggcctgaagaggagcctgttgcctcagctgtggggaagtcagcgtgggaacagtggggtgcacgtcccctcttcccctccacctccctttactcatcacccctctgtcctcgtcccacagatcctcagccacagaaagccaccctcaagtctggggatgaccccagctcctgtgcccacctctttgggtctgccccctggcccctccagctacctgcttcctggcagcctccctctggggggctgcggttcgaccccccccacccccaccgggctggctgccacgtctgacaagagagagggcagcagcagctctgagggccgtggggacacagataaggtgagctggcctggggagaggtggggcggtgctgacagttctgtagagaatatggacaggaactgagacgcgggggcccaaggagaaagggagactgaggcagggagacagggccgtagagaccaaagtcatggaaccataaggaactccactttgctggaatgggtgagcaggaaatgcgttaggcgtgtccaaaggaaaatcgcgtctgtgcgtgtgtggggctgtgtgcgtacacaccacatatacacaccctggaagagatgccccgcgctgcagcccaccccttgattatctgttgctcgcgctgtctccgtctctgtgagtgggggagggtggtttccgaatgaaaactcaagaacctgtttgtagatgaagcaggggagaatgggtgccaggcagacagtaatgtaggttcttactcagctgctctggccggctcctactcctgggctctggagctgtttctctcttggtcaggtctagatgtgggtttttgtt

SEQ ID NO: 92192 - DNA, 1335 bp, Homo sapiens
aatcctttttccctgttactctctcctagaattttgtagccaccttggctaatgggatgagcctccagccgcctcttgaagaagtaaatatccttttgtgagacccctccccaccctgacctccacatcaatatatcttgccacacatctggccctttcttgaggtctaaccatacccctcttgcttcaaaccagtttaccccaggcccccagacacttagtagcaacccctccaggttcacagcccccgctggcctcccccagtatcgccgctacttccttaactccacctccaacccccctttgcccttccctgtgtctgcccccattttccttcccctcccctccccagctgtgggctgagctagagacggggtcagagagactggagagatggtaggcgtggctgaggtatcggggtgctcccctggatggtgctctgggggggtcctggaagtggaaaatggggttgttaggttttggggttcctgggggggcaagatggcaggcgggggctgtagggttgtcatggtatgattttgggggttctatactactcttcagggaaaagtagggcgctggaggtttaagaggctgtggggagcccccagatctgacccatgatcccatcggccccctcccaggtgtcctgtggccaggcggaaagcagtgagaagcccaacgctgaggacatgacatccaaagattactactttgactcctacgcacactttggcatccacgaggtcagtggggacagtccccaaggccccaatcttaggggggcttaaatgttggggaaggggtggaacctgttttcccacgcatgcgcactgcttcccctggccgcaggccgcccccctgcccctctgctgcgcacttcctagggtcgcctcgccaagccgttgccttggagaccgaggttagcctgaatctctgcaggggcctcgcgccgaaggctggggtgggagagcgcatgcgtgcctggggccttagccagaggtcgggcagggcccactggtctctgccgccctctagtgaccggcggtgggactgcgccccggctgctcccgccctaacagcttctgcacacttcagatctgactgaagacactgaaatcccagaacgaagctggggtggcattctaaggaattttcttttccccctgaggcctttttcataaaattgtggcaaaatatgcataaaattgccattttttatttttagagacggtctcgctctgtcgcccaggctagagtgcattggtgcaatcatggctcactgcagcctcgacctccccggctcaggtgatccccccacttccactttcggag

SEQ ID NO: 92193 - DNA, 1331 bp, Homo sapiens
ctgggcgcagtggttcacgcctgtaatcccagcactttagggggctgaggtgggtggatcacctgaggtcaggagttgaagaccaacctgggcaatatggtgaaaccccatctgtatgaaaaatacaaaaattagccgggcatggtggtgtgcacctataatctcagctacttgggaggctgaggcaggagaatcacttgaacccaggaggcggaggttgcagtgagctgagattgcaccattgcactccagcctgggcaacagagtgagattccatctcaaaaaataaaataaaataaaaataaataaatgaataaatataaaagggaaactgaggtgcatggaagaaagcgagagggccgagctctggccctccgagctctcaggacacgctgttctccagctggggatatggggcccctcacggcgtctctgtgccattcttgccctaggagatgctgaaggacgaggtgcgcaccctcacttaccgcaactccatgtttcataaccggcacctcttcaaggacaaggtggtgctggacgtcggctcgggcaccggcatcctctgcatgtttgctgccaaggccggggcccgcaaggtcatcggggtgagtctccagggtggccaggcggggccgggcctgagggatggaggggagcccatcagggctcagggattggatggaggtgatgggggcaggggatgggtctcaccctcccttcttcctgggccctcagatcgagtgttccagtatctctgattatgcggtgaagatcgtcaaagccaacaagttagaccacggtgagcccagaaagaggatgggtttgtgggagtggagggggtgatgccctgcttccccagggccctctgaagagcagtggggtctacagatgaccacagattcagcagctcccaacccatggtcttttgggctgccggccgcctgagaatctgagtgtcaaaatcacaggcttagcaccgcagtcttaaaattagggcaagaagcactctctagtttcttgaatgagtaatagagtcacgtggttggccacggaaggcccacagtgagaagccttccctgtttcccagctgccctcctctgagtttaaccaacactaacttccagagaagtctggacctacaaacacatacatacgtaaatgcatttacattctcgtgcataattttcacgccagtagcatttcataccagcctcttgcccttggcttcttacacctgcttgtcatgtcgtttaacactttccaggatgttgcggcatccgctcttttgcatgaccaccatcataggtacatccccagcattttttttt

SEQ ID NO: 92194 - DNA, 1920 bp, Homo sapiens
gaccatcctggccaacacggtgacaccctgtctctactaaaaatacaaaaaattagccggacttggtggctggcacctgtagtcccagctactcgggaggctgaagcaggagaatggcgtgaacccgggaggcggaggttgcagtgagctgagatcacgccactgcactccagcctgggtgacagagcaagactccgtctcaaaaaaaaaaaaaaaaaaaaagtaacatcacctgatacccagtccacataaaatttctgctcctgcctcaaaaatgtccagaacgatgtatgaattttaaaactgttagaagggttcatggcttctgctcacgcagttctctgaactgaagtggggtccccaggctctagcccccgggggaggtgaggtgaggggcaggcctcccgggggctgacgtggccacccttgtccgcccgcagtggtgaccatcatcaaggggaaggtggaggaggtggagctcccagtggagaaggtggacatcatcatcagcgagtggatgggctactgcctcttctacgagtccatgctcaacaccgtgctctatgcccgggacaagtggctggtgaggccccagcgggacgggtgcagctcgcgtgggctggggtccaggtagaagacgaaaaccacgctcaatttttcccacagacgggacttactgtgggggcttagctgcaaggtgttagaaagccacagcccaagccaggtgtgacagaccctggagggagatggtgcgatgtgggggaggtcgtaggaacaggaaatccgtagcggcgcaatagcccaggtccttaggccccagcaggcctccccgggagaggtgaggtgacggagaggtggatgaagcatacggaggggcagccagggcaggtgtgcccttgctgcgtgtggaacagcagggaggcccgtgtggaaggagggtctagaacggcagcaggaggaggagtggaggtgaggggtgacagggcgtgtgcagattttgtggaggcttatgggaccccgtgcttttcctctcagagcagctagggagggtctgaggatccccagaacctccaagggccgggagctgactggggtgcccctgggtgccctctggcggccgtgtgggaaatagaccagggggcgaggggtgagtgccgctgcgacatgagggtggcccagaccagggcaggaggccacatcttggaggcaagactcagggtagtgttgccaggccccacccttcatgcctcgccctgcccctctgtaggcgcccgatggcctcatcttcccagaccgggccacgctgtatgtgacggccatcgaggaccggcagtacaaagactacaagatccactgtgagcgcggcccgggagctggcgggcggggcctcgggtgggctgctgcgggctcaccccctccctgcctgcctccccagggtgggagaacgtgtatggcttcgacatgtcttgcatcaaagatgtggccattaaggagcccctagtggatgtcgtggaccccaaacagctggtcaccaacgcctgcctcataaaggtgagggggtgggcatggccaggtgccccctgggttgaaaccaaagagaggccatcacctggccctggcatgggactttggggcccagaatgttggcctgaggtctcagagcctgatctgccagccagaggtggtgctagaggcccaggaaagacacttcgtcctttaaatatctttgtgagcgctgctgtgtgagaaccatgcttggcacttggcttctggcggaggaaacacccaaagctggcagctaaagcccacagcccatgcacggaaaggcaggaccccagggcgatgagcggatgcacatgcacgcgggccactgcagaagagcacggggccaggctgggctccgagatgtgcctgaggtcc

SEQ ID NO: 92195 - DNA, 1175 bp, Homo sapiens
cctccccgttctgcctgcaagtgaagcggaatgactacgtgcacgccctggtggcctacttcaacatcgagttcacacgctgccacaagaggaccggcttctccaccagtgaggcggggcccacagggctgggggccgttcccgagccagggcggaggcgcacccacgtagtggagggggtgacagaaacgggcagaaggaaccatggggacacgcgtgttccagtgtgagctctgccatgtagcagtcacgtggccttgggcaagtgacctgagtgtgcagtgcctcagtttcctcatccacaaaaggctgacacggtccctgtctccaaagctcaatgacagggaggtgactcgcggatagcagtcccatcagctgtcatgggggtgggcattccgacagagggaacgcaagggtggggttggggggggcagcaggccgaggccggctgacccgcccgcgcccccaggccccgagtccccgtacacgcactggaagcagacggtgttctacatggaggactacctgaccgtgaagacgggcgaggagatcttcggcaccatcggcatgcggcccaacgccaagaacaacgtgaggctccgggcagctgggtgggagggtggcagctagggcggggagtgtagattggggggggagtggtgggggaggaatggtggcagcgggggtaggggatgggggcagccggggtgggggatgggggcagctggcgggggcgagcacctctgcctattcccgggtccccaagcccctcagccccatgcctgtctacacagcaggattgcttgagcattcaccggaagttatgggcctggggacccaggctgaaaccctgccctcctggtgcttccactctagacaagggggtcagtgacatggtgatgccagttggaggtgacctctgtcaggctgggagcagggcagacaggtgttggtgtaggtgggctccagggcaagaggcagcccccagtagagtgcacggggttttctagcccagctgggaggcatgagaggagaaaggcagctttttgttttctgctcccctttctttttcctcctgagcacttggcaggagctgccatcacctgagatcagggggcttccgggggagctgggggggcttctcggagacagggtctgggcagagatccagtgtg

SEQ ID NO: 92196 - DNA, 1051 bp, Homo sapiens
ccgggaccacggcactagctgggaaacggatactggagagggaggaggagtcctcgggcgttggtgactttgtctcatcttcatgtgctggagggtatggggggaggagaggaagtggagacagcaggctggaccattgtgtttcactggaacgtttgcctgaggaggaagtgggcttgggagaggttttcttttttatgaaagaagcaatcactgcattgctgatgggaatcatcctgatggagaaatccaagggcaagggacagcagctgggctctactcctgagtgagtctagtgggcttgggggtgtccatgtggtgctgtcccttggcagggtcagggcagctgctagggtgggaccagcagttggggtctgcagcgtggagatgggcaggaagctggagcccggctcatcgtcgcatagcctgcctgcacccgccccccgccaccacctcctggtgggttccgccctcatgccccacctctccctgcagcgggacctggacttcaccatcgacctggacttcaagggccagctgtgcgagctgtcctgctccaccgactaccggatgcgctgaggcccggctctcccgccctgcacgagcccaggggctgagcgttcctaggcggtttcggggctcccccttcctctccctccctcccgcagaagggggttttaggggcctgggctggggggatggggagggcacatcgtgactgtgtttttcataacttatgtttttatatggttgcatttacgccaataaatcctcagctggggtctggctttgtttcctgggggcaaaggaggtttggggttcctttcgcaggtactgcagtgccagcctcagcagtggggggaccggccttggcacctgctggtggctgccattctgtggatctgcgtctcccgtcccccgtctctaggcctcttgctccccttccttggttccttctcggggtccctgtcctccacagctgtctctcagggtctttgtccaactcttttcatccctctcctgggtctgcgcccctcccctctgcggtacc

SEQ ID NO: 92197 - DNA, 1021 bp, Homo sapiens
cggtctatatacaaaatttaaaaattagccaggcatggtgatatgcacctgtggccccagttaatcgggagcctgaagtggaaggatcacctgagccccggaggttgaggctgcagtgagctgagatctcaccactgcactccagcctggcgacagagcgagaccttgtctccaaatactaagtaaataaaagtcctagggtgctgatgattactagggtactttgaacaactgacgacacctaagaagtatataataaatggtcactatttttatgtgtctggccttcctgcccccatgcttctgccaacgccacccctagactacatccgccacctccatgacagccaacacgtggctgtcttccaccggggccgattcttccgcatggggacccactcccgaaacagcctgctttccccgagagccctggagcagcagtttcagagaatcctggatgatccctcaccggcctgcccccacgaggaacatctggcagctctgacagctgctcccaggtaagggtcaggggtcaggggtcaggggctctcagaggccgccagtgtcctgagactgtggaagggcagggtggggccaggtggcggctgggcaggatggactcaggcacatcccgggccctccaggggcacgtgggcccaggtgcggacatccctgaagacccaggcagcggaggccctggaggcggtggaaggggccgctttctttgtgtcactggatgctgagcccgcggggctcaccagggaggacccggcagcgtcgttggatgcctacgcccatgctctgctggccggccggggccatgatcggtgagtgagtcttgggatggggcccccagatgtggcacccgagaatccagtatcagacctaggacccctgacagtagacagccagaccctggagcccacacctgcagagtctgtagaccaggggctgcatagagctgaggaccccagacccagtgctttgggacctggagacctctgacctggggaacccctca

SEQ ID NO: 92198 - DNA, 1976 bp, Homo sapiens
atcgccttgcaactggcccacttccgggtcagttgggttccccatccacagcccccgcagggtctcagtccacctgagcccccaagacctgcccctccacggttccttgtggtcgctgccattgtgggtcggccatcttgaattctctcttccaaccattcttgggctggctggaggaggctggaggtctggacagagataggtcaagtctgtaagatctcctgagcccagctgacagactcctcttctcctccctgtcccccaggacaggggtcaattctgcctgacttatgagtcggccatgactcgcttattcctggaaggccggacggagacggtgcggtcttgcacgagggaggcctgcaactttgtcagggccatggaggacaaagagaagacggtgggtgcagccctcgcttgaggcttcagttatttctgtgtactcactcatccacttgcaaacgttgatgggacctactgaagccagcctccacgaggagcacaagggacaagggatgaatcggacctggcctctgacttcaaagagctcactgatggggggagacagcccagcatagtgtgatatctgctttcatggtggtctcacagggcactgggggtgcacccaagaaggaaccccatttctttttttttgagatggagtcttgctctgttgcccaggctggagtgcagtggcacaatctcggcttactgcaacctctgcctctcaggttcaagcgattctcatgcctcagcctcctgagtagctggaattataggcacccgccaccatgcccagctaattttttttttttttttttgtatttttagtagagacggggtttcaccatgttggccaggctggtctcgaactcctgacctcaggtgatctccctgcctcggcctcccaaagtgctgggattacaggcgtgagccaatgcacctggctggaactccatttttacaacgtaactctgcccatttaacctctttgtgacttgtgaccttcctttgcacccctgtaccctctctgcccagatcccacctgccctgcacctcttctcccttgccctacacctagccctgcacctacaaggtattgtggttccatggaaggagtttggactctggggccagacacacctaggaacccgcctggctctccctggctgtgtgaacctggccaaatgatttcccctctctaagcctcagttccccatctgtaaaatggggttgatattcccaccttgcagggatgtggcaaactcagttgaggccagatgtgccgcaggcccagccctaagtcgacttcctgtctttccatgacctgtgacctccctggggactgcaggacccacagtgcctcgccctgttccgcgtggcagtggacaagcaccaggctctgctgaaggcagccatgagcgggcagggagttgaccgccacctgtttgcgctgtacatcgtgtcccgattcctccacctgcagtcgcccttcctgacccaggttggggcacagggaaagggttagagagggaagtgggagaccatggaagaagggagaggtttcagggaaggagggtgatgttgaaaaaggacccatcaaggccgggcacggtggctcacgcctgtaatcccagcagtttgggaagccgaggcaggcggatcacttgaggtcaagagttcgagaccagcctggccaacttggcgaaaccctgtctctactaaaaatacaaaaattagctgggtatggtgacaggcacctgtaatcccagctacttgggagggctgaggcaatagaatcccttgaacccgggaggcggaggctgtagtgagctgagatcgcaccactgcactccagcctggacgacagagcaagactctgtctcaaaaaaaaaaaaaaaaggagggtgatgttgagaaaggatgcgtcagcagagaagtcagttgtgggggggcggcaaggcagaaggcggaga

SEQ ID NO: 92199 - DNA, 1702 bp, Homo sapiens
cgcctcctaggaccgttccccgccttccttcacgtccctcccttcctccttggagagccgctagatccaatcagtgtttgacctggccgcgcggagggggcgggcccatgatacgcaatcgaaccccgcccgtctctcgggcaacgcctcctcccccccctccccagctcccaaacggaaatagcggaacactgggccaatcgtagcgtcgtgcctttgcttggcggccaatgagagaggaagtgggggagaaacccgcctgtgagcggcaggagctcaagccagtgggcggctcagagctccggaccgcgggcggaggggaggggcagggggcggtgccacggcctgccagcccgcccgcccgcccgccagccagccctccccgcggccggctcggctccttggcgctgcctggggtcctttccgcccggtccccgcttgccagcccccgctgctctgtgccctgtccggccaggcctggagccgacaccaccgccatcatgccggccgtgtccaagggcgatgggatgcgggggctcgcggtgttcatctccgacatccggaactgtgagcgcgcggccgggggacactggagacgcgggggaggggggagcgtgaaattgaggggtttggggatcacagagggacccgggggatcaaaagcctctgcggccgtatagggacagcatagatgggccccaggaagaactttagagtggggggcacgtaggggcttggggtgtcatagagtgcctcttgaggtgacgacacggagtagctagaggggtccgggagggcttgaaaggggaggaagccagtgaggtcccggggatgggagcatagaggtgtcccctgggaaagactgaaaagctgggggatcttacaaacgatggggttagagggattcccaatgtagagaagaagtgaaagaagtgtatggcgggggtgccctgtggagcgatggaatgggaagaggccagaggggacctggaggaagtggaatgccggaagcctaatgaagcagggcttgaggacctgggatagggggtgtcatacaggggaaaggggttagataggtcaccgaggctcctggccagtggtatagaggaggcctgagagtggttgaaagtccatgagtttggggcagggagatgatgggacggggagactataaggacaccctggtgaaggatagaggggcttcagggtgggagattgcctagaagacatggaaggcagtgtggagggggctagaggggcagctgaggggaaaggagggacccaaggaacacagaggaaaagagctgtcggtgtaaggtcttgggagaacctgtgacagggaacggggggccaggaaagaagaggacattagagtaggggattggggaaagggtagaagaaggagcgcccagacctcaaggaaggcgttgggttctgaagtgcttgaggggtagatatctggaaagctgggaataggggaagtctaatcccagagagaggtcaggggtcaggcagcaggacaggcagggatctgagcccttttctatttgaccacagtaatatggggacggtggtccctgccaggaagagttgtcgtgacgatgggaatcctggcggcaagtcagctctcaactcctgggaatggctgtgggtgattggagctgccaggagtcttcagaggctgcatccgcatgggctctgg

SEQ ID NO: 92200 - DNA, 1056 bp, Homo sapiens
gacaaagggggtgaggacagcacccaagggtctgacctggtgactgggtggacagtgggaccttcatgggattgagaactggaagaggcagtgagctcagtggtaggggtgagcaccctgcggccagccaagctctttattcattcattcattcatcacatgttcatcgcatgtggggagtggggacaggagctctcagggagcgtgtctggggccctgaggagccccacaaatcaggggccacagtggtaggaggaaggagagaggaagtcagggacagcccaagggtgtgtgctctgtgctgtggggctcagccagcggtggttcttccctctttgaaactcccagccagagaaggggtcctggcctgtcctgagccccagggcttgggggcggagaagatctgcccttcctgctgggtggggccgcgcctaggaaagagagggcaggtggctgactccccagacccctcactgcctaccctcctcctcctctcccaggtaagagcaaagaggcggaaattaagagaatcaacaaggaactggccaacatccgctccaagttcaaaggtaggctgggggcccaacttctggttctgagggaggagggggctgggagctggggctcctgtgacctatcctgtgacccttccttatttctggctcccctttcctccttcctctgccctaggagacaaagccttggatggctacagtaagaaaaaatatgtgtgtaaactgcttttcatcttcctgcttggccatgacattgactttgggcacatggaggctgtgaatctgttgagttccaataaatacacagagaagcaaatagtgagtctggagaggggggtgccagggcctggactcctgggtctgcgggggagggggctggaggtctggactcctggatctgggggaggagggggtctaggggtctggactcctgggtatgagggaggagggggtctggggctctggactgctgggtctgagggaggagggggctgggggtctggactccccattctgagggaggagggctggaagcccagac

SEQ ID NO: 92201 - DNA, 1028 bp, Homo sapiens
aagctagagggagtgcagtggcacagtcatggtgcactgccgcctcgacctcccagtctcgagcaatcctcccacctcaccctcccgagtagctgggattacaagcctgcgccaccacacccagctaatttttgtatttttgaagagactgggtctcactgtcgcccaggctggtcttgaattcatggcctcaagtgatcctcccacctcgacctcccaaagtgctgggattataggcgtgagccaccatgcccagccctgacagtatttgatgtatgtgttttcgtggtgctgtctgaaatgtaagccctgtgaggacaagtgtttggaccactttattcaccactctatccatggagtgaacagcagtgcctggtaccccatgggcacccagtaggtgcttggtgaatgaatgaaggtgcagagccaggcttgacatgttcctgagccctgtgaggttactgagatgcaatcattttgcagatgaagacactgagtcctggtgggccgtgaggtcagcgccagactggatcctgcggccgcctggctgtctgtccctctcgctggcctcgcacacccttcctgggaggaacaggagaggaggggaggtgtgcagggctggggtcactgactctgcttcccctgccctgcatggtgtccccacagggacagcatggacagtgtcaagcagagtgcggccctgtgcctccttcgactgtacaaggcctcgcctgacctggtgcccatgggcgagtggacggcgcgtgtggtacacctgctcaatgaccagcacatggtgagcccccagccctcacacccccggatacccagggctcccacctcagccctgacccccctggatgcccggggctcccacctcagccctcacacccccggatacccagggctcccacctcagcccacgcaccccctggatgcccggggctcccacctcagccctcacgcccccggatacccagggctcccacctcagccctcacgccccctggatgcccagggctcccacc

SEQ ID NO: 92202 - DNA, 1050 bp, Homo sapiens
acctgcccaagtgtccagaaaccctcccatccccatctctgacactcccctggctggccagggatcctgtccagtgacccccacacccctcaccaaccacccagtcccttagaaaatcccactctgtttctaatacctggagattcccccaacagcgcccatcacctgcgcaccagcgcagaaaccttgactgtcccacccccacagtcccaaccctctagagtctcgccccttcactgctccttacccagctgcctggggtcctgccagggacaccccacacacccaggtcagtgctggccatggcgcccgaggccccgtggcctcctcaccccacccctaaagcacgcacagtgacacatgtgcacacccctaaaccccatcttcccgactgcacacacatcccgaccctgtcccgctcctgagcctctgctctcaggtaccacctcccccaggggcctgacttgtctctcctctgcccctgcagggtgtggtcacggccgccgtcagcctcatcacctgtctctgcaagaagaacccagatgacttcaagacgtgcgtctctctggctgtgtcgcgcctgagccgggtgggtgtggcctagatattggctgctggaggtggccctggcatccctatgccctctgacacccctcaggcccccactctccctgagaggcagcccagcccaaggtttacaaactcaggctctgagctggattcatcctggctcggcctcttcctggctgggtggccctggacaagtggcttcacctccctggcctcagctgccccctgtgttcagtggggataataccggtgcccacctggaggcacagagcgctgtggatagagtgctcagaacagggcctcgcgggccgagcaccccgggagccagccgccctcatgacctcctccctctcccacttctctctctgtctcccactttccctcttctggctttgcctcccgcctctctctttcctgtgcagcctctcactcctgcctggcgtccctctcccacctttgctcctgtcctgcccaggaaca

SEQ ID NO: 92203 - DNA, 1869 bp, Homo sapiens
gtgggtggcttgtgcatttttgtcaggggctgctcagcactcacaccagtccttgggaaggcctgggtttgggggcacctctggggaaggttcctggagcttcctttgctctgtgagaaacctaaggagcctcagagctgcagatgaggaaactgaggctcacatggtgccacctcttgcccgagagggtcagagcaggaggagagcccaggtctggggatagatcttgtgtctccagaggtgccttgtctcaccatctctgctgggctgggaagaggttgagggagcagagaccctggccctgagctgcagaattctcgagtgtcagaggcaccccgagctcctcctttggaagacaggagctggggcatggccaccaccccagcaggtgtgccaggtgggcaggacactcagccgggggcgtccccttcgtttccccagaggatgcggctgtgaaggggcggctggtggaatgtctggagactgtgctcaacaaggcccaggagccccccaaatccaagaaggtgcagcattccaacgccaagaacgccatcctcttcgagaccatcagcctcatcatccactatgacaggtgcccgcctgggcctatcagggcctgatgcctggggccaggaaagaggggcatggaggcccggactcctgagtcctaggcagagggcagggaatcttgacttttaggtagggtaggaggaggatggggctgtgaagtgtcacctgtgaggttggtgctggggcccttcctgggggcagaattgctaggtatctttctctgggctcaaaggcccagttgtctgggtcactggaggtgcagtactgcgatgcaaggccggcaaggttaagacctggatccttgggggctgtgagatgggtcagctggggcccgagtcctccaccttctcctgtcagtttctctcaccatccctctcttgtggcccctgctggcagtgagcccaacctcctggttcgggcctgcaaccagctgggccagttcctgcagcaccgggagaccaacctgcgctacctggccctggagagcatgtgcacgctggccagctccgagttctcccatgaagccgtcaagacgcacattgacaccgtcatcaatgccctcaaggtgtgagcccttggagcccaccccgggcctgccacccccctcagaaagaccagaggctcagaggcccttgggtggccaaccctgtgccaacagggagtctaaaacacacctgggctctgctctccgccctcagacggagcgggacgtcagcgtgcggcagcgggcggctgacctcctctacgccatgtgtgaccggagcaatgccaagcagatcgtgtcggagatgctgcggtacctggagacggcagactacgccatccgcgaggagatcgtgagtgctgtggggtgcgggctggactcttgggtctgaggcaggaggtggctgggggcctggattcctaagtctaagggaggaggggctggggcctggactcctgggtctccagatgggggcagtggtgagcccagatccaggtgagtgaaagcccgacatggcctgcggcacactctctctcacacgccccggcggcaggtcctgaaggtggccatcctggccgagaagtacgccgtggactacagctggtacgtggacaccatcctcaacctcatccgcattgcgggcgactacgtgagtgaggaggtgtggtaccgtgtgctacagatcgtcaccaaccgtgatgacgtccagggctatgccgccaagaccgtctttgaggtcagcatccctgaccctgaccctatgaccccacgacaggacctagaggcagagcaaggatggccggggccgtggcgcc

SEQ ID NO: 92204 - DNA, 1103 bp, Homo sapiens
tggtgcgatctcggctcactgcaacctcggcctcccagcgtcaagccattctcctgcctcagcctccccagtagctggtactacaggcacgcgccaccacacccagctaatttgtttgtatttttagtagagacggggtttcaccatgttacccaggctggtttgaaactcctgagctcaggcaatctgcccgcctcggcctcccaaagtaccaggattacaggcatgagccactgcttccggcccacagccctgttttacttcctgtgtgagcttgggcccgtcactcaacctttctgtgactcagtttcccacctataaccccacctgcagcagagctttcagtgttccaccagtcagtaggtggctgcacccaccgatcccggagagggcgctcattgttgtcctctccacgcccttccccaccccactcaggcgctccaggcccctgcctgtcacgagaacatggtgaaggttggcggctacatccttggggagtttgggaacctgattgctggggacccccgctccaggtgagggagcctcagcctgcaggggagaacacacatgcttctgaggggtccagggcttgggggatccccaggggtctcagggcaggcagtgatgggctcccatcctctcggcctccaccccaatccacctagcagggtaagaaaggagcttagtcccaggatcgtggacagagtgtgactgcggcccctgtctggtgcctggggagggccactcccctccagcagcttggggtcctgggacgggtccatcctagggaggggcacctctcgagggggtttctgggagagggcagtggaacctggccccgctgacacccactcctgcacacagccccccagtgcagttctccctgctccactccaagttccatctgtgcagcgtggccacgcgggcgctgctgctgtccacctacatcaagttcatcaacctcttccccgagaccaaggccaccatccagggcgtcctgcgggccggctcccagctgcgcaatgctgacgtggagctgcagcagcgagccgtggagtacctcaccctcagctcagtggccagcaccgacgtcctggtcagag

SEQ ID NO: 92205 - DNA, 1090 bp, Homo sapiens
atgcgggggcacgggccagggttctattcccattggaggccactgctggatggatgcgaggttcctcgaggctctgtgaggggtctggatatgtggttctggggttctgtccttagggcttgttctcgcactcaatcgctctgggcctttgcccctccccaccaagttccttcccatctcactctgctccatgcctccagcccaggtcctgaggacatcggccctcccattccggaagccgatgagttgctgaataagtgagtcctgggagtggtgggggaggggaacgggacaggtgcggagcccaggccaggtgcagacaggcacccccgtcatcttgcgccccctgccccctcaggtttgtgtgtaagaacaacggggtcctgttcgagaaccagctgctgcagatcggagtcaagtcagagttccgacagaacctgggtgtgtcccgggggactgtgggaatgggtcggagggagaccttggggaaggggtcagagggactcagatggagctctgcctcccccacctactgcaggccgcatgtatctcttctatggcaacaagacctcggtgcagttccagaatttctcacccactgtggttcacccgggagacctccagactcatatcctctcaggcccggcccagcctcctgcctctccacgtcggccttcctcaccgtggggaagccggctgacccaggtccacacttctcttcagcctctcttgggcacgcaattagttctctgagattgagtgtctgcatctgttaagatgggggtgggattccttcccccaggacaggggatgacagtgaagtggtgtgtgggaggctttacttccagaactccacctgctccaggcctcattttgtccctgtctggcaccttccgtgtcctgccatcgtcctccactgggctccatgtcatgatgccagcaccgcctgcactcaggagccaggcctgcgggtccagacgctgatcaggcctgatctgggctgagtcactttgcctctctgggctctcctgtccccgctgtgaagtgtatgtagaccctcctcttcctcatagggttattgtgaagatca

SEQ ID NO: 92206 - DNA, 1050 bp, Homo sapiens
ggtgaggggcggggcctaatggagcctccctttcacctcatcaggtacggtggcgccccccaggccctcaccctgaagctcccagtgaccatcaacaagttcttccagcccaccgagatggcggcccaggatttcttccagcgctggaagcagctgagcctgtgaggggtggggagggggcggagccaaagccgcgcctctgggtgggcgggtcgggccgtccaggtccctgacttgaaccttcccggtccccagccctcaacaggaggcgcagaaaatcttcaaagccaaccaccccatggacgcagaagttactaaggccaaggtgagagaccgcgggcgtgtttgccggcctatggctgctttgcttctctgagcctctgttttcccatctgtaaagtggggccaattcccatccccaagggttttttgggatctgggatgccactgtgtggtaactaacagctctggcacactctgacggcgccccccctcctcccagcttctggggtttggctctgctctcctggacaatgtggaccccaaccctgagaacttcgtgggggcggggatcatccagactaaagccctgcaggtgggctgtctgcttcggctggagcccaatgcccaggcccaggtgagtgctgctgtgggaggcctgaggccggcaggaaggccgcctgtcatctctgcgtccacccttcctgcctcactgttctttaattcacgtccccactttgaccctcctcctctcacatttctttgtccacttttactcctctttatctatcagtttaatctcctgtctccaacctctggtgttcctctcctcttcctgtccctccctgatttctacctttccatatcctttccacctttctctcatcttttataattttcttcctctctggcgcctctgttgatttcagtcttacatttttctctcctgtgtcttgtatcacctttctggcccctttatccttccttccttctatctcccttgggtcccgacttccctgggctccccatctcctctgagttctgccccca

SEQ ID NO: 92207 - DNA, 2189 bp, Homo sapiens
gctacttgggaagctgaggcacgagaatcgcttgaacctgggaggcagaggttgcagtgagccgagatcaagccactgcactccagcctgggcaacagagcgagactccgtctcaaaacaaaacaaacaaacaaacaaaagattcctgggttctgaggaaggaagtgttggtggtctgcactcctaggtctgagggaaaaggatgctgagatctcagattcctggtctggggagaaaagaggactggtgagtctcaccatggctccaaacaccatttggagtagtctctccagcctcagctcagagatgcccacctcagatgacagaacaatgagggtgatgctgtggaatggaagtgagaagaatgagtcaaggcctggggaatcaggaaggggtatgttggagtccgcccattgatcctagaacaccagatacatcctctctcagaccaacctgcctttcttatagagaacatcagggatcaaagagggtaactggcttgctaaagatcccatagccaaattaacagctgcttttagagagctggaaggcctccggggtcatcttcaacagggactatcacccaggccctgtccctgtcccacgttccctcctggggacctgtcatggaagcttttccacaccacagtcgtgttctcggtcctcgcagagctcagctgcacctccagattctgcccaaacatgtggactccattgagggaaccgatgacagagaacgggagctaaggaggggttagggacatcagacaagagcacccccccatccccttcccccttaggacccaagtgtgccagctcccagccccatcctctttccatatgacctggcagtgcctctttggggaaccaggcttattggtccattgcctcctcggtcctacaaattcaacactgaaacttccccagcccctactgccttgaagacccagagtcaaaacaccgaacccccttcggtttagatacaggcgtccaaggccccacctgctgacgggcgggggcgccgccgcgactgctcctgcagaatagggggaccccgctggaggccgcgaggcacagcagatgcacagtgccgcccgtcccctcctcccccatttaggactcccaccgcggtccctcacgtggggactgtcagtgcgggtcttggagcatggcggtaatcagagtaactcggcctgtggtccggagccgccagagggcgagatggggagctgattggaagaggattaacttcccgccttcttcacccaactcaaacagaccctcaaaccctattcaggcacctcccccaaacccattaggttctcttccgccctagccggaagtcacggtacccctaacaaagatggcggcaaattgaatttgcaaagctttctagtttctccgaggaggtaaagagaaccaagaagccggattgaagatgatgactgcgccaaggcgttgcctagccaccatcctgtaggctttgatgatttacattctaaacggaaaaaacagctgtgcccggatcaaagattgcgatggtcccaaagcattgcctagcaaccacattccctgtaggtttccagtatatagtagtaaacaatgtgccctactcaaagatggcgaccgtggcggggcgttgccaagcaaccaccattcagcctgatatccattccaaggctgtaaacagctgtgccctgctcaaagatggcggcacgtcgaagtccgagcaccctccttggggcgaaatcgagaaaaacaccatctcccctacaaccttcgagggtggttgagtccagcgatcgttgcctagtaaccactaaaaaaaaggttgtttttgttattagaaaaaagaaaacaaggaaatcctttattttccagaataataaaaataatatcatttctgtaatgaatttatacatgatagcataccatgtaaaatgtgaaaaatcccttccccaatttttttcctaaaatacagtttaacgtagactattcatacgttttcacaaagatgatcaatatactaacatttccacactttcttttttgccatgaaaaagtatgtctatttcatcttaataatgtatttttataatctattttatggatgtgacaaattgatttgaccaattctgtattgatgtacattaggttgttgaactcctccagactagccaactagtgct

SEQ ID NO: 92208 - DNA, 1062 bp, Homo sapiens
ccccatctcgccctctggcggctccggaccacaggccgagttactctgattaccgccatgctccaagacccgcactgacagtccccacgtgagggaccgcggtgggagtcctaaatgggggaggaggggacgggcggcactgtgcatctgctgtgcctcgcggcctccagcggggtccccctattctgcaggagcagtcgcggcggcgcccccgcccgtcagcaggtggggccttggacgcctgtatctaaaccgaagggggttcggtgttttgactctgggtcttcaaggcagtaggggctggggaagtttcagtgttgaatttgtaggaccgaggaggcaatggaccaataagcctggttccccaaagaggcactgccaggtcatatggaaagaggatggggctgggagctggcacacttgggtcctaagggggaaggggatgggggggtgctcttgtctgatgtccctaacccctccttagctcccgttctctgtcatcggttccctcaatggagtccacatgtttgggcagaatctggaggtgcagctgagctctgcgaggaccgagaacacgactgtggtgtggaaaagcttccatgacaggtccccaggagggaacgtgggacagggacagggcctgggtgatagtccctgttgaagatgaccccggaggccttccagctctctaaaagcagctgttaatttggctatgggatctttagcaagccagttaccctctttgatccctgatgttctctataagaaaggcaggttggtctgagagaggatgtatctggtgttctaggatcaatgggcggactccaacataccccttcctgattccccaggccttgactcattcttctcacttccattccacagcatcaccctcattgttctgtcatctgaggtgggcatctctgagctgaggctggagagactactccaaatggtgtttggagccatggtgagactcaccagtcctcttttctccccagaccaggaatctgagatctcagcatccttttccctcagacctaggagtgcagaccaccaaca

SEQ ID NO: 92209 - DNA, 1348 bp, Homo sapiens
gtcccttatctaggttagcctaggcacgggcttatcccataaccttcactgtggtgcccaggcagctcaggcttctcatgaccttcgctgtacttcttagataaaacagaatacttgaagtcatgagttacagagaacaggaatctataaactcattccataaaacaaaggaaaatttgttttttcttctctctatgttgagggagtgctgggagagtctccaagagcactttagatagtattatcaagacttttcctgggtctgggctgtgcccattgctgcctctcagacaagtcagcctaatacatagaacttatttctctttttaattttttttctttaatttcctgcctcaccaccacgcctggcgctggatcggattttgatagttgacattgtagagtctggagtcaggcagacgggttaaatcctggctcttccagcacagaactaactctcagacccaggagtctgtcccctctgtgcctagtatctcacttgtgaagtggggatgtggatagtacttgtattagtatttcattgtattacttattcttagctgtataatagattaccaccaaataatggctgcatactgcaaacatttattatctaacgcagtttctgtgagtcaaggacacaagagtggcttggctggatggttgggctgagggtctcacaaggcaatagtcaggaggtcggcaggattgcagccatccaggggtttgactggtggtggggaatccgttcccaaggtggcgagtctgtggctgttggccacaagacctctccacagggctggttgactgtctaacatggcaactggcattcctcagattgagggacccaatagagagagcaaagaggaagccccaggcctctcttgtttttgaggaagggtctcactctgtcacgcaggctggagtgcagtggctcagtcacggctcactgcagcctcgacctcctgggctcaagctcaagcgatcctcccatctcagcttcccgagtagctggagtagcagggacggtagccaaatgccagcacacctggctgatttcttaaaaatatttttgtaggtcgggcgtggtggctcacgcctgtaatcccagcactttgggaggctggggcaggtggatcacctgaggtcaggagttcgagaccagcctgtccaacatggtgaaaccctgcctctactaaaaatacaagcaatcatcctgccttgacctccctaagtgctggagtgctgaaattacaggccttagctgggcatggtggcgcatgcctgtaatcccagctcttgggaggctgaggcaggagaattgcttgaacctgggaggtggaggttg

SEQ ID NO: 92210 - DNA, 1931 bp, Homo sapiens
gagaggtggggagtctctaccaggagcctctgagccactctctgtgttctcccagccgcagactggggtgcccccaccccaggcctccctccaccacctccagccaccaggggctcctgcgctgctgcctccgccgcaccagggcctggggcagccccagttggggcccccactcctgcatccaccacctgcccagtcctggcccgcacaacttccccctcgggctccactgccaggtaaggggacccgggggagggcagaggtctggactgagtgtcccagcagctcctgggctagagcaccaagaccgagtgctcctgggaagtaaagacataggatccaagaatgagggttcccccatggcctttgcggagctctgagggctccgggaaagtacagcccatgggtccaaggacctagtgggttaagagcgtttcccatgatcctcctgtgtgtgctcctgggattgctgggaaatgtggtcttagggccagagaagtagttttggagaagggcccccaaaggctcatgggaaacagcatatttgtaactagatggggccagaaggtgcttctgttgggtcccccaagggctgcctagaaaacttagtgcctctgggccctcctgggcccaagggcctactgggagatgcagtcccttccccactgcccctcaggtcagatgctgctgagcgggggtccccggggcccggtcccccagccgggcctgcagcccagcgtcatggaggacgacatcctcatggatctcatctgaatccccaacacccaataaagttcctttttaacacacgccccggctcccgtcactgacatccctcaggactgggcaggaggaaaccccagggggcatctctgtccttgttctcacttcagcagacatccctggggccctgggtgaatgacgctggggcctccgtggtgagtcacaggcagtctggtgcaacctgattcgtgggagatgcagggacaggcaggcagcgctcaggactcaagctctcatggaggtggcaggggcaccatgggagcctggaagaggcatctgacccagccccagctcctcagagtcttgaaagagaatcagccgtcaggctgggagggaaggaggtgaggggtgatctgggtgcagaggacaacagaaactttgaatactcaaaggcaggaggaagcctgagacattgagaggagcaagttgatggatgcttttggagcatgagcatgtagggagctagagagatgggcaggtgcagagtttgaggagctcggattccaaactgagcagcccatggtttgtcctggggacacaggagaaccaggaggctttgagcagtggggcgggcctaggccagctctggatgtcagaaagacccctctcagctgtagagcgtgatgaggccagacaggaggccaggaaaggtgaggctgggtggtggcggtgtcgggggctggggtagaggttcgctcccgggggccaggcctacgtgatggtaggtggtggggctcctgggagaaggagctggtagtaagtgcaggtggtccaagggacatccaggtgacaggtgccatgttgggagctcaggacgtgtccttaggggacagtgtatgtttggcagttcaagccacagaagcagacaagatcgcacatggagagagggcagtccctgggtccatgtcagagactgaccttccagggctgtggatggggaagacggtgggtctgtccccaggatagaatacccagcagggaacaggtttgggacgtggcaaggtgagggacctgaaggatgtcctcagagacgtcccgagggcagggggatccagacaggcttggagcgcagggtggtctctcctggaggtggtgagtgagttgtctgttgttggactctggaccagtgttgctgagagcgcggtcca

SEQ ID NO: 92211 - DNA, 1162 bp, Homo sapiens
ggcagcgggaaaggacatgaggaccagcgtgtgggggtcctgaggggtgagcagagggtttggacatggccccgtgggcttccagcaggggatttggggctgaatattgggacgtcccctctggggtgtgtggggactgcctgtccttgcaggccccggcctcagttttcccacctatcccccactccattgcaggaaggtgctcgggtcttcggggcactgggtcccatcggtccctcctcacctgggctcaccctcgggggtctggccgtgagcgagcaccggctcagcaacaagctgctggcttggagcggcgtcctcgagtggcaggaggtgagtctctgtggggctgcggctggcctccagggtcttgtcttgtccctgcggggacaggccagggcatctaggctgtgcacagtgacgcccctcctgcccccacagaagcgcagaccctactctgactccactgcaaagctgaagcggaccctgccctgccaagcctacgtgaaccaaggcgagaacctgtgagtgccggggcgtggcagccagggcggtggcaggggcagtggctgtggccgtggggatcagggcagccctttctgaccagctccttcccatagggagaccgaccagtggccgcagaagctgatcatgcagctgatccctcagcagctgctggtgagacccgcccctcccaccccatccactctgagcacccccatgcctggctgacccagctgtctgtcctgtcgcccccagaccaccctgggccccctgttccggaactcccagttggcacagttccacttcaccaacagagactgcgactcgctcaaggggctctgccgcatcatgggcaacggcttcgtgagtggggcgggctcccttgtagcactgtggtgacaagtacagctggaggcagcgctctgctcacacagtccaggcgggggtcggggggtctcccctggggccgagggtagccctcgtggcctctcggaccccatctggaaatgactgactccaggcaccctccgtagagcacagggtgaaggaactcagcctgagaggcctccagtttctgcatctgtgcccagcttcgaggtggccctgggggcgtgagtgcagggagggactggggccagccctgttggggcccaggagc

SEQ ID NO: 92212 - DNA, 1032 bp, Homo sapiens
tggtgggggcacagtggccccgggcagtgaccacagggtcctgacccgcggcccccgcaggcgggctgcatgctgttcccccacatctccccctgtgaggtgcgcgtgctcatgctcctgtactcgtccaagaagaagatcttcatgggcctcatcccctacgaccagagcggcttcgtcagtgccatccggcaggtcatcaccacccgcaagcaggtgtgccagccaagcacagcccctctggggacagagggggattagaccccactgccctggttgggcagccagacttggtgtgggcggagtgtgatgcgatggctggagcaaggagctgcaggggagcccggaggatgccgggcgggttcccaccagggctccatggaaaagcggccactgggcggctctgcagggctggagggtgggtcttggcgcggcggcagggaagccagcggagcggggagctgggcaggggttgggatcgtcctgcggctggaaggccctgcctggtaaccacgtgtcctggtcatgccttgccagttgaggcagactctgcaggtcctgtgcaccaggtgagggccgggacctgtctcaggccactggggagccatggggggctgtgagcagatgaggggcagggcctgttcccctgggactagagaatggacccagctggggctaacaggccaaggctcggagggagggatggcaggccccaggacagacagacaggtttcccaggagcctgggcccctcttcccaccccgttcccttccaacaggcagtgggacctggtggtgtcaactcaggcccagtccagatcgtcaacaacaagtttctggcatggagtggtgtcatggagtggcaggaggtgagcactcggcagcccagggacttgggacccccagatcctcacggactgtggctgggaggggacactggcattgggggtctccagccctgagggctcctctttgcctctcccccaaaagcccaggcctgagcccaacagtcggtccaagaggtggctgccat

SEQ ID NO: 92213 - DNA, 1094 bp, Homo sapiens
ggaggcagaggttgcagtgagctgagatcatgccattgtactccagcctgggcgacaagagcgaaactcagtctcaaaaaaaaaaaaaaagtttcctcaaggaaacccagaaaggctccatgtacctcagcccttgcttgtgctgggccggccgctgcagatccctcgggctcctgagttgaagccatggccggttggctcaggtggctgtggtgaggtggccccagacacagcctggcctgcccaggagctctgaaatgcaggttcttgggcccttcccgacagagcctgttggcctttggcccacccattgctcttggccaccgtgtcatcccaataagggggcccacctccagggtgggtggggggtgtgaggacagagcagttaggctgtgcctggctcatggagcccacggcatgatgccgtggttggagggatgctggtccctgtggtgctgtctggtgacaccacgccctgtgcctgccaggccggctgcgtgcacttttcctacaaagcatcgtgtgagatccgcgtgcttatgctcctgtactcttcagagaagaaaatcttcattggcctcatcccccatgaccagggcaactttgtcaacggcatccggcgtgtcattgccaaccagcagcaggtcctgcagcggaacctggagcaggagcaacagcaacgaggggtgaggtggccggcctccagggctgctcagtctccctccacccccgctgcctgctcaccactggcctctgatttctcgccgtagatgggggggtagtggttaccccgggctgggcccctccaggagtcacagatgaggcccccgcagagactggtgagtggtgaccctgtcatgtacaggagggaccctggggcatgtggggggggtggggttgggaaagaagcagggcgaccttggccttggggagagcagagcagagggagaggcagcagtcccagcggtcctaggctgtcgggaaactgcagcccagcctcagggccatgggaggtggtatccaggcctgggtggggccaggcctctgctcacagggatgtggggtcagtgcttgggagcctgtggccagcagcc

SEQ ID NO: 92214 - DNA, 1042 bp, Homo sapiens
cgcccaccccgccgcaggccacctacggccccgcggtcacgctacctggcgcggctcgcggcgtctgggtttgtgttgtcgatggcgacccgtttcccttgcttcagggctgtctcacacgtggtcacacagcgctgccaggagcctagcgtgtcctggggacacgagaggtcacaaacagatcggcagacccagggggagagaagaccccgagcggggacggggaggcaatgatggaggaaagccgccccaaaccagttgagaggtggagatgggaactttataatagatttggggcggcaaaagcctggtcataccctgttcacgtggacatatccggccgacacgaggtgcttcttgagaaaggtggacttcccggctgtgtggggggcagtgtcggtgggtggcctaggacccaggcggggctcagggcacgcgcacaggaacaggacacttacccccagggaatcccactgcgacaaccacctccgggctggcgctcaggagggccctggactcggggaggcagagaggccctgagcgggagacagtcctctgcgaggggcgggggacacgcgtgagatgccgtccccatccccgggagccctcccatccccacccccacccccgccccagggcctcaccggatcaaaggctgggagctcgaagccggctgctggccacttgagaaagaactcctcaggcgtggcgaagggcaggccaaggttgagggcaaactaggggttgaggacgaacatcagacacaggccagggtcgggctcgggcgcggggcagggggcaggggcctcaccaggcgatcggcgcaggagaagtctttcttcttccgccccggggcccagttggccgggcgtccggctgcgtctggaacacacgggacaccccgttcccaccagctcggagggaggcgtcccagcccaccctcagcagcctccaggcccttacctcccacaaagatgctgtccccgatggatatgggcgtgccgtcgttggcctacgggagacggtagtgaggaggcccttc

SEQ ID NO: 92215 - DNA, 1672 bp, Homo sapiens
agtggtagcggcccgacccgttctagagaaggagcgggtgaaaccatttttcagaagggggttattccactggaacctcgagggtggatcggagtcacgtggcgcagacgctgaaggtggatccggctacggagagtgcgcaggcgcagtgttcgccctctcgccacgaagtaaacaagtgggagggtctgagagctgcaccacctggggcaagcacgccttgaaacgcccacttccttctccatattgtatactggaattgaagccaaggaggtaccattttgctcgagggcatggcctaagccggtcagctaaggccatgttaatacggggctgtcccatctctctgcggggcgcgacagctggaagagccgaacggataagagaagaggaggtgagaggagctgtacaccacaagaggcactgagggactcaggataacgggatgaagccgtcagtgcccccagaaacgaagcggccccggacgaatttctgagtcaccgtcgcgagaaagcgggctgagccgccattttgaagcctggcaaaccgaagcaagaaatgctgccgtgttggatctttgccagccttcgtgccgaatgggagcaggttggagggagggagagccaatatacactatgggctgattaagcccggttggctgccatgttgttaacgagcaccgatttcctctacttttgtcgaagaagtttattgtgggtcagggacgtcaggtcgcttgccttcgtttactgtggtcatgattgagcatatgaggacggccattattgttgggggcaaatggaaatgctctaggcggggccatttttcttaggggcaagctgtcgtcacccttgtcaactggttcggatgaagcccctgtggccgccatcttgatctcgggcggccccgataagggaggcggagtgtgcggagaggaggcggggcaactgcgcggacgtgacgcaaggcgccgccatgtcttttgagggcggtgacggcgccgggccggccatgctggctacgggcacgtgagtggaggcggcgttgttaaccgcggtgtggggaggatttggccgtcctgaggcagcggggcgctgggagggcgagcggctcacgggaggggtatggcctgcacagatcagagggcagaggtctgccagcgatcctttgctgagcgctggaagggggtcgcccgtgggaatcgtcctgtcagacctgaggcaaatcgtagacagtctcaccttgcggttccagagcgcctgggatctctacctgggccgtggaccacgtccacggggtcgggggatggtttggggggcctcggggcgcccctcacccgtccaaaggcgggacttccggtcctggcctccgtctgggcgggatttcctgttttcttcctagaccagtgggtcctccctggaccccgggcgaggttgggaggtctcggggcagctgagcgtggccccaggcgctcaccccatggctaccgcgttcatgctcaggttcctcacatcttggggtgtggggtactaaaatttcgacaggaggggtggttccacccctctcctccttagctcttttccctcctccctgcatccaaagaggacagccacatcgtgctccccctcctgtggggaacacgtctcactttcctctaatctctccctgatct

SEQ ID NO: 92216 - DNA, 1074 bp, Homo sapiens
acaaggctatgtagtgagagatgccaggaaggtgaagtgtaagggatagtggcaagaatgacgaggtgacctgcttgggtctgtgtggtcagggaggggctctgcagggctgacctgggaggtggcgccaggcttggaggtctctgggtgttgcagacagtggcggcctcacatcttgtttccctctgtcactcagggatgagtatttccgcatgaagctgcagtggaaatctgtgagccctgagcaggagcggagaaactcacttctgcatggataccgcagcctcatcggtcagtgtcaggggtggcacttagggtggatgggagcagggaaccacaggagggcctcaggcataagtgcgagtgggagatagagggagccccctgcctccccaagaccagtgagagggcatcttgggggaaagctgcatgggctgttggggaatggccctgggggagcaaggccagggacaggatgggaaagaaggggagcccagctcccttcaggcccagtctcagttctgtcaatgcctggtgatcttggcaagtgattttgcctccctgggcctcagtttcccctactgtgggaggatatagccagctggtgagtgggaggcctggcgcctcacagcaggagcatcagtgatagtttctagaaccagctctgcttctcccccagagcaaaccccgaggctgggggctgccagcaggaggagcagtgggggctggcactggtggccagcagggatgggcccccctacctttctcacctttgcaccctgtgcccggtccccgcagaaagggatgtgagccgcactgacaggaccaacaagttctacgagggtcccgagaacccggggctgggcctgctgaacgatatcctcctcacctactgcatgtatcacttcgacctcggtgggtgccaggcctggggacgggcgtggccggggctgtccaggggagcgctgcgggcttggctgcagcctgaccccatgtccccccaggctacgtccagggcatgagtgatcttctctccccgatcctctacgtcattcagaacgaggtggatgcttt

SEQ ID NO: 92217 - DNA, 1053 bp, Homo sapiens
tcaaactctcagtcccagcgctgggcaaggctgagtgggctccatgtcatcccccagattcccaggactccggctctctctgcttctgtttccggtggctgctcatctggttcaagagggaattccccttcccggatgtccttcggctgtgggaggtgggccagccagtttgggcgagaggcctgaaggggtgggctcacctgccctgggaggttgggcggagagggacagaccctggtgggacctcaggcccaggctgggctatgacctccctccctccctctgtcccgcaccctcaggtgctgtggacagggctccctggccccaatctgcacctgctggtggcctgcgccatcctggacatggagagggacaccctcatgctgtccggcttcggctccaatgagatcctcaaggtgaggctccggccccgcccccgccctgtcccccctgagctgggcgctgcccagggccgcagtacctccggggagcaggtgtttagtgtgggattattgaaagcctggttagttgggagcgcagtgggggtggggccgcgtaggtttcccttctgccccatgccatgcctgctcccagcaaggtcctccgggcaggtgggtggggaccttccctccccgagtacgtgctcagaatgctcccggaggcctgagaagcatgtctcgcccagcgcacttctgagcccccagagggccagcccggtgtgtcttcattgtttcccagcacgaagcacagagtgggcgctcgggcggaggtggttgagtgccgactggcgcctgacccaccccctcccgcagcacatcaacgagctgactatgaagctgagcgtggaggacgtgctgacccgcgccgaggccctgcaccgccagctaaccgcctgccccgtgagtccccgtccgccccgcagcgccccgcccgaaccccgaccgacccccgcccccttctcaccttcaccttccgcttttcgcttctctcatcccgtgcctccaggagctgccccacaacgtgcaggagatcctggggctggccccgcccgca

SEQ ID NO: 92218 - DNA, 1041 bp, Homo sapiens
ctgtgggcaggggacggacggtagataaacttctcagccatcatgccctgtcagcactgaccagtggcacaggggaccagcttctgtccgtggccacagtgattcaggcaacaaataatcactgagcccccgggaggacacagcacgcctgggaccctctcccagtctcctctccagctgcccacatccctgcctccatggagctcacagtctggctggctggctgaaaaataggcaaaataacacgcaaccgggatgagctgtgaccagccgggccagccgaatgaggggggatgggcggcgttaacagttcggtaatatcggaggagcagtggcatctgagttgccgtggagggcaaggcggagggcatggtgtgggcaaaagcccaggggcttgagagtggtgaatggccagccgtgggcagaaccacgaggagaagccgagtgtgggctccaggcccggcctccaccctggctgcccgggcagctcagcaccatgtctgcttcttccacaacaggccctcaaagacctcaaggcactgggctgcagaaaggcgatgaagaagtttgaaaggcacacgctcttggtaagtggggatcttggttctgctgagatgcagggcaaagagagtgaccatgaggccttccccagagagtcagaaggcgggtacctggcaccctagtcctgccaccgccttcctgcctgacccgggggctggacacgccccctgtctggacctccgtttccctcatctgtcagagagtggggacaggatcctacggtccaaggacatgtcatgggaccaggaggcccagctgcggaggggctctctcaggggtgcagcctgcctgggccctaacctcggcctgtgcccaacctgcaggaatatcttctcggggaggggaacctgagccggccggccgtgcagcttctgggagacgtgatgtccgaggatggcttcttctatctcagcttcgccgaggccctccgggcccacagctgcctcagcgacagactccagtaaggggcggggctggcgg

SEQ ID NO: 92219 - DNA, 1105 bp, Homo sapiens
gctggaggtctggttggaccaggtggcccgagtgttgccagaggcccagggctggcgctggaggcaagactgaggtgaggattaggcgaaggatggggttggaggctgggtttgggagtcagagtggaagttcgggcccactctggtgtgggcatggagctggggggctagttgagtctaggcacacaggtgggtgggttgctaggtcacctgtgagagctgggcatgcgcatggctcccagctccccaatccagcccgtgttctggtcccggtaggtgaagatgcggcccccgatcctgttatctgcctccaggatggtgacctgagggagtccgtggggcgaggagggcccttcagctccacccactgaccatcccctgccctctaccaccccgtgccagccccctgccttcttccatccccacagtggcccagacccagactaggagagggtccccttctgtatggaggtgggggaacagaactgagtgagcagttccagactgcaggaggaaggctgccagctagactgcaaagggacttcccagctcggggagttcggagatgacccatatgcgtagaagcccctgggctggcccattctcattctcggattgcagtgagtaggtcagtggttagacctcagggcacacatccccttggtagagtttccctctccaccaacaggcgccccaccccaggacagaggagctttgagccagtgagacttccctctgggatgaaaaacgtgggacaggaaagtctggggcctctcagtggagacatgtgacagcagggggcttgggcctcacccccagactacagggaaagatagcctctccccccacatccccacctccaccccctcaaggaggaacgcggccgtgtccctgtgcccagggactccagcctgcagcaggagggactccaggtagactgcaagcagtgcttcccaccttgtgtccagcatcgctgagcaccttggcggccaccagcccggccacaccagcgccaaccacaatcaccctctggggcttcagggtccgattgagcccccaggtcaccaccttgagcagctgctcatagtcaggatcctgcatgcat

SEQ ID NO: 92220 - DNA, 1195 bp, Homo sapiens
ccaccagcagcagcagcaccaccggctttgccttgaatttaaaaccactggcgccagccgggatccccagcaatacagcagctgccgtgaccgctccacctggccctggcgcagctgcaggggcggctgccagctccgccatgacctacgcgcagctggagagcctgatcaacaaatggagcctggagctagaggaccaggagcggcacttcctccagcaggccacccaggtcaacgcctgggaccgcacgctgatcgagaatggagaaaagatcaccagcctgcaccgcgaggtggagaaggtgaagctggaccagaagaggctggaccaggagctcgacttcatcctgtcccagcagaaggagctggaagacctgctgagcccactggaggagttggtcaaggagcagagcgggaccatctacctgcagcacgcggatgaggagcgtgagaaaacctacaagctggctgagaacatcgatgcacagctcaagcgcatggcccaggatctcaaggacatcatcgagcacctgaacacgtccggggcccccgccgacaccagtgacccactgcagcagatctgcaagatcctcaatgcgcacatggactcactgcagtggatcgaccagaactcggccctgctgcagaggaaggtggaggaggtgaccaaggtgtgcgagggccggcgcaaggagcaggagcgcagcttccggatcacctttgactgagcgacagcagccctggggcccgcaggtccctagggagttcatgaggggaatgcgccctgttgtctgtagtttggggttgtggcaagatacttgtttgtttgtttctttctttcacatgactgcccttgacatgatcgctgtgtgctttgcgtttttccatttaggagggtattctgggccttctgcccaggcagcagcctcatgggtgtggcttctgtggctttcatttgagtatctttggccccttttcacctactgcgaccacccacctcatcctggctcagcctggtgatggagaagtgctgatggtcttggtcccagccagggtcgtgggggcagccactctctccaaagcatagtcataggtgtcatgaaaaaataccaaatgtaagagaacctccaagtcagggcgcagtggctcacccctgtaatctcagcactttgggtggccaaggcgggcagatgac

SEQ ID NO: 92221 - DNA, 1025 bp, Homo sapiens
tcagccctggctgtttgacggggacggggagttcggggattctctggggaccccagcacacctggcaaccgctcccggttagcagagccttggataagggagaacccccgcacagcaagagtaggggtggtgtggagagggagggagatcagccacccgtgcaggaccctgagaatctgaggctcggtgccaagaaggggcctcagatcacagaggcttgttagcaggagtcaagactgaggtcccgagaggtaaggggggttgtgaaaatcacagtgccagttagatgggacctcagcctccaccatgctgcacagcttccagggccccgaggcccatggtgtagtctctgggaggtctccaagccctgaccctcacctcaggcctgctgctgctcacagttgccagacgctatcgattcctgcctgcacctgcaccgtgccatcgccctgctattgccgcaactcctcactgctttcccaatcacggtggcctcctggcatgatggaaaaggctccgagttttgcatcagacagaccggggttctggtcctgagcccagcactcagttgtagactggagtgcaggcagggccctcatctgccgagcctcggctgccttccgcagcgtgggtcagagcatgggccctagagccagcctgctgggttcacaccccaactccaccacttctgtgaccctcagcaagtggcatcctctttctatgactcagtttcccctccgtaaaatggggatgagatggtccattgcagacggtggttttgaggattaaatgtgtaaatgtgcgtgaaatacctagagtggggcctggcatagggaaatgccctgtgagcagtagttcctgctctggggcctggtgtgggagcgctgtggagatggcatcagtgaagccggcggctgccagagcccgggtctgtgtgtgattctctctgttctcgccacgcctgcttctgctttcagatccgccgtgtgcagatgtctgcctacgtgactgctcccccgaacgct

SEQ ID NO: 92222 - DNA, 1025 bp, Homo sapiens; identical to SEQ ID NO: 92221

SEQ ID NO: 92223 - DNA, 1033 bp, Homo sapiens
ataagaaaaatcaactcgcctggtgggtttatgagactcaaataagacgatgtctggcaagccttatgcacagagctcaactcatacattcctgttcaactgttttttttttttgagacggagtctctccgtctctgtcgcccaggctggagtgcagtggcgcgatctcggctcactgcaaactccgcctcccaggttcacgccattctcctgcctcagcctcccgagtagctgggactacaggcgcccgccaccacgcccggctaattttttgtatttttagtagagacggggtttcactgtgttagccaggatggtctcaatttcctggcctcgtgatccgcccgcctcggcctcccaaagtgctgggattacaggcgtgagccatcgctcccggcctcagcatattttattaataggaactctggggcccagtctcatttcttccttaccacttgtaagagccgcagacgttggactgtccaacacctgctgtcattcttctgtctccctcatccctctaaagtgtctgtttccagctatcctcatcttccattccaaatgatgggtgcccaggccccatcccctggcagggattcagacatcgaggccccagctgcgtccttttctccatcccttgcccttggcttcctttcaaaccgtccttcagcttccactggataggaactatctcccaaccctgccaaaaatggaagatctccgttttcgtttagtcacagggtagccatcttgccccttctcatgcactgggccctcctccaccagccgaggtggatgtccgtcttttctctgttgcagaaacccaccttgtcccatccacatcaggacatcccagctggagttcaaccttcatcccttctgtggcagttaggagactgaatcaaggtccagagaaggtggaggaatcctgatactgagcggtacacacaagcttctttctccttccttacctgttgcgggcaggaagtccttcttgggatctgaccaccttcccttagagcacttactgtcc

SEQ ID NO: 92224 - DNA, 1024 bp, Homo sapiens
cgcagctctttcactacggggcactggtgggctactgcgcaggaacaaccaagcacgaagaatcgtttagaaaaaaaaaaaacacaccctcccctggagtgctcaggcccagctgcacgcgggctgacaaacatcgagtctagaactctcccacccggccccgggcccagtgcgcatgcgcagccgcgcgccttcggcccaccgtactacttctgcgcctgcgcgaccgtgattccccgctcgcgactccccaccccccagggctccctaaagagggccacgagctgcgaaagggcgggaaaggcagttggagaagaggtaagcggttactcactccatggctgcagcaaggagaggcggcggcggcctcggctgaagaaagaaggtgggagcggagagcgcaggcgtggtgagcgcggagacgggccgggggcacaaaggggtcgaggctacagagccatggccggggctacgcaggcagaggcggcgacactgtagtgagaagagactgtgatccgaggacagggaatgaggcggccccggggactggggacagatatatactgggtggcggagcacggccctcccggatccttccgcgccccgccctcgcgcggccccaaccgggaggcagccgggtcccctcctcctggggatcaggggatccgagcctttccttcccactcctagggtccgggaccctcctccctctcagctggggatccgacctcttccctctgagccggggatccagccctctccttgtggctccggggtctggtttcctcctcctgactctaagctctggtttctttctctttctgcctctgaggtctgggcctgcttcctcctgtgattttgaggatccagcctcattctcttcccgcagacctgcaccagttcatttctctttccctttccttgcttgcagaatttcctgccagtcacttttcacttcttcatcccccagctgctgactctgagaaaccctcgtgggttagagtccagcatgagtcacagcact

SEQ ID NO: 92225 - DNA, 1018 bp, Homo sapiens
ggcaacatagtaagaccctgtctctattaaaaaaaaaaaatcaacccttcttccccaccaaaccacccaactcctctctactcttatccttttatcctctgtctctgcttatcacctctcttgcgtatttctggatctccttccctcctttctcgtccaaatcatgaaatgtttggccttagtcaatgtctatgcccgtcacataacagccgaggcaccgaggcccacagggaagcagctgggagcttggaaacctggtctcttgaatttcaaacctggtttcttacaggtggttgtctggggtgggtggagtggcgacaggatagagctgaaggactatgcaaatgaggaagtaagtcagggcgggctttgagaaggggacccatatcctacaggcaaaaagcaggctaggtgaccttgggacactacgctaagggagggaggctaaaggcggccaggtttgcagtgcgggaagatgagcaggccagtgggaggaggggcagggcagggctgtagttggtgactgggtgttcattttagctctaagaaaaaaaatcagtgtttcgtgaaggtgttggagaggggctgtgtctgggtgagggatggcggggtactgatttttttgggaggttatgagcaaaaataaaacgaaacatttcctctggcttgtgcatcttgtctttgagagaagcagctggggagaggcggccttgtaatctcagcactttgagaggctgaggcgggcagatcacctgaggtcaggagttcaggaccagcctgaccaacaaggtgaaaccccatctctactgaaaatacaaaattagctgggtgtggtggcgtgtgcctgtaatcccggcaacttgggaggctgaggcaggagactcgcttgagccaaggagacggaggttgcagtgagccaagattgttctattgcactccagtctgggaaacaagattgaaacgctatctcaaaaaaaaaaaaaaaaaaaaagggggggggaggtggggagggccgggc

SEQ ID NO: 92226 - DNA, 1028 bp, Homo sapiens
gagtgcagtggctcaatctaggctcactgcaagctctgcctcccagattcatgccattctcctgcctcagcctcccgagtagctgggaccacaggcacccgccaccacacccggctagttttttatatttttagtagggacagtttcaccgtgttagccaggatgatctcggatctcctgacctcgtgatccacccccctcggcctcccaaagtgttgggattacaggcgtgagccactgtgcccggccaaaacaaggtgtattgatcggggaaaatcgtgtggccagaggcttgcaggaagcagtgctgtttcccttgggagcaatggtagtggattggttgattcagtgttcacagtgactttaagaacataacttccctggatggcagaggggactgtgtatatatcttaggctgtgtatatatcttaggcattctgttttaaaaggttgctctcctttccctaagagacctttcacatgtgtttctgtcccttcaggtttgttgataagccggggcccttcgtgggaccctgcggtcactggatcaggccctcaggtacgtcctgaagggagcgggaacaggcggggactcgggcaggacctggtggctcagatccatcttggggtggcttctccttacacctcttcattttttttagttttccaaattgcatttgtaatacgtacccattgtagaaagacaaaatcgtcaaaagattcactagtgcctctgaaaaacaaaacaaaaacacaacttttttttgaagacagggtaattttttttttttatttttaagacagggtctagctctgacatccaggctagagtgcaatggtacgatctcagcttactgcagtctccgcctcccaggttcaagcaattctcgtgcctcagcctcccaagtagctggggttataggcgtgcgtcaccatacctggctagttttttgtatttttagtagagacggggtttcatcatgttgcccaggctggtctcgaacccctggcctcaactgatctaccta

SEQ ID NO: 92227 - DNA, 1017 bp, Homo sapiens
tcctttgtcactcaggtagtcgcacgctatagctgtctccccactaggctgtcacgggctgggacccgacgagatcctggtctgggttttcagaagtgagctgggcctggcacacgggtgctgaggcttgattgaatgagtgcatgaatgaaagaggagtggatgagggtgacctggtaaaaggggctgagagaatggttgagtgagagagagaatgagtcagcttctgcctactcatgaaagtgaatgagcggaggagacagcccatatggctggaaggctgggtgtatgagtgtgtggttgagtcagtgagagagaggggaaggaaggggggtggacccaccagtgagtggagcgtccagacttgagctgccacctttactcctccttccccagggccctcccgccgcagcgacctccagagcctgggctactgcatgctgaagtggctctacgggtttctgccatggacaaattgccttcccaacactgaggacatcatgaagcaaaaacagaagtgagtctaggggtcagcagaacccctgcaggtggtcagcagaacccctgcaggtggacagaagcccagagcccaactgggagcaggagggaaggggaggtggcatccagcagagcccaagtcctctgagccgcacaggcatgtgctgcagtgtccacacagcaggcgaggcaggtgttccggagccacactgcctgggctcagactctggcaccaccactgtggggtgttaacgtctgcgagcctcagtgtcctgctccatgagatggtctcctactagctactaccttatgggactgcaaagagttcagggaagtcaggtgcacacagcacttagcacaggggctggctcagagaaaatgctcattgtggccgggcgcggtggctcacgcctgtaatcccagcactttgggaggcagaggcgggcggatcacgaggtcaggagatcgagaccatcctgactaacacagtgaaaccccgtctctactaaaaatacaaaa

SEQ ID NO: 92228 - DNA, 1043 bp, Homo sapiens
cattcaggtcgtttctagtcttttgctgctacaaagagtgcctcaaccggtcacctcgcacatggtcatttcctgtgtgagtccaggcagccacaggctgtgacccaagtctggctggctgcaaaggccttgttctctctcaggacaaatcctcacccagacagtgcctttgtgcaatttggaaagattctttgctaccatcagcctgaaaatgctcataacaaacattcaaatctacattgttatggtgtagacataccatgtgcagatagatgcccttgtgcagtgcacggcctgctcagcagccccatgacgcctttcaggccgtgggcagccatctgagaccctctcccctctcacccactgcagacgtactccggccttttctgtgtggtcatcaacccgtacaagcagcttcccatctacacagaagccattgtggagatgtaccggggcaagaagcgccacgaggtgccaccccacgtgtacgcagtgaccgagggggcctatcggagcatgctgcagggtgagtgctgggtggggctgtaggccagcgaggcggctcttcaacgggggcctgacctggggctgccggaagccagagtccaggtcaaatgacagcttgtagacttgactctgtagggcttcttagggggctggagggagcacaagtagaggcctgagtgggtgaggtgctaggtcctagagtctttttacctgtctccatgttcattgtctcttttattattgttattattattattagtttgagacggagtcttgctccgtcacccaggctggagtgcagtggcatgatcttggctcactgcaacctctgcctcctgggctcaagcgattctcgtgcctcagcctcccaagtggctgggactacaggcgtgcaccactgcgcctggctaagagatggggtttcaccatgttggccaggctggtctcaaactcctgacctcaagtgatctgcccacctcggccttccaaagttctgggattacaggcataagccaccatgcctggcctctttttaa

SEQ ID NO: 92229 - DNA, 1080 bp, Homo sapiens
ccgccttggcctcccaaagtgctgagattacaggcatgagccaccgcaccctgccaagaaaatagaacctctatgaaattaggctcttctggaaaaatggttaaaatagagacagtttgccctatttcaaatattgcatataatgcaagaatttattacatcttttaatatgtttcagattcctaaaatgcaactgcagtggttatgttatcactgttttctctctctatgcctcagtttccaaatctgtaaaatgggaatgattcttacaggcttataaagccattgatgtaaattgctttgagcaatgcctgccagagtatctatgctaggtaagcatttgctgttattgtcatcatttattgataaggaaaacagagatcatgtccttgaagagaagaagggtcaaagaccagagtttgagaggactcctactgtctgagttctaatctcggatcttcagtttctaagctgtgtgaccttaagcacattctcccactcttcagagcctcagtatgtccatctgtccaatgaagctgatatctaccttacaggctgtgtgaggtccttcatatgtaaagtgccagttgtgataaatgataagacccttgacctttggcccaggtccctaaaactgaccctgacctccttctctctctctctgcatctccatctgacagtggagggcatcgtggggctggaacaggtgagcagcctgggcgacggcccaccaggtggccgcccccgtcggggtatgttccggacagtgggacagctctacaaggagtccctgagccgcctcatggccacactcagcaacaccaaccccagttttgtccgctgcattgtccccaaccacgagaagagggtgagtgactcagcctggggaggaaggggtggctgtggctgtgggttaaggtttggcctctggacttggctggagccacatctgattcgaggaccctcaaattagctgtgtggctttgagcaaattgcttctattcctaggctcagggtccggttgggaaaattcatgcattcatatgacttaatgtattaagcatctactgtgctgggaac

SEQ ID NO: 92230 - DNA, 1081 bp, Homo sapiens
actaggtggtgaggggcaggggcagctctgggtgtcagaaagaccccgctggagccatgtaggcaacagacttggggtggagggtgctagaagctggggaggcagggaagagaggtgaacaggtgacctaaggccaggggtctctgcagggttttgtctctgctagcccctttgacttagacatggctgagtgtccaagacttggccctgggggcactggggaaccatgggagggctatgagcaggatcagctctggagacgtgttggaatgggctggaggggagagatgagaggctagaaaggaggcttaggtgagatgggggactgagctggggcagtagggatagagaggagaccaagtaaagagagtcagggagtgagaggagcggggcttgcagcctgggcaggagctccagggcagacatccatgtccctagcacacagagggaggctgggcttcctgtgtctgacccggtccctcctgacctcctctccagctgagagatgcagaggtggagcgggatgaggagcggaagcagcgcactctggccgtggctgcccgcaagaagctggagggagagctggaggagctgaaggctcagatggcctctgccggccagggcaaggaggaggcggtgaagcagcttcgcaagatgcaggtaagagccggcgtgagctgcagggaggggaggctttggtgtcttcaagccccaaccatcactccagggtctaaggctagctcggacccctcgctctcaacccacaggcagcatccgcatgggtcagcacctttataaacatccatgccccagaggctggcttccttcttcttctattttacatttctttcatttaaaatgctgcacttttaagtcaaatttcctcatttttttgtttgtttctttgtttgttcagttggtttttttttttttgagacagtctcattctgtcacccaggctggagtgcagcgacgtgatctcagctcacagcaactctgcctcccaggttcaagcagttctcctgcctcagcctcctgagtagctgggattacaggcgtgcgccataatttttgtattttt

SEQ ID NO: 92231 - DNA, 2145 bp, Homo sapiens
agtggcgcaatcttggttcactgcagcctctgcctcccaggttcaagtgactctcctgcgtcagcctccagagtagctggaattacaggtgcctgccaccacacccggctaatttttggatttttagtagagatggggttttgttggccaggctggtctcgaactcctggactcaagtgatctgcttgccttggcctcccaaagtgttgggattacaggtctgagccactgcgccaggcttcttccctccctaattgtcccctatggtcctcccaagaccctcctttcctccaggcttgtcctccacccctgctcctccctcctacatctgccctcacctgatcactggctcccactcctccccagaactctccctcctcccatccttcctcctcccctccccctccccagccagcccggaagctccttccatatttgatgtctcagccgccccccatttcactgctcccctcccgcggaaaacaccagagaggaggaaatgatcccggcggcgtttctccatccccccaacagtgaggctgtgttggggggtttcccctgaccatcctctccccacccccgtgactctgtgtatttctgtccccagctcttgtcaccgcctgagacctcgcgagactttcggtcccccccgccccttccccccaggttagcaattgggaatggctgggagggggtgtccccaagacactgggcttcaaatctccccccaagccctccctcctacgatcaagacaccttttgtccagacagctcccttagcgttgcctggaaaagccacagagctccctgcgggggtgcagaaccctgcaggcagccccaggctttgcagaaaccacacacactgttgctggatcttgagtcccattagctgtgagatgcctgtgagagccttcccgcacccgtcagaagctcagagccttcttggaccctttaaagatgtccctctccccagccctccgcctcaccgccccccacccccgaccccgtccttagaatcttctggaggagcctccctccccccccacccccccccactgctcctggagttctcatcggattccccaagggcactgccagcttcgctccactcagcccccttgcagaccccaccccctgcctgctctctttccctacaactaggtcagcccccagccccgctacggcggccgcaccgttccctgccctctccgctggctgctcccacatgcattccacccagcccctccccacgcccctgccgcccaccatcccgccttgctgccccccaccttttgcctcaggtgaggggaccagtggagggggggaagggcggtggactgtggtgggaatggggcgggggaggctcggtgggcaccaacctgcctcctaatccggagtctctcccccctccccgatgtctccccctttctcatcgatgttgactgactccccgatttgttcactttctctctccatctccttggtccatctctgtccatctgtctcttgtcatccgtccttttgtgtctctgtctgcctgactctgtctgtcttgccttctctgtctctctgggtatctgttgtcctccccttccatttctttctctctctgtctctttctccctgccttgggtctctctgtctgacccttccctgcaccccatcttcgtgcttcccccctgtgtctgcacacctccccaccccccaggttacgagaaatcccgcagcctcagcagcatcgcgggcctgagcggggtgtccctgcgcctcgcgccccttgccaccccccctggctctccccgggccgcccgccgcgctcccccgaccctgccctccatcctttagcgctcccctcccccctgtggggggactcgggggtgaccgggaagaaggtcaaaggagctgggggtggggggtggggaaaagggtttttttaaaaaaaatcaaaaagtcattaataatatgcaaccgagatgacgatgccagcagacacccccgggcccctcacccccaacctgggcccccaggatggagagaggggccacagcccgtccccccaactcttccctccccaaaaaaagccttctcaggtctccacgagccataggacatccccctgccatcaacttgtgtaaataagtccaa

SEQ ID NO: 92232 - DNA, 1049 bp, Homo sapiens
cagtgagccaagatcacaccactgcactccagcctgggctacaaatagagtgagactccctctcaaaaaaaagaagaagaagaagaagaagaaaagaagcaattaagataaagataaaagaacaagactattactctggccacttcagttaaagaggtctggctgggcacagtggctgccgcctataaccccagcactttgggaggccaaggtgggagtatcatttgagcctagaaatttgagaccagcctgggcaacagagcaagaccatttcctcaaaaccaaaaaacttaggtgtggtggtgcatgcctgtagacccagctacttgggaggctgaggtgggaggactgtctgagcccaggagtctgggaggctgcagtgagccatgattgtgccatggtgctccagcctggggggacagagtaagaccccatctctgggggaagaaaaggagttctgcaaaggactttttgaggaggtgacacagaacctggagggtgaaaagggccaggcaggcagaagaaacagcaagtgcacaggccctgagcttccctgggggagggggtggaggatgagcttggcttgttcaagggacagcaaggagcacagtgaggctgatcccagtggccaaggggagagggctgctggagtccagggagaaagatcaggacggattttcggccatggtgaggaggcgggactttatcttaaacgtgaagggaagccacctgaaggtatgtgatccatcatgcattcattcaacagccgtctgtggaatcttctttagaaatgcagagacacatcctaaaggatccctgtccacagcctaaggagatgccataggggaacctggggggcttccaggaatggcctcacctaaacccctgtgtttcacagacattcagggaaggccatgaccaacccaccaccccaggccacagagcacaagggccgagaccccaggcttccgggctcctagtccagaggggggactgtctggctcctcttgttccatcccccccacctctcctttttgtaacctccccgt

SEQ ID NO: 92233 - DNA, 1048 bp, Homo sapiens
ggtggagacggagcccttcctgacctacgtggagggggtgtgcgtggtctggttcaccttcgagttcctcatgcgcatcaccttctgcccagacaaggtggagtttcttaaaagcagcctcaacatcatcgactgtgtggccatcctgcccttctatctcgaggtgggcctctcgggcctcagctccaaggccgccaaagacgtgctgggcttcctgcgggtggtccgcttcgtccgcatcctgcgcatcttcaagctgacccggcacttcgtggggctgcgcgtgctgggacacacgctccgcgccagcaccaacgagttcctgctgctcatcatcttcctggccctgggggtgctcatcttcgccaccatgatttactacgctgagcgcattggcgccgaccccgatgacatcctgggctccaaccacacctacttcaagaacatccccattggcttctggtgggctgtggtcaccatgacgaccctgggctatggagacatgtaccccaagacgtggtcggggatgctggtcggggcgctgtgtgccctggcgggggtgctgaccatcgccatgcctgtgcccgtcattgtcaacaactttggcatgtactattcgctggccatggccaagcagaagctgcccaagaagaagaacaaacacatcccccggcccccgcaaccgggctcgcccaactactgcaagcctgacccacccccgccacccccgccccacccgcaccacggcagcgggggcatcagcccgccgccacccatcaccccaccctccatgggggtgactgtggccggggcctacccagcggggccccacacgcaccccgggctgctcagggggggagcgggtgggctggggatcatggggctgcctcctctgccagcccccggcgagccttgcccgttggctcaggaggaggtgattgagatcaaccgggcaggtgagcctgggcgtcagggatcgggggcacaggtggagacccggggaggactggggaggtagctgccggggttcagagaacctggggtggtt

SEQ ID NO: 92234 - DNA, 1834 bp, Homo sapiens
gggctggaggtttggctcccaagaagcgaggaaatgggttcggaactcttctgccaagtcccagtagatctacccggtaaacttccggtgagtttccaacttccgtgcggggcagcagcttcggctggtcctaagcggaccggaagttcgtcaagtttcacgctccgcccctcttccggacgtgacgcaagggcggggttgccggaagaagtggcgaagttacttttgagggtatttgagtagcggcggtgtgtcaggggctaaagaggaggacgaagaaaagcagagcaagggaacccaggtaggtgcacccgagagtggggagacgcaggaggagccccgaacccggggcttctcggcgctccccgcgtactccgctctgcccccttctctccttccatttcctcccctcggtaattcgcgcctcccgcggctgtttccagggcaacaggagtagttcactccgcgagaggccgtccacgagacccccgcgcgcagccatgagccccgccccccgctgttgcttggagaggggcgggacctggagagaggtgcgagggcggagcatgaatggaggaggcggggcggggcatgatgggaggtgatggggcgggacctgcagcgcggtgcgggggcggggcatgaagggaggaggcggggctgggggcggggcatgatgggaggagatgtggcggggcctggagcgaggttgtgggggtgcagtaggaagggaggaggcggggcgggggcggggcatgatgggaggggatggggacctggagcgaggttgtgggggtgaggcttggagggagggatgcatatggggcggggcaaggtgttgggaggcccatgatgggggctttaggggctgaacctggaaggttgagggcggagcatagtaggaggaggtggggtcagaatgagaaatagggatgcttggggcagaagtgaggtagagtcttaagaagaggaggtggggggaaactacatggcatggaggccgtgaaggcagagcatgattaaaggagaatgggccctacctagaaaaagcaggtggattggacctgagggggcggggcctacagcaggggcggggcttaagaccaagctgaaggctggcgtggaacagaagggggcaggtcttgttagaaggatggggagggtttgtaggctggcaggaaccagggttgtggctgagagtagggtctttggagagatggaaaaaaaagggaaagccctgtcaggacctgtaactgacctaacctaacccttcttagccccacaaggctctcaatcccctgtattctacaggctgctccgtgaccccaccatgtcctctcctaccacgagttccctggatacccccctgcctggtgagtgactctcttccccacccagcccttatcacacacgagcagaagctcactgtacctctcccggattccaccctcttccaggaaatggcccccctcagcctggcgccccttcttcttcacccactgtaaaggaggagggtccggagccgtggcccgggggtccggaccctgatgtcccaggcactgatgaggccagctcagcctgcagcacagactggggtgagacagggccctggagttgatgtgggggcttggggaggggtttaggaagggagaaagaaatagaaatgggaatgggaggccctgatctttgctttttgttcttgctttctccttaacatatacatctttctaaattgcaatttccctgaatgtgagcagcaactcctctctccctccatcctctggctctttgcctggggatctcctgtgggcccatctctctggttcctgtttct

SEQ ID NO: 92235 - DNA, 1035 bp, Homo sapiens
actgggagccaggtctagtccaagcacagaggcgggccccacgctggctcccacgcctggtcggggaggggccctcctttctgttggggtgggcctcccaaagcctggcagggcaggggctcagccagcgcccacctgcctcctccctcaggaccagctgcgcttcccgcgcatgctcatgaagctggtgagcctgcgcacgctgagctctgtgcactcggagcaggtcttcgccttgcggctccaggacaagaagctgccgcctctgctgtcggagatctgggacgtccacgagtgaggggctggccacccagccccacagccttgcctgaccaccctccagcagatagacgccggcaccccttcctcttcctagggtggaaggggccctgggccgagcctgtagacctatcggctctcatcccttgggataagccccagtccaggtccaggaggctccctccctgcccagcgagtcttccagaaggggtgaaagggttgcaggtcccgaccactgacccttcccggctgccctccctccccagcttacacctcaagcccagcacgcagtgcaccttgaacagagggaggggaggacccatggctctcccccctagcccgggagaccagggccttcctcttcctctgcttttatttaataaaaactaaaaacagaaacaggaaaataaaatatgaatacaatccagcccggagctggagtgcaagatggagagggcgcgggcttctagggacctcagtgacactgggtgcccgaacctgattgagcaggtgggactgggtgtccccaggctgttgggaaaagggtggcacatagggtcccagtgttgggtggtgtgtcgcctgctgtgaaagttcaggacagaggcctcagcctcagggtcacctccctggacaaggtgaatcagaactcacccttgaaggataaacaggatttaagtgaatgaggggacctggacttctgtccgaacaacaagtgtttgctgaggcctcctgtgggccaggcactgggttggc

SEQ ID NO: 92236 - DNA, 1031 bp, Homo sapiens
tgaggggcaggagtcaggcccctgcatcctcctgcctcgcaggcatcttccctgagcctgagcgggaccctgtcatccagatctgctcgctgggcctgcgctggggggagccggagcccttcctacgcctggcgctcaccctgcggccctgtgcccccatcctgggtgccaaggtgcagagctacgagaaggaggaggacctgctgcaggtagctctcgctccacgccccacaccatttcccggggtccccgccagcctccgcgtcctgagccatcagctcctgggtgctgcgacgcccatgtctgtgggtctgggtgggtgtctgtgggtctgggtgggcccctgtgcaattaggcttgagcacttcccctctgggttctgcaggattttcaggggtggctggggttctagaacattctggaagtaggggaatccgaggcagggcaaccaccagggtgacccaatgtgctcccacccccaggcctggtccaccttcatccgtatcatggaccccgacgtgatcaccggttacaacatccagaacttcgaccttccgtacctcatctctcgggcccagaccctcaaggtgagggctgggcaggtgggaggcttctctcagatgccccaggtgtggcctccgggccctgggcctccttcccactccctctccacatggcttggtgcatcttgctctgtgtgcctcagccgattgcctgcaggggcagcctaggcctggtcctgccctgctccaagtcgaaaaagttactgtggcttttatcagaggcaaggagggcgttacggtggagtaagagaaggctgtgcattcaaggtcggcctgaagcttgcaggggttcaacaagccatgaagcagccactgaatcccagtcttcctttaggttatatcagcataaggaaaagaatcataatggaggaggaggggggagtgtgttgactgatggggcaaattccggatgcttcttgagtctgcatgtgtgtaagggtggattcctctgcccgagttgctgtaaca

SEQ ID NO: 92237 - DNA, 1336 bp, Homo sapiens
tgccttattttcctgcttttctctatgtctggccagcttggtaatggaaaaacaaaacaggctgggtgtggtggctcacgcctctaatcccagcactttgggaggatgaggcgagaggatcgatggagcccaggagttcaagaccagccagggcaacatagcaagaccctgcctctattaaagagaaaacaagaaaaaatccattctaaaatacagaacaaactcttaggacccccagtgtatattccacagcgtggcgctgatgcccgggccatggtactcctcctccccttccctgggtgtccctcaccctctgccctgtccccagctcaggcttcttctggcctcagtctcccccaggctgggccccagcaccctgcaaggcctcctgcagccaggcgccctccagcgccctcagcatccatctcagcccagctccacgccgcctcctgcctctgcccccacctggccgcctgctcacagtgtccccaaatctcttcctgtttcctgcctaggtacagcccgcagacactgggctccatccttggcccccagtccatcagggcccctgactctcgctatcccagccttggctgcagcttagtccttactccggactccctccccagtctccagccacccacacccagccccagaccgtctttctgcccccagggttgctctcgaccccctagggttgttataaggatgttgtggttggtctcaatctccgttcttcaggcttatgtgacggggacccgcagcctgctgcacaccctgcctctcctcctcaggtacaaacattccctttcctgggccgtgtggccggcctttgctccaacatccgggactcttcattccagtccaagcagacgggccggcgggacaccaaggttgtcagcatggtgggccgcgtgcagatggacatgctgcaggtatgggcgggaggtggggtgtgtccctgtccttggaaggccactgcccaggcccgcagcccaccagcccacccacccacctaggtgctgctgcgggagtacaagctccgctcctacacgctcaatgccgtgagcttccacttcctgggcgagcagaaggaggacgtgcagcacagcatcatcaccgacctgcaggtgcctgctgcctccctgacctctcaccccaacctctgacctccacctcacccttccccggcctctgacctcaacttcacgcccccacgtctgacctcactctttgacctgctgttatgacctgtgaccttacctgacgcccactttttcctgacctctgaccccagatttctctccactcctgtgacctctgtcactatgacctt

SEQ ID NO: 92238 - DNA, 1051 bp, Homo sapiens
cggcgatcctcccgccttggcctcctgagccgccacgcccagttctcacactgtactgtttccccgtggcttaacgctctctcgtgccaggccttggacttggagcctcgcagagtggggaggtctctgcctcagggctcacccagccgtagtttctcctctctttcatgggatgcttcatcgactcgcctgtctggatctcatgttttagggactatctggatttatcccagtctctgtttcagattggggtctctggtgtgggggctctggcattgccgaggggcctcaggagccacttccagccatacagtgtctcggtccatcccaccaggctcagggcacggctcccatgtcctcaaactgcgtctgggaccctgtctaccttcagtttctggggggcgtctccagattggggcttggcctcctcaggctcagggtcttggccatggctccctcccaggtctacttcccatacctgcttatcagcaagaagcgctacgcgggcctgctcttctcctcccggcccgacgcccacgaccgcatggactgcaagggcctggaggccgtgcgcagggacaactgccccctcgtggccaacctggtcactgcctcactgcgccgcctgctcatcgaccggtgtgtggggcctcctccctcagactcagggggctgggccccaaacccctcctccctcagacccaggagtctaggccccagcccctcctccctcagacccacgggtccaggcccccagccccctcctcctcagatcccggggtcagggcccccagccccttcctctcttagatacaagagtccagacccccagcccctcctcctctgggaacacaggtgtcaggcccagctcttcctcggtggtgaagcagtggaaagagtcggcttgggcagctgtgggttcaggccctgcctctgccactctgcagcctatggtaggaagggcccctctctgccctgagcctcagccctaagagctcatcctggtctccagccctgagacccgtggaggcaccagcctggccctcagtgc

SEQ ID NO: 92239 - DNA, 1144 bp, Homo sapiens
tagtgacgtaggggacctgggcgccctccccttacgcgacctcccctcatgccggtccccaccgtgggtgggtgatgcccacactcacctccttcccctctctctctctttctgtgtctgtctgtccatccttccgtccggctgcagtggatgtacatcattcccgtcgtcctgttcctcatgatgtcaggagcgccagacaccgggggccagggtgggggtgggggtgggggtggtggtgggggtagtggccggtgagggcccaggctggtcagcgtcccgtcttgcacacccaggggcctccctttctgctggagtcccctgtgtcctcagccatcccaagaagggtttgctggtccctcctttccccccgtcccacgaggccacctgggccagccccttgtcctctgccttctgctggcagaggagcagctggactggggcctttggcacagcagccggtgtctcctgcgcccgcctcccccatggccccatgcagccccaggggcttcccccctgcccatggagtagagcccgagatcctggccactatgccagttctgacctcgcatccccctaccccgagcccatgcagtctgggaacatgccgccttctctccagcctctgtgcctttgttccaggtggtctcaccctcctgtccctggctgggctaggtggtcctgtccaggctcctgcagcgcccccctcactttgacactggactaggatgcagcctcccttctgtgtccccttgagggtaccctgggtcccctcatcaggggcagaggcatgaaagagtcggggctggatggccgggggcttctgggcccgacgcctagtgcagcccctggggtcgtggtttgacatttgtctgcctggtgcaaacaaggaatccttgcctttaaggtgacaggccctccacaggcttccagacttgaaggaaaaggtttaagaaagaaaacaaaaccaacagttagtggagtcaaagcccagacactgtaaatagaaccccctccaccaccccccgccgcccagcatcctacctggactgcggtgctacgagggcctgcgggcctttgctgtgtgccaccctccctgtaagtctatttaaaaacatcgacgatacattgaaatgtgtgaacg

SEQ ID NO: 92240 - DNA, 1162 bp, Homo sapiens
tatttttagtagagaccgggtttcaccatgttggccaggctggtcttgaactcctgacctcaagcgatccaccttagtctcctaaagtgctgggattacatgtgtgagccaccgcccctggcctctgtaggcttctttaacccatcagagagactccctggtaaggattaggggctaattactggtgcctcttcagctgtcagtccatcctcctttatttgtacccaccttccagtcagcaaggcacaacaatgttgttacaaaggaaacaaactcaatttggcccatttcctggaaatgcaatctcccaaacaggtttgtgtgaaccaaattccattttcctttgtttcccatgtgcagtcccagttgcatttccatgggagccaatccacccacccatagaatgacttgaaaatgtgtgaagttcagaagtttcataccaagaagtttgctgagcatgatgtttgtatattgattaggagtaaaaatgttcatttttacaaaatattacaacttctccctctcccctccttccacccagtatcccctgttcctcccccaggcattctggtcactgttcctttttgttgagatcattctcggtgtctcatatagctgggttgcagctccgttctttgccaggaggtggtaatagaggattccacgcactcagaatgcctcaggccggcgcctgtggcttctctcaatggagggaagtgtcctgcagggggcgctgttggtccttcaggcaaggtcgggttccctcgaagtctctgtcttagcagttgctggtcttcagaaacattgggcaccaattttctcatttctgaaatggaattcaggtgaggtcccctcagtgctgaggtgcttcatgttgtcagaggaagagttgggaagggagcggaatggagcagaaaggcgtcatccgctgctcactgagctcagataggaggccagggatcggcagattcaggagcccactcctggccaaccccaggggccccacccagtcctgtccctgctccttacgtgctgtgtatctttaggcaagttgcttcctgtctctgagcgtcgtctttgtttccgccttcctgggcctacggcaggcctgattcctccaggcagtgtccagagttccggacagatggaaaaggaagagaga

SEQ ID NO: 92241 - DNA, 1036 bp, Homo sapiens
ctggatctctgggtggtgatggagctacaggaggtcgtggtgcagttctctgccattgctgacccctcctttcctgctccatcgtgcaggtctggcctaggcccgggatcggaccaggctccctcaggaccccatcctttcctgcccggaccgtgaattcatctccttgaagccataacgtccgagctgctggtgcggggcagccctggccctaggcttcctaaccctggaagcgagaggatgagaggaggccggcccagctccttctttcagggtgggggtcattcagcctccactgtgtctgtcttttcttccctggggctccccctcgaggcgaggggccatgcatgtctgggggacccctgccccccaaaaccctctgtctgtctctgtctctttgctgtttgtccaagactcagtgtcccgacccttgttctcgccgtgaatgtcaatgggccaatcctctctgtcctttcagacacacacacacctgtgtccaccccttctgttcgccacacccctgcgtctggccggtccccccactgctgctgctatcaacgccagaataaacacactctgtgggtctcactccaactgggcctcctgtcctctctgagactgggaaaccggattggaacatgctggctctgcaagcagacaaatttgtgtttctttcaatgactgggcaacttaatgatctctctgagcctcagtttataaaaatggtgttagtcaggatcattgtgagtacagaacacaaaattcaacccaaagccataaacagaattgaaagacctctgtccatggaaagcctatgaacacattgaacacagagggacttcaggctgttcaagggactctcacttctgctttcctctttttttttttggatggagtttcactcttgttgcccaggctggagtgcagtggtgtgatctcggctcactgcaacctcgcggtttcaagcaattctcctgcctcggcctcctgagtagctgggattacagccgctcgccaccacgcctggctaattttt

SEQ ID NO: 92242 - DNA, 1038 bp, Homo sapiens
gccccttgtccgccctagaacccccatgggctgccgcccgccgccgcctcggctgccacccaggacacggcagagataagcgcaggtgagtgtggccatgcctgtcttggagtcctggccttctgcagcacccccacgacacctgtccatctgtgagccctggtctgtctgttcctaattcccctgcatccccttcaacccatcttgatgcctggctccgagccatgtgtcactaattccccctctccccacatccacctctccttcctagcctcctctcatttatgtgctcattgaaccttcccttatgaacccatgtctgtctgcccagccctcctgtctccttttgtctatctgcgatctctagccatcatctgctgtccttgcccacccatccatcctcccgttcgaccgtttctctttcaaagatatttctgcccacactcctgcctgcccctcttcaccgtctctcgtcctctcgtctctcaagcccccgtgaattaattacatctcggttcattccttgtcactgtccatcccaagtctcaatccttgactttccttctgcctgcctgttcacctctccatctcttcggagcctcagtctgcccttcacattatctctgtctcccctccctgtatctctccctccctcaacttggtccccatctctgcatctccacctctccacccccagctcccaccatacctatccacctccaatctctctacccacatccatccttctctcctggccctccccgcgtctaccccagtctggcctccttggtccctggaccctccaactgctttcctaccctaagcccctgtcatcctgctcctactgtctaaaatgcttttctttaaaatgcttttcccatcctggcgccactgccccccgcctgtggctggctccatgtcatccttcaggtttgggagagccctccctgaccgcccccctctgagttcctttgtgacacattctccagctgtgtcctgtggagcgcttctcacagacagtctgacagtgaccggttt

SEQ ID NO: 92243 - DNA, 1072 bp, Homo sapiens
cttcgggaggccaaggtgggcagatcacctgaggtcaggagttcgaaaccagcctggccaacatggtgaaattccacctctactaaaaatacaaaaattagctgggagtggcggcatgtacctgtcatcccagctatacaggaggctgaggcaggagaatcacttgaacccgggaggcggaggttgcagtgagccgagattgtgccactgcactccagcctgggtgatagagcaacactcggtctcaaaaaaaaaaaaaaaaaaaaaaaattaaccaggcatagtagcacatgcctgtcatcttagttacttgggaggctgaggtgggaggatcacctgagtgcaagagttcaaggcttcattgagctatgattgtgccactgcactccagcctggatgacagagtgagactgcgtcattaaagaaacagaccaaccaaaaagacaagtgtaaatttcaattaattaaaattaatttgtaaaattcaatttctctgttgcactggccacatttgaagtattcaacagttacctgtggctggtggctaccaaattggacagtatagatatggaacatttcatcatcacagagagctctattggttctagtccagagtttcctggggtctgtattacatgcctctcactacacttcccttcctgaattgggactgtctgtttctatgtttgtctcattgattcattcattccagaaatatttattgaggacttcctttatgccagggactgtgacagatactgcagatacgacaaattagacaaatgtcccagcccacaggaagggcaagcaggccataaacagcataaattcgtaaaatataacattggtcagatggaggtaagagggaggagagagggagaatgtaatttaaaatatgggctggtgccaggcgcggtggctcacacctttaatcccaacattttgggagttcaaggtgggtggatcatttgaggtcaggagtttgagaccagcctgaccaacatggtgaaaccccatctctactaaaaatacaaaaaaattagctaggcgtggtggtgcatgcctacggtcc

SEQ ID NO: 92244 - DNA, 1534 bp, Homo sapiens
cccgacgcacagctgctccagctaaacggcccctcccttctctccctcagatgctttcctgaagagcccctaatgcagtcagatgccagccacaaagatctgcagtatacccctggagttaacagatcctcttcatgtatctcccatgcacactcacccccaaacccacatcctgctcacacacgcccctcccagcctccagacctgcgctatccaagccagtagccactggccacctggggctgtttaaatttaaattaaatagaatgaagtaaaattaaaatttcagttcctcaggctcactagccacgttcaagtgctcaggggcccacacgtgcctgccatatagggtggtgcagttgcagaccatccccatgatgggggaaacgttctgttgggtggcactgctacaggctgtcctcacacgaggttgctgccaagactttctcctattaatgttcattattgccagccttccacacccagagctgtccttcaagtgggggcaggaagtggcctccagccccagtgaggccggcccgatccttgcccttacccaagcttacctgtcccctggcttcctgctgtgccccttctttgagatcctggacctaataacacctcccacttggtcagagaccctccagcatccagactctgtcctctcacttgtccccaacaacccacctgtaggaagtggaatgggtgggtactgtggcccctaatgtctttcaatggctcatccaagatcgcccccagggggaaggctgggtgggatgtcagagtgcaagtgtcctctggaggcatctacccaagtcccacattgttcacacggaatcagagtggcccagggagggaaagggccaggctcaaggttgcacaagggcatcacggcagaactgagactgtcattggccactgtaggtcacccaggacggtccagtccccctggcccttcagaatgagctggttaatgtgtgactgtcatctgtgtttttctactgggttctctctccgttcctaggcgctcctggaccttgggggttcccccaactacaaggaccgtcgggggctgacccctctgttccacacggccatggtgggtggtgacccccgatgctgcgagctgctcctgttcaacagggcccagctgggcatagctgatgagaacggctggcaggaaatccaccaggtgctcctgattcaggccatgaagggctggggtgggggacccagtccctgaggcatccaaggggctggggctgggaaccagatgccagggtcctcacagagcatgggggtgagaataacatggtccccaaagaggaaatggtgggggtgaaggcagaaagaccctaagggggcataggctggggaacctgatgccttgacccctgagagggatgggctgtcctcttgacccccttaaggaggcagaccagacgcctgggccttggaatgactgaacatttgggttttgaggctgacagcctgggtcccagagcaggaagcggggctaaaaggtgatggggag

SEQ ID NO: 92245 - DNA, 1068 bp, Homo sapiens
gagcagcgtgggccggggctcaccctggtctggacagaccagctcgaggacagtcttgcttctcggagccagctcaggcggccagacccagagctgcctctctctccacccgctccctccctcgccacacgtgggtccagccccctgaccttatcctcagccacgggcaccgtgtgcaccgggatcggcctccagcgggcctcggggctccctggagcagcctcgggaaacagcccggcaaggttggcctgggcactctccagcgtgcggtcaaagtccgtgctgcggatgtacacctggagcggggtggagagagggcacgcggggggtcgtggttggggacagaggtcagctgtcgtggcaaatcagaagcctcagattcactttggagtaggggtcagacactgagaatcatgtggccttcgaagttggaagttgggatcaagggtccagaggctaatgtcaggagcagttgggctggacgtcctaagctggacagccatgttggatttagggggtcaattgagtcaatgagggtcaaaaaggaagatcagaatcagtagaggctggaggttagaggtcaagtttaggagggcagcttggaggacttggagtcagagttcaatacatgttcttcagaggttaggaggactgtctgtagctgggggatgtcagaagacataggaggagacagaaaaggtaggtcagaattgataaagcgtagaggttaaaggttagaggtcaagagggcaagttacgtcaacaagggtcaaagatcgaaatcaagtttggggtcaaatgtcagaggccagaggtctgactggagtcaatgggacttagaaaacagagatggaggccagaaaataaagtcagagttgatggaggtcagaggtcgagatgtgacaggttgagatggggtcagaagtcagtgtgggttagtcagtgtatcgggggtcagagattagaggtagagggcaagtcaggttgatggaggtcaaaggccagaggtggaggcccaaagagagcgttgtagtcagtggaggtcacaggtgggaggtcagggggcca

SEQ ID NO: 92246 - DNA, 2436 bp, Homo sapiens
agtttaaacaaggacccccctcttcctacaaagcatatttctatgcaaaatggggcttttggtgtttctgaggttgttaaacagcagcacccactgagcgagcacccacagtgttagtgcttttgcggagaataaactgaacttatcctgccagggtcccagtgagaggcagctgccccttccccatgtcacagaaggttctggtgaagtcagagcagcttagaagagctgggccgggggcagcagaggcgattgaggggtatcccgttaggcatgggaggcccaagcagaagggtttggccccgtcctctcactgaaccccacagatgtgcctgtctgcaggcatctctagtcccgttttccagagaaacactgctgctggggggcggggaggggtgaggtcagtgggcctagatcatacaaggagccatacccaggctgagctggatggggaggggaggtagcctggcacccccagggaccaagtgtcattcagtttgttgcctgatctctcagcactcttctgtgatgtcccccttaggacagtaggtggtcctgggacccacatcaggagggggtgagggcaccggggcctccatgatgtccagcactgggctccgactgccactgaggacacggtgccccccgggacctttgacacccgggggtctgaggggccctggctctggggagggctggtgggtatcttggctgccctgcaccccactgaccttctcccctcccctgtgccctcctgcctccaggtgctgaagggcctgaccatcactcattaagaacagaggaggctgcctgttactcctggtgttggtgagaaggcagatgtagacaggtgcccagcaagtgctgagccaggcgctgccctaagcactgggctcattaaccttagtaaccctgttggggggcggaggtgggatgggggctggggctgggttgcagtgagatgtccagtgtccagggttcttgaaagggctgcacttggggaccccgtgatgtccagcactgggctctgactgcccctgaggacacggtgcaccccgggacctttgacatccggggttctgaggggccccactccgggaggtgatggtgggggtgtggctgtttcccccattcgtgccttttctgtgtccttcccctgacagcatccctccagacactctgctgtttcctgcctaggcgtggctgcagccatggctaggaaagcgctgccacccacccacctgggccagagctggttctgctcctgctgcagggacactgagctggctatctcggcgcttcgggcaagaactgcaacaggctctcctgggtcctgcaggtgtacagccgggcccctgccttgtgcctcagctctcgagagctgctgctgccgggtgacctgatccaacctgataaggtgccatcttcagctaccactgcaaggccctgagggcaacagcagcacggcactgcccacccggctgctgatggcctggtgccagctgggagtcctcccggcacttcgaggccactgagccacccttccagccccagcccaccatggacaggggtatccagcttcctcctcaacctcgtcctctgcccctgagccagtgacgcccaaggacatgcctgttacccaggtcctgtaccagcactagctggtcaagggcatgacagtgctggaggccgtcttggagatccaggccatcactggcagcaggctgctctccatggtgccagggcccgccaggccaccaggctcatgctgggacccaacccagtgcacaaggacttggctgctgagccacacacccaggagaaggtggataagtgggctaccaagggcttcctgcaggctaggggaggagccacccccgcttccctattgtgaccaggcctatggggaggagctgtccatacgccaccgtgagacctgggcctggctctcaaggacagacaccgcctggcctggtgctccaggggtgaagcaggccagaatcctgggggagctgctcctggtttgagctgcattcaggaagtgcgggacatggtaggggaggcaaaaagccttgggcactaccctccctgtggagctgttcggtgtccgtcgagctagccacaccctgacaccatgttcaagggtaccggaagagaagggtgtctgcccccaacctcccctgtgggtgtcactggccagatgtcatgagggaagcaggccttgtgagtggacactgaccatgagtccctggggggagtgatcccccaggcatcgtgtgccatgttgcacttctgcccaggcagcagggtgggtgggtaccatgggtgcccacccctccaccacatggggccccaaagcactgcaggccaagcagggcaaccccacacccttgacataaaagcatcttgaagcttttactccgtttttataaggat

SEQ ID NO: 92247 - DNA, 1002 bp, Homo sapiens
gtgaggcagaggttgcagtgagccgagattgtgccactgcactccagcctgggcaacagagcaagactgtgtctcaaaaaaaaaaaaaaatttagccaggcgtggtggcacatgcctgtaatcccagctattcaggaagctaaggcaggagaatcacttgaacccgggaagcagaggttgcagtgagccaagattgtaccattgcacttcagcctggacaacaagagtgaaactcccatctcaaaaaaaaaaacacccatctcacaactatggaaaacttggcaggcaggcctgggtccaaaccccagctctgctgtttacaggcttggagacattcaccaggccatcactcttttgcgcctcactgctgtgtctgtggaacaggcaccgagcaaatggcccggggcactagcgcttcccgccttctgaaggtggggcttgaataagaagaggaatgcgtggactggagggaacaagcatttgcgtttcaggggaaagaactaatcaaacatgtcaaaactcagcagtggaaaagagacagtaactaccaggtgattctgtcacgttacttcatgggttttgtaggctgaatgcaatgtgtctttaagcacagcttagcctgcagtgaaccgtttatatataaactgatagaattcagggaactcctattttcacaataaaaataacaggctttatcaggagaattgtttcaaagagcaaaatcagacaagcatgagtgtgtgttatcagaaaagagacaggtgttctcagctctgggaagattttcatttgttccttaggtgtcaggagctggaaccgtggctgcagcgaaatagaactgaaagtgtgttctccgggttcttggaggtttcagctatttctggcagggaagctggcttttgggcagggttggctgggattgcagttcccctgagtatctttctgagggtcctgtgcttttttttttttttttttttttgagagggagtcttgctctgtcgc

SEQ ID NO: 92248 - DNA, 1134 bp, Homo sapiens
ggtcctacccatcccatgaggacagtcccccgaggacctgtgacactggggaggttggggcatcttggtgtctccatgagcaaaactggtcattcctaccttctggatgagttttgcatttcctactctttttgagacaagtcttgctctgtcgcccaggttggagtgcagtggcacgacttggctcactgcaacctccgcctcctgggttcaagcaattctcctgcctcagcctcccgagtagctgagattacaggcattctccaccacgcctggctaattttgtattttcaatagagacagggtttcaccatattggccaggctggtctcgaactcctgacttcgtgatctgcccacctcggcttcccaaagtgctgaggttgcaggcgtgagccaccgtgcccggccgcgtttcctactctttaagctctgttagcttggcctctgtccctgaaggtaagtggcctcaggacctggttgcagaggggctggggctcccatgatgtccagcactgggctctgatcacccctgaggacacagtgcaccccaggacctttgacacctgggggtctgaggggccccagttttaatggcttgtggacttgcagactgtttcctcccccactctcactgtgtctttctgtgttacaggtgcagcttcaagcttaggaccacccaccatgcctatccaggtaagaacccttgctcctgctccttcactcacctgggtttaaaatatctcactgtctaggttgacttcataccgtacctctagaaactgattgatgtgccaatgattgtactcagtgtttacatacaaaaaccatctcaggctgggcgcagtggcttacacctgtaattccagcactttgggaggctgaggtaggtggattacctgaggtcaggagttcgagaccagcccagccaacatggtgaaaccccgtctctactaaaaatacaaaaaattaggccgggcacagtggctcacgcctgtaatcccagcactttgggaagccgaggcaggtggatcatgaggtcaggggttcaagaccagcctgaccaacatggtgaaaacccccatctctactaaaaatacaaaaaatagctgggcgtggtggcgggtgcctgtaa

SEQ ID NO: 92249 - DNA, 1013 bp, Homo sapiens
gccgccctcggggtcctttctcttcacggcccatctttgatgctgtcttcagaattgccggacgcaggggacaagacaatcgtttccatcatatccttgcccctttttgtcagccccagagacagcgtctcctcgcttgttcaggaagattctagcggaagcaggcagtattcctttccctaagcatgaaatggggtttcccaaacaggcgtgtgtattggacgcctcgggcggagcgcgggctggcgccgaggaccggccttgcgagcggcgcgcactataaaatggcgcgtgctgcaacccgcgcccgcttcggagagagaaatgctggggtgaggttcttaagtttattactttttccggctgtgtggaaagacgcacgtgtcctgaagggttcgaggctgcgacgggagcggccatgtagtcgcgtggaaagggtcagggcgtttgcaaggacccagagagcgccctccggggcgagcctgggagttttctgcggggatggtggtggctgtttgggccgcctgggagtttgcgactcctatagctggcgcgagcggggatgctggggcggacccccctccgtctgccccgcggcggagctcgccccttgtgctgcccgcacgccgcgggcctccgccatcttgtcgatttggttgggggagaggggtgggcgggctgggaggcgacattgagttctttccgagtgtttccattttcgtgctacctacaggtgcttccttaggaattctctcttgcttttaaaattctggatggctggcatttttgtgcaacctagaacaaagactgggggacgggagagggttttggggggttccatgggggcacagatagggtatcgagttaccaaagaagtgagagtgaagtttctaggtgaattgccgggtttgagagtcgtgtaggaatggatatagaaggaagcaaacgaggcctttgcttacctgcgggagtcgttctgaccgttcatgccacgtgagagggttttgttaacg

SEQ ID NO: 92250 - DNA, 1064 bp, Homo sapiens
tgagttttaggttaagtaggggtgatttgggacaactctaagggtgtgactgggggatgactttaggggtccctgggggtgaccttgtgagtgagattggagtttctttggggtttctaggaggtgactttggggaggtgagtaggggtgattttgaggatgtgccagactttggggttgtctgttgggctgcttgtgggtatcagcagagatgactttggagggtgaccaagaggggtatctggggttgactctggggcccctgtccccctctccccagttctcatccatatgagcaagggcttcatgttactggccgtggccctgtgctgagtcctcctcccgcccatggccctctcctcctggccagtggtcctccgcctgaacatggccgactttgtcttcagtttcctctgcctcggcattggtaggtgttggcttggggggcgggggccctccctaaccccagccctgctctctggctttctggaggtgtatctagacttccgtgctgctcccctcggggcctctgtcttagcatgtctctggggagctctgactcagttctactctatctgtgggatgtctctctctcccccactctctgtttccctttctttttttgtcccctctctccaggtatctttctgtctgttgtgagggcgtgtgtgtgtgtgtgtgtgtgtgtgtgtgtgtgtctgcttgtcacggagggtgggagaggatgtctcagtccctcttttcttactgggggtcatagggctcactgtccagccttctgtctctggccccaccccattgcagggctcctgatttctcttcagcctgacgctcttttcagttaacggcaaggcggtgcacccaagtccggtggtgtcctacctggtgacctcctacctgtgctgggacgccagcgacttgatgctgcactccggtgagggcggggcctcgggaggagggcggggcctcgggaagcgggtggggcctagggtgggactcggagtacagcggcccacctagccatctcccaggagccgtgtcctacctaagcccagtgggcatgt

SEQ ID NO: 92251 - DNA, 1055 bp, Homo sapiens
cccagctgcagctgagccgctctcaggcctcccctcctccctacctgcccccaccctccccacctgcccccaccctcccccagggcctccctcccttttctctcccacactcggtcactcctgcttcctctctgcctctgtttctagttctcactctgacgtcccgcgtcctttttcatttgtctgcttctcgctcccttccgtgttctgttccctcttcctccctcttccctgggcctgtttctcgctgtccctgtcttttatccttctcatctgcctcttttttgctcaccctgtttctcactgccctcccctccgcctttttcacccctctgtccttttgagctcttttttgctctgtctcttcatttgccttttgcactctcaaaatctttcatcttcccattcgctgtctgtatttctccataactatatctttcttcctctgtctccgcccacccacatttttctctttccctttctctctttggggaccctcccccatgctcccctgccccatccccttttccccttcccgtcttctcatccctccattcccatctttccccagcaattaccagctctggctgggtcgccacaacttgtttgacgacgaaaacacagcccagtttgttcatgtcagtgagagcttcccacaccctggcttcaacatgagcctcctggagaaccacacccgccaagcagacgaggactacagccacgacctcatgctgctccgcctgacagagcctgctgataccatcacagatgctgtgaaggtcgtggagttgcccaccgaggaacccgaagtggggagcacctgtttggcttccggctggggcagcatcgaaccagagaattgtatgtgggggcagactgtgtagcccaaggcggggatggggactcctgcgtccaagggagaaagggccagggaagcaggtgaggtcgggctgcagccctttttctcccgggttcgtagtctcatttccagatgatctccagtgtgtggacctcaaaatcctgcctaatgatgagtgcaaaaaagcccacgtcca

SEQ ID NO: 92252 - DNA, 1034 bp, Homo sapiens
ccctcctctctctctggtctctgtccctctctctctgggtctctgtcaccctctctctctgggtctctgtcaccctctctctctggtctctgttccccctcctctctctgtgggtctctgtccctctctctctgggtctctgttcccctctctctctggtctctgttccccctcctctctctctggatctctgtccccctctccctggggctctgtccccctctctccctggctctctgtcttcctctctctggggctctgtccccctctctctctggtctctgttcccctctctctgggtctctgtccctctctctctgggtctctgtccctctctctctggatctctgtccccctctctctctgggtctctgttcccctctctctgggtctctgtcccctctcctctctctgtgtctctctcccccctcctctctctgtgtctctgtcccccctcctatctctgtgtctctctcccccctcctctctctgggtctctgtccccccctctctgggtctctgtctccctctctctggggctctgtccccctctctctctggatctctgttcccctctctctgggtctctgtctcccctcctctctctgtgtctctgtcccccctcctctctctgggtctctgtccccaccccgtcccccaggtctttgcacaccctctctgtcacagtgtctcttctgaatctgtgaatgtcactcctcgcagtgagtacaccgtgcacctgggcagtgatacgctgggcgacaggagagctcagaggatcaaggcctcgaagtcattccgccaccccggctactccacacagacccatgttaatgacctcatgctcgtgaagctcaatagccaggccaggctgtcatccatggtgaagaaagtcaggctgccctcccgctgcgaaccccctggaaccacctgtactgtctccggctggggcactaccacgagcccagatggtaggtggcctcagtgacccaggagtgcaggccccagccctcctccctcagacccaggagtcc

SEQ ID NO: 92253 - DNA, 1107 bp, Homo sapiens
gggtctgagtggggaggggctgggcctgaatgctttctccttctcagctccagcaggagaggcccttcctcgcctggcagcccctgagcggctcagcagggcaccatggcaagatcccttctcctgcccctgcagatcttactgctatccttagccttggaaactgcaggagaagaaggtgaaagctggactgggaagtctgacctcacctcagggcccccactgaccctctccaaggagtccctgagtcagaacccttccctcctcaaacagcttccatcctgggaggaccagactgtcggctgaagcccccgctcttcctgcttctgctgactcagggggtctctgtcccctccaggccctgcctcctgtgctcagggtctctctgtggttccccagatgagatgcgcctcctgggtttctgagtgggctccttctgtctgtctctatccctatctcttgctttctctgtatttctccacacattttcatctgtctctgtccatctctgactctgggaatccctgaggtgcagcctcagccttcccctaatgctagctacccacgtgctcctccatgtctccatccagcccagggtgacaagattattgatggcgccccatgtgcaagaggctcccacccatggcaggtggccctgctcagtggcaatcagctccactgcggaggcgtcctggtcaatgagcgctgggtgctcactgccgcccactgcaagatgaagtaggtgccgcccaagtctctgctggaggtgcaccagcgtctccagctcgctatgggggtggaagggcagtctttctgtgcctacggctctattctcctctctctgggtctctgtcctcctctctctgggcctctgtaccccctctccctggggctctgtccccctctctccctggctctctgtctccctctctctgggtctctgtccccctctctctggatctctgttcccctctctctgtgtctctgtcccccattctctctaggtctctgttccccctcctctctctctgggtctctgtccctctctctctggtctctgtccccctctctctctggatctctgtccccctctccctgggcctctgt

SEQ ID NO: 92254 - DNA, 1027 bp, Homo sapiens
ggtggcgatccaaccctctccctcctgctgcaggacactccagggcacaggaggacaaggtgctggggggtcatgagtgccaaccccattcgcagccttggcaggcggccttgttccagggccagcaactactctgtggcggtgtccttgtaggtggcaactgggtccttacagctgcccactgtaaaaaaccgtgagtggatgatgggggcagaggtcagctggggcttaaggaaagagggggctggggtttcgactcaggaaggagagagctgaggactggactcctgggtctgaaggaggagggggctgggggcaatacccctgcctgggtcccaaactatccccaccattacaggaaatacacagtacgcctgggagaccacagcctacagaataaagatggcccagagcaagaaatacctgtggttcagtccatcccacacccctgctacaacagcagcgatgtggaggaccacaaccatgatctgatgcttcttcaactgcgtgaccaggcatccctggggtccaaagtgaagcccatcagcctggcagatcattgcacccagcctggccagaagtgcaccgtctcaggctggggcactgtcaccagtccccgaggtagtgggcttgtccactaatgggagggagaggaggagctggttggcccagtggaacccaagctattggcaaagcttggtcccccagagggagacaaagaagggaaagtgatcatgatgttgagattcacaagcaggagtcatatgagaagcctcgaagatctgactactaacaagagtggtgagagaaagaaccaactagcagattgttaagcagggccagaaaagcccatcctgtatggcggagagcactaccctatgggacctttggttgtataggattttatataatcttaacacacttgggatatttggacttctcagaggcccaggaaaacaggctcctaagcaccttctcccccacctccctccttttttttttttttttttttttttttttttttttt

SEQ ID NO: 92255 - DNA, 1041 bp, Homo sapiens
tggcttctatccgttgcaggcaaccacctcctcctagagctcaaggagaatcagcgggagaggagtgacgggcccagaaatgcggaaaaggaccacaccgccccctggcggccacagcgcaagcccggtctctcctcctgctggaaggacaccggggaccgcacctccagctgtgggagttccgagagaccccgccctgcccgctcctccctggaggccgcctccacagccccccgtggcgtcctcggggatggatctcctcctacttgtttccgcagtgcgcggccgtcagcacccaactctggtccaccaggacacccgcgcagtggaacgagaggccgttgaagagcgagacctgccagggctgcgagccgcgcgcgcacggggagccataggcttcggggtccaagcgcgtgtcgttttgggggagcagcgccgcctctgcggctggagaaagaaaggggacggaatcaaagcacggagggcagggtctgggtttggggttggagctgggctgtggcactggactgcgttcggggacgggggacgcagccagaacgcgagggtggtagggaaatattgggggtttcgcgtgcaccgaagggaatgggaggagaagaagcgcgtgaaagtggaaggaagctgggatagggtagcgtggagtaatgagacagaatagggtgggtctggagggcagggactgaacgcagcgcgcctggagagctggctagaacgtcgctggtcgatagaggggcggggattgaacgcggcggggaggtaagggtgcggggatagaactcggggatcggggagaggaaggggtgtgaataacaaaacgggattgaaaaccaggagaggggtggggcgcagtggtttacgcctgtaatcccagcactttgggaagccgaggcggttggaccgcttgagctcgggaattcaagaccagcccgggcaacacagcaagacccagtctctacaaaaacaaacaaacaacaacaacaacaacaaaaaagtagtcgcggaggcatgcgcctgtagtca

SEQ ID NO: 92256 - DNA, 1028 bp, Homo sapiens
aactcgtttttgagcctaaccccatcctttatcccacccataatcccagctttatcgctaaacctatcacctttcccagtgcctacccatcctgtctcggccccactcctaagcaccgtccccacctcctccctggctaacaccatgctcaacgctttctctgaccgacattctctctccccgtgcccagggtgactccgggggccctctggtctgtaaccagtctcttcaaggcattatctcctggggccaggatccgtgtgcgatcacccgaaagcctggtgtctacacgaaagtctgcaaatatgtggactggatccaggagacgatgaagaacaattagactggacccacccaccacagcccatcaccctccatttccacttggtgtttggttcctgttcactctgttaataagaaaccctaagccaagaccctctacgaacattctttgggcctcctggactacaggagatgctgtcacttaataatcaacctggggttcgaaatcagtgagacctggattcaaattctgccttgaaatattgtgactctgggaatgacaacacctggtttgttctctgttgtatccccagccccaaagacagctcctggccatatatcaaggtttcaataaatatttgctaaatgagtgaatctactgagtgcttactatgtgctagaccctgatccaatggcttttattttattttattttttgacagagtctcgctctgtcacccaggctggagtacagtggtgctatctctgctcactgcaacctccacctcctgggttcaagcaattctcctgcctcagcctcctgaatagctgggattacaggtgcctaccaccacatccggctaatttttgtattttttagtagagatggggcttcaccatgttggccaggctggtctcgaactcctgacctcagatgatctgccctccttggcctcccaaactcctgggattacagacgtgagccaccgcgcccgcccggctttcatttattaattaaaagaaat

SEQ ID NO: 92257 - DNA, 1080 bp, Homo sapiens
aaacgctatgacctccaatctcagatatgtgattttggatagaatcccaatttccatcctcagattttgaccagattgtacaacctctggatcccatgaccttaattctacggtgacctctaaccccagacccatgacccacaatgcccatatcctatacatacatatatatatatatatgccttttgctccagtgtgatgacctctgacacactctgacctctgacctctgatccctgacttcatacccagtcctttaacccctttggctcccaagaccccaatccaccataatctctgaccccaaaccatgatcctgatgtcccatcccacaccctgaccctttacccatccttcctctgaggtgtcatgattcgacctctcgccctgcatcccagacttgtacccatcctgacccctgacccctggccctgggccccttactccgtgggtggttggtgatgccccagcctgagacgtggcactcggtgccagcggttgcacagtcattgggcaggggcaggggttgaacgctgctggttacgcggacgggcaggcgcagccgcagcagccggaggtcgtgctcgtggctcgtcgaggctcccaggtagccgggatgggtcacagagaagccgctgtgccggatctgctcggtccagtcgagctggctgaggctgtgttcccccaggcgcacccagtacctgctgccggtggcgacggctgagcgggtggcaggcacgcagtcccccaccttgcacccctccacggacactcaggcgctcctgccgctccccactgttctgcccctcactgtctgtcctctcacccgcaactctcattctccgagtctctcttacaggctcttattcccaacctccatcaccctctttccatcttgggtgttccctgtttctcctaccatgtccctgcatctgtgtctctctctctccttttttttttttttttttttttcaagaccgagtctcgctctgtcgcccaggctggagtgcagtggcaccatcttggctcactacaacctccacctcccaggttcaagcaattcacctgcctcagcctccc

SEQ ID NO: 92258 - DNA, 1063 bp, Homo sapiens
tccgggagaactcaccaagaacacacaggagcaaaaagatgctgagccccatggtgggtcacttccaaagtctgggggaaaaggggaatctcagaggtcaccctttccctgtgccccccacctctgccctctctgcttctctttgaaggtcaccaaggggatgacctgcttgtcctctctctacctgctcccctgtgtgtcactccctcattggcagtcgcctacctccttctcaccttgtctctttgtctgccagatcctctacgtggctgtcactgtttggcctgtcctcgtcgctgctatctctccgtccacctacctgcctgtcttctcatgtgctggccactccgccagccaactctaccactctgcacctggctcctcagccacctgtcatgttgctcaaccggtccctttccttccatctgtcgctccagacagaccactgacaaagctcttaactctctttgtcctggcccatccagtttccgggttaagggaaggggaccacgaagacaggggtggggcgtgctctaattctgcagaaactcttctcagctaatcacacttaattgagctttacagctaaacggagtggggaaggaggaaaggacccagggtgggaagacccagccccactccctctctcctctgcaagcccgtcagcagccccaggactgatgactcaaggtgactagggagctgggttctaatcctgactccagtgacaaaggagggtggggagaccttggacacctggggcccatccccatgcagtgcaggggaggggcagggggaaggagaggctgtgaaagcaggagagtggacgggaggggcaggaagcccaagctagaaagagtcccagaaagagaagaagagttgaaggaacagacttccaaataggtgatcaggcaggggtagaagagagtttctgaactgagttcatatatgtacatatgaagtggatcaatctaattccataaagtttttctttgctaagaacttctattgcttaaataaaacccacagagagaaaaaaaaaagacacagggaaggagaaatg

SEQ ID NO: 92259 - DNA, 1031 bp, Homo sapiens
tggggtcaaagaggctggcaagggccagacagcacagagtcctgcacaccttgggaaggctttttggattttattttaaagaaagttgagcctgggaacaacatctgactttctttgtttgaagagtcctcagcctactttgagaagactggatcggagggatgtaaaagtggaaggatttaggttaatgttgtagtcatttgggctacagaagatggggcatggaccaagatggtggcagaagtgtggagataactggatatttgggagataaaaccaataggaactggttgtgagtgatgaaggaaagaagagaagcaaagatgactcccaggtttggggctgagcactgaggtgggaaatactggagcgaacagttttgattgagaagaatcaagttgggaatacaaagcttaagatgcctgtaaggcatccaaatcaacagtgtttgagttttgagcttaaagaagagttcagggctggagatgattagcctatagctggtatttaaagccatggaggcaaccagtatatatgcagtgaaaggatagagagatgggtggaaagatgattggatggatgcatggatggatatatggatagatggatggatggatggttggattggatggatggatggatggatggatggatggatggatggatggatggatgaataaatggaccagtggatggagggacagatgagtggatggatggttggatggatggatggatggatggatggatagatggttagatgactacctaaatggatgaatggatagatggatgagtagacggatggacaaatcaataggatgaatgggggatggatgattggatagattgatggatagatattgcctaggtggatgtgtaggtcagtctcacttctacctcctgaaatccatcttctggtagaatgatataaaaaatgcatgtggagagaaagtcaggctcctgcttacctatcagcaacatcctcattttgtgaactcttctgttaacccccagtggaggatttggta

SEQ ID NO: 92260 - DNA, 1021 bp, Homo sapiens
gccctggtggcccaggccaatgatacctaccttgtcctgatcaggactgtaacaagggtggcctccctggaggttgtgacaaatgggccttaatatacacccccatccctctggagaggacacaacctaatcctgggtataacctgcttgtcgctccctctctttacccatgaagccagcttcttaagctacttctcttcttcttgcataatgggtgcaatccaagaagccttccctaaggcagtggcttccttacaccggacctatttataaccatcctatccccagcgctagaagaagctactccactcgcgcacacgtctccctggtctattccgggcagaggtgcaatccagacaatctccccgatggcagggaccctgcaatccggaatccatatgtaacccacctcctctctctccctgtctaggagaagccgacccctcccgcaatgcccgccccgccgtgcgcctcctgccatgctgcacgcgccgccctccgccgtccgctctcgggccaagcgctgtgcggtgcctgcttctgcgccgccttcgaggccgaggtgctgcacacggtgctcgccggccgcctgctgccgcccggcgcggtggtggccgtgggcgcctcgggcggcaaggactccacggtgctggcgcacgtgctgcgcgcgctggcgccgcgcctgggcatctcactgcagctcgtggccgtcgatgagggcatcggtggctaccgggacgcggcgttggcggccgtgcggcgccaggcggcgcgctgggagctgccgctcacggtcgtggcctacgaagacctctttgggggctggacgatggacgccgtggcccgcagcacagccggctccggccgcagccgctcctgctgcaccttctgtggagtgctgcggcgccgggcgctggaggaaggggcgcgccgcgtgggagccacgcacatcgtgacaggtgagcgtagtacgggccgcagagcggcactctccgaggcagtggggcgaatgcacaggcga

SEQ ID NO: 92261 - DNA, 1089 bp, Homo sapiens
gctggatggttctctccgtggtcacaccagctccggggaacgtcacctgacagatgaggttggtgccgtggtcctgaggccgtgggatgatcgtgagcactgaggagtggagggtcctggggcccagggaggtgggggcagctgacatccaggagaagatggggggtgttccctgctcacagacccagggcacagagcaggtcaggttgctgggatggccagactttaggaactccgggatgaggatgtcgggcctgtgggtcagggctgttgtggacagaggtggggacgcaggatcaggagggggatccaaggtgcagccctgtgggaagctcaggctctggtccagttcctcccctgagcctgacgtgctttattcccatccccattccaggacatgagtcccatctgagcccttcccagtggcccccataaccttccccttgtgccactcctggagcccgtgccttacctgtcacatacacagagagcggggaatatttgtaactaaattttgttcttcctctcgccacccaaaagaagtatgaaccgttgtccctcctcctggcgtctctgatgctcagggagcagttgttccttgagggatcaccgaggaggtggaatcggccctgggtctccttctgcactttttgagttgagttgtttgtggccactggagtctcctggtctacactgaccccttcccggaaccagtggccataagcaggggtagaatctttccagccatactcgaggtagaagaccgaacagtgcacaaagatgcacagaccctcctgcaccgtcacggactctggcatctccagccggaatcttgcatcctgagcgagggccctgtggagacatgagggtcagatgggctcatccccacggcccctctccccagggccactcacctgcccacagcaggggcagcggcagcagcagcggcagcatctctgaggcagaggcttcctgggcttcctgtgtgagcagagaagagggctgtggggaggagcatgagatcttggcagttcacagaagaggaacctcaaacccacacgtggtcagaggtcatccgcctctgcacag

SEQ ID NO: 92262 - DNA, 1041 bp, Homo sapiens
tgcccgcggtcggaccgggccacgcaggcacctacgcctgcctggcggcgaacccgcgtaccggccgccgccgccgctcgctgctcaaccttacagtggcgggtgagaggctggagcgggagtaggggaatgcctgggagaggggcggggccagaacgagggcggggctagaggaaaggggcggggccagcaaggaggagcagcataccggtgggtggggcagggccagcgggagggcgggtcaccaagaaggagctgggatacccgtggtggggcgggccagcgcggaggggcggagacacctaggataagaggcggggccagaaagaggataagggaaggagccaaatagagtggcagggatgaccaggactgacgggccggcccagcactgagagggcggacattcctgggcatggaacactcgacaaagtcgacaagcggagttaaatggcaaagagtgggagttagaaaaggaaagaactaatttgcttaagtgggatcagcaaagggagaagttacctggcaaggggggcggagtcaccagggaaaggggcgaggtcatttagaaagcgggcagaattgtcttagaaaggggaaggggtccacaaggaagggcggagatatctgggaaaaggggaggcttctcggagtgcaatccaggagggggcgaagtaacctggcagaagtgggtggagctggaaaggaaggggctgagttacgtttgggaagagaaatatcattgtgtgaagatgcagttttcttaagaaagttgggcagtcagcagggctgcgggctacccacttagcgaggaagttaatgggaaaagggaacgggatcgcaggaaaagtggggagtgtgagcgcctatggggtggggctagtgaagaagggtggagtcaccgcgcggggaggcggggctggagaagaaatgagaaagggactccatcttcattctctcccttctctccgcagacctgccccccggggccccacagtgctcagttgaagggggtcccggggaccgcagcctccgcttccg

SEQ ID NO: 92263 - DNA, 2244 bp, Homo sapiens
ctctcatctgtaaagtggggataataacatttacctcataaagttcctgcgaggattcgatgacttgatacatcagttgcttagcacagggctcagcactcagtacatgttccctgtcaggaaggcagggaggcctcactggcagcatcaggacatgggacatcaggacatacaccgtggctctcagggaaaggaaaaagaccctctcccaggtgtacaagctcgattctaaacctcatgggaccctgcattgttcgctccctcattcattcactagtccatgcgtgtactcagtagtggcataagcagactgctcgggtcggacctgaattagcctcacccactctcctcctacactgtccctccccagggcacattcgcctcccaggtgacgctggagggggacaagttgaaagtggagcgggagatcgatgggggcctggagaccctgcgcctgaagctgccagctgtggtgacagctgacctgaggctcaacgagccccgctacgccacgctgcccaacatcatggtgagcccctggccagcgggcactgagggcctgggggtggcaagcacattgccagcccagtgccccccggtggtcgcacgtggggagggaaggatccaaaggaggtctcgtgcacaggaagccgtcacctggagtttggctgatagagagagtttgctgggtcatctctgccaatactgagagttcatgggggctgctttggctagcagggagggcttgctggtatctaggccagtagaaagccttcgctgggcagcagaaggtgttccctttgtcattccagccagtggaacaagttcactgggtcatctaggttcattagggagggtccccttggtaatttttgccaatgtgaagttaccatgtagatcatcttagttaactaggaagggtgcatggggtctcttggctaacaggtagagttcactaatcatcatggccagtagatgggttcgctgggtcatcttggccaatattaacagtttagtgggtcatctccgccaatagagaatattcatctcagccaacagggagggttcactggatcatctcaactaatggggagggttcaatgagtcatttcagccattacagagtgttcactacatcatctcagcctatagggagggttcagcgcatcatctcagcctatagggagggttcagcgcatcatctcaacctatagggagggttctgcgcatcatctcagtctatagggagggttcagcacatcatctcagtctatagggagggttcagcgcatcatctcaacctatagggagggttctgcgcatcatctcagcctatagggagggttcagcgcatcatctcagtctataggcagggttcagcgcatcatctcagcctatagggagggttcagcgcatcatctcagcctatagggagggttcagcgcatcatctcagcctatagggagggttctgcgcatcatctcagtctatagggagggttcagcgcatcatctcagcctatagggagggttcagcgcatcatctcagcctatagggagggttcagcgcatcatctcagcctatagggagggttcagcgcatcatctcagcctatagggagggttcagcgcatcatctcagcctatagggagggttcagcgcatcatctcagtctatagggagggttcagtgcatcatctcagcctattgggagccttcagcatgccatctcaaccaaaagtccactgagtcattactaccaaaaggatgggtttgccactctgttgcagccagtgaagggcttcctgatttggttacctaaaggaggactgctgcagtagttgggcctcccagggcctcctagccagcaggagttgtccacaccaggtgtggccctgtgagaagtttcgcgtgtcctggccagtgggtgggtccagagggttcagcccatgggactggtctgcaggcctggcacccatgggaaggaggtggcaggaagggtggcaggagttccacagccctgtgaacaatggcttcccatgtgcagaaagccaagaagaagaagatcgaggtgatcaagcctggggacctgggtgtggacctgacctccaagctctctgtgatcagtgtggaggacccgccccagcgcacggccggcgtcaaggtggagaccactgaggacctggtggccaagctgaaggagattgggcggatttgagcccctcccagagatggcaataaaac

SEQ ID NO: 92264 - DNA, 1042 bp, Homo sapiens
tgcgcgcgtgtgtgtgtgtgcatgtgcgtgtgcgtgtgtgtgtaacaccacatgtgtgggtctgtgcaggggtgtgtctaggggcaaagtgtgcccacgtgtgtgagctcatgaaagttgtgctgagggtcctcccccttctcctctccccgacccctgctctgggagtttcttgatgtgcccgtggatggggatggtcccagccccctccccgccgctttgctcctagctgcccttccctcagtcctgggaagctcatccagcatccagcatctcttacccatgaggaagaccctcctccacaggctccatctgggtctggaaaggtccatgagctgcctggggtcctccaggaggaggggtccctccagagacacagccacctcctctgctccctccaagacctgtgtctcctggcacagaggctgccggtctcgtctcccagccttcagggcggcctttcctccccagggtgcactctgaccagcaggggtggggcctggggaagacggctcttgagagcccaaccttatctttatggctttatgttgcctttagttcattatttatttacttatttttataataatttacatttttttctctggtcatgaaaaaacggaaaaacacaggctcactgttgggaaaacaaagaaaaccagaaaatacagccaagtgcctcaaagataggacatcaaactcctcaactgtatgtcctgtttccatttggtttggttttcctatgcagggcccagctttttttttttttttttttttttcacggagtctcgctctgtcaccaggctggagtgcaatggcatgatcttggctcaccgcaacctcgtcttccgggtccaagtgattcacctgcctcagcctcccgagtagctgggactacaggctcgtgccaccacacccagctaatttttgtgtttttagtagagacggggttacatcatgctggccaggatggtcttgatctcttgacctcgttatccgcccacctcggcctcccaaagtgctgagattacaggtgtgagcc

SEQ ID NO: 92265 - DNA, 1122 bp, Homo sapiens
ttaaccatcccactgcccaatctcttctccctgcatagttcaccgctgatacctgtttccccaacttcacttggtagcaaaggatgactatgtaccaggaattgacatgcagacctctcatttttttacctgtccctctaggtaaaccttaatatcccttataaacacaaagagaagggaagttgctagaagaaaccccacagctatttagaaccatggccgactctaaaccctctcttgctcccatcagcttcaggtcctgggggctgatctgtctgccccagatgatccctgacaacctagttcctggcttatccctccccttctggctctgcttcccctctggagggagggctggctcctgagtcccagcccccagccaacatcccacccttgtcccagagcaatgagggcacctgattgagtagtggttgatcagagcatggatcaggactccacagatgtaaacgccacccagcactgtcagcatgatgaggaacatcaccatggatcctgagatggagaaatctctgtggacaacaggtaagatccctgaaggaagaggacacctgggggtcaggaccacgattgacccattcatgcattcactcatctcttcacccacccacatatccattcttcaaagatttgtcaacatctattatcagcaaagcactgttccaggtacgagggattcagcagccaacaaaacaaactccctgtacccatgggcctgacattctagctgggaagtggacagtggacaattaagcaaagagatgtctcacactgcaagcaaccataagtgaatagagaagaataaaccctcataaggggagagacagtgactggaaggggggtgtgtgacacagggtcattaactcattgcataaatgttcactgagcaccaactatgtgctacacactgtgccaagcactgaggacaaatggaaaacagaaagctcgcccaaggtggatcacctgaggtcaagagttcaagaccagcctgggcaacatggtgaaaccccatctctactctattttgtaaaaatacaaaaattagctgggcacagtggcgtgtgcctgtaatcccagctactcaagaggctgaggcaggagaat

SEQ ID NO: 92266 - DNA, 1033 bp, Homo sapiens
gctaacacttggcattaacaaaattggtgaatttatagccctactgataggtgaaagggctgtttcatttttttttgtttttggttttggtttttttgagacagagtctcactctgtcacctaggctagggtgcagtggcacgatcttggcttactgcaacctctgcctcctgggttcaagtgattctcctgcctcagcctcccgagtagctgggactacaggcacccgccaccacactcggctaattttttgtatttttagtagagacagggtttcaccctgttagccaggatggtctcgatctcctgaccttgtgatctgcccacctcggcctcccaaagtgctggaattataggcgtgagccaccgcacccagcctgtttcattgcttaagtgttatttttctaataactgaatggtgagagcctctcatcttatctgttatctgattggctttttcatttgtttgttgcattttcttaccgcttatctctttacgtccatggagttttctgccttttttttccagtttttttgcccctaattttatttattttcttttctttgctggatctgctgtcttcttttcctcccagttgtggcacctctagcttggggccctgttcttccatatgggcatcttttcttttttttgaggcagagtttcactcttgttgcccaggctggagtgcaatggcacgatcttggctcaccgcaacctccgcctcccaggtttgagtgattctcctgcctcagcctcccaagtagctgtgattacaggcatgcaccaccatgcccggctaattttgtatttctagtagagacggggtttctccttgttggtcaggctggtctcgaactcccgacctcaggtgttccgcctggcttggcctcccaaagtgctgagattacaggcgtgagccaccgtgcccggctatgggcatcttttcccacaggaattgacttaaaggacccatccattctgaactcttagtcctcatatttttattctaatgatttatatatcagtacc

SEQ ID NO: 92267 - DNA, 1053 bp, Homo sapiens
gagatcagaaattggaatcatcatcatccaaataaggaattctcacctgataaattttgtgagatttttctgtttctgggctcagaaacacagtcctctaatttaatttattactttggaattcttaccagtttttcttgttttaattaagaaaaaagtgaccctttttcttaatcccagtggtattacaacaaactagatccccattttctcatatttagacaattttgttcccagtgagatatgttgatttcaggtttttgagtttagtcaagatactgacagattttatgaccccaaacatggctattttgtttcttttttcctcagtagatatgataaaaacaggcagttctatttcctactgtgtaggattaacaaattcttttcagtgatattgtcctcatggccacatatttccaatttaaaaatatacctgaatagttttcatcactcatgctctgctccattgtttttgtatgttgtttaatgtctactccatagaatgattcactttgcatacactctgctgattactttgtactttcttaatcttcattatatcaatgtttagcatgaggaaaccattgtatttaagatataggattaggatttttgtatttaggatacagaaattactgattttctgaaaatgggcagaaaagaatatttcacagtattttaaaaggatgctttaaatatttgctgagataaattcaaaagaacggagattgtatttggatggagaggacaatggcattaaatgttaaaagtattagcctttgtgcatcaatcatgtctatttcatggaaggctactcaaaaagtaagtgtatcaacatgggaagcatggatagcaaatgctggtgaagttcagaaaaatgatgtcagcctagaggtggagtgacattgggaattaattttaagggcatagtacctataactggttcaagaagccattttgaattgaaacaaagaagcagatgaagcaagcttaatgggaatagaggacatgagagtgtgcttggatttgagaataaattggacttctttt

SEQ ID NO: 92268 - DNA, 1050 bp, Homo sapiens
cccacaaaaggagatttctaagaaagcttcatttcaaaaggatatggtaggtgagttcacaagagatggttcatggtgttccattttagaagaactgaggctggatgctgaccgcacaaagaaagatgagcaaaatcaaattcaacccatgagtcacagtgctttcttcaacaagaaaacattgaacacagaaagcaattgtgaatataaggaccctgggaaaatgattcgcacgaggccccaccttgcttcttcacagaaacaacctcagaaatgttgcttatttacagaaagtttgaagctgaacctagaagtgaacggtcagaatgaaagcaatgacacagaacagcttgatgacgttgttgggtctggtcagctattcagccatagctcttctgatgcctgcagcaagaatattcatacaggagagacattttgcaaaggtaaccagtgtagaaaagtctgtggccataaacagtcactcaagcaacatcaaattcatactcagaagaaaccagatggatgttctgaatgtggggggagcttcacccagaagtcacacctctttgcccaacagagaattcatagtgtaggaaacctccatgaatgtggcaaatgtggaaaagccttcatgccacaactaaaactcagtgtatatctgacagatcatacaggtgatataccctgtatatgcaaggaatgtgggaaggtctttattcagagatcagaattgcttacgcaccagaaaacacacactagaaagaagccctataaatgccatgactgtggaaaagcctttttccagatgttatctctcttcagacatcagagaactcacagtagagaaaaactctatgaatgcagtgaatgtggcaaaggcttctcccaaaactcaaccctcattatacatcagaaaattcatactggtgagagacagtatgcatgcagtgaatgtgggaaagcctttacccagaagtcaacactcagcttgcaccagagaatccactcagggcagaagtcctatgtgtgtatcgaatgcgggcaggcctt

SEQ ID NO: 92269 - DNA, 1153 bp, Homo sapiens
agcctcatctcctgtgctccttggctcctggcttcggaggctctagtcagacttaagggctttgttgtcctcccagcacctccttggtttcctgccttgggccttcgcttcagctgtgccctctgcctggaagggccttagtggaggtcatgccacaaccacgccttctctggaggtcctctctgccgtctccagctgccaggattcctcccgccctgggctctcacagcctctggcctctccctgtgtcatacccagatcacccgggattgggactgtctgcggctggctctgtctcttccatcagactgtgagctccatctgcaagggcagattcgggtctgattcacctttgagcccccagtgggtgggggtggggggtggagatactaaagctggtgggggcgaagctgggagagcaggaagggggagagagagacgggcagaccctgactggttcggggagagaggggaggagaaagcgagagagaggaagaacagagacacagagacaggaagggagggagagaaacagagaaaagggaagaataaatgggagacacagataatgccccacaggcagagaaagaggatggagatagggagagggcgaaaggaaggacagatgtgcagagacagaagggaggacagacggaaagagacacagagaggcagcaaaagcaaccaagaatgacaggagcagagaggaggagggaaagagggagagagagagagagagaacgagagagaagggagggagggagagagggagagagagagcgagagagcacgcacagagcgaggaggaggcgcaggagagaagagggagggaggccagcgagggacaggacggggcggagaggcggaggggagctagggaaagccggggaggagcgagactggccgaggaggagggcgggcgagcgggagcgccggccccgccgcctcccggcctcttttgtcccttccctcctctgcgtcaggcttctctggcccggcctccccctcccgctccctcctcctccccggggctggatggaattttttcccctggacctgggccagctccggggcaggggggaagccaggccggactgggctgggcggtggggaggggccggggcggggggccccctggggagggggctggtcc

SEQ ID NO: 92270 - DNA, 1011 bp, Homo sapiens
ggattccaggtcccagacccctcctccctcagatctgggagtacaccacccagtcccccacccattccagaatccgagcccccagcccccttttttccaggatccaggagtctgagcccccagtctgttctctcagaccagggaatccacactccagcccctaactccttcaaaaccccagagttcagaacctcagcccctcttcccaaggagcgcggcccccaaccctctgttcctctagaacccaagcgttcaggctccggcatctttctccctttgaagcctgcagttctggggatccccaggcccctcctcctccggaacccaggagtccccacctcctctttagccccagctggagtccagccctccaggggttaagggggcgggaccagctagttgccatggtgccagactgtttgggtctgctctctgacccttgggggctccccagggtccgcagagagggggagggggacctaggcctgggggaagtccagagcctaccccttccccaaagcggggctatgggcccagggagttcgcgtttccaccaacgccttgtccagtgaccttgaacaagtcctgacccttctctctccgcctcagtttccccaaggagacactggttggcgggtgggggagatgcttaggtccggggaatctctgagattctcggcttcccctctcccctcaccctcctcctcaggccccaggcagccccggggcatgctgggaacccaggcctgggctccgggccaggttggtgtgggggggtgggggcgggggcagcctcctcccttccccttcctccccaccttggcctgactctcgcccccgcctgagggtctgggaggttgggaaggagggaagggggaagagagctggccgtagacccgtctccggcccccgcctccccctttcctcctccgcccctttcccgcctctcctccccctcctcaggtcgctaccccagccctgggccccttctcaaaccacccccaccccacc

SEQ ID NO: 92271 - DNA, 1065 bp, Homo sapiens
tgcggggccttcgccgcacacaagctcgtgtctgtgggtccgtgtcgggggctcaccatcgcggctggggcctccccggccctccccctcatccctggtcctcctggtccctgtctgtctgtctgtcgggtctgtccacctgccgcgccccccgggctgaggtaggaggttgtatagttgaggaggacacccaaggagatcactatacggcctcctagctttccccaggctgcgccctgcacgggacggggcccggcggggacccccagccccactcagggacccttagccccactgggctgccccagggaccctgggaggaagagccgggctcttttctgtccttgtccctgcatcccctccttcccctgaaatctgttttccttccctgtctgtctccatctctgctgtgtctctgtggcttctgtgtctctttcacagtggatcctctgactccctcttattctggctttctaggtctctgcccctcccgatatctctctgtgtctctatttctgtcgtttttggtctttctgtctctggctctcagaatgtctctgtgcctatctccatctctgacccccaccccagggtctaccgggccaccgcacaccatgttgccagtctctaggtccctgagaccctttaacctgtgaggacatccagggtcacaggtgaggttcttgggagcctggcgtctggcccaaccacacacctggggaattgctggcctgacttctgacccctgactcctcatacccttcctccagagcatgacatttgaccaccaactgaaacctgacctctgaccccagaccactggcccttcccccgccctgtggtgacttcataaaggttactagcttctcccctggccttgagacccacacgatggccctgctggctctggccagtgccgtcccgtctgccctgctggccctggctgtcttcagggtgcccgcctgggcctgtctcctctgcttcacaacctactctgagcgcctccgcatctgccagatgtttgttgggatgcggagccccaagcttgaagagtgtgaggaggcc

SEQ ID NO: 92272 - DNA, 1071 bp, Homo sapiens
caggggctgaaggtggtgagggggaagggacgctgcagaaattgcctagagctggaagtccagatggggtcgggtaggcataggttctgccatggctgcatggctcacactcttactggctatgaagttctgggtgtgtcactgcccctctcctggcctcaacttacccatctgtaaagtgggacaatcttcttgcctcctaggatggccatggagctcagtgcaggggttggggctgcctgatgagcctgatcttagggaaggcatcttcctctaggatagaacacacacacactcgcacacagacacgctcagagacatacactcacactcacacacacacacagatttcttataaagtgattccacatttttgaggtgtgaggcaattagagggcgggaaaacaggaacagcagagtggatcactcaggtgacagcagtgaaaagagacaaggtgtgactgtcctggtgagacaggcacatgtgacagccttgaggtgtgtggctgtgcgaagagacctcagggctgggggccacgcaatgccgatgggcagcatgggcggtaatcatgcctgatcaccatggccatgatccccacgaggtgccagaccctggaactgtggaggctcggagttgcaggagttacagagccctgcgctatagaataaactggcttcctcttaggtccaggagctcagggcttattcccacacccacagtcgctccttttgcttcctgctttgccctccaagcgtcctgtcaacaatcccggaagagggaaggttcccatccacccagggggcatccagggccagcctggagaaggcctcagctgtggctctccccatctccaccctaaagggagacctgaggccctaaacctctccatgtgggggtgtgcaggattccaagaaatgccctttctccccacataggctgccttgttacagaagcttttgaaaagatgaggaacctttggatctgggaatggaagccttctgtggggccgcatgggggacaaacttggaggggagagagaagaggctgggtgagggtccaggccagagcgg

SEQ ID NO: 92273 - DNA, 1022 bp, Homo sapiens
ttaaagtgtgtcagattgggttactcctctacccagaatcctttagtgactccctgttgccattgagacaaaatccaattccttgtcaaagcctcagaggttccacaggtctggcctttgctgacctcaccagcagccttgtcccatacccctttcctccttgatcttgccaccctgcggtttttctctggcctttcctccttcctcgcattcatcatgatacttcttgccctctctagggtcttggttcacactgtttcctgcctagaataatattttctccttttttttgtctagttaactcttatgatttcccctgagtagccattacatctattaaccccgctaatccccttgacaagtctgcgcggctggcactgtattgacttaactgactctacctctccctcaggccccttgctactttccagccccagtggcctccttattaggtccctggaacatgcaagtctcagtcccatttccaggcctttgctgtgcttcatacttgaaatgactttcctctgagtatcacaaacccacctctctcattgcacagatcccagatcaaatgtctccttctctaactacctctctctccctgtttgacattgcccaatttcaccttgttcactgagctcatctggacctaatgttaactcttttttttttttgagtttcgctcttgttgcccaggctggagtgcaatggtgcgatgtcggctcactgcaacctccacctcccgggttcaagcgattctgctgcctcagcctcccgagtagctgggaacacaggcatgcgccaccacacctggctaattttgtatttttggaagagacagggtttcgccattttggccaggctgatctcaaactcctcacctcaggtgatccacctgtctcagcctcccaaagtgctaggggattacaggcgtgagccaccgctcccagccgttaactcattttttaatttggttttgcctttcctacctgaaagggaagctccttttgagcatgtactca

SEQ ID NO: 92274 - DNA, 1047 bp, Homo sapiens
gaatcctgtcctcaacctcatacgcactccaacttgcctgtcattgaactatacccactgtgactgcaaacctgcccaccccagtctcatcaccaatcccatatccattctcagccccatccaaaacccactgcaacctcaaacctggctccaactctgtctttgactccaagcctatcccatcttcttccccagccccagccccaatcgtcatccatatcctttttccaacctcactccccacaccaaactcagcttgagcccaagcagcatcctcaccgccagcttccagttttatcccatccccaattcctgccctgctgcatctttgttcccaaccccagtcacatcctcagccccatccggcttcccttctccctttccaccccatccacagccctcccaatctctgcccctgcttacctagaggaccgctgatgcaggatacacagtggaagtagctctgacaagcccgctccacattgaaggctacccagtatcgcaggctgcttaggaagctgacccaggagtccagagggttaaggatccgcacgtccccaccaacagcccctacccgggggtcctcgtccagtacccgcacgagctccagcagtgccatggggtccaaccttgtgtccgagtcacagacctgtaaggtggaaggggccaggatcagcacagacccctgcatcaggctgatgcttgagaggaaggcatcaaggggtgcaatgcagctggggcactctgcaaccgatctgaacataattttgagattttttaaagtcattttcaatgtgtagtcacagtttaacatgtactccaagatgcacatccttgtatgaacatgaacaataagacatataccatctcctctggtgtgtgagtgagacccctaacttgctactaagcaatagaatatggcagaagttatgggatataactgccatgattatattacctaatatggaaatggtgaataggttttgcaatgtaattaagtccccaaatctcttgactataagttaatcaaaaggagattatcctggg

SEQ ID NO: 92275 - DNA, 1044 bp, Homo sapiens
ggctcatagaaactatgagataataaatgtgtttcgttcaagctgccaaacatatggtaacttgttatgcagcaatggaaaactaatataatgcattagaattgctacaccaggccaggtgtggtggctcacacctgtaatcccagcactttgggaggctgaagtgggcagatcacctgaggtcaggagtttgagaccagcctagccaacatggtgaaaccctgtccctgcaaaaatacaaaaattagccaggcatgatgacaggtgcctgtaataccagctactggggaggctgaggtgggagaatcacttgaacccaggagacagaggttgcagtgagccgagattcaaccattgcactccagcctgggcaacggagtgagattccatctcaaaaaaaaaaaaagattgctacaccaaatgggatggatgaatgagataaataaatgaaattaatctgtatattgaatacatagatagatggctgagtggttgaatgaaagaatctcaacactgaaggaggggaaaggaaggagggaagaaggaaagaagaaagggaacaaatctccacatttaatagataaatgaatgaataaatgagtaaatgatctccatattggatggatagatggtatatccatgagtgagtaaagaaaaagaatttctacactgaatgaagtaaggaagaacttttatttatttatttatttgagacggagttttgctcttgttgcccaggctggagtgcaatggtgcaatctcggctcaccgcaccctccgcctcccgggttcaaaagattctcctccctcagcctcccgagtagctgggattataggcattcgccaccatgctcggctaatttttgtatttttagtagagacagggtttcaccatgttggccaggctagtctagaactcctgacctcaggtgatccgcccacctcagcctctcaaagtggccggctggaagggtttaattttacattgaatggatggataactgaatcagtggatgaatgaacaaatgaatctctatattgaat

SEQ ID NO: 92276 - DNA, 1375 bp, Homo sapiens
gcaggtatctctcctaaatgtgtgatcaaggaattaccaccaatacagaacagtaacacaggagaaaaattccaagcagtgatgttggaaggacatgaaagctatgacactgaaaatttttacttcagggaaatccggaaaaatctacaggaagttgactttcaatggaaagatggtgaaataaattataaagaagggccgatgacccataaaaacaatcttactggtcaaagagttcgacatagtcaaggggacgtagaaaacaagcatatggaaaatcagcttatattaaggtttcagtccggtctgggtgaattgcagaaatttcaaactgcagagaaaatttatggatgtaatcaaattgagaggacagttaataattgttttttagcttcaccacttcaaagaatttttcctggtgtccaaaccaacatttctaggaaatatgggaatgattttttgcaactttcgttacctacacaagacgagaaaacacatattagggaaaaaccttacataggtaatgagtgtggcaaagccttcagagtgtcttcaagtcttattaatcatcagatgatacatactacagagaaaccttacagatgcaatgagtctggtaaagcctttcatcggggctcactactaacagtacatcagatagtccatacaagagggaaaccataccaatgtgatgtatgtggcaggatcttcagacaaaattcagatcttgtaaatcaccggagaagtcacactggagacaaaccctacatatgtaatgaatgtggcaagtcctttagtaaaagttcccaccttgcagttcatcagagaattcatactggagagaaaccttacaaatgtaatcgatgtgggaagtgctttagtcaaagttcctctcttgcaactcatcagacagttcatactggagacaaaccctacaaatgtaatgaatgtggcaaaacctttaaacggaactcaagcctcactgcacatcatataatccatgcaggaaagaaaccatatacatgtgatgtatgtggcaaggtcttttatcagaattcacaacttgtaaggcaccagataattcatactggagagacaccttacaaatgtaatgaatgtggcaaggtcttctttcaacgttcacgtcttgcagggcaccggagaattcatactggagagaaaccctacaaatgtaatgaatgtggcaaggtcttcagtcaacattcacatcttgcagtgcatcagagagttcatactggagagaaaccttacaaatgtaatgaatgtggcaaagcctttaattggggctcattactaactgtacatcagagaattcataccggagagaaaccttacaaatgtaatgtgtgtggca

SEQ ID NO: 92277 - DNA, 1046 bp, Homo sapiens
ggaggtgagggggctgtgctctgtatggggtttgatcagggatgggtctgtgtcctgaagggaagcatagtccagcccagctccccactgttgcagggtgtgtgggggcttctctgggaggggaacaagttctgaagaaaagggtgaaaaacttacttggtctttgtgtaggagtttattatgcttgcatccccctggtgcactgggctgtctctccacatgctgaggccttccctgtgggcatggttgtggcacagaaaggaatgtgttgtttccaaggattaaacaacatatttttgactttcagatttgacttttaaagaattaattatattgactgagagagaggcccaggagagaaagaagaaagaaaaggagccagggatggctcttcctcaggtaaagtgataatcttggtggattgttctgtctcctccctttttgaaatgcagggcattggagctgcaaatcttctctgagtctgaagtatcctgcctgacacatttgctcgcactcacccatgccttccttcagtccctctcttctgcacttagattccagatctcacagtgactcagtgacatgagcttgggaagaggctccactgggcatggtcctgggaagggctcacacccagacatggatggagacagggtgtgagttctgtggtgtcagcttttgggcagcagagattgtttaggggcaacatctgaatgcactgtcagctctcagtagaccaggagtagagaagctgtatgtggaagtcacatgttaatatgcaaaaatacctcataaattcttgaaaagatgcctctaaggggagatcttttctgcctgattttataccacatttgaagctataatgaatcagtcactctttctaactccacaatcttaatgaccgggaatggaatggaaaactaggtacagacatcagtgatagaggttgttttattccatcattgattttaaaatatgaaatcaacctgaatgtcagattaatttagccattctcagcatatccatcccacagagaatgtggtgtt

SEQ ID NO: 92278 - DNA, 1039 bp, Homo sapiens
cgttcagcttttgcaaggcatcggagaattcatactggagagaagccttacaaatgcaaagaatgtggcaaggtcttcagtcaatgttcacgtcttacagtgcatcggagaattcatagtggagagaaaccttacaaatgcaatgaatgcggcaaggtctacagtcagtattcacatcttgtagggcatcgaagagttcatactggagagaaaccatacaaatgtcatgaatgtggcaaagcctttaatcagggctccacactcaatagacatcagagaattcataccggagagaaaccttacaaatgcaatcagtgtgggaattcctttagtcagcgtgtccatcttagacttcatcagactgttcatactggagacagaccttacaaatgtaatgagtgtggcaaaacctttaaacggagctcaaacctcactgcacatcagataattcatgcaggaaagaaaccatataaatgtgatgaatgtggcaaggtattcaggcatagttcacatcttgtaagtcaccagagaatccacactggagagaaaagatacaaatgtattgaatgtggcaaagcctttgggcggttgttttccctcagcaaacaccaaagaattcattctggcaaaaaaccttataaatgtaatgagtgtgggaaatcttttatttgtcgctcaggcctcactaaacatcgaataagacatactggagagagccttacaactaaactcaatgtgacaaggccttagacgttgtcctagtttctggaatcaccgaataattcctacttactgatataccttgtatatttaccccttctcttgaaatccctgtggaattgtaatctccagtattggaggtggggcccattgggaggtgattgaatcatggaagtggatttctcaaactgagaaagatgtagcgtcatccccttggtgctgtcctggcaatagtgacttctcttgaggtctggctgtttagaagtgcatagcacttccctgtcgcttgccctcattctcaccatgtgaaataccgaca

SEQ ID NO: 92279 - DNA, 1261 bp, Homo sapiens
tcagctctgtctaggcagcagggaaggagaacctgttgggcagttacaaccaaaagggagggttcttggatctcatgcaagaaagaattaggggtgagttcacactgtaaagtgaaagcaagtttactaagcaagtaaaggaacaaggcagggtgcagtggctcacgcctgtaatcccagcacattgagagaggctgaggtgggcagattgcttgaacccaggagttcaagagcaacctgggcaacattacaaaactctatctctacaaaaaatacaaaaattagccaagggtaatggtgtgcaccagtagtccaagctagttggaaggctgaggttggaaattgcttgagcctgggagaatttttttttttgaggcagtgtctggctccggtcacccaagcagtagtgcagtaatgccatctcggctcagactctaattcaacacggaatgttgagcttctgagcgtgatatagcggaagtgccttctcttccggtctctctggtcttggccgcagaagccagatgacgaagggaacgtcattgtttggaaagcgtcgcaataagacgcacacgttgtgttgccgccgtggctctaaggcctaccaccttcagaagtcgacctgtggcaaatgtggctacgctgccaagcgcaagagaaagtataactggagtgccaaggctaaaagacaaaataccaccggaactggtggaatgaggcacctaaaaattgtataccacagattcaggcatggattctatgaaggaacaatacttaaacccaagagggcagctgttgcagcatccagttcatcttaagaatgtctatgattagtcatgcaataaatgttctggttttaaaaaatacaaaaaaaaatactgaatgtttactcctgaaacttatgatgcctaggttgagaaagactcaattttcctcatgctaaatactttatacatgtcctttattcatgcatacataggacactttacacaatataattgttgaaagtgcttctgaaatactgttcaaattgtctataatatttttacacatgcactataaaaattaaatttatcagacaataaatattaaataatttaataaaattgcatttttcaaaggctctaacaatgcatatttgagttatcatattaaacattgtattctatgatttttcaactgtaatataattttttttgagatgggatcttgctctcttgcccaggctgcagtgtggtggtgcaatcacggctcatgcagc

SEQ ID NO: 92280 - DNA, 1049 bp, Homo sapiens
attataaaaccccatctctactaaaaacacaaaaactgaggtgagaggatcacttgagcctggggaggtggaggctgcatgagccgtgattgcaccaccacactgcagcctgggcaagagagcaagatcccatctcaaaaaaaattatattacagttgaaaaatcatagaatacaatgtttaatatgataactcaaatatgcattgttagagcctttgaaaaatgcaattttattaaattatttaatatttattgtctgataaatttaatttttatagtgcatgtgtaaaaatattatagacaatttgaacagtatttcagaagcactttcaacaattatattgtgtaaagtgtcctatgtatgcatgaataaaggacatgtataaagtatttagcatgaggaaaattgagtctttctcaacctaggcatcataagtttcaggagtaaacattcagtatttttttttgtattttttaaaaccagaacatttattgcatgactaatcatagacattcttaagatgaactggatgctgcaacagctgccctcttgggtttaagtattgttccttcatagaatccatgcctgaatctgtggtatacaatttttaggtgcctcattccaccagttccggtggtattttgtcttttagccttggcactccagttatactttctcttgcgcttggcagcgtagccacatttgccacaggtcgacttctgaaggtggtaggccttagagccacggcggcaacacaacgtgtgcgtcttattgcgacgctttccaaacaatgacgttcccttcgtcatctggcttctgcggccaagaccagagagaccggaagagaaggcacttccgctatatcacgctcagaagctcaacattccgtgttgaattagagtctgagccgagatggcattactgcactactgcttgggtgaccggagccagacactgcctcaaaaaaaaaaattctcccaggctcaagcaatttccaacctcagccttccaactagcttggactactggtgcacaccattacccttgg

SEQ ID NO: 92281 - DNA, 2209 bp, Homo sapiens
gggcgcccccacgcccgcccttccttcttctcccagcattgccccccccacgtttcagcacagcgctggccgcagtctgacaggaaagggacggagccaagatggcggcggccgacggcgacgactcgctgtaccccatcgcggtgctcatagacgaactccgcaatgaggacgttcaggtccggaggctacgggggacttggggaagacgcggaggggtacctgggggcacgggcggccctcgcggagaagactcagcgttcgctgggagtggcggaagggggcgacggccaatcagcgtgcgtctcttatctccccggttgcccggactccttgagacggcgctcccgattgggtgtcggcccagtggagggcgggggccagcgctagcctcgagggtcccgggcctgccctgtgcgcgcggcggtccgcggtcctgggaggttgtggccagggctggggtctgcggactgggtctgggagagaggaggactccgtgattggcggcggcctctgaatggcctcttggggatgtggggcgcgcatgacttgctccaagtaggggagggccgccgggtgggtcgggacctgggaaggtttttttgttttctgggtttcgactgctgggccaagtggggaccgagaggcgaaggcctgccatcctaattcctgctcttcctccgcctctcattttggtttaggtgtcctaagaggacggggacgcaaaaacacccccccaccaaaggtggggactagccaagtttaggagcgaattaggttgtagaaacccgcctccccatctccccggatcctcccattgaccaggataggggttgagggatttgctaagcagatgaacatttatttatttcttttttttgagacagtctctgtgtcgcccaggctggggctggggagcagtggcgcgatctcggctcagtgcaacctctgcataccgggttcaaaccatcctcgcccctcagctccctaattagctgcgattaccggcgcgagccaccacgcccgactaatttttgtatttttagcagagacggggtttcaccatgttggccaggcttggtcgggaactcttgacctcaagcgatccacccgcctcggcctcccaaagtgttggaattacaggcgtgagccaccgcgcccagcccggatgaacattcctggttatgggatgaggtgacccaaggctctgagccgggctggtgtgggattgagaacagttagaactgcaagtccacctcccacctgctgtgtgaccttgtgcaaattacttcaccgctttgggtctctgtgttccataaaatatgggctaattgtagtcctggtcttgctggagggacttgtgagggactgaacgaattatgacacaaataaaaagtagaatggtgtcaggcctgttgtaagggctcgataaatattagctgtaattattgggagtggtgattaaagaggtcccatcctccctttaggtctgttttcccatttataaaattggacaaggtgcactgggtaacctgccaaacgtgggtctcgcctcctaggttcctggtatatcactgtttctggtggcatacaggttgtggttgtattcccggcccttccacttgttactgattgacaagggcaagttagttaatctctctaggcctgtttcctcttctctttaatggggttaattacctagttcatagggcggttgtatgaattcttttgttcagtaaatatatgccatgtatgagatatgatgctggggatatagtggagacaccagttgctatacaggatccagatgtgaaacaggtcagcagagctgaatagatgagtgtttgaaaagtgatgggaaggaaacaaataggatgtagtggtagcgaatccatattgaattgggcctctattctgtgcagggcgctgttctaagcactggtatatagcaggaacaagacagaaaaaactctaggccttggggagtttattttgtagtgaggagagacagacaataaacagagtatactggggataagcattagggagacaaataaaaataagagagatggggtatatatagggcatgcagttttaaagtgtggtcaggggaggccttgttgagatcctgtttgagaacacgcctgaaagcagagggcacagcaagtacaaagtggggtggggcagatccattttaagaaggccaatc

SEQ ID NO: 92282 - DNA, 1042 bp, Homo sapiens
aaaatgggactccagctagtgacatgggtgcaggtgtgtggatgtgtttagccgaggaccgggcacagaggaagcgtgttataaacgtggctgctgctgttaaagtacagtgcattggcatgttacatgatactgtgtataggagaaagtgatgaagagagaggaggagagggagtacagttttcaacagagtggtcctggaaagtgcaactgagtaggtgtcaccttcataagacccaagggatgcttttgcatttgttgctgctgccactactattgttgttatttaatgattccctcgaggtcacagggtctcttggtgggtgtttgccaaattactcttgagcatcttcacatgtaaccaagcaaggcttccaggggctgactgggttgagagctgtcagaactcacgcgtgtctgggatttctaacattctcccctcctcttcttgttctctcattagcttcgcctcaacagcatcaagaagctgtccaccatcgccttggcccttggggttgaaaggacccgaagtgagcttctgcctttccttacaggtaacaaaggggacccctggggcccagatgtggggactcttgggaggtggttttcactatataagagaagacttgtggatttaacatattgtttgtgaatatctgccctgtgttagacactatggagtgggaaaagggattcagagaagtgcagtcttgctctaaaagaatggtctggaatgatggagacagatggtgaaagggatctagaagcaggtagaacgaggtttgagttgcagctccaacagttggaagctggtgactttagacaagttagtttacctgtttcttatatttttcatctgtagattgggataatcatccatgtgccaaagtgttgatctgagcattcaatgttaataacaattgctaatacttatgatatgcttactgtatgccaggtggtgttctacaccgtatcttgtgaggattgagttcatataaagtgtttagaaagctgcctgtactcagtaaacatacatcactat

SEQ ID NO: 92283 - DNA, 1056 bp, Homo sapiens
tatagatgaagaaaccaaggtgtagagaggtgaagtgattcatttgcccaaggtcatgcagtgaggaggtaactgagaagggatatttatctagtcattctggcctttaacttgacagcattggttaatgactgatttcaaatctgagctctaccactttctaggtgtgtgactttgggcaagatattttacatctgcctgcttcagattcttcacaggtgaaatgggcataattatgtaacctaacatgaagactaaataagatactgtaaagtgcttataacactgtatagtacgtgccgcctaagcgatagctgccaggctgttactaagcactgctgtttgtgaggatgtaggtaaagcatttaatacactgtctgacacagactggaccacaattaatagtaaattctctgttatcattattcccattactacttcatattttatacttattaccagctgaaatcacagctgaaggttcagagtgctttgtcactaaactcttgtgtatgggaacatcttacttggacctagtgatgatcctggggaggaaggagcttgagattgttacccctccccacactggacagatggggtattggagcctaaagaggtgcagtgactcgcctacagtggcacagctagtgactgaggggtgcaggtgtgtctgactggatggtgcatgaagagtaggtgtctgctcgtatgacactgaacaaatggccccaaaccaggtggcttctattggtgaactgttggggagacttgaaagctttagaatgctgaagcatggcaggataataaagtggtgaagaagttgtagaggaaaaatgttggacctgggtttgcaataagcagctctgccactgacttgctaggaaaacctgagtaggtcactccacctctcttagcctcatttcccttgtctgtaaaggagtctaataagaggagtacctaacactcggggtgtgtagggaaaactctgtgactttcctctactttcacaccacagcaatcataacacagaacatgacttctgtgaccatatgtctg

SEQ ID NO: 92284 - DNA, 1105 bp, Homo sapiens
agagggcagaagcaggacttagggctctcttatcccagccaagcctgtaccttaatatctgtggcagcccaggtggagagtgggggagcaagtgggcggatggaagaactgagtgctgacagcctgaggaagcagaatggagtccatgtgttctgagcttgggctggggtcagagttgagatgggatagtcacgaagtctgtcttggttccacagataccatctatgatgaagatgaggtcctcctggccctggcagaacagctgggaaccttcactaccctggtgggaggcccagagtacgtgcactgcctgctggtgagtggaaggcaggaagtcctcttgcccaccccttagggtcggcccatggtcctgccggcctagggcagggaggggagcgtgtcagagagcgtggggatcacgtcagaacagccgggccatggacatccgctttaatccaacaagtcaggagtggcttttaatatcgtgaactcagggtgcagttatcatcctttctgtttagtggtcaggtaggtgcccagtgccaggccttacctgggattctacatagggctgtgggtttagagtcaggttgggttctactgcttatttgctgtgtgacttgtaagagaattacttaccctctctgtgctgtacctttctcatctgcacaatggggttatgaaaacctttttaaattaccttgaagagccctagcacagtacttggcacttagtaggtactaaccgatgttaactgcaattgtcattattgttgctgtgacatcatatccagcctttggggtaggagggattccctgtttatgggtgagccacctggagcactgagaggttaagcgtctcttcagattgtatgactagtagatggcagagctgggattcttggtctgtccatttgactgtctgccaggtccccaccccactgcctgcctgtgtgtcccgtgctaggtgatggccaaggacacaaagatgggccagatcccaacaagcagcgttgtttgagagaagatgatctgggaaggcagaccgtacaggttacctagtcccctggttttcactgttctcagagtgctgggccactgctgct

SEQ ID NO: 92285 - DNA, 2299 bp, Homo sapiens
gtagatgttctacacagtgtcagtgatgatcattgcactttgagaggctaagaactttctcctcagaaagcaacgtgtgtaattttaaggtttatggaccccagtgaaactccttcaaggacccctaaataagaacctttgtggaaggcacgctgacagagaccttctgctggctggcataatattacgtttttcctttgagtcattcattgcaaccatttttaaaggctattttaatgaaggtcgggatgggtaatagggaagttttctctgaggagatgagcccatgatggggtgcaggatggggctccagggctgcggatggtggagagggagctgtccagtgactttgtgttctcaccacagccaccgctggagtcgctggccacagtggaggagacagtggtgcgggacaaggcagtggagtccttacgggccatctcacacgagcactcgccctctgacctggaggcgcactttgtgccgctagtgaagcggctggcgggcggcgactggttcacctcccgcacctcggcctgcggcctcttctccgtctgctacccccgagtgtccagtgctgtgaaggcggaacttcgacagtgagtctctgcctccttggaagctccaagctcccatctcagctccaaccttctctaaagcctcagactccttttggtctagctggggcccaaatgcccctgaactctctccactcccactcctgcttaccacctgataggccacatcctcgagagttggtctctggacacggccacgtgtcagtttacccacctctgcccccttgctcacttaggaattgagatgatgacaggtcctccttcccactggttaatgtgaggatttaaaagaattatcacacataaagtgcttagagcaaaatctggaacataaaaactttcagcaacttacatctgatggtatctccagcctgtcccaggtccagtgcctttggcagataaaccacctcagttttcagcctcctgctcgtctactttgcaaacgattgaccgtcaagcccgggtttgagcctgactcactccagaactctggtttatggctgtacacttgcttagatacttacactggcccccaccgcctttgatcgaagcaattgctgctgaaaaataaagcctttctgtggctctagacctgcctcttagttaagcagttttttgtttgtttgttttttgagataggatctcgctctgtcatccaggctgaagtgcactggtgcagtcatagcccactgcagcctcaacctcctgggctcaagcattcctcctgccttagcctctcaaatagctgggaccacaggtgtgcaacaccacgctgggctcattttttatttttggcagagatggggtctcactatgttgctcaggctggtcttgaactcctgggctcaagcaatcctcctgccttggtcttccaaagtgttcagattacaggtatgagccactgtgcctggctcgttggttaagcaatttttatgggaatgatgtaatcgtcagcacttagcattgactagatttattatgcgcaatctgcgaagtgtctcacacacactattttcatttaaacctcatgcggacctgtggggtaggtactgttactatcagctccgtttcatagggctgggaagacagagagggggtcatcacttgcccaaggtcattcagctaaaacctggacccacacaactgcagagtctgtgcttgctcctctctgccatactgcctgctgcctcaggatccccgtccccgactcccaggtacttccggaacctgtgctcagatgacacccccatggtgcggcgggccgcagcctccaagctgggggagtttgccaaggtgctggagctggacaacgtcaagagtgagatcatccccatgttctccaacctggcctctgacgagcaggtgagttttgcttcctggccctctgctctcccgtccttctggtggttcctgcccatgaaagagaatcccagagctcagcaaggcctctgctgccctcccactgttcctctcctctccctaggactcggtgcggctgctggcggtggaggcgtgcgtgaacatcgcccagcttctgccccaggaggatctggaggccctggtgatgcccactctgcgccaggccgctgaagacaagtcctggcgcgtccgctacatggtggctgacaagttcacagaggtagatgagcgaccgttgacattgtcccactggtggggacactgacactctcagaagggaagcatataggagctgaggtttc

SEQ ID NO: 92286 - DNA, 2152 bp, Homo sapiens
cccaagcctgccaggcttgttcacttggttattgattcatttcagtgctcctttatttatttatttttttagactaaaatagttttaataaggaaatagttttcttccttcccttctcccatgttgtggattgatacccagaaaggaacccttgttagcaagcagcggagctaggattagaagaatcatgtctgcctgttttttccagggtgctgtattttcctactgtgattcttaaagtcttttcaaaatggataaacatttcttgtgatactattgtaaggtttaaaaatctgcttaagttagtgatccatgctgcttgctttttgtgtgccgttaatgtgttcccagaacggggagctgggcttggacaggagtagtccctcgggagatgtccataaaagttgatgcagctgagctctttccatcctgtcctgggttgctgtgtgcattgcattctctcagaatccttctttcctctcctcagtgccctgaggtacggctgaacatcatctctaacctggactgtgtgaacgaggtgattggcatccggcagctgtcccagtccctgctccctgccattgtggagctggctgaggacgccaagtggcgggtgcggctggccatcattgagtacatgcccctcctggctggacagctggtgagtgaggaggcctgggggccaggcagtgctgcctcaggggaggtgcagtatgtccagggctgtgatggggaaacggggctttgaaggcttagtggaggctgtgacaactgcctggggagtcgaaggaagggacccaggaaatagggccttaaaagatgcattggattcaataagagagaggagggaaaggagcacctcagacaaagttgagaagtgtccggtctttctagggtgggtgtaggttccatgggatgtggctagcagctccccctgtttgctctcctggaacgcttaccttggaacccttggtttctcctgtagggagtggagttctttgatgagaaacttaactccttgtgcatggcctggcttgtggatcatggtgagtaccttcacaggagcagcaagaggagatgggagctccagaaaggcaggatggattggctggggctgtggcgggcagtggaggaggctagagtcactccccacgccgctggatgctcgtatggaccagctcgcatgcttgttagagtcctagagaagtgttgagtgggaggaggacgaaacagatcacccaggggttgcctggtatagtggagagccagagggccactgagcagccagaccagggttttgaatcctgcccttggggctgtcagatctaaaacaagtcacctgctgtctttgaatgagccccacactcattctttgaaacttcttattctggtgccttggggccattatgagaatggctcattgtttacactaagagaggtaaaaaataaaaggtaatatttatctctgtgaagccctgtttgaagtaataagtgccacataatttaggcaaatcacttcttagagccttagtttgcccatctgtaaaatgaagccagtagtggaacctacctcttggagtggttgaaaagatactgtataaaaaaaaacagttactagatatagcacatagtaagtccttttttctctctttggctcacatgcagcctggcacctaggggctgctttgtaagccatggtgagtgtgacctacattttgcccacatcagttcttcacctccaaatccctgtctctctcaccctcacccttctgcagtatatgccatccgcgaggcagccaccagcaacctgaagaagctagtggaaaagtttgggaaggagtgggcccatgccacaatcatccccaaggtcttggccatgtccggagaccccaactacctgcaccgcatgactacgctcttctgcatcaatgtgagccttccacctgcctgctggcccatccctagggaactggagcgcgtgggagaggagggatgctagagggttccccaagggagacacctggcttgggaatggagacatggagtgcatcttctatccagagatgagtccttggggaactgcaggcaagggggtggggctcccagggtcagggtcatagggcctctgggactggggacttggatggtgagg

SEQ ID NO: 92287 - DNA, 1058 bp, Homo sapiens
cagttccctgaactcatctttagattcagtataagcccaataatcttaacaggttctttagtggaaaattgacacttctaatgaacaaagttgtctgatttacactaccagagacgaagacttatgacaccacaataattaaaatagatgtgaacacaagcatatttaaatcgcccaatagaatggaatcaagggtacagaaacagtcccacatgtgtttaacagtaggcatctctgcagttcagtggagaaatgtatgttttttaaaaaacatagctgagtcaatttgatatccatttaggaataaaagaaggctcgcctcaatgcataaacaaattaatttgagatgacagaccagaaccagaaagattttaaaaataaaggacctagaagaaaatgtaggaaaatatcttcttgagttagcgtaggcacagatttgttaaacagcaaaccagaggaagtgatgggtaagttgaccttctgtaaaatgtaacgctgtttctcaaaagacagcattttgagagtaaaatgcaagccactgactggaggaagatgttttaatatatgtttctgagaaaggactcatccacaatacctgtctacaaatcaggcaagacaagaaagagatggggaaaaagacttgaataggcacttgaaaaaggatctccaaatagccagtaagcatatgacaagggtgttcagcatcattagccttcaggaaaatgcaaattaaatctcagtgacatatgactacacgcctcccagaacagccaacattaaaaaagactcagtggtgcaaatggtgaagacatagaagagctggaactctcatccattgcacgtggggctgtacatttagggtttgatcactctgaaaacgggagtggatctggagtggaatttggtgaagcttgttatacaaacagcctgtgaaacagcccttccactcctgggtctctatccaggagaaatgagtgctgtttctgtcagaagaatgttcatggtagctttattcatagtagccgtaaaaatggaaacaacctccatgtctgtccaca

SEQ ID NO: 92288 - DNA, 1055 bp, Homo sapiens
caggagggtggactttgaggacaggcactgggcctgtgggcagcagcttctgggagggggaggtaccttggcattgtgggcagagagagggctctggttctgattcttgcctgttcctgttttcctagttctgtctctcgcctgatgctggaagaggagcaaacactggcctctggtgtccaccctccaacccccacaagtccctctttggggagacactggggggcctttggctgtcactccctgtgcatggtctgaccccaggccccttcccccagcacggttcctcctctccccagcctgggaagatgtctcactgtccacctcccaacgggctaggggagcacggggttggacaggacagtgaccttgggaggaaggggctactccgcccacgtcagggagagatgtgagcatcccgggtcactggatcctgctgctgtaatgggaacccctcccccatttacttctccacctcccgtcctccccatcattggtttttttttgtgtgtcaactgtgccgtttttattttattccttttattttcccccttttcacagagaaataaaggtctagaagtagttggtcctctggccttagtcatcagcttggaggagggggcaccaccccagagccacaacatctgcgcttttctctggagaagatcttgttacaggacccattatacccctatgtcccgaaagaatactctggggatccccccaggagtgctgctggcctttggggtagagggtccatgaggtgctctgggtggtgtcctgtagtgcagttcagattcatagatgtcggccgagtatttggggggttaagagcaggtgccttggaaccagactgcctgggtccaaattgtggctccttcagttaatagacgtgtgactaggagtagcttgttaagtctttatgagctcagttttgtattgtgtaaaatgagagttacagtaatacctagattgcagggtgggtggcgaggaccaagtgaattagtacctggaaagtgtgtaacagtttcaacatgagaagtacacaacatgag

SEQ ID NO: 92289 - DNA, 1011 bp, Homo sapiens
ttagtgttcgttcaagcctagcaatccatcagacaatccacactggagaaaaaccttacaaatgtaatgaatgtggcaaagtctttaggtacaattcatacctcggaaggcatcggagagttcatactggtgagaaaccttacaagtgtaatgaatgtggcaaagccttcagtatgcattcaaacctagctacccatcaggtcatccatactggaacaaaacctttcaaatgcaatgaatgcagcaaggttttcactcaaaattcacaacttgcaaatcatcgaagaattcatactggagagaaaccttacaagtgtaatgagtgtgggaaagccttcagtgttcgttcaagtctgactacccatcaggcaatccattctggagagaaaccttacaaatgtattgaatgtggcaagagcttcactcaaaaatcacaccttagaagtcatcggggaattcattctggagagaaaccttacaagtgtaatgaatgtggtaaagtcttcgctcaaacatcacaacttgcaaggcattggagagttcatactggagaaaaaccttacaagtgtaatgactgtggcagagcctttagtgatcgttcaagcctaacttttcatcaggcaatacatactggagagaaaccttacaaatgtcatgaatgcggcaaggtttttaggcacaattcataccttgcaactcatcggcgaattcatactggagagaaaccttacaagtgtaatgagtgtgggaaagcctttagtatgcattcaaacctaactacccataaggtcatccatactggagagaagccttacaaatgtaatcaatgtggcaaggtcttcactcagaactcacaccttgcaaatcatcaaaggactcacaccggagagaaaccttaccgatgcaatgagtgtgggaaagccttcagtgttcgttcaagcctaaccacccatcaggcaatccatactgggaaaaaaccttacaaatgtaatgaatgtggcaaggtcttta

SEQ ID NO: 92290 - DNA, 1057 bp, Homo sapiens
acattatatatttcaaaggtcaaaggacatttggaaatggctacttaccttcaggttataaaatcttttattccattgtttgaggtttctcaaaaaggctactgtttgtgactttcaacctgaactatggatctgtggctattttgcatccttaagcacctttcgtggtgcctatctgggaaagaaccacagtatggaaaggcttacttcattacatgaggatcatttttatccatgtttattgaagaaggaggactctgccttgtaaaattaaatattctctcaattgagagaccatggttttggggcagaaaataatgtaaaactatgatatcaatcatcatactgattgtgttcagggtgcttttctgagagaaagacaccatgggttttagggaagtaaggctctacctgcattgagcaggccaagacctcaggacactggaatttttatgagaggagagtaataagttattagtgactgattatgtgatgggaatagtgcaggggaaatggttgccactttctctactgaatggcaatagctgttttatagcagagattgatgaaaaataggcttatttttgaaattgaagaggtaacagttattagagtggagagcttggtcagaaaaaccagaataccatggttttttttgttttgttttgtttttagtagaattcacactaattgctggaattacattttgctacagttttattaagaatgtgtcacagacataatgttttgctaaaaaaaattcaacgttttcttataactataaacaaatcacattctttgtaccaacatcattttatcctacctcagtaggatacttcatagcagataataacaatacactcagtcttttaggttggaggatgtagaacaattttttttttctttgtggaatcaacatacaattttgggaaaatgtaatcatactctgcacttgaattattctctctacactctgccttagaatatttatatggatataatgaaaatcccatagaaagtgcagttttcatactcttacactctgaaagctgccaca

SEQ ID NO: 92291 - DNA, 3086 bp, Homo sapiens
atcaactaactttgattgcaaaaaaagaaactaaaacctctgtgcatgttcgttcccttctcaccctgcattttgaattttttatgtcgcaatttatgttgtgtactgcctatcacttaacaaactgttgtgcttatttttaatagttttatcttttagccctcttagtaaatatacaaatggtttgcacaccatgattatgatattaatattagtgtaacagttacatcgtgtcattttctttggatttgaagaactccctttatcatttcttgtaaaacaggtctgatcatggtaaattcccttagctttgtttgtctggggaagactttctctcctttatgactgaacgattgctttgctggctacagtattgtaggttgggaactaggcttccatactattaatttgaattacatggaatcaactttattaaacaatcctctttcctttgtgttcctaaaaattgaatattattgttctgaagtttcataaatctgtttaatataagaattgcttttggtttaatattgtttttcggtgtaatattgtttttcggtgtaaaatacttgtttacgtactacaattaattggaaacctatggatctttatatcttgtagctctctcttccgaatttgtaatgaaagatttactacacaaagggaagagtaatacaggagaagtattccaaacagtgatgttggaaagacaggaaagccaagacattgaaggatgttccttcagggaagtccagaaaaatacacatggccttgagtatcaatgcagagatgctgaaggaaattacaaaggagtgcttttgacccaagaaggcaatctcactcatggaagagatgaacatgataaaagagatgcaagaaacaagcttattaaaaatcagcttggattaagccttcagtcacatctgcctgaactgcagctttttcaatatgaagggaaaatttatgaatgtaatcaggttgagaagtctttcaacaataattcctcagtttcaccacctcaacaaatgccttataatgtcaaaacccacatttctaagaaatatctcaaagattttatctcttctttattactcacacaggggcaaaaagcaaataattggggaagcccttacaaatctaatggatgtggcatggtctttcctcaaaattcacaccttgcaagtcatcagagaagtcatactaaagagaaaccttacaaatgttatgagtgtggcaaagcctttagaacacgttcaaacctaactacccatcaggtgatccatactggcgaaaaacgttacaaatgtaatgagtgtggtaaggtctttagtcgaaattcacaactctcacaacatcagaaaattcacactggagagaaaccttataaatgtaacgaatgtggcaaggtcttcactcagaattcacaccttgtaagacatcgaggaattcatactggagagaaaccttacaagtgtaatgagtgtgggaaagcctttagagctcgttcaagcttagctatccatcaggcaacccacagtggagaaaaaccttacaaatgtaatgaatgtggcaaggtcttcactcaaaattcacaccttacaaatcactggagaattcacactggagagaaaccttacaagtgtaatgagtgcggcaaagcctttggtgttcgttcaagcctagctattcatctggtaattcacaccggagaaaagccttacaaatgtcatgaatgcggcaaggtctttaggcgtaattcacaccttgcaaggcatcagctaattcatactggagagaaaccttataagtgtaatgagtgtggcaaagcctttagagcacattcaaacctaactacccatcaggtcatccatactggagaaaagccttacaaatgtaatgaatgtggcaaggtcttcactcaaaattcacaccttgcaaatcatcaaagaattcatactggagtgaagccttatatgtgtaatgagtgcggcaaagccttcagtgtgtattcaagcctaactacccatcaggtcatccatactggagaaaaaccttacaaatgtaatgagtgtggcaaggtcttcactcagaattcacaccttgcaagacatcggggaattcatactggagagaaaccttataaatgtaatgaatgtggcaaggtctttaggcataattcatacctttcaaggcatcagcgaattcatactggagagaaaccttacaagtataatgagtatggcaaagcctttagtgaacattcaaacctaactacccatcaggtcatccatactggtgaaaaaccttacaaatgtaatgagtgtggcaaggtcttcactcagaattcacaccttgcaagacatcggagagttcatactggaggtaaaccttaccagtgtaatgaatgtggcaaagcctttagtcaaacatcaaagcttgcaaggcatcagagagttcatactggagagaaaccatatgagtgtaatcagtgtgggaaagcctttagtgtccgttcaagcctaactacccatcaggcaatccatactggaaaaaaaccttacaaatgcaatgagtgtgggaaggtcttcactcagaattcacaccttgcaagacatcggggaattcatactggagagaaaccttacaagtgtaatgagtgtggcaaagcctttagtcaaacttcaaaacttgcaaggcatcagagaattcataccggagagaaaccatatgagtgtgggaaaccctttagtatctgttcaagcctaactacccatcagacaatccatactggtgggaaaccttacaaatgtaacgtgtggaaagttctaaagtcagagttcaaaccttgcaagccatcacagaattcatagtggagagaaaccttacaaatgaaggtggtaacttttgcagttagaattcattcctttgacaacgtcagagaatttatgcctgagagattccttgaaaatgcaatgactggctgggtgcagtggctcatgcctgtaatcccaacactttgggagtccgaggcaggtggatcacctgaggtcaggagttcaagaccagcctgaccaacatggcgaaac

SEQ ID NO: 92292 - DNA, 1054 bp, Homo sapiens
ctgagaaatcaacactgatttaaagactatcataacctcttatagaagagtataagaagacagaattaaggaaacattctgcccaaaaatacctgtgtgtgtgaggatgtggtgaaaacagacccagtttctcctactgtactctcacaacggaaaacacatctgtgatcccagatgtcctgggttttcccacacacaccaagggagcaattctgcactggacaccagctgagtgacctcctattcagttcaattctgacactgtctacctggacatagcatcagatcccacaggttgagggctcaatccaacaagagtgtgcccacttcaatgccagttgcaaacacagatggtctctgcttctcactgactggcttatacatcatgaattcccatgaccccctcctcaggtttgattaatttgctagaatggctcagagaaatcagggaaacactttatttatattgacccatttattatataggatattacagagtatacagatgaacagccagatgtaagcagtctattgggtaaggtatgggagaaggagcatggcgtggtggtgcatgcctgtaatcccaactacttgggaggctgagtgctgtctttggtgggggtcggtgggggcgtcctcagagcctccgtgtgtttccctatcctgaagcttgttcaggccctgtcctttcgggttattatgggggcttcattaagtgggcacgattgcttacatctttggctactggtgatcagccgagccttcagcccccatcccctcagggtaagttgggggatggggctcgaagtcccaactctgtaatccagccttggtctttctggtgaccaccccgccattctgaaactatcttggggcctccagccaccagtcatctcattagcttacaaaggcacttatcactccagagattccaagtgagatgtatgtcaggaaagggggatgaagaccatatgtatattttattatatcacaacttggatatcggcccacttactccagtttaatctattctgtcttctcattttatgtgaag

SEQ ID NO: 92293 - DNA, 1124 bp, Homo sapiens
cccccaaccccgtgctctctgaaacatgtgctgtgtccactcagggttaaatggattaagggcggtgcaagatgtgctttgttgaacagatgcttgaaggcagcatgctccttaagagtcatcaccactccctaatctcaggtacccagggacacaaacactgcggaaggccgcagggtcctctgcctaggaaaaccagagacttttgttcacttgtttatctgctgaccttccctccactattgtcctatgaccctgacaaatccccctctgcgaggaacacccaagaatgatcaataaaaaaaataaaaataaaaataaaaaaataaaaaaaaaaacctctaggcttaggggctttgtgttaaatgcgagttacaataaaattgccgacgttcatccaagggtgctgtttcccaatgtgtcatacggcaacagaaaatgtcttccaactggggtgtttagaccacttccttttaaagtgattattatatggttaaactatcttggtattggttttgtttttgcctttgttctttcttctcttttctttcgttgccttgggttttgttttgttttgtttatgtagactggaagtccatattttatttctctagtgacatatttacagttcaatataaattaaaggcctgcttgtatgccaaatccaggtcccttgggtggttcagtcaaaggggtaagacctccagctggctcacaagagaagcgtccactccttggcccaggttttgggattttgccagccttgagctcatcaataatttcttcaatatccttagctgtcaaatcttcatagtaattgtcatttatttgaaccattggtgcgttcacacaggcccctaaacattccacttctacaagagtgaaaagtttgtcaggtgtagtctccccaagctttattccaagctttttctgaatggcctccagtatgctgtcagagtttggaagcatgcagggtgtagtagtgcagacctgaatgtgatacttttcaactggctttcgattatacattgtataaaaagttgctacttcatatactcttattggaggtacttgtaaaacttctgcaaccttgttcatagcagagatgggcaaccacccattct

SEQ ID NO: 92294 - DNA, 2743 bp, Homo sapiens
ccagctactcggggagactgaggcaggagaattatttgaaccggagaggccgagtttccagtgagccaagatcacgccactgcacttcagcctgggcaacagagaaagactttttctcaaaaaaaaaaaaaaaatacaaaaaattagctgggtgtggtggcagttacctgtaatcccagctacttgggaggctgaggcaggagaatcacttgaacccaggaggcagaggttgcagtgagccaagattgtgccactgcactccatcctgggcaacaagagtgaaactgcatctcaaaaaaaaaaaaaaagtatttgggtgtgctgacacgtgcctgtagtccctacttgggaggctggcacacacacacacacacacacacacacacacacacacacacacacccatacccatatatatggtttgggggataggatgtggcccgagatcttcacttatttagcttctgaagttgaacctgttctccccaaccttgacccttttccagttgtcctgctgtccatgctatgcctggtattggcccattggcccaaacgcctgttctctggagagctgatctacatcgcagcggctgtgttgctgctggtgctcattgtgggattcactttcaccgtctggagacagccccagagcaacactcctctttacttcaaggtaggtggccttatgtccccacaccaccctcctgagtcagtggactctgcatgcctcaagctctaaatactctacgggaccaggggtaaaaagggcagttgcgaaaaaccaatggactgttcatggacaccccctccagcccccacatatcagtacttcccaaaacctgtctcttccagaacacccaatggaatacctactcagaacaggcattgagccaggtgaggtggctcacacctgtaatcccagcactttgggaggccaaggcgggtggatcacttgaggcgaggagttcgggaccagcctgaccaacatggtgaaattccggttctactaaaaatacaaaaattagccgggcatggtggtgtgtgccggtaatcccagctactcaggaggctgaggcaggagaatcgcttgaacccaggaggcggatgttgcattcagctgagatcgcgccactgcactccagcctgggtgacacagcaagactctgtctcaaaaaaaaaaaaaaaagaataggcattgaatatgcgactgcaacagagctgaggccttcccaccccttggaataagggtcccttgcagacgttcgtggtgtgctcacggttaacgctttgcctgcaggtccccctgttgcctgttctcctctggtcagcatctctgcacatgtttacctgatgatgcagatgaccactgagacctgggcccaatgtggagtctggatgttgattggtgagtggcttcctggaaaaaaagaggcctcttgggtgtctgagcccaacactcttcctgcgacctttccctatagctgtctcaggctaacagtgtggggtgtgcctgtagtcccagctactcaggagatgaaggcaggagcatcgcttgagaccaggagctccagaccagcctgggcaacatggcgagactccacctctaccaaaataaaaaactggccgcacgcagtggctcgcacctataatcccagcacttcagggggccaaggcaggtgggtcacctaagatcaggagctcaagaacagcctggccaacatggtgaaaccccatctctactaaaaatacaaaaaagtagccgggcgtggtggcgggcgcctgtaatcccacctactcaggaggctgaggcatgagaattgcttgaacccaggaggcagagtttgcggtgagccgagatcatgccattgcactccagcgcaggcgacaggagctgagattgtgccactgcactccagcctgggtgacagagtgagatgctgtctcaaaaaaaaaaaaaaaaaaaaaaaaaaattagccaggcacggtggcacctgcctgtagtcacatctattctgaaggctgaggtgggaggatcgcttgaacccaggaggtcgaggctgcagtgagccatgatcatgccactgcactccagcctgggcaatggagcgaagctctatttctaaataaaagaaacaagaaaacctccaaataaacaaaccacagtataatcgctatagggcatttataagggaaggggtgactacatttcctttcattgtctcatttccctgctaggatttgctatgtattttggatatgggatcccacacagcttggagaacaatcaacagccaccagcgtcaagctcccaaactcctcatgaaaacatccctagtcccttgctgaattagtttaaccacggaaaagggatggtccagtccactggaggtgtcctctggatgaagggaaagtgtgaagctctgtggagcatgaaggtgggatacacttaaagccccttgtgcattgccagtgagcaaacactttttaaaaaactttattttgttgtttgtttgtttgtttgtttgtttgtttgttatagaggtgaggacttgctctgttgcccaggcggaacttgaactcctgggctcaagtgatcctcctgcctcagtcttccaagcagctgggactacaggtaccccatcatacccagcttaacaaaatatctttatttgatttgattttttttctttttgagacagagtctcgctctattgcccagtctggagtgcagtggcatgatctt

SEQ ID NO: 92295 - DNA, 1019 bp, Homo sapiens
caagatgtaataatcaaatcaaggtaatatcataaccatcacttcaaacattgattatttccttgcattgggaacactgaaaacctatttttccagctctttttttttttttttggagacagagtctcgctctgtagcccaggctgcagtgcagtggcacgatctcagctcactgcaacctccgcctcccaggtccacgcgattctcctgcctcagcctccggagtagctgggattacaggcatgtgctaccacacccagctaatttttgtatttttagtagagatgacgtttcaccatgttggccagggtggtcttgaactcctgacctcaggtgatccgctcaccttagccttccaaagtgcttttccagctcttataagttgttaacgacagtcaccctctagtgctgtggaacattggaactcaccctgttttgagccctgactatagcaatcatggctttcctgtttgagttcagtgaccttgtgagcctcttgtccatcgggactatgcttgcttactccttggtggctttttctgttcttgtcctcaggtgagactggggtcctagacacgtgaggattgatggggttcccagccctcttctgcctgcctcctggcccctcggtgcattgctacacatacaggagtgggaggagtacaacagcccctgcttatccacgggggacacgttccaagacccccagtacatgcccgaaaccgcggatagtaccagtccctatacatgatcattttcccatccataactcagttgcctaatgtgacttaacacggccggtagcgttcacagcatggacacactggacaaaaggatgatttacatcctgggcatgggcagcgtggaatgccgctacttgaagctgcacacaattgaaaacttatcaattacggcggggcgcggtggctcacgcctgtaatcccagaactttgggaggccgagacaggtggctcacttgaggtcaggagtttgagaccagcctggccaacatggtgaaa

SEQ ID NO: 92296 - DNA, 1524 bp, Homo sapiens
tgaaacagggtcttgctctgtccctcaggctggagtgcagtagcacgatcatggctcactgcagcctctacctcccaggctcaagcaatcatctagagtagctaggactagaggtgtgcaccaccacacctagctaagtttttaaatttttgtagagatggggttttgccatgttgcccaggctggtctcaacctctgggctcaagtgatccacctgactcagcctcccaaagtgctgggattataggcgtgagccattgcaactggccagaggtgccctcttggacacaggagtggggcctggggtgcagaacctggactattgtgggaatagggggaatctgggttgacggagccagatgatggggagtggggatggcagtgggggccccgggcttgtggaattaactgagcagttggagttaactgagtcgtcccagaaagacggctgcacaccttaccaatgtttcttgttccttctgtccccgtagctcgggctccctgggctctggagggtttgtgccttttggctttggcgtgattctccatggagcggccacgtgtttctttgcatttgtgggttttgatggcattgccaccacaggtaacacggtcattctgtctcatcgggggtttgggcactgtttgggctgccgctgggcacaggtttcattaaaggctaccctgttctcagatggggaagagggaagagggttttgtaccttcacttccgtgcattttcctggcccagtgcgtatacctgtcctgcaggagaagaagccctccaccctcaccgcccggtgcatatacctgtcccgcaggagaagaagccctccaccctcaccgcccggtgcatatacctgtcccgcaggagaagaagccctccaccctcaccgcctccaccctcaccgctccatccccttgggcactgtgacctcgatcttcatctgcttcttggcctattttggtgtctcagcggcgctcaccctcatagtgcccctactacctgatatgtcccgagaaccccttgccggaggcttttgtccacattggatgggcccccatcagatatgctgtggccgtcggcaccctctgtgccctttcctccaggtcagtgctggatgctctctccctgtctgctgtctggttctcgggtgtcctgggccttggtaaagggaggagacgtttcacccacggaggcgacagagcagaagccccagtccctcttgcttcctgagtccccatgcgtgttcccgttttctcctgcatgcagcctcctgggtgccacgttccccacgcctcgcgtgctctagtcaatggctgaggacaggctccttttctgcggactcgcccggatccacgcccacaccagcacccctgtggtggccactgtcgttgctgggacccttgcaggtaaaggcccagaatccaggctttctttcatccattttctatgagttagttcctcatcctcccccacagcccatccatttttgcttttattattattcatcaattttttta

SEQ ID NO: 92297 - DNA, 1092 bp, Homo sapiens
tcactgcaacctctgcctcccagcttcacaccattctcctgcctcagcctcccgagtagctgggactacaggcgcccgccaccatgcccggctaatttttctgtgtatttttagtagatacagggtttcaccatgttagccaggatggtctcaatctccttacctcgtgatccgcccgcctcagcctcccagagtgctgggattacaggcgtgagccactgcgcctggcctgaaatgaaccatttgaaagcatgcagttcagtggcatttagtacatccacggcattgtgcagctgccacttccatctaattgggaaacgttttcatcacccctgcgggaaaccctgcaccctttaggcggtcgttccccattccctttggctcctggcaaccacggatctgccttctgtctctgtgggtttatttattctggatattccatgtttcccacaggactgctggctctgggagctcgggagtcagcctggggttccaaagtcttcacaggtgtgaaccttttggttctgagctgcgtcatcttctccggcttcatcaagggagatctgcacaactggcagctcacagacgccgactacaaatgggccgagctggggtggtccaacgacacccacaggtgagggcacaggtttattttatttttttttattttttaattttaattttaatttttatttatttttatttatttatttatttactttttttttttgagatggagtctcactctgtcacccaggctggagtgcagtggcacgatctcggctcatgcaacctctgcctcccgggttcaagcgattctcctgcctcagcctccgagtagctgggattacaggtacctgccaccatgctcggctaatttttgtatttttaatagagatggggttttaccacgttggccaggctggtctcgaactcctgacctccattgatctgtccacctctgactcccaaagtgctaggatttcaggtgtgacccactgtgcctggcctgtttttttattttcaaatttacctttatttttattttttgagatggagtctcactctgtcgcccaggccaaatttcggtcg

SEQ ID NO: 92298 - DNA, 1026 bp, Homo sapiens
gcgatctcggctcactgcaacctccacctcccgggttcaagcgattctcctgcctcagcctcctgagtagctgggactacaggtgcccgccaccatgcctggctaatttttttttatttttagtagagacagggtttcaccatcttggccaggctaatctcaaactcctgacctcgtgatccacctgcctcggcctctcgaagtgctaggattacatacatgagccaccacgcctggccagctctgtcaaacattaatttgatcccaagcagagggacttttgatctcaatctgcatgagtctgtctctaggaaggaggctgatcattatgctgggggggtgatgagcaccctcccatcttcctctgtccagatctcaggggagagccagcagataggaccattcagcagccaatgtccaaataaggttttgttactcgaagcgctgccaacctactgtgggtcattttattcaggtccatcccaaataacctgtggacacaagagttgatattattccagtgtactactgtggcattcaattaataagccttaagtatctattgtgcactaccgtggtaagataattccatgatcctccagaaattccacccaacgctgctggaaagtaggcttactacatgctacatgcaagtccccaagctgtgttaactgcataatttttttttttttgagacacagtctcattctgtcacccaggctggagtgcagtggtgcaatctcagctcactgcaacctccacctcccaggttcaagcgattctcctgcctcagcctccccagtagctgggactacaggcgcccaccaccacgcccggctaattttttgtatttttagtagagacaaggtttcacccgtgttagccaggatggtcctagtctcctaacctcgtgatccgcccacctcggcctcccaaagtgctgggattacaggtgtgagccaccacacctggccaattcataatttatcatagccttatgaagatgcaactatgttctccattttt

SEQ ID NO: 92299 - DNA, 2028 bp, Homo sapiens
ggcaaggaaggggtgggggcggaacagaccaggaaggagggggtaggaagggagcggaagaaaggagtgaggtgagacgggggcggggacctgagctggggggctctgcactaaacaaaccctaaacatgcggggtttctatggtaacggtcttccctggcctacccgggagactcctctagggctgtgtcgaggagggcagcccccaggagtctccacgccgccagctgttgtgtcttcctgttttgtcaccacggcaaccgtgacctcagccctccaccctgctcactggggtggggcgggagctccacgctacttttactctggggggcgtggtctgctcttggccccgcctcggggcggggctgggatagcccagactcggggaagtccctgtccaccgccctagccggagctgcgccccgccccggccccgcccccgtcccgcccgcgctggctccccagccctccaaccccacccagccctcagacccttccagctgccgctgtcgtctttgcttcagccgcagtcgccactggctgcctgaggtgaggttgtggggaccccagagggcataagcaacagtctagggtctttatggccagagagaggaatgggctgggtctcagaatgtctgggtccctagaaagactggggctgggccaggattcttggggttctgcagaggagagggctgaggacctggactgtggaggtcatacgtctggaagagtggggaaggggacctggactccggggtctgagggaggaggggctgggggtctggactcccgggtccgaggcaggaggggctggggggtctggactcctgggtccgagggaggaggggctgagggcctggactcctgggtctgagggaggaggagctgggcctggactcctgagtctgagggaggaggggctgggtctgcgggagtagagagatggggactcgtaggtgccctagttggaggctggaatctggtacgtggaggtcctttaggaggggaagcgcttagggttaggtgtcctgggtttgggaatgagaatggaaggaattcagaattactgacccctccccatccaggggacagacagaatcggaactttgggctcctgaaaggccgagggaggggggtgttaagatccagccccgtgcttccgaagtgcagaaggagctgggaaaggaggagaagacagggctgcgtcccgcacctctgggtgccgagagccgaagctggggttccggggcccgattctcagcgtgagcgatgggtgtggcgtctggagtggacgagggaggacactgaggggctgggtgtggcccggagagtcgggtgcgctgcgaggaatcccggaggggtgtttcctcaccctccagggtctggctgcgcattcctgagctctgatctcgggcgatggctggaggccctaagggcggggtggacccctcccctcccctcccctcggcgcgcccccctcccctgcgcgcccccctccgcggctagcccaccttccgcgggggacagaatgagtgacgccctcgctcgtcctcctcccctgcttgggacggggcagtagcccgccttctagagcacgggacgctgggccagtcccgatttccttctccttcgagggtcctggaggggcgtgggggcaggcagtgtctggctccgggtggagcctcccaggtgctcccgcaagccccgaatggcgattagggaggccgtgggaggcgtagctgggcctcgggcctgacgccagcaccgcgtgcagtttccggcctggagcctgagcccctcagaggcccgggtccctgcccactccggtcttagagatgctcttgggggggctctcagcccatgtttatagggatccagaaatgcaggcctccaaccctgagagtcggggtccccaccccccggaaatccgggagagggcgggcagccccggaggcgggcgggggtccgggcaccgcctcctggtccctgacacattccagatgcctgggccgactcgaagccctt

SEQ ID NO: 92300 - DNA, 3733 bp, Homo sapiens
aaccggaggggacaggctcatccctgtatgcccaggactgtccccatttgaaaacccaaggctgggcccggtggctcacgcctataatcccagcactttgggaggccaaggccagcggatcatgaggtcaggagatcgagaccatcctggctaacacagtgaaaccccgtctctactaaaaatacaaaaaaattagccgggcgtggtggcacatgcctgtaatctcagctactcgggaggctgaggcaggagaatcacttgaacctgagtagcagaggttgtagtgagctgagattgtgccaatgcactccagcctgggccacagagcaagactctgtctcaaaaaaaaaaaaagaaaagaaaaccgaaagccccacatcttgggaactccctaattagagctcatattaatttgtccctggggtaggcaatggctaagggacctggattcttatgtttgtgactgtataaggacactgtctttcccctttttgcagccatgccagtgacggtaacccgcaccaccatcacaaccaccacgacgtcatcttcgggcctggggtcccccatgatcgtggggtcccctcgggccctgacacagcccctgggtctccttcgcctgctgcagctggtgtctacctgcgtggccttctcgctggtggctagcgtgggcgcctggacggggtccatgggcaactggtccatgttcacctggtgcttctgcttctccgtgaccctgatcatcctcatcgtggagctgtgcgggctccaggcccgcttccccctgtcttggcgcaacttccccatcaccttcgcctgctatgcggccctcttctgcctctcggcctccatcatctaccccaccacctatgtccagttcctgtcccacggccgttcgcgggaccacgccatcgccgccaccttcttctcctgcatcgcgtgtgtggcttacgccaccgaagtggcctggacccgggcccggcccggcgagatcactggctatatggccaccgtacccgggctgctgaaggtgctggagaccttcgttgcctgcatcatcttcgcgttcatcagcgaccccaacctgtaccagcaccagccggccctggagtggtgcgtggcggtgtacgccatctgcttcatcctagcggccatcgccatcctgctgaacctgggggagtgcaccaacgtgctacccatccccttccccagcttcctgtcggggctggccttgctgtctgtcctcctctatgccaccgcccttgttctctggcccctctaccagttcgatgagaagtatggcggccagcctcggcgctcgagagatgtaagctgcagccgcagccatgcctactacgtgtgtgcctgggaccgccgactggctgtggccatcctgacggccatcaacctactggcgtatgtggctgacctggtgcactctgcccacctggtttttgtcaaggtctaagactctcccaagaggctcccgttccctctccaacctctttgttcttcttgcccgagttttctttatggagtacttctttcctccgcctttcctctgttttcctcttcctgtctcccctccctcccacctttttctttccttcccaattccttgcactctaaccagttcttggatgcatcttcttccttccctttcctcttgctgtttccttcctgtgttgttttgttgcccacatcctgttttcacccctgagctgtttctctttttcttttcttttttttttttttttttttttaagacggattctcactctgtggcccaggctggagtgcagtggtgcgatctcgactcactgcaacccccgcctcctgggttcaagcgattctcctgccccagcctcccaagtagctgggaggacaggtgtgagctgccgcacccagcctgtttctctttttccactcttcttttttctcatctcttttctgggttgcctgtcggctttcttatctgcctgttttgcaagcaccttctcctgtgtccttgggagccctgagacttctttctctccttgcctccacccacctccaaaggtgctgagctcacatccacaccccttgcagccgtccatgccacagccccccaaggggccccattgccaaagcatgcctgcccaccctcgctgtgccttagtcagtgtgtacgtgtgtgtgtgtgtgtgtgtgtgtgtgtgtgtttggggggtggggggtgggtagctggggattgggccctctttctcccagtggaggaaggtgtgcagtgtacttcccctttaaattaaaaaacatatatatatatatatttggaggtcagtaatttccaatgggcgggaggctttaagcaccgaccctgggtccctaggccccgcctggcactcagccttgccagagattggctccagaatttttgccaggcttacagaacacccactgcctagaggccatcttaaaggaagcaggggctggatgcctttcatcccaactattctctgtggtatcaaaaagaaaaaaaaaaaaaaagaaggagtcggggccgggcgtggtggctcacgcctgtaatcccagcactttgggagaccaagtcaggcaatcatctgaagtcaggagttcaagaccagcctggccaacatggtgaaagcatgtctctattaaaaatacaaaaattagccgggcgtggtggcgggcgcctgtaatcccaggtatttggggggactgagacaggagaatcccttcaacccgggaggtggaggttgcagtaagtcaagatggcaccactgtgctccagcctgggggacagagcgagactccatctcaaaaaaaaaaaggaatcggacgaagaaccacaggatgttgaagacaactgtctgaagtatttgtgagggacagcgatgtggccctctgtgttaagaataacgtgtcctgctttggcagagagaagaaaatagccactgcccgctttcaaggcaagatcgaccttttctgttttgttttgtttttctttctttttcctggccatgaggacaaaaattactgagtggcccttaaagagggaagtttgttttcagctgttctcttttgcccgtaggtgggagggtggggattgctgcgtcctagctagaggaatggctttgcttgaatgtgtagtgcacacgcacgggtgtttctgtgtgctagttgcttcttgctgctgcttcctgcttgtctgggactcacatacataacgtgatatatatatatatatatataaatgtataaatatatattttatttttttttaaatccctggagcttctggttcctatcagttcctgttgttaatcgtagaaccgttgtcccttcccccattcccgtatccatcatgttctttttcttttaaatatcaatataaaggtaaaagaaggacttgtgctttcttaatgaggagggcggccgagcacggcgggcggatcacttgaggtcaggagtttgagaccagcctggccaacatggtgaaaccccgtctctacaaaaaaataaaaaagaaaagcgggggaggactctcggagaggggcaagggccagattcttgggtctagtgggagaatagggttggtgccaagacaaccttggcctcatcagaagatactagctggatctaggtcttctaaatgacttcctcaaaccaggagggctgggtgggatagaaatgaactagacttctccctccttggagtctgtcccctgagcac

SEQ ID NO: 92301 - DNA, 1093 bp, Homo sapiens
cctgattttgatgttctggaatctgtaatcgagattctggttctatgtctctgggttccaatgttctgggactcagcagactgtgaagatgttccaggattccaggtccaggagcctgcctagatctgggagggtggaattagggttctggagctaggttctggagtgaggaggaattggagcaagattgggttttaagacggggtgcaagaatgtggagaagggacgaggtcccagctgagagtcagaggggcgaaagggggaagctgagatcggctacctgggatggaggcagccagggtggccagggtgatggtgcccgtttccgaacccacagggctgcgagaggaccaggcagctcgcggtcaaacccctgagccgccaggcggaggatgggaggatgtcatgtgtgatgtcatcttaaattggggtatcaaatgaggtcaaggcacaggatcagagttagaaggtcatgggtcaagttcttggtgttagaattgggtgttaggctcaagatacaaatcttgagtgtaaacttcagtgggggcctctgctcaaagtcttagatagggctgaggtcaagggtgtgaagccctggtatggggttagagatccttggttagtgacccactttgggaatttctggatgtagttcagagacagggtgcaagaaaatgtatcagggcatcagattagggcatggagttaagactgggtagcctgggttagagtttctggccagctcaagttgtagagcatccagggttcaagcccaatgccctgtgctctgggatctaggtcctggctcagagttgaggttattgatccttgttggagtctggtgttcacaaccgggggcttcgatcgtcacacagagacagggctgcaggatgccaggtcctagagctgaaatcattgatctgcctaatagtttctgagtcactgatccacactcaaggttagggactctggtggcatctgatttctaaattagggtctcaggtcagcaggtgaggttaggttttggcagggggacctggttctggggttaagaagctcaaattagaatttctgctcggagtcacagtatttg

SEQ ID NO: 92302 - DNA, 1033 bp, Homo sapiens
accatctgagggggtgcttgagcctgcctgggccaggaccacgcatgatgcagtctggaccattggcggccctacaccacctgggggatggagtttcgaccagccggggttggattagaccagcagaggtgaggcctgggccagctaagagtgggccggagccctctgggttggagcttagaccagcagggaagcgcctagagcatcgggcggggagttgtgttcacttctggcaggacttgggtcagccagatccaggacgggggtctagaccactcggggtggggcctagaccgcctgggggtggcgcctgggcccgctggcgcaggcgggcaggggtcggggccgggggcgggggcggggccgggggtggcctcgaggctcccgtctgaccgtccccgcccaggcctgagcaacatcatcggcgtgatcgtgtacatctccgccaacgcgggcgagccgggcccgaagcgggacgaggagaagaaaaaccactactcgtacggctggtccttctacttcggcgggctgtcgttcatcctggccgaggtgataggcgtgctggccgtcaacatctacatcgagcgcagccgcgaggcgcactgccagtctcgctcggacctgctcaaggccggcgggggcgcgggcggcagtggcgggagcggcccctcggccatcctccgtctgcccagttaccgcttccgctaccgccgccgctcccgctctagctcccgctccagcgagccgtcgccgtcgcgggacgcgtctcccggcggccccgggggcccgggctttgcctccacggacatctccatgtacacgctcagccgcgacccctccaagggcagcgtggccgcggggctggcgggggccggcggcggcggcggcggcgccgtgggggcgttcggcggcgcggccgggggcgccgggggcggcggcggaggcggcggcggggcgggtgccgagcgggaccgcgggggggcgtccggcttcctcacgctgcacaacgccttccccaaggaggcgggcggcg

SEQ ID NO: 92303 - DNA, 1043 bp, Homo sapiens
taaaatatttttattttcttctttgttaggtaatgttatgccagagtcagattggaaagtaagtcacgatatatagggctaaataaaacccatctgatgagaatttatggtttgtagggcatgagaccccagaccccttagataagaatctgggcaagataaaaaaaaaaaatcagagctgagtcctcactatggtaattcagtgagtgtgactaccagcatagatgtccataaaggatatccattagggccacccattttaataatgtttgccaggacccttcaatcaaaacaaaatccattctcagaatagcttagaatcaaaggaggactttttgggtttttttggttcaagaaggattgggcaagaaaactgcagggagtgaaggaatgctgagctttggaagcaattagaaccaagaaaacaaaagctgaaagcactgttactcactcccgcttcccggatgctccctgagtcatctttgtgtttctccataaagactggcttcctccacatggcgagacagatggccaccaagaactcccaagcttaaaaaagaatgactctctgtggcaagaaaacaaagagacactcctccccaccttgctactccctatgtggcctccacactgcaacctgggactgtgtagtgaggggagggggagcgaagaagtttgcgttagtctgttttcacactgctgataaagacatacctgagactgagtaatttatttttatttttatttttatttatttatttttttgagacgcactctgtcacccaggctggagtgcagtggcacgatctccgctcactgcaagctccgcctcccggggtcacaccattctcctgcctcagcctcctgagtagctgggactacaggcgcccgccaccgcgcccggctaattttttgtatttttagtagagacggggtttcactgtgttatccaggatggtctcgatctcctgacctcatgatccacccgcctcggcctcccagagtgctgggattacaggcgtgagccactgcgcccagtcagt

SEQ ID NO: 92304 - DNA, 1686 bp, Homo sapiens
agaccagcctggccaacatggtgaaaccttgtctctactaaaatacaaaattagctgggtgtggtggtgcgtgcctgtaatcccacctacttgggaggctgaggcaggagaattgctttaacccaggagacggaggttgcagtgaactgagattgcaccactgcactctagcctgggcaacagagggagactccatctcaaaataataataataataataaattttaaaaagggcttcctgagagcaggggagggcatcgggtccagcatcaggctctgcttccttccagggtcactgcccaagccgtccctcagtgcctggcccagctcggtggtccctgccaacagcaatgtgacgctgcgatgttggactcctgccagaggtgtgagctttgttctcaggaagggaggaattattctggagtccccgaagccccttgattctacagagggcgcggccgaatttcacctcaataatctaaaagtcagaaatgctggagagtacacctgtgaatactacagaaaagcatccccccacatcctttcacagcgcagtgacgtccttctactgttggtgacaggtacagacagggtgcctgccaatgacatacgggggacaggggatgagggaggaagtggaggaacagagggagaaaaggggtcccaccttcagagtagttgggggtgatgggagagggagagagacaggaacgaaattgcatatgttggttttatactttgtcgcccaggccagagtgcagtggtgccatctcggctcactgcaacttccgcctcctgggctcaagtgattctcctgctccagcctcctgagcagctgggattacaggtgcctgccaccatgcccggctaatttttgtatttttagtagagacagggtttcgccatgttgggcaggctggtctcgaactcctgacctcaggtgatccacccgccttggcctcccaaagtgctgggattacaggtgtgagccaccatgccaggccttacacaggtcttgtaggagggagaatctctgtcctggggtcggagtaggaagtggaggaaggtagaagagatcaggaatctctcatttcccacactccacgagagcctccggccaggagaacaggggtgagtgggggattccagacttctccccaggacctcagaacctgacttctcttacaggacatttatctaaacctttcctccgaacctaccaaaggggtacagtgaccgcaggtggaagggtgactctgcagtgccagaagcgagaccaattgtttgtgcctatcatgttcgctctactgaaggcagggacgccatcacccatccagctgcagagtccagcggggaaggagatagacttctctctggtggacgtgacagccggcgatgctgggaactacagctgcatgtactaccagacaaagtctcccttctgggcctcagaacccagtgatcagcttgagatattggtgacaggtaagggcgtgtatggttttgaggaactgtgtgtgttgtttttaatcagagattgttttgttcttctgtgaatctcatttcttcattacttacaatatcatcgctcttaacaaaatcttccctttctggcctggcgtggtggctcatgcctgtcatcccagcactttgggaggccgaggtggatggatcatctgaggtcaa

SEQ ID NO: 92305 - DNA, 1097 bp, Homo sapiens
ctgtgatcccagctatttgggaggctgaggcaggagaatcacttgaacccgggaggcggaggttgcagtgagccgagattgcgtcactctactccagcctgggcgacagagcgcaactctgtctctggaatgaatgaaagaaagaaagaatgaatgaaagaaagaaagaatgaatgaaagaaagaaagaaagaaaaagaaagaaagagcgagactctgtctctggaatgaatgaaagaaagaatgaatgaaagaaagaaaaaagaaagaaagaaaggaaagaaaaagaaagaaagaaagaaatggtaagaatgagtgctgttttcaaacagaagatgagaatggaaggatttgtgggaaaggcctggagcagggggaggtgacagccacacaggatggtcaaggagaatcgctgggaaaggatggaggagctggaagtcgagcagaagccacagtccagtgtggggagaatgagaactcctgagcgtatgacctctaagggtctgttctcagcaggagactctgggacgatctccaggggtcagggcagggggtgacgtggctccaggtaggggcttctggctcacggaggattgtcttgcaggactgtgcgtgggccaaggagacacaaggggagatggtgagtgtttcttcaactacaccctccttggcctgtcatcccaaatcccctgctgttctcttccccttccccctctttttctcttttttttttgacggagtctcactctttcgccaggctggagtgcggtggtgcaatctcggcttacagcaacctccgcctcctgggctcaagtgattctcctgtctcagcctcccaagtagctgggactacgggtgcttgccaccacgcccagctaatttttgtatttttagtagagacggagtttcaccatgttggccaggatggtctcgatctcatgacctcgtgatctgcctgccttggcctcccaaggtgctgggattacaggcgtgagccaccgcacccagcccgcttcccttcttaaaatgggattcctgattgggctcaggggttcacgcctgtaatcccagcactttgggaggccaaggtgggtggat

SEQ ID NO: 92306 - DNA, 1294 bp, Homo sapiens
ggcaggagaaccgcttgaacctggggggtggaggttgcaatgagatgagattttgccacttcactccagcctgggcgaaagagtggaactctgtctcaaaagaaaaaaaaaaaatggtgatgaaggcctggcacagtggctcatgcctgtaatcccagcagtttgggaggccgaggcaggtggatcacttgaggcgaggagttcaagactagcccagctaacttgtgaaacctcatcttaactaaaaatacaaacattagccgggcatggtggcatgcgcctataatcccagctacttgggaggctgaggccggagaattgcttgaacccaggaggctgaagttgcaatgacctgagatcgtgccactggactccagcccaggtaacagaaccagacaccatctcaaaaaaaaaaaaaagagtgaagtgctttcatctcttcaatacgaacccttcagggccaagtctgaagcattttcggggttacctgtttgatgcctgaaatctgcctgagacagaggagcatttcctgtgagtcaagtgctcgaacactggtgtgtgtaaggagcatgttgcaatcagcaacatcaacatgtttcctgaatgtggatatgggaggggaaactgaaaggctaggaaaggctgttactgcccacactctggggtgggagagaggcagcgacgactccagctcttctcccatctgtggactgcagaacccaagacggactctgggagggctaaggagccatcatgatccctaagctgctttccctcctctgtttcagtaagtctcacagggctatccactgggactgcagaaaatcatggaactggtgggatagttgggctggggatggaaataataacatcaactttggcttactgagcacacgggaggagtgagacgtcctgctgagtgcagtgcagacattccctggaaacgagtgctctgcaaacttcaactcctgtagtttcaacttcgtgagttttgctgaatgcctccaccacctggcttcattggcttaccccttttctcaggatcaactctgactttttgtgtgtaagtaaaagtattcagaatagaaaccttattttattttattttattttatttttttgagacagagttttgctcttgttgcccaggctgtagtgcaatggcatgatctcggctcaccacaacctctgcctcccgggttcaagcgattctcctgcttcagcctcctgagtaactggattacaggggtgcgccaccatgcctggttaatttttgtatttttagtagagacag

SEQ ID NO: 92307 - DNA, 1078 bp, Homo sapiens
tatttttttagtagaggcggggtttcaccgtgttagccaggattgtctcgatctcctgaccttgtgatccactcacctcggcctcccaaagtgctgggattacaggtgtgagccaccgcgcctggcctgtgcttcgagtttctattacctttccagatttctgtctctctctgggttcccatctgtggtggtttcttggtctccatcttctcaggtttctgtcctgtttccccatctcttttgaccctagctctctagtgcgcgggatctctccctcgctatctctctggttttccgtgtctctcagtctctgtatttcccgcctctttctgcatcactgattctctgacccttcccctctcacccctggggtcccccttccctctctgaacataaagcgacagaccagctcttctctccagggccctggagacgtgctggtctcagtggcccacctcctgccccacagtgcccgtccgtgatgatgggaacatgcccgacgtgcccagccacccccaggaccctcagggccccagcctggagtggctgaagaaactgtgagcacctccactgacagaggcggcccctcccacggctcccaataaaaatgtgaaaaccaacccccgaacgtgagcatgtgtgtgatcagaggtgggaacaagtagacggtggccggggtgagtgtggggtcagtttattgggcatgcgtcagtcagaggctgggctggccagggtcgggtagggcagcagtttgtctggaccccgagaaacccaactggaatccagggcctcatctgcttcaaagccaaagtcttcctcaaccttaatctgcaggagataaggaacaaggtgttaacaggcctgggaatctagaaaatcccatcagcttcaccatttttgttttcattttgttttgctttttaaagagacagggtctcactctgttgcccaggctggagtgcagtggtgccatcatagttcactgcagcctctgcctcccaggctcaagtgatcctcccacctcagcttcccaagtagctgggactacaggcacttgccaaccaagcctaacatgttt

SEQ ID NO: 92308 - DNA, 1050 bp, Homo sapiens
tgagaggatggggcgggaagggcgggaggccagactgcagagctgctgagtcagcaaacaggaacgggggaactccctgtgtgccaggtgctgtcctgggtactcggctgtgggtacagccaacgcaggcacagcactggtccctgcagagcttccggagttggggaggccctgaatgtcagtctgaggactcggtcattagccttggggctgtggggagccgtaggaggtttcacacggtcagttctggggtagatggggtcaagtctagactggtgtggagggagagggattgaaggcaggaacacaagttcagggatgtctgcagacatcagcctgtccctggtttactcttcagcccctccttcctgacccctcccaacttcatcctccgcctcctccagctgcgggacccgagagggggtagggatttagatactcacacccatgcctccgtgtcctcacagtgatgggaccagtggaggccgcgcctgaataccgcgtcatcgtggatgccaacaacctgaccgtggagatcgaaaacgagctgagtgagtgctggggggcaggcggagacagccccgtgtgacgtccctcacgccccctctcccttccccactggcctttcccagggtcctgcccctaagcccaagctcagatcgaggttgacctgctgtcacagagtggctgaaataagaaggaagtgcgttctctcgcgtatgagtctgaggagcactcggggatggtgtggccgcttggctgcctgtagggccccggctctttccatcctgttggtcggccacctgcctcacggtgcgaggtgactgccccacctccagccatcacctccgcattcccaccagcaaggcgcttcttttctttaagaacatgtcactgcagctcacgttttacagaccagaactaattcccctggtcacacctagcggtaaggacggctgagaaaggctgtatgctggtgcccgtgtgccaggccacaagccagggcttcagttactaaaggaagaaggggacatgggtgttagggccaac

SEQ ID NO: 92309 - DNA, 1042 bp, Homo sapiens
gggcagatggtgtggatgcttgacgtggtggaggcaggaatggtgtggatgcttcaggcggtggaggcaggagaggcccccagtgcagagaccctgactgtcccagtgtccctaagaagagacctgaggaggtgctgagcaagagaggttctcgagccttcctgagttcccgagcctcccctatcttctctgctcgcccccaggagctgggcaacagcctggacaagtgcaagaacaatgagaacctgcagcagatcctcaccaatgccaccatcatggtcgtcagcgtcaccgcctccaccacccaggggtatgtccgcttcgagggaggcgccgggccctaatgggattggggattaggctggagctacacacgcaggtgtacacacgcacacacacatacacacatgcacacacacacacagaaccgagagggctggggctgggcacaccaggcaggcgggagatccaggaggctgggcccacccgcccctgcaggcagcagctgtcggaggaggagctggagcggctggaggaggcctgcgacatggcgctggagctgaacgcctccaagcaccgcatctacgagtatgtggagtcccggatgtccttcatcgcacccaacctgtccatcattatcggggcatccacggccgccaagatcatgggtgagtccccgggctgggtcccatggagcgggggtctgctgacactgtgaccttgggaaagctacatccttttctgtagaatgggggctttggcacctggacctcagcaccccgtctccctggacatcacagaggtcagccagcctggcacacagcaaagcctcgtctgtgggaaaaacactcacccacagctccttctccctcccctgtgccggaaacccagagatgaccacacccaggccctgttgtcagggagctcctggtttggtgaaaatggttccaaaacacagccatccctggaacggcgttagtgtggcttagcacaaacgtggtggtcagcttcctgttgggggcctcctccctgcacccccagg

SEQ ID NO: 92310 - DNA, 1010 bp, Homo sapiens
tcagcctgggccacctgggcaagtcgggcagtgggcgtgtgcggcagacacaggtaaacgaggccaccaaggccaggatctccaagacgctgcaggtatgggccagacccaggtggggctggggaccgagggacacaaggtggggggagcccagatcgcagcctccctgtcctccccacagcggaccctgcagaagcagagcgtcgtatatggcgggaagtccaccatccgcgaccgctcctcgggcacggcctccagcgtggccttcaccccactccaggtacctcccctgggccggctctgtccccagccctgagaccttggcaaggccccttgccctctgcccctgtgaagaaggccaggatgagtctcctcatggggctgttgtggagggtgtggtgacgaggtatgcagaggacgtagacagctcctggcacacaggaagaggttagcagagacgagagcccagcgctgagcagtcctcgtgagcacgcactgctttagaaccaggcccacagctgtgttcagggcacccagttcctctgtcgggctgtgagcgggtaacactgctcagcctccaggccctccagttcaaaacggccaggacggttaaggtaacctcaggaccccactcgagaaagttcccggctaggcgggcttggatgtcaagtgtgggtccaggccccagccagtcagcagtgagcagcgtggagcatggcagtcaccgcatcgtcggagcctcggtttaccatccacagagcagggcgagcctgcaccacggaggcgagacagcagcgagctcatctgcccagtcagcgggtgtctacgcagcacctgctgagttctgtcagtgttcccggctctggggatgaagcaacgaatgagagacaagtcttaccttcttggagccagtgggtggccgggcgcagacagctcagtaagatgtccagtgtaggagaaggcagaaatgccaggccgggcgcagacagctcagtaagatgtccagtgta

SEQ ID NO: 92311 - DNA, 1045 bp, Homo sapiens
cccacaggcggcagagaagaaggtggctgaggccaaccagaagtatttctccagcatggctgagttcctcaaggtcaagggcgagaagagtggccttatgtccacctgaatgactgcgtgtgtccaaggtggcttcccactgaagggacacagaggtccagtccttctgaagggctaggatcgggttctggcagggagaacctgccctgccactggccccattgctgggactgcccagggaggaggccttggaagagtccggcctggcctcccccaggaccgagatcaccgcccagtatgggctagagcaggtcttcatcatgccttgtcttttttaactgagaaaggagattttttgaaaagagtacaattaaaaggacattgtcaagatctgtccttggggagtgatcatttttcaaacagccggggcaactagaagaatcagagctgtggagctttgagaaaagagcttggccctcgggtccaagcggtgtctaggcccactcccttccccgttactttctcgtcatgggatcccagaaggaaaaagccctctccaaccccctggagagccgcagtcactttgatagcaaatgatgtggctgccaacagccgcagatctcagcgcaggccgaccgggattgctgtccacctcaggccagcctcctcacctttccaagcctccacacctacgcccaggtgcccaggactggaaagaatgcacagaaagcacttagcatgggacttgccatcagcgccctataaccaggtcctgttatgattgggttttttagagacggggtctctgttgcccaggttggagtacagtgatgcgatgaagctcactaaagcctcaaactcctgggctgggattacaggcatgaaccagcacagctggcctcctggttaatttaaattttttttttttttctgaggtggagtctcgctctgttgcccaggctagagtacagtggtgcaatcttggctcactgcaacctctacctcccgggttcaagcaattctcctgcctcagcctcctgagtag

SEQ ID NO: 92312 - DNA, 1361 bp, Homo sapiens
tgggggagtcacccttcccaggaccgaggccgccctccgcatccctcctcactgctcccgggagcgcagcctcccctggatctcaggttccagctgcccgtctgtatcggatgggagcctcttgggagaggagtggaggagaaactccccgttagttggagcctttgccgaagtttccacctctgtagtctgcagctcttccctctcatagcgagtagcgccctgggtggctccagcctcgccatcccgctgcactgggcgcctgcctttttgggggagtttggctttcccccacctggggtacaggaccgtcctcagtgtggcccacgtctggtctcagctctcacacttctttgatcctggcgtctgcccctggctttgcagccttgaactcccctgcatcgtgactctccgaccttctgggtgtgggcgtctcccagtgatatcaggaccactgtggtcttgttgctgggggctgctgggatcccctggcgctcaggtgcctggtgaaagacactaagccgccacgctgtccatgttagtgagctcccactgcgggcagcaccagcccctctttctgagcagtccctgcctctcagtgcagggcggccacccaccccggggtgagctctcctgtccttttggtgaggggttttgatgtctcccctccctcccttcacccctgcctgagtatgaggcttcttccatcttcacaccagtctcctcctttagggtgtcagctctccaaggaccaagaagcccactgcccttgatatttgcatcagatcccacactgtgggtttgttgacttcccatctacccttacgctgggtgtcagcagttggagaacaagggtttcgccttctggccccgctgctggtaccccatgagagtaggaagcttcctagacccgggttcctgtactgcgaggtgggggctcttccctctggggctgtgccttctctccagggtaaggaccctttcttggtgtcacctcccccagggataaggttcttgccatccttggtattggtatggctgcttttctggatttgaggtgtccacgcctctgcatgtgtccccaccgtaaggctgaggacccctctcggatgcaggtgcccccggctcatgcttccaaaaccccctcttgatttgtcactgtatggggtaaggcatagtttcctggctgtgtggatgtaagatacctgagtctcaagcgggagactccactgtagaccctgtccctgggaccagagacttctctggtgtagactttccaaggtgggagattccagccccccacccttggcatggggcatctcagtggagatgactacctctaccccaggccctaacgcatc

SEQ ID NO: 92313 - DNA, 3905 bp, Homo sapiens
agttaaaaatgaaaaattcagttcctccattacacttgccacatttcagatgttcagtggccaacagatatgcgcaaatagagtgtttccagcattgcaaagttctgttggatagcactgtttgccagatgttcccttctttgtgggtgaggactcttttggtgtgacttccctctgtattgaggctcttgttcctcagtatggggctgtttctgtctttacagtaagtgactactccagggttccctgccctgcacacgtagagtgggagcggcccgtggatcccagggaactgtgcttttcattgtaggccccctccctggaggggaagagggcaatctccgctggtatctcagaagtcttcttctgaggcataagcctctcttcccagggctcccctggtctcgctgtcaggccctaaggtatgtcttcccttggactaaagctccttggaactcccttttgacctcagtcttctctgggttccaggtaacttcctttaaaataaagacgctcctctcttgaagttttgggttcctgccctgatggtctatgtctccctgactctaaattaccaatccacttgctatgggattcctccatgagtgcagatcggctccctcacagctgcggtacctttgcaccctcttatcttagtaagatttctgtcttctcccaggtctctcttgggtactgccttctgcccccaaatctctaagccttcttggtattagcttctttgggttaggagtgttatttccttttggtttaaggatcctgctctggaataaatgtcttggtggtttgagtcccttctacttggcattcagccctgtctgcatgagcgggttcagctcttcacagctttcggcatctctgctcgccgtcgttttcccccacccccaatctttcttctcctacctacagcttacacacacacacacacacacacacacacacacacacacgcccttctctgtgagctgccagtttcatttgtctcctgacttgtctgagggatgacctctcctagccacctctgcccagcccctctgagtaggaagtgtgatttccagggctaatgcctccatcccagtcatcagctgtgtgcagcatgactgtcctgctctgaaaaacctttttgagtgtattctggggagaaggtactccatgctctaggaattttccacttcctgagtcagaggcacacaaaaaagtatgtaacttttcttgtttcaacaaacttatggggtcccctgttggccagacactatgctgggcagtcaagcgagcatcaggagaactggggctggtctcttgtcagatagcaaatgcttcttctctttaccagtcccacctacctcactatgctgactaggtccatgtctctgggtttttaccagccagggaatacgtgttaattcctctccaatctctcctagcagcgtccgtctccaagagagtatgaagagagtgcgtctgtagggcagggaagatggcggacaagcgcaaactccaaggtactagactgacttcctgctgcacctgtagccacatgctccctcttctgaggactgctctttagatacctgccacctgggcaggattctcacagccttgttcctccctggccaggtgagattgatcgctgcctcaagaaggtgtccgagggcgtggagcagtttgaagatatttggcagaaggtacaggggctgagaccctaataatctgggtcttcagagaggagggcacaggaaggcggctcaggacctctgggtgttgaccagcgggaggggctacatatgcagatgctgaggacctaagagaatcagctctaagatggattgggggtaggggttggggggggtcctcgagtccctagcataaggaagaatcactggagtgggtactgggacatcccctcccacactgacttctcaattctctccatccctcagctccacaatgcagccaacgcgaaccagaaagaaaagtatgaggctgacctaaagaaggagattaagaagctacaagtgagggggctgggggcctggacgcctttgtcctgagggtagagggaactgggagagtggactgctgggtcccagggagaaggagctgtgggccccagttcctgggtcctgaggtctgactttcttgcttttcccatctgcagcggctgagggaccaaatcaagacatgggtagcgtccaacgagatcaaggacaagaggcagcttatagacaaccgcaagctcattgagacggtaggagcccagagcctgagtcccagagaggtgggaaggtcaccagattcttgagatcccaaggggcggaggcagagcggccagaccccagaggtcctcaagagaagtaaggtttctgcacctaagggaagtgaagaggcagcggactcagagctcagaaagtagggtcacgaggctcaggtcggagtgtctgctggcccttagtcagctcctttcccacctttgagagcccccctgccaactgcactctctacagcaaatggaacggttcaaagttgtggaacgagagaccaaaaccaaagcttacagcaaagagggcctgggcctggcccagaaggtagatcctgcccagaaggagaaggaagaggttggccagtggctcacggtgagttggggtagagaagaggaggtgaactctgaggatcctgagccctgggtgtaggcggaaccctagctgatgggcttcctcttcctctccctcccctagaataccatcgacacgctcaacatgcaggtggaccagtttgagagtgaagtggagtcactgtcagtgcagacacgcaagaagaagggcgacaaggatgtgagtgagggagacccgacacctttgggatggggatgggcatgggaatgggctggccagcaggaggccagtcatttatgctcctgggagttggggcctggattcctcaggcggacagggccaacagccgggattagggatttgagagacaggattgggagggcttagcagctgcacgcgtggggcaggaaggaggtcagacagaatctcagggtcccctgggtgtctgggtagaccgtggggcctttgtgaagaggagcgacttgggggaaggtgagtgcaggttgagcttgggccacagagtaaaagtgagacctgaaggacacccatggcaagaggcctcctggcacccagagggccctggtcctagggagagcacagtgggtagagacaaggcagaacatggagaaggcagagaaccaggcctgaaggaagacaggagtctgggacaaagctggatgttggggtcccaggttctaaaatccgggattgtggggtatgagttcaaagggatacaaactgtacagacttgctgaaaccagaaagacagggaggggagagccgggtcctcagggaagctgtgggtgggagagggtcaggaagtggaagatgacagggttgggtgtcagactctgaggggtttgggaaccaggggctttcggggagatgatgggtccttgaacagagcagagatttggaaccaaggctaagatgttaaatcctaaaggggccttgaggggagggcaggagcgaggcttaggaatctgggctctctcagggataaatgggtagggttgggggcctagtgatgacagatatcacaattctaaacagcaagctcctcacaaatgggggttatcattgttactgctggagcaggtcggagggtatctgtatgccagaggcagtcacagtggtgggcgggctcagttgagaaatctgggctgtcaggtgaggtgcagatggaggccaagtcgtgggatggcacaaggacctctgggtcttttagaggtttccaaggactcctggagccagaaaggtgtggggagaggaggg

SEQ ID NO: 92314 - DNA, 1028 bp, Homo sapiens
ggacgacgttgagtactatgttgactcatcccaggaccccgacttcgaggagaacgagtttctctacgatgacctggacctcgaggacattcgtgaggccctggggctgatcgtggcacaggaagtgagggcccagaatgggctgtgtgagccagctaagcatgcccttcttctgcccccacagcacaggcgctggtcgccacctcccctcccagccacagccacatggaggatgagatcttcaaccagtccagcagcacgcccacctcaaccacctccagctctcccatcccgcccagcccagccaactgtaccacggtgaggccccacgggacactagtaccttgtgtttccagcagggcaggactcgaggagacaaatctgggtcactccaaagtggctatgggagcgtaattgaggaaacacagatctaggtatccagggtctaggctcttggagcacacgctaaggtcctatatctgggtccctaaaggacataaagagcaatagggtgcatcccgcgccagtttaggtcctggatctgggaagtgggaggggccggtgcctgggctgcctgaggaggctgggtagctggccaccttgggcagggatccaagggttggcttccctgtggagagcaggttcccagatccttaagaggctggtgggtcagtgctggctcccagaaaacaagaagactggagagcctgaattgagatggtttctccaggcagattaaggacagccatttgaccagctctggggccgcaatggcagtcaattgggcccaggtccccggggcattcagagattggcggttctccatcagagccccagaggtcacacaggtttctattctgcctcccctacctcaggaaaactctgaagatgataagaagaggggacgttccacagacagtgaagtcagccaggtgggtgtgagcctggaccgggtgggcacgccattcactcctctgttgcttcccaaaggcatcttgaggcctgagcgccggccactgtgctgggct

SEQ ID NO: 92315 - DNA, 1072 bp, Homo sapiens
tccagagtccaataagcctaggaagcgatggggcctttgctgtgctgataatacacactgcaaatttctgagaggagacggtggcgggcagtgcttcttcaactcctttaacatctcccaggacaggagcacgctttcggaaacgctgctacagaacaatgttaggcaggagcagcatgggcctgaggcccctctgtgggctaacgggatggatggttccaaggggacaccctgagtgggcattgaggaggctggtgtggagactaaggggacccgcaggtagtagtgagggcgggcaacagggccaggaggtgatgaggagagacactgaggcaggtactccaggggccaggctgggctctgccaccttcccaggcccccactgccaagcagcgatgcccaggagagaagtgggtagtcagtcctgttgggcgcttggtaagcgcaaggtgcctgtggggtggctggaaagaagcccaggaggtggttaggctcagcagccggagtgctgtccacagattgcctgcggtagggataccatgagcacatttaccctcccaccactttctggagtgctggtaacttccagccctgtgagtagcttctgtgacccttcaggtgacattcagaattactatccaatttccagctgtttttccttctactcttggacattaggcggctccagctaatctcatattgagaacacttaagtgtttcccactagtcctctggcttccaacagatggatcttctctggctgacaacctaagttgtgtgtcagatccctgtgggggtgtccatggggcggtgtccaggcaggacttgggaagctgggcaggctggaaatcagtgtgagtgttttaagcatgaaggtgattgaagccatgagggtgagtaaggtcacccaggtccccaagagggcaggagcaggtgggggcagcgaggccagagaggaggctgctgggacaaagatggagcctgaggtgggggtggtgagggagaccagctggcccactgggtcctgaccctctgctctctcccacccgcagtctccagccaaaaacggctc

SEQ ID NO: 92316 - DNA, 1065 bp, Homo sapiens
ggctggcaagcagaatggcgccaccagtgagtgaggaggcagcggggtggggggcgtgggcggggctgggcagcaggcagcagccctttccatttactctttgttcccaggttacagctcagttgtggcagacagcccggcagaggtggctttgagcagcagtgggggcaacaatgccagcagccaggccttgggccccccttccggcccccacaacccacctcccagcacctcgtgagtgtctcggccatcggcagggttgggatggcagccttttgaaacagagaggcgcaggcgcctcacccccgcatcggtgggttctgaaccccccgcccttgctgctgggaatggccaagcgctatcctccatctccctcgggtgttacacccccacttctttccagcaaggaaactacatcagcctccctgctttgcccttcagaacattctaaaatacgttctcatctaagtggaagttttctcaagagccccataccctttcctccccatttctgttacctgcctgaggccaattgactgccaccggagggtcactgtttcacttttcaaagtgaattgtcccgaagtccttattcctctgcagccactccttcaaatcttagctcagaccattccactgggtctgcctgtttcccgaagaatgccctaagaaagatcagtgtgcacaaaggaaaggcctgcttcctgccccctcaccccagctccagctggcctgcccaagggggagtgggccctgtgaacacctgcccagggcaagtggttttgatcagcctgtggcctggtggagcacccgagaatcctcacccccacccccacagctctgctctgctgatgagaaaccattccaaagattgggctctgcctttgtttgcccagagaaccacttctttctcccatctgtctgccctcacctgcccctctcagatcccatctgatctgtgcagtctcccctctctccagccaggcctctctgcccatcccaccctcagggaccctcctctcaaccccctcttccatgctctctctccaggaaggaacccagtgc

SEQ ID NO: 92317 - DNA, 1043 bp, Homo sapiens
tctgtcacccaggctggagtgcagtggtgcaatctcagctgaatgcaacatccgcctcctgggttcaagcgattctcctgccgcagcctactgagtagctgggattacaggcgcctgccaccacgccaggctaatttttatatttttaatagagatggggttttgccatgttggtcaggcaggtcttgaactccgaacctcaggtgatccacccacctcgacctcccaaagtgctgggattacaggtgtgagccaccgtgcccggcccaaattttagaagtaggtggacaggatatttatagtgcgtgcatttttctggaaaaagggaaacagcagctttgagattttcagaaggggtccatatcttttaacaccaccaacaacaaaaatgaatcgctggggtgggtggtcgggaaccatggcaaggtttggagtagagaaggaacaacatgacttcattggaaaggtcccctggggctggtgaggacaggatagagggagggtggtctgggcaggagaggacaggcctgggctgtgtgggacatggtggcacgacagggaagggagccatccagtggggtttagaagcaggacggatagctgggcgtggtggctcacacctgtaatcccagctcttagggaggcagaggcgggaggatagcttgagcccaggagtttgagacctgcctgggcgatatagcgagacagaatggataagccttggcgactgactcgttgtggagagtccagcacagggctggggtttgggacagctgcacgtggctggaggagatgggaggaaccagccctgactttggggaacagaagcctgctgtaacctttgtaataggaaacgaggctgtggctgcggggctggagacccaacctacctgtttccagcaaggagactgaagcctagccgggctgggcccaccccgattccagtcaccccatgccagtcacaggcagacagctgagcatgtagacctcctgcctccttcaagacaggcgggagctctcccagcgtgtaggtgtccctagtg

SEQ ID NO: 92318 - DNA, 1006 bp, Homo sapiens
ttgttattagggatgataaccacaacttccctggcaactgcagtgtccgacaatttagaagggaccatccttggcggcttctctgaatatactgagtttggttgctaaaggactcatagcttagcaaccatagcccttcaaggcttttcatggctgtggcgggccccattaggtaccaaaagaagaagaaccccattgtcagtgaactgtaccacccagcccacccaccttcctaccctacaggcaccctctgggccaccctcccttgctgccctagcaagtctgacagccagagggccattgcctggccaggatcccttccttagcatccggggctgggacactagcaggcgtcgggagggggcctggctgagctgcatgtctgtcccccaccctcatcctccaccccccagtccggagaaggcggcttccttggagtatgactatgagaccatccgcaacatcgactgctacagcacagatttctgcgtgcgggtgcgcgatggcatgcggtactggaacatgacggtgcagtggtggctggcgcagtatatctacaagagcgcacctgcccgttcctatgtcctgcggtgagtgagcccgcccagtctcaggtgacactgcagaactacatctcccagcaggccccagggtagcctgcagcgtccctggctgggcccctgcccccggaggctcatgggaattgtagtttgtttagcctggttttgccctgcctctaattatagtggcagcatgccggtgtaaaatcgttccccctctcggggcctcagttgctacttctgtaaagtcagcctcactcagcagaagcaatgtactgagtcctgtggactcaatagccagccttcctggaatcttggccgtccaggttatggagaaaccttgaggagttagttgacctcttagttgcctcaagtgttgaatggagtgaatgctatttattactggtttcataggtagatagaaggactaaatgtgataaaatgtg

SEQ ID NO: 92319 - DNA, 1044 bp, Homo sapiens
gctgatttttattttttgtagtgatggggtcttgccgttttgcccaggctgctgtccaactgttgggctcaagcagtcctcccagctaggcctcccaaagtgctgggattccaggtgtgagccaccgcaccggcccctctgtctgtttttctgttactgtctctgtctctctgagtttcttgtcccccctgtctctcgttccttatccccatctctcagggtctcagtccctacccttggggtctccccggcgcccagtctctgcccctctcactccctcttcccaccttccttccaagctccctgtcctcctcctgcagacttgagctctgcccacctgcctgtctgaccgcggccctccctccccgccccacaggcccgttcttccgctaccgcacctacctggactggctggagcagcccttccccggggcagtgcccagcctgcggcccctgctgcgccgcgcctggccggccccgctcttcggcctgctgttcctgctctcctctcacctcttcccgctggaggccgtgcgcgaggacgccttctacgcccgcccgctgcccgcccgcctcttctacatgatccccgtcttcttcgccttccgcatgcgcttctacgtggcctggattgccgccgagtgcggctgcattgccgccggctttggggcctaccccgtggccgccaaagcccgggccggaggcggccccaccctccaatgcccaccccccagcaggtcaggcggcgcgagggaggcttcccaagacccagcagcccccacctccaagggctggctctgcccctagccgggaggagagcggggagcaaggggccagggccaccacctttttgagcagagtgtcgccccctcggcaaccatggcctgccagcccctgtcggtagggaaaagatccctggtactgacagatgccccttgttgctagcgcttgtcaccccgcagtgtggtgaactgccccctgtcgctaggaaaaggtggtaacttagcaaccctgtgccacccctctgttgccacagaagtgtca

SEQ ID NO: 92320 - DNA, 1017 bp, Homo sapiens
caagtcgctttcgccccgcccccttgtaaatactcatgggtatctggcgaacctgttgactccgcctatcatcctagcgtcacttgtacccaactatctacgaagtaaaccgaagcttgtggccccacccacatccggccgagtctgtggccccgcccacatcggaacagtgaccctaaggactcgactacctccgaagaaagccgaaacatgtggctccgcccacactggcctcagctctccgttctcgactattgccgaagtgagccgaagtttgtggccccgcttccggagaactcaagctcccgattgtgcccgaaggaacccgaagggagaccccgcctcattcctcacggcgagctccagaccccgcctcctttccggagcccgtctgttccccttcgggtccaaagcttttggctcctccttgttccgagcccgaaggcccgccccttcacgtactcggagctcggatcccagtgtggacctggactcgaatcccgttgccgactcgcgctctcggcttctgctccggggcttcttccctgcccgcccggggccctgaccgtggcttcttccccggcctgatctgcgcagcccggcgggcgcccagaaggagcaggcggcgcgggggcgcgctgggcgggggaggcgtggccggagctgcggcggcaagcgggctgggactgctcggccgcctcctgcccggcgagcagctcaggtgggccagggtggcggcgcccagtggcgaggcgaggttacacggcggcagggtctctgcgggctggcgggtgcggggcggccccggaggcgcgttggaactcggggctggcgcaaccgcctgtggctctgccggggatgcgctggggtgcgcgggacgggttggggctgggcctgggcctgggcctggggaggggagggtgttcgatccccgggttctcagtaggagaggggtgtggagctccgaaggaggtgcaggttggagacccgggctcctctgggtggtctcgaagaagg

SEQ ID NO: 92321 - DNA, 1141 bp, Homo sapiens
aacactttgggaggccaagacaggtggatcacctgaggtcaggagtttgataccagtctggccaacatggtgaaaccccatctctactaaaaatactaaaactaactgggcgtggtggtgggtgcctgtatttccagctactcgggaggctgaagcaggagaatcatgtgaacccagggggcagaggttgtagtgagccaagatcgtgccattgcactccagcctgggggacaagagcgagactttgtctcaaaaaaaaaaaaaaaaaaaagcctagaagtggaatagttgtgtccaagagcatctgttttagagtatctatagtgatggctgaaatgatctcagatctcctcccagtggtcgttcccgtggcgtccagccgtctgccattggtcactgcttcagtgcctctctccttcccccaggtgaccccctccgcttccacgcccattatatcgctcagtgctgggcccccgaggacaccatcccactccaagacctggttgctgctgggcgccttggaaccagcgtcagaaagaccctgctcctctgttctccgcagcctgatggtaaggtggtctacacctccctgcaatgggccagcctgcagtgaactccagagacctaggggatgtggctgtgtcggcagcaagagcctttctggatgttccccagctcttctctgggagtctagaacatcctcctacctttctccgcggttagtttttgattccaggttttcgaacactacatcttttttatgttcttccttgtttcaaagcacttattggctgtgtttttgtagttacctattttcacactgtgagcttcccgagaatggggcctgggtttgattcatctgttttctacagggtttaagtctcaggaggtctcaataaacttggtatataaatgttcatgatttgaatgtttgcgacagtcctggaacccgtggatggtctcatctgcatgtacaggtgagaaaaaggcctggaggggggggactgacttgcccaaagtcacacacttagtaaatagcaggcctggcctttcaaaattggtttttctgactcctaaatctgcactctttctacctcactaaacttcctcttgaaaagatttctatgaaatttcccagatg

SEQ ID NO: 92322 - DNA, 1717 bp, Homo sapiens
gaggccgggagttcaagaccagcctgggcaacatggcaagacgccgactgttaaaaaaaaaaaaatgctacccgggcgtcgtggcgtgtgcctgtaatcccagctactggggaggaggtgggaggatcgctcgagcccgagaggttggtcggggcctcagtgagccgaaatcacgccactgcactccagcctgggcgacggagcgagaccctgtctcagaaagaaaaagaaaaaccaccgtccaggggcggagaaggaaggttctccctacttctcaggtttccactccctggccggaaaaaacctagtcctcccaggttagcacgccgctctagcccagcctcacgtctccactgcttctcagccagccaacgcctcttctgattggctctgacgtgcgtggtgcgtgaaaacgtcacgagacgccggcgttactataagagcgcagccgtggcgcttgcgcgcctctttctcagtgaccgggtggtttgcttaggtgaggtgcggcggtgtgctttttctctagggtttgggttggatggtggcccgggccttccgagtttccatgagtaagctaaagacgttaggaaacagagcagggtggttgaacgggagtgcagcacggttgtgggggcagatactgactatgagagcgttggaggttattctcgcgagatcggatctgggctccgcgaggttttggcgtagttgtgggactgcgcaggcgccgtttggagcccttacgctcacacttctctcccgcgcaggcgcagacggggaagcggagccaacatgccagtggcccggagctgggtttgtcgcaaaacttatgtgaccccgcggagacccttcgagaaatctcgtctcgaccaagagctgaagctgatcggtgagtggccaaggcttccgggaagtggttcggcttccgggaggcggttagcacgtggatgaaggtgcccatgtactctatctagtccgtcccctaaatttggtactattcgtggtttaggaaggttttgtgattccaaagctgccagtctagttgttgtgccagtacgtgggactacacttgtccacccccttctccccaccaggcgagtatgggctccggaacaaacgtgaggtctggagggtcaaatttaccctggccaagatccgcaaggccgcccgggaactgctgacgcttgatgagaaggacccacggcgtctgttcgaaggtgcgtatgggagtccacagcagagggatggggtgcagggcttgtgaggttcattctcccttctgttgcctctgttccagtgatgagagttgtgtcattggataaatggaaccagccttctaacttttagtggcacttgtgaagtaggaaaagtgtatctggatcagtctttgccctgtttcttaggtgtgtggcttttttgcccagttattggaccttcagtttagtaatgaccagagctaaagataggcctggcacacctgggcacccgtctatatctttatattctgtttatgtggcctgtttgctagtggatgagagtagactatgaagtggaatttctgggctaagtgatggtgataacagggtttgcacatttgcttggtttattgtttttttaattaagttttctcgttttatttagtcttttgagacggagtcttgctctgttgcccaggctggagtgccgtggcgccatttcggcttactgcaacccccgc

SEQ ID NO: 92323 - DNA, 1126 bp, Homo sapiens
actatgaatgatgacctgacaaccatagggtagtttggttttttgtattgttttgttttgtgacagggcctcactctgtcgcccaggctggagtgcagtggccccatctcaggtcactgcaacctccgcctcctgggttcaagcagttttccttcctcagcctcctgaatagctgggattacaggcagtgcgccaacggcctggctaatttttcgtaatcttagtggagacgggctttcgccatgttggccgggctggtctctcaaactcctgacctcaagtgatccgtctcggactcccgaagtgctgggattacaggtgtgagccaccactcccagcccgtagggtggttttgacagtgacatgggtcacggtgatggcgctgtactacttgtgcctcaccgccgcggcatggagctaccaagaggcggagccaggatttgaacccaagaagcctgaggtcagaaggcggaatcagtgtttcctcccactcttcccaggcaacgccctgctgcggcggctggtccgcattggggtgctggatgagggcaagatgaagctggattacatcctgggcctgaagatagaggatttcttagagagacgcctgcagacccaggtcttcaagctgggcttggccaagtccatccaccacgctcgcgtgctgatccgccagcgccatatcaggtaccacctcggatgggcacctgaatcttcctccacctgcccctctgatggttgccctcactaagcctgctgtccctatctcctatgcagccctcggaggtgatgggtgtgaactcacccagagggtacagattcacccttgcacacagctcaccagggagctggggcagcctcttgccccaatagcccagcgcaagggtcactgcggctctagccgtacaccttgtgaaggcctctgccaggcatgtgggcagctggacaggtaacagctcttggtgtccccagtggagggagagaaccagcctcacctcgcttgggtggtgggttcagctgtctcctggctcgcttgtgaagttgattccagaccccgatccatgactgcgttctgggtactcagtgtgccctttctgtaatgtggcaccattgagggggaggagct

SEQ ID NO: 92324 - DNA, 1214 bp, Homo sapiens
tttagaatcttcgccccagcccttcactaaccctgtgagccgtaggcagagccttgtgtgtcaatgctttcgtcggagacgtagcctcgggttgctgtgttattgtgggcattgctgctgcacgtggtaatacagctcagtgtcaggtgtggggttcacgatatttcagactcggaacttgggggctctcacatggccatctcatttgctttgtggtcttaggtgggatactttcagatttctcctataaaatggggttgagaaagtcatctgaagcatttttggggattaaggtgataccctaaaaccccggagggcgcacgtaggatcaggtgcacccttcctgcagcgccttggtgtctgcagccgtggcggcctcacggggtgggtggagaggaaagagtggtgcggtagctggggttagcgtccgtttctcctccagtccacctcaccttgtcgcttcttccagggtccgcaagcaggtggtgaacatcccgtccttcattgtccgcctggattcccagaagcacatcgacttctctctgcgctctccctacgggggtggccgcccgggccgcgtgaagaggaagaatgccaagaagggccagggtggggctggggctggagacgacgaggaggaggattaagtccacctgtccctcctgggctgctggattgtctcgttttcctgccaaataaacaggatcagcgctttacaattggtgtgtgggggtctctcatccttgactctttcccctgctctaaacatgcagccttccctgggaggctcactcacttgggagtgcctaccagctagtggtccctggcctctcagtactattctacagtagtgaacacacatctttaccagaaacttctgtcatcaggggagagacgagtggtatttttggaaaaactgtgtcaaaaccagaaggaaattccaagtaagccggtgtttgcatataggggtgggagggagccggtcattgctaggcagggcaggcgccgagtggaggtgggggccttccctgcctgctggccctgggaccctgaccccgccaggcaagagacaggtgggacgggagctgaccagaggctgacgggttgctggggaaggtgaactgttggtgattgttggggaacacttcacagaatttgcttgctagtttcaaagcttgtgatgcggttgatgttgggcaagttcccagttttgt

SEQ ID NO: 92325 - DNA, 1032 bp, Homo sapiens
acgcctcccccagcctggcccgaggcaccaggaacaggtgcccccacacccccacccgccccctgatcccacacgattgtggaggggccttggcaggtccttgggaaaacctccattccaactgctggctgcagagagaaggaaacccaggctcggagaaggggcggttcctgctaaagattgcacagccaatggagggcagagcagaattgggacccaaggcttggggcccccagttggaagctccctccagcaagctggccctgacacctggagccccagctgccagcctgggaggggctgggacccaatctcccccaagattaggccagggatgtctcccaccttcactctgacatcccagaccccgaccccccagccacgcaggaagggggatctgagtgtggaacacacgggtgccctcggaggtctgatgtcacccccttccccaggccttgttgctggtggcggccttggcgggcctgggcttgggcctgagcctcattttcatcgctgtctacctcatccgcttctgctgctgccggccccccgagccccccgggtccaagatcccctcgcccgggggaggctgcgtcacctggagctgcattgtcgcccttctcgccggctggtaatggggccccagggtgggtgggcggtggggacagggctccccaagctctttgctggccttcctgggggtgtcctccggggacatggaggaagcagacaggaaggaggaaactccctcgtccctgtccctgccatttgcaagcccacttcagcgcacagcaggaaggactgtcccatttgatggatggagaaagtgaggctctggagaggaagtgaatcaagggcagccatctggtgagaaggcgcaggggcagtcagatggcctggttttggtggctctcccattgaatagctgtgtgacctaagggagtgatagtctccctgggcctcaatttccacatctgtaaactgggcattatcatctcgcccacctcctgcgggggtaagatggagagaaag

SEQ ID NO: 92326 - DNA, 1022 bp, Homo sapiens
ttgtaggactctgaacaatggggcggggacactgggcgtccgacccgagggatgggggtggaggcccagccggggctgggaaccgggagggtgtcaggctcccgccccctccactgcgggacaccggccgggggcggggacgggaggggtctggggccccacattcaggtcccacaatggagctctgtgtgtcggtagggtgggggcgggggcacggcttctcgcccatcctccagcctccctcccacattcccttacttccctcccagctggcccgacgcttgggtcccgggtgggggaaggccgagagctccaggctcagcgtccccccaggagatggtggcagctgccccccttgtacccttaggaacccccaggaggtgggggcggagaacgtctcagcactgaagggttggcactgcaggccccaaggaccctagggcaccctaggacaggtgccaggagggctgcctgcctggcaaaggatgcgggggaagggtgtggggcaggcagtcctagggaggggaagacggcccatcccggagctgggtgtgactggggttctgctccagggaggtgcgagttaaatcgggggctccctcccccccaccactccacccaccattaacatcacaatgacgtccctccgctgggggagtgaggccttcccgttcccttggcaaccgacgggggccaggctgaagtcgcccttttcccacgggctggcccaatgaggtggggctgagatgggaggggtggataagaaggcgaggtggaggggatggggtgggaggggacggtggcccccggggtcctgggacccgctgagattcctctccctcctcctccgctcagcactggcattggcatcggtttctatggcaacagtgagaccagtgatggggtgtcccagctcagctctgcgctgctgcacgccaaccacacactcagcaccattgaccacctggtgaggggccagcaaccagtgggaccccagacccacacctggacgggctccccac

SEQ ID NO: 92327 - DNA, 1864 bp, Homo sapiens
tgatttaaaataaaagggaagactattttacaagcagctgggtcctccttatttctcctctcccttgattcggcctcctggccagggctgggacatcctccctgctgtcctctctcccccggcctcccagctgccaggaatttctgcgcctgtccaggctcagcaaggggtccaaagacattgttctttaaaaaaaaaaaaaaaaaaatcaaaaaacaaaacgctttcttctgattctaaaagtaatgcgcgtgtcctgacacaggaagacacaggcatctctggcacagaatagatggcctagaaatagatctaactgtgtgtgtgtgtgtgtgtgtgtgtatatatatatatatacacacatgacagaagacagatttcaagtcagtgtggaaaggacggttggtttagcagcagtagtgacatatcggctctccatctggccaaaaacttctatagataagatgggtggaagatctagatgtatgcaagtaaaggcacagaagaatttctagagaaattaggagggtgggcatggtggtgcatgcctgtggttccagctactcgggaggctgagactccttgcttgagcccgtttcgaggtagcagtgagctgtgatcgtgccactgcactccagcctgggcaacagagcaagaccctgcctctttttttttttttttttttgtttttgagacggagtctcgctctgtcacccaggttggagtgcagtggcgcgatctcggctcactgcaagctccgcctcccaggttcatgccattctcctgcctcagcctcccaagtagctgggactacaggcgcccgccaacacgtccggctaattttttgtatttttagtagaaacggggtttcaccgtgttagccaagatggtctcgatctcctgacctcgtgatccgcccgtctcggcctcccaaagtgctgggaatacaggcgtgagccaccgcgcccggccaagaccctgcctcttaaaaaaaaaaaaaaaaaaagacaaaaaacagagagaggctggctgcggtggctcatgactgtaatcccagcattttgagaggccaaggtgggtggatcccttgaggccaggagtttgagagcagagtggccaacatggtgaaaccccgtctctacttaaagaaaaaaaaaattagctgggcatggtggcacaggtctgtaagcccagctactcgggaggctgaggcaggagaattgcttgaacccgggaggtggaggttgcaccactgtactccagcctgggagatcaagtgagactccatctcagaaaaaaacaaaacaaaacaaaacaaaccagagaaattaggagaatatttgtatattgtctgcatgtcatgtatctgggtagggaaaatggggagggaggagtttaagcaggagatcataaaaccagaaaggaaaagatagcttagttggcaaattatagattgaaaaacataccgtaaagtcaaatggcaaattgacagactggggaacagtgagtgtgtgcgtgcgtgtgtgtgtgtgtgtgtgtgtgtgtgtgtgtgtgtgtatgttaacagttatgatgcagaaatgttattcttaaaagatataatctacaaaagctttcataaactaagaaaaagacaacccatttaaaagtaatcaattgagttgaatactcaataaaaattccaacatcagtaaacagacaaaaagattcaaactctaataattgggaaatgcaatttgaaagaatgagaaactacactttttcactacctagacacaatgaaattaacaagagtggtgatgtcctgggcgggcgaggacctagaggaacaggcactcaaaacacttctcctgaggctgtgagc

SEQ ID NO: 92328 - DNA, 4417 bp, Homo sapiens
gtgatgtggttctgaagagggaggccatgcccatgcccctggtctctaacgtgcgtgagtctcatggtagagacagtggctcactttgcagatacatggacccagtttcatcccttggcaattggccaccagtaaacaggcttgccctttgggggccgtgtgcctgtggatttgggctgctgacggcacatgtgcctctctgcttccacagtacgtgtcccaggcagaagcctcagctttgcagcagcagcagtactaccagtggtaccagcagtacaactatgcctacccctacagctactactatcccatggtgagtgcccagccagtggggcggggcagggcgaggtggagtctgctgggtcggggcgaggtgaagtggagtctgccgggatggggccgggtggtggatggactggagatcgcagtgataactgctcagaaaccctctaacttgcccaggaggtaaattcctaggtccccgccatgagccacaaggtcctacatacccggttctggtcccttctctcctcatgctcattctgccatggccatcgaagcagagacctccttgatgcccgcacccgccaggcccgctctcgctttgccctggctgcagtgctccctgtgttgccgcctcttggaggtctctgctcagatgccgccttcagagagcctctacctgacacactgattgaaagtagcattcctgcctcgcagcctgtccctctccctttctttgccatcttattgtttcatgatccttattgctggatgtattacatgttgatgtctccagccggacatgtaattccagcacaagcttcattacagcatgggttttccttttgttctgtcgtagtgcttagaagagttggcactcagtatcgttgattatattcttccgagaactagctaagtgagatgtgggattgatagaggtttttcttttcctaatatatgagaggatgtggtgcattaatatagtggagagagaaaggggtgagggattggtagagggtcatggctggtgtagttcctgagcaggctggggaagcggaaagggtaggcctcccactaaaccctccctccctgcgcctttgcagagcatgtaccagagctatggctccccttcccagtatgggatggccggctcctatggctcagccacaccccagcagccatccgcaccccaacaccaagggactctgaaccaggtaacatcctagcccagctcccataccctgctcaagcagaggaagtgtagatttttgaatgagctgtcaatgaggaatggcttgtactccttaagctgcttttttccttccaagcaactcctgatctgaaaatgaggaggacagagcatagtgtttgaacctggggtgggtttaaggctgagccaaggccagggctgagatgttgaaagacatctcatctttttccctagcatggtcacccacaggcgtgcacacaccggctgggttttgcattgaatgtgcagcttggaggaatggccgggctagtgcacaggaggcaggtagacctgggtttgaatcccagctgtcccacccctggtgtaattacgcatctcggtcagctctcgaaagcgggaaggatggtagcctcatccttgggctccatgagtgtgtgtgctcatgggtgtcttgtgctcagatggtagcgctggagtgggtgtgttgtcggtggctgttactccagcattgaaacgctgccagctgccgcttcatagcttagggccctgggaagtcgcttagtctctgagctggagccttgtcagctgtgaaaagggctgttaacaaatgttaacctcacagagttactgaggactcgaatgaactcacatttgggaaggtcacgggagggttgagtgctgagtgctgtgaccaccgcgtcctcacagcgagggctgagtgccactcgccagccccagaatctgcctcccgtgctcagcgcctgcttccttctgcagcccccagtccccggcatggatgagagcatgtcctaccaggctccccctcagcagctgccgtcggctcagccccctcagccctcaaatcccccacatggggctcacacgctgaacagtggccctcagcctgggacagctccagccacacagcacagccaggcggggcccgccacgggccaggcctatgggccacacacctacaccgaacctgccaagcccaagaagggccaacagctgtggaaccgcatgaagcgtaagttggcagagctacgtggaggtcggagcggttgggccctcacaagagctcctgggtgtgaggcccgtggtgtgtgctgctccttgtttctgggtgttgtgatcgccaggctgggggtggggctgctctggaccaggcacatgtgtgctggagccctcctctagaacctgagcgctcctccctgcatttccacttcctcccgtcccctggggacccctggatgtgccggggaagggcctaaccatagctttcgctgccctcacagccgcccctgggactggaggtctcaagttcaacatccagaagcgaccctttgctgttaccacccagagctttggctccaacgcagagggccagcacagtggttttggcccccagcccaaccctgagaaagttcagaaccacaggtgacgtctgcccccttgccccgtcgcagccccacactctgcactcagcgtctatggtccagtcccactggccagctgcccaccctgagcctcagtgtgcgcctctgaaaagggcagaaggaccctctcttgggggttgctgtgagcactgaaggagacagaaggaaaacttggggactgcgtcccgctgtgtcagctcagagtggcggtggggatggtcttttgagtttgggatcgtctccagctgagcccctcatctgtcctcccgcagcgggtcctctgcccgggggaacctgtctgggaagcccgatgactggccccaggacatgaaagagtatgtggagcgctgcttcaccgcctgtgagtcggaggaggacaaggaccgcacggaaaagctgctcaaggaggtgctgcaggcgcggctgcaggacggctcggcctataccattgactggagccgggagcccttgccggggttagtctgggtgggggacataggtgggagggtggtgctgtgagaggcatgggctgggtatggaggtaggagagttgcgggtcccaggtaccaggagctccaaagagaaatgaaccggaaagttggatcctggggggatgaagtcctggttggagggaggccggtggggtggggtggggaccatgggtgctggagaggcgtgcattgctcagtggttaagcgcaccctctggagacggaaaacctgggttcgcgtctcatttctgcactgtagtagctgagccgcctggggtaagtgcctttcctttcggaggcgggtcggtaccttgagggaggtggtggcggctgtcctgccagtgtctggcggggttggtgacgccctgccctgctgtattctcaggctgacccgggagcctgtggctgagagccctaagaagaagcggtgggaggccgctagcagccttcaccctcctagaggggcaggctcggcgacaaggggcgggggtgccccgtcccagcgagggacgcccggggctgggggtgccggtcgagcccggggcaacagcttcaccaagtttggcaaccgcaacgtcttcatgaaggacaacagctcttcttccagcacagactcccgctcccgctcctcctccaggtccccgacgcgccacttccgcagaaggtactgaggctcccggctggggctgtgtgtgagggagggggaggcgtttcaggcctgaccctcctgcttcttcctgcagtgactcccactcagactccgacagctcctactcagggaatgagtgtcaccctgtgggccgcaggaacccgccccctaagggccggggcggtcgaggggcccatatggatcggggccgaggcagggcgcagcgtgggaagaggtgagactgtgtgagggctcgacacacgggccagggtggaggagggtactggggacccatgggagaaggaggaggagggccggacaggtggacagccagctgccaaaggggcgaggctgaaggggggctggagacgcctgtcgcgctcactgcccctcatcccttcctaggcacgatctggcgcccaccaagcgcagtcgaaagaagatggcggcgctggagtgtgaggacccggagcgagagctgaagaagcagaagcgggcagcccgcttccagcacggacactcccgccgcctgcgcctcgagcccctggtgctgcagatgagcagcctggagagcagtggggctgaccctgactggcaggagctgcagatcgtgggcacctgccctg

SEQ ID NO: 92329 - DNA, 1512 bp, Homo sapiens
catgtcttgtgggtttgttttctctttttttgggagagagtctggctctgtcgcccaagctggagtgcaatggcgtgatcttggctcaccgcagcctccgctccccggcttcaagcgattctcctgcctcagcctccctagtggctgggattacaggcgtctgccactacgcctggctgatttttgtatttttagtagagacggggtttcaccatgttggccaggttggtctcaaactcctgacctcagatgatccacacacctcggcctcccaaagtgctgggattacaggcgtgagccactgcgcctggccttttttttctttttttaatgttgcaactctcccaccaaataagtggaagccgttggccacgctacctgagttgtactccgagtgtgaattcagttccctttttcaggttttgaaaaagtcgctgtgcatggtcaagtgccactggaaagagaagcaggactacgcgtttgcctgcgagcagatgaagtcgatccggcaggatctgacggtgagactcgcgctgggaggggcctggcctcagccagtcctgcctcccgctccttgtgactcttgttctcgccccgctgccccaggtgcagggcatccgcaccgagttcacggtggaggtgtacgagacccatgcccggatcgccttggagaaggtgagctggcctctgcgggcctccccagcccctttcctgctgccgttctgccctcagcaccctcactctgctctcctccctcggtgcctctgccttccagggtgaccatgaagagtttaaccagtgccagacgcagctcaagtcgctgtacgccgagaacttgcctggcaatgtgggcgagtttactgcctaccgaatcctctactacatcttcaccaagaactcgggaggtgaggcccagtccccaggacagaggccatggtacccagggttgagccctgctgacttcaccctctttgtcttggtgctagacatcaccacggagctggcatacctcacacgagaactgaaggcagatccttgcgtggcccacgccttggcattaaggacagcctgggccctgggcaactaccaccgctttttccggctctactgccatgcaccctgcatgtctggctacctcgtggacaagtttgcagatcgggagcgcaaggtcgccctcaaggccatgatcaaaacgtatgtggtgccaagctcccttctgcctttgctcttcccatccttccgcctcgcaccgcccctcagaccagctcctggccgcaggcctcccccagcccccaacccttgtcctggtccttgcttccccatcatctttctccattcagccctcccctctccagttcctcttgctctccttgttggtcacctctgtgttccgggtcactcctctccctctccccactgttcccagctcactgcctctggggcctcttctccaccccatctgtgtgtctcttcctcctgttctctcctgcctggaccccctagttcactcct

SEQ ID NO: 92330 - DNA, 2169 bp, Homo sapiens
gagctctgaggacctggctcgtgctagatgctcagtcagtagtgtgttttagcagcagccggaagtgactgctttcagtgtgtagtggtgagtgctagctggcacccctgcgcctggcttcccagacactgtaacgcagggcaggggaggcagcgagggctgggtccccacggtggccctggcagccccgccatccccatcccctgccacgtgctgctccctccatctggtccctgcccctcagccagcggaggagcccgctgggcccttccctgcccgtccccgctcctccctggcccccgcacaggtaagtgagggtgaggggggcacaggggactggggtcactaacccccccccgggccccccccgagcccctgaggtggggaggctgggaggcgggtggggagccagcaggcactgtgctgaggaaatcctgtgggcacccgaatgggggggcctccccgctcgtggggccctcccctgccctcccgcccgcccgcctcatcaccttctcctcttgtctccatagcttccgccctgcgctgccagtctcctacctgcaggccgagctggccttcgagggcgaggccgcctgccgggccttcctagagcccctgggcctggcctacacgggcccggacaactccagcatcgactgccgcctcagcctggcgcagctgtcagccttctgagcacccagcgaggaggggcgggggcaggggctgcagcccccagcgctgcctttgcggattctgtttttgagccgtggacttgggttgtaaatttatttgtggggagtgcgctccaggaagagccaccatccctgcccccgttttcccaccggggagtctgtacagagatttttctacgtttttattttttgcctcagagggatgggattggggaggaggggatgggcagcggagggttgggggcatggtctgcaggctcatctgtgtccgcctttcactccactaatgctgtctcagtgttttctctctctctctttcgagcttgcactccggtacccgacccggcgccctggcccatcccatgccggggggccagtggaaagaagacaggccgtccagcccgtgcccgcctgcggcgggggcacccagcaagcccgcccaccgcccgctgcctcacctgcttcgccacagactcttgttcccagccccttggggcctccgtgtttggggtgggggagctgcttagagactgtgcccgtcctcggccccccaccctgaagtgccagcaccaccagcaccagatcctccgccgccacaccgcactgaggacacgccggccgggccgcctcgtctcaagttgtataaagttgtctccgtgtcccctcctccctctgcccccagtgtttcttctgatttttttttcccctttccctccctccctctccgcattcttcccttggttcagcacaggtaaaacggttcccctccctccctgccttcatggatcaccagctcacgtcatgttgccttctcttttctttgtgtgtgtgtttatttaagttatttttcttcctcctctcccttttctttttggccctccctccctccctcttctgccatgtaactggaggatgtgctatgagtttgcaaacagctggactgtcaggctgctttttttccagatgttcctcctctgcctccccttcccctcctctcccctccttttccttccttccttcctttccttggagcactgagcaccatttggaagcttgagagaaaccaaaattaaagagagaaagagagagcgtgcacgctcctgctttgtctttcctgtgtgggctgtttgcatccattgtctcctccagaggtctgggggtgtcactccaggcggatctcagccaggggctggaaaggcccccctgtcctccctatacggcacagccagagtgtctgcaggggctggcaccccacttcctggctgagggtgaactccagcttggggaggtggacctgggaaccatggggcaccttggccacggtgaggtgggggtgcagctgccctggagactgtagtgtactcagcccctcggcttccagcctctggctcagcacttgtgccatgctttccagtgtgggagagggtggggcacacagcacatgcgggcccaggaggaccagctttctaaagctcag

SEQ ID NO: 92331 - DNA, 1047 bp, Homo sapiens
ggaagcacagagccctgggacagaacgaatccactggagaccaggaacaaggccagatactccatcccatccatgacacagcaccatgcagtgagatatcagtgttactatctcagccctgcgggctggtcagagcccagtgaccccctggagctggtgatgacaggtgagaggacactcaggggtcccagccccaggctctgccctcaggaagggggttggctctcaggggtgtctccctctcacagcccagccctggggatgatgtgggaggtgggagccccatttaacatggtgcctccttctctcctaggattctacagcaaacccaccctctcagccctgcccagccctgtggtggcctcaggggggaaagtgaccctccgatgtggctcacagaagggatatcaccattttgttctgatgaaggaaggagaacaccagctcccccggaccctggactcacagcagctccacagtggggggttccaggccctgttccctgtgggccccgtgacccccagccacaggtggaggttcacatgctattactattatatgaacaccccccaggtgtggtcccaccccagtgaccccctggagattctgccctcaggtgagggagccacggccttgtctaacacactttccggacagctgacaggttgtggggagtttggctggtgactgaatctggaaaggacccagagtgatgtgttgatggatgggctgaaggcatgagggagaccccatggggaggctctgacatgggaggacagagctctccccctgtcctggcccctggagagaccctgaccctccagtgtggctctgatgtcggctacgacagattcactctgtacaaggagggggaatgtgacttcctccagcgccctggccagcagccccaggctgggctctcccaggccaacttcaccctgggccctgtgaggggctcccacgggggccagtacagatgctacggcgcacacaacctctcctccgagtggtcggcccccagtgaccccctggacatcctgatcgcag

SEQ ID NO: 92332 - DNA, 1092 bp, Homo sapiens
ttccgggagatgtggaagagctggcctggagatagcaaagaggtccaggttatggctgagagatacaagatgctgatcccattcagcaaccccagggtgcttcccgggcccttctcatacacggtggtgctgtatggtcctgcaggccttgggaaaaccacgctggcccagaaactaatgctagactgggcagaggacaacctcatccacaaattcaaatatgcgttctacctcagctgcagggagctcagccgcctgggcccgtgcagttttgcagagctggtcttcagggactggcctgaattgcaggatgacattccacacatcctagcccaagcacggaaaatcttgttcgtgattgacggctttgatgagctgggagccgcacctggggcgctgatcgaggacatctgcggggactgggagaagaagaagccggtgcccgtcctcctggggagtttgctgaacagggtgatgttacccaaggccgccctgctggtcaccacgcggcccagggccctgagggacctccggatcctggcggaggagccgatctacataagggtggagggcttcctggaggaggacaggagggcctatttcctgagacactttggagacgaggaccaagccatgcgtgcctttgagctaatgaggagcaacgcggccctgttccagctgggctcggcccccgcggtgtgctggatcgtgtgcacgactctgaagctgcagatggagaagggggaggacccggtccccacctgcctcacccgcacggggctgttcctgcgtttcctctgcagccggttcccgcagggcgcacagctgcggggcgcgctgcggacgctgagcctcctggccgcgcagggcctgtgggcgcagacgtccgtgcttcaccgagaggatctggaaaggctcggggtgcaggagtccgacctccgtctgttcctggacggagacatcctccgccaggacagagtctccaaaggctgctactccttcatccacctcagcttccagcagtttctcactgccctgttctacaccctggagaaggaggaggaagaggatagggacggccacacctgggac

SEQ ID NO: 92333 - DNA, 1023 bp, Homo sapiens
gggacccggagctccctgaccggggagcggggcttccttccttctctctgagcgagtgtggactaaatgccctgtgggctgattgcagggcccatcttctggctgctggtcaagagccccgagctggccgcccagcccagcacatacctggccgtggcggaggaactggcggatgtttccggaaagtacttcgatggactcaaacagaaggccccggcccccgaggctgaggatgaggaggtggcccggaggctttgggctgaaagtgcccgcctggtgggcttagaggctccctctgtgagggagcagcccctccccagataacctctggagcagatttgaaagccaggatggcgcctccagaccgaggacagctgtccgccatgcccgcagcttcctggcactacctgagccgggagacccaggactggcggccgccatgcccgcagtaggttctagggggcggtgctggccgcagtggactggcctgcaggtgagcactgccctgggctctggctggttccgtctgctctgctgccagcaggggagaggggccatctgatgcttcccctgggaatctaaactgggaatggccgaggaggaaggggctccgtgcacttgcaggccacgtcaggagagccagcggtgcctgtcggggagggttccaaggtgctccgtgaagagcatgggcaagttgtctgacacttggtggattcttgggtccctgtgggaccttgtgcatgcatggtcctctctgagccttggtttcttcagcagtgagatgctcagaataactgctgtctcccatgatggtgtggtacagcgagctgttgtctggctatggcatggctgtgccgggggtgtttgctgagggcttcctgtgccagagcccagccagagagcaggtgcaggtgtcatcctgagttcaggctctgcacggcatggagtgggaaccccaccagctgctgctacaggacctgggattgcctgggactcccaccttcctatcaattctcatggtag

SEQ ID NO: 92334 - DNA, 1029 bp, Homo sapiens
tccacacatggccttctccccatgtgtctctgtctctgttttcccttcctataaggacaccagtcattggattagggctcaccctaatgaccgcatcctgacatggccacttcggcacagaccctgtttccggcacaggccacattcacaggttgtgggagcacaggagtgtttctgctggtgcatcaggctggggtctgtcctcaccgggatgtctcctcctccacccctctcttccagaggaggagcgagtggacattctaatcaacaacgcgggtgtgatgcggtgcccccactggaccaccgaggacggcttcgagatgcagtttggcgttaaccacctgggtgaggcctgggcaggggctgcaccatgggttcaagcgatcctcccccgtcgtcctcccaaagtgctgggattttaggtgtgagtcaaaagtgaccttttcatcatccttaatccaggtcactttctcttgacaaacttgctgctggacaagctgaaagcctcagccccttcgcggatcatcaacctctcgtccctggcccatgttgctgggcacatagactttgacgacttgaactggcagacgaggaagtataacaccaaagccgcctactgccagagcaagctcgccatcgtcctcttcaccaaggagctgagccggcggctgcaaggtacgggggcgctaggctcggcctccctcttgctttactctgagcctagagcggcctttccatgatcctaggctgatgggaggccaaacggtggatccagaacagagtcagcaaaagtagagcatgtggaccacgctgcccgcttctggtgcctgaagcagacatcactaatcgatcgttcttctgaggattgtctgttcatcccaggtggtctagtctgcctggatcagatgtccttccctgctgctgttgggcaggcagctcagccttttggctccagccagtgagtctcaaccaggggcagttttgacccgcagttgtcaatgcctggaaacacagtgatcacagctggct

SEQ ID NO: 92335 - DNA, 1052 bp, Homo sapiens
ggattcgaacctatttcactccagaactgcgtagcgccttatacgctgcggcaagtgtgacgtcattcgaacaaaccataggccccgcccccggactagccacgcccacaggctcctgaaaccaccaatcccagctgtgacagcgctcaggaccgatgctcataggtcccgtccctaggatccccgccccctccgcccgcgccccgcccctcgcagcccagttccggacgcgggcccagccgcgcctgcgcctccgctcgcctgtggctgcgtcgcgcgctcttcctcggagctacccaggcggctggtgtgcagcaagctccgcgccgacccctgacgcctgacgcctgtccccggcccggcatgagccgctacctgctgccgctgtcggcgctgggcacggtagcaggcgccgccgtgctgctcaagtgagtacattctagccccgcgtgcgcggtcaaggcgggcccccagcgcaggggccgggaaggcggcggagacccccgcccctcgcacccgggtccaggccccgtagctcccgacccgcagtgcccgcccggagtggggcaaacctgcgctctggccggccaggtcaccggcccaaggtcactcggagggaagggcgagcctgggcccttgtaaatgttgctttccttccagacttttaaactctttattttgttgttttgtattatttatttgttcgtttatttttaaaggcagaatctggctctgtcgcccaggctggagtgcagtggcgcgatcttggctcactgcagccttgacctcctgggctcaggtgatcctcccaccttggcgtccccaggagctgagatcacacgtgcgccaccacgcccggctaatttttgtatttttcgcagagacggggttttgccatgttggccaggctggtctcaaacacctgccctcaggtgatccgcctgcctcggcctccaaagtgctgggattacagacgtgagccacctcgcccagcctacttaatttaaactttcttaaaaattagcctctgtggctggtggccactgtattgc

SEQ ID NO: 92336 - DNA, 1159 bp, Homo sapiens
ggtggggcttagactgctgggaggtagagcctggcctgggggtgccggcggggctgggcttcacttgaggggcggggccgagatctcggaggcggagtctgagcgaggggatggggctgtgggcctgccggtggcggggcctggcccgtgggggaagggcttgtgggctgcctagtgggcgggcgggtgcccagcaggagcctaggacccttcagagcagtgctggcttcttctgctgacccctgtgctttctgtgtcctcaccagaggcaagaacgcttcgctgagaggccagccctcctggaactggagagattcgtgagtaggggcagtggggatgggggccagaggcgtccccagcctcacatccctaagtttggaccaagggagccacattgcccttcccagctggcccctggccttcccctgccctcctcagcctcactcagtttctgcactttccctgttcattccaggagcgcagggccctggaacgcaaggccgcagagctggaggaggagctgaaggtgggggctgtgggggctgtgggcagagggccgagggtgggtgggggtgcaacccgccagggctgcccagctgacccttgccgtcccccaggccctgtctgacctccgcgctgacaaccagcgcctcaaggatgagaatgcagcgttgatccgcgtcatcagcaaactctccaagtgacccggagggactttcccgcacccgtatttatacagctgcttctgccacacgcaccccttcccccgtgtgaacacgagtgacagggctccgggggaagtctcagagaagccatagcccccctgggacctccggactgggaggggagcagagtccccaggagccgagggggccacccgaggccaggatggaggtgggaggccgagccaagcagggggacgttgccagaggggaccagggccagagacgggaccaggaaggaactgaggaccaagaagtgcaaggatcagtagccaggaccagagtggccgcctggaggtccccatctcacgtgtgatgccaccccgtcacccctcccctcctgagcagggatccaagaatgtgccaagagtcccgccagcctcagccaggtgggcctgtatatagggtccatgtgcaatagggagggacgtcttcta

SEQ ID NO: 92337 - DNA, 1157 bp, Homo sapiens
cagctgcgggcgcctgctggacgcagggcacctcctgcccctgaggtgtgtggccatctgtaggaaaaccagtaagcccacgagccctcggtgcccgcctgggcagtgagctcctgcacagctgtttgtggtggtgttgctgtggggcacgtgtgctccacccctcccctgcagcccccttccctccttgcagcttcggaaccaaaaagaagcttcccagagccggggccaggagccccaagcgccctctagcagcaaacacagaaggtatagggagggaggagtccagggctggcggggtggctggaggccccgggcttgtaccccagcaccctctccttccccaacaggagctctgtgtgtcgtctgagcagtcgcgagaagatttccctccaggacttgtccaaggagcgccggcctggtggggctggggggccccccatccaggacgaggatgagggggaagaaggtcccaccggtgaggggcctgaatctggactcctgggtccgagggaggaggggtcgggttctctgaatctagaggcaactggcatcttctgtgacctgcccggtgttcccacatcacagaaccaccccctgcagaacccagaaccctcaatggcgtctcctccccgccgcaccccagccctaagagtcccgtggtgagtggatgccctgagaggtcctgtgaggctgggagggcccggaggtgggattccatacagcctgtgaacctctggcaggggcagatagggggaagactatagttcccagagtcgtcctggacaaccggcttcctttttaggctgtgcctgccccgggggctgatgggaattgtagtttgttgcagtcctttgggggctaacccttgaggtctgagaagagggatcctttctctctaactgagacctcctccttctcccagcagcttgaagaggcccccttctccaggcgctttggcctcctgaagacagggagttctggtgccctgggtccccctgaaaggcggacagcggagggagcccctggggctgggctgcagcgctcggcttcctcctcctggctggaagggacctccactcaggtgagtgagggttgggccgggtccaggcccaggcccctgcccagtcgagggaactgccccttcctccccttct

SEQ ID NO: 92338 - DNA, 2101 bp, Homo sapiens
ttgaatccaggaggcagaggttgcagtcagtggagatcgtgccactgcactccagcctgggtgacagtgtgagactccgtctcaaaacaaaaccaaaccaaaacaaaacaaaaaaacatttgttgcagagtagaggtatatgtttatttgatgatactcattcgatgcttatttttgagcccctgctgtgtgccaggcagtctgttaggtgccagggaaatgggtaaacaagacagatctgggcctgtgtgcggctcatagcctcgtggggagacagacattttgggctgatcgctcttgctgcggggccgtcccatgcatcacaggatgtggggcagcctccctggcctccacctatgggatgttgggagcatccctggttgtgagaaccaaaaatgtctctggacgtggccaaatgtcccctggggggcagcattgccccagttgagaactgctggcttaagatataaatagggttatgggagaagacaagtgtgatgaggaggggctttggggtcaggagacagggggatgagggggtggtgactgccaaaaaggggctcagcgtgagatgctgcagggcacagaacactgcccggctgagagcagcaagtgcagaggccagcggcgagcggacgcttggggaaatagcgagggcccagcacagctggggcagggtgagctccgggcaaagcgtgggaaaggtgaagggcaaggtgggcgggaccagagagagggacttgtgcttataaggcctctttgtagaatatcccaggctgtccatctgttcccactttgtgaagctctttctcattgacacagaaactcattccagttctccaaaaatagacacgtcctaccgttaagctgagcttggagagtggccttggacttgtaaccctgcctttgccctcagattgaatggtttaaggtggttattgttttctcgcagaacactgtctcgggtgagggtttctcagcctgggcgctggcagcatgttgggtcaggtccctctccttgtggggctgctgctgagcgctctgagcgcagccgggtgtggagcagcctccctggcctccacccagccgatgccgctaacccttgccctaagttatgacaacaaagatgtctgcagacctgccgggtctcccctgggggacagcattgccctggttgggagtcactgctttaagccagcccgggtcctagagcactactgccctgagacagccctttgggggtcccatccttctgacaggcatgggggctggcaagggtcctgcacttgcatcctccggagctgcctccttacaccccgctgctgccaccttggaatcccacagccagggtgaccccctgccagcaccaggagcaggttccagaggccacctgcagggtcagggtttaacatgtaactgctggtccaaggggagggacaaggcctggtgcagaggggcctcttgtggcagcggatgctgggcagtggctctttaccagcctgtccagggacgtttcagtctcgtggcctgggacctcgttaccaaaccgctggccgaaatcagccctcggccaagggccccgccttggcctctgaccctgagcctccctggcccccaggttgctccttcaggctggctacgacccagagctccgggacggggacggctggactcccctgcacgcagcggcacactggggcgtggaggatgcctgccgcctgctggccgagcatggcgggggcatggactcactgacccatgcggtgagggccagtgcccaggctggtgaggggcagggcgtggggagggcccagcacctccttcattgtctgatcctgctcctcccctgacccaggggcagcgtccctgtgacctggccgatgaggaagtactgagcctgttggaggaactggcccggaaacaggaggacgtgagtgtcagggctgaggggcttaccccagactccccatgtcccctcagctcctcagaggagggtgcagagggggaacccccccgacttctgacacccaccaccccagcgacctgctatttccctcttggtgacccagccccagccccagcctcaggagagacccccagc

SEQ ID NO: 92339 - DNA, 1050 bp, Homo sapiens
tttttttgtagttttagtagagatggggtttcactgtgttggccaggctggtcttgaagtcctgagctcgtgatccacctgccttggcctctcaaagttgctgggattgcaggcatgagccactgcacccggccatggttttatattaaaaataataaaaatacggtgaatttctggttgaaatggggaaaggcctgtgatctccgttttcccagtgcttagcgctgactcagagaccctgagtgggacacacgactgcatggagtacagttgggaaacaactgggctagtctgggcctcctgagtctcagaggggagcagggggaagagctctgggcaagtcactgggctgaaccctggccagcccagtgtatgaccctgggtatttcaggtcatggggtgtgagtcctacctcgtgcctcttatcctcctaggtgtggatgtggaagcagccaagcgggcagaagaggaattgctccttcatgacacgaggtgctggctgaatgggggcgccatgccagaggcccggcacccccgcacaggcgcctctgccctgcacgtggctgctgccaagggctacattgaggtgatgaggtgagttgggccagtctgttccatcttgctgtcttataccttcctgtggatcttgtcctttccctttctttttaaatgtatgtaccgaaggctatgtatttccctctaaatacagccttagctgtacccacaagttttgatgtgcagtcttttttttattgtcattcagtgtaaaatatttcccaatttgtaatcttttattatttatttattttgagacagggtcttgctatgtcacccaggctggagtgcagtggcacagtcgtggctcactgcagcctcaaactccccaggctcaggtgatcctcctacctcagcctcctgaatagtggggactacaggcgcacaccaccatgccccgctaatttttgtagagatggggtttcaccatgtggcccaggcttgtctcgaactcctgggctcaagtgatcctcctacctcagcctcccaaagtgc

SEQ ID NO: 92340 - DNA, 1006 bp, Homo sapiens
ggacctgcccctggacctggccgagtcggacgccatggaggggctgctgaaggcggagatcgcccgccgaggtgggctctggtgtgctgtgtgtggggtgggggacacctcctcacccgtggtctccaggctgagagctttagaggcggcctgggcaccgaggctgaccctgcttcctaggattgtctttctttgtgcctcagtttcctcacctgtgaaatgggggtgtaggggcctgcctccaggattgcttggagcccagcacacgcacaggatgagaactcaaacccctaccaactgggactgtcaatccccctgagtaactgaggggattggaatgccggggcggggtgggtgggtggagggactcacccaggagtgcgttaggtaggattgctggaaccctgccgcaggtctttctgggaggggatgcgtttacttgggggggagtaggggcatgcaggggttgccagggactggtctccctgtcctctgagactcatcgtaccccaggagccttcatatggggtccaggagcccctgaaactgtgtctggccaggttcatttttctagggaaggggtgttgcttctagcaggtgtgtgatggccacacaggatccctgggtccccagcatgtcttctaaagtcctgggcttgcctcccagctctgcctgtgactggtgactccaggcacgtccctgaagcttgcttccctgatttcctaaaacaggaccactggtgccgcttcatggggtggttgtcagggtctggctgggttggagtggaagggtgtgagcatggttcccggcagactccaggggaccgtgtggaaggaaagggagactgacgaggaaatgagataccggcagcctccgagacttctgacgcggctgtcctgacggggccgctggccaggctgaaaggataggattccgcgtgggttcaggggtccacgagagccatgcgggaggactagctagtgggacacgtgacggcggagatctg

SEQ ID NO: 92341 - DNA, 1025 bp, Homo sapiens
cgcccccctgctgtggctgttcccaagttcttagggtaccccacgtgggtttatcaaccacttggtgaggctggtaccctgcccccattcctgcaccccaattgccttagtggctagggggttgggggctagagtaggaggggctggagccaggattcttagggctgaacagagaagagctgggggcctgggctcctgggtttgagagaggaggggctggggcctggactcctgggtccgagggaggaggggctggggcctggactcctgggtctgagggtggagggactgggggcctggactcctgggtccgagggaggaggggctggggcctggactcgtgggtctgagggaggaggggctgggggcctggacttctgggtcttagggaggcggggctgggcctggacccctgggtctgaatggggagaggctgggggcctggactccttcatctgagggcggaagggctggggcctggcctcctgggttgaatggggaggggttgggcctggactctggagtccctggtgcccaggcctcaggcatctttcacagggatgcctgtactgggcaggtccttgaaagggaaaggcccattgctctccttgcccccctcccctatcgccatgacaactgggtggaaataaacgagccgagttcatcccgttcccagggcacgtgcggccccttcacagcccgagtttccatgacctcatgctcttggccctcgtagctccctcccgcctcctccagatgggcagctttggagaggtgagggacttggggggtaatttatcccgtggatctaggagtttagcttcactccttcctcagctccagttcaggtcccggagcccacccagtgtccacaaggcctggggcaagtccctcctccgaccccctggacttcggcttttgtccccccaagttttggacccctaagggaagaatgagaaacggtggcccgtgtcagcccctggctgcagggccccgtgcagagggggcctcagtgaactggagtg

SEQ ID NO: 92342 - DNA, 1031 bp, Homo sapiens
ccacacccgtccgcagggagcagccggaaggtgagtagggagtgggccggccctatgggatggggacacgcccaggagctcttgggaggggaggcgaggagtgtggcactttggcggggaaggggcggctcagccctcgggccctcgcccgccctctccgggtctggagcgtctcctcgcgccatccctgcaccgccagggggaacgtgcccatcgcagccgaggccagagggacccccgtccagcagagactggaaccctggtctctggccaccgcccccatccctcccccagctcctaacgccttctcttctgtgcccccatctccagaggaggctgcggaggaggaggaggaaggtgaggtcccggactccgcaggtctggagctggggggtgggggggcggggacgctgggcccgggaggagggggcgggatggggctcccgacggcctcggctcccggtcctctaacagcctctcacgtctcttccctctctcccctcccgcgcccgggcgtggccgctcccccctcgctccccaaaccctcgctgctcctccctcccctccccagcccccgaagagccggagccggtggcagagccaggtaaccgcggctgcttcgcttcccgagaccgatgtcgggggcccggggggacccccgatatcctcgggccccaacctccaagaccacccttccctccctccgcccccataacccgcccccaggcccggtcctttaagcccctgagagctcctgcgccctctcggggccgggaagggaaatggccccgcagtggctttaaccctttcccttccttcttaaagggaccgacacccaagccttcttccccagtctggaggaatctttacagaagggttggatgtttgcggagaagcaccaccccatccccccttatcttcgcctccaaccttgtctgttattttctcccccatatacattcaaaggttggggcttggaatttaggattgcagaggaggcgagcgctgggagtcagggtctccaaggtcgg

SEQ ID NO: 92343 - DNA, 1071 bp, Homo sapiens
tgcctgccaggctgaccttcccagaactttccaggagcctaccttagaggattttttaaaaagctgcaagaggacaaaaagtgttatctccaagtcctgtgtgcctgcccagctctgcccagctctgtgtatctctctggttttccgcccttatggctccgcctgtcagaggtgacccctctatccccttcccccagcagccccgaccccggaatctttcaccgtccacttcctgccgctcgattctgctcagactctccaccacaagagctgctacaacggccgattccagctcctctatgtggcctgtgggtaagcggggaggcagctgtgctcacaaagacccaggatcaggcccccagcccctcctccctcagacccaggagtccaggcccccagcccctccttgcttagacccaggggtccaggcccccagcccctcctccctcagacccaggagtccagacctcctgctcccttctttccccaggacccagactccagttttgccacccctcctccctcattgtctgggatcccagagccccatcctccctccggatttggagctgaatctcagcctgtcctccgtcctctctgcagtatggtccatcttctcatccctgagcttggggcctgtgtggcacccggagggaacttgattgtggaattagcccggtgagtcagtggggtggagggtggggaacatcctggctggggatcaaaatctgggtccctgacagggcgcttcccatctgcaggtacctggtggacgtgcggcaggagcagctgcagggattcaacacccgggtcagggagctagctcaggcagctggatttgctccacagaccggggccaggccttcagagaccttcgcacgtttctgcaagtcccaggaatcagctctgggcaacactgtcccagctgtggaacccggaactccgccccttgacatcctggcccagcctcttgaagccagcaacccagcccttgagggcctgacccagcctctgcagggtgggaccccacactgtgagccctgccagctgccctctgagtctccaggttca

SEQ ID NO: 92344 - DNA, 1016 bp, Homo sapiens
tgcatgtggggagacctgcaaggaggctcggccagggtggggcctggtgctctgggatggtccttctcttaggccctgaggggtgacctcggggccattcccaggatgggccttcctcactggtaccccacccctctcccgccaggcatggccgcctttgccaccgcccacctcctctacgtctgggccttcggcttctctcccctgcagcccggcctgctgctgctcatcatcctggcccctggcccctacctcagccttgtgctccagcacctcgagccggatatggtcctgccggtggcagcctatgggctgatcctgatggccatgctgtggcgcggcctggcccagggcgggagtgccggctggggcgcgctgctcttcacgctctctgatggcgtgctggcctgggacaccttcgcccagcccctgccccatgcccacctggtgatcatgaccacctactatgctgcccagctcctcatcacactgtcagccctcaggagcccggtgcccaagactgactgactagggagcttgaagggccggtgttcaggccctctcctcctgcaaggacctgggcctcccagcccagcccagcctgagaaataccctcagcagcgaagcttcctgacgcctgtctgcaggcgccgctgccgccgtcgcttctggctgaagacgtttgaggacgatttgcggaattccaagtccactactgggttccagctgccttcccccggttctgactccagatccctggctcctcagccaggcccacatggagccctcccagccaccagcctgcctccatgttcactgtcggccccacagcctgcccgccccctgctgctgctctgaatccgttttccctgtgggtgtggaaccgtagatgttgctgttaccgtaggagaggcctcggggagggtcatgattgtgataaaccatcgcggttaatgacagcagaaggttctttgtcgctccccatggaccaggcctggtgcccagtgggaccctcc

SEQ ID NO: 92345 - DNA, 1727 bp, Homo sapiens
gaaacatatattatatattatatagagagagggaggagagcgagagagagtgaggacaccgaactgggctggcggctccaaagcacagccttccctgttccgtcccagcgggagctggtgttaggggtcccaaggttgccacccacgtgcccagctgtcccacgctgcagcgcagacggccacgcccacacccggccttttagctcaggtccaccatgggggacggcccagcgtgggtgggggtgccagagggtcccgagtgggggccgtgcctttgcccagaccctgcactttcaaccaggccagtccggctctggggagcaggggcctccccggcaacagccccaggggccttgagggtctgaggtcccagccctgttgccaagtgaccttgtccccagctccctcctcccaggctggtgtgagtgtgcgtgcgtttgtgccgagcttctatttcatattgcaaatataaataaaggaaggcagtttacgattctgctggtcagaccttacgttctgggatgcggggtggggagcctgtattatccctgcaccccagaggctgggggtgctcctgacccagtctgcccccacactgtcctgccagagggagccctgtggctgcagaggccccaggctgggccaggcactggctgtgagggctcctgccaggtctaccccacctgtgggcagggccttgggcagaggatagaagccaccgacaggctcaaatccctgctcctgcccctgcttacccccagtaaccaagcccagcattgaggctgggtactggcgcccagtaggtctgagtctttcaggtagaaggtagaagtgtaggctgcgtgtgcagcgagtggcaccggtgagcggcgctgggaaaccggagcgtgtggaccgggccatgaggacagcgtcctcactggggtggcagttggcttggaggtcacctgggggctcgctcagctaacaggagagggtgcttgttccccgcattcgtggtggtccctcctggtcacccattgaagcagtgtttgtggtggagcccctgagggcttggtggggttgagcagaatgaggaaaggtttcatggagcagggagggagacggctagggcagcaagtgaaggacagactcgccttcccatccctccaggggcactcctgccagccagcccctctcccgcttcccatgatggggtggctgttggaattctgcaccccatctcttctgattgttggggcccaggacaaggggacaggcatttgtgggcctaacctccccaggcagataggaggaggaagccatgtcccagcaggctagggcagagggacccccagtgccaacagtgctttatcagcgggcgccaggcagggccatccccagggtgaggacaacatctccctgggccctgttatcagtcacagagtccacaggacgctccttgggttaacgtgtaaccatgagccctcccctccaccccctgaagccactcgctcccagattaggtcgctctggggctatcaggccagcatggacgctggcaaagcggggcagaccctgaagactcactgctcagcccaggtgagagccttctgagctgtgcctggggctggggggacagggccctggaaccccagcagccggcgggtctgggagctgctgtccttgagttggttgggccctgggaagctgggttctggcagcctggtccctgaatgggtccagcc

SEQ ID NO: 92346 - DNA, 1143 bp, Homo sapiens
acacccagccgagaccctttctccagaaaaaataaaaaagatgccctgtgttcattagcagctcctcctgatcttcccctttctcttcttagcccccggcaaccaccagactattctgtctctgtggatttgtctttggacatttcatataattggaatcatgtactacgtgatctgtgtgtggtttctttctctagcatgatgtttttgtggctcattcatgtggttgcatgtatcagtttcactccttttcctggctgattagcactctcctgtgtggatagaccagcttgggcatattcactcatcagtcagagccttctgggtcattgtgggcggtgctgccagccctgtatgcggtcatgagggccttgtgtggatgcctcctgtcctggggagccttccgggcttcctgttctctccaccatcttccctccagcagttggtgcctctgtgccctcctccttcgtaacacgtgtccctgtgtctgggtgaccatttttccctggatggtcagctcatgggaggggctcccagcaccaggctgcagagggcccggtggcccgaccaggatcctcacctgtctctccccgttccagcaacattccaacgcatcccagtccctgtgtgacatcatccgcctgagccgggagcagatgatccaagtccaggacagcccagagcctgaccaactgctggccaccctggagaagtgggtgtgcgggcaaggctaaggctggggggagctgacttggggaagccctgggcccctggcccctcaccctgacccctgcccctgcccccgcaggcaggagacgattgagcagctcttaagcaacatgttcgagggggagcagagccagtctgtcatcgtcagtgggatccaggtgctgctgaccctgctggagcccaggaggccgaggtgagggatacgggccacagaccatgcatgctgcccatccccaggggctctccggcccctcagaggcgggtctcggtgtccaccaagagaaatccccgcccgtggcaccttgctctgtggctgcctgtgctccctgcacagtggacagtacggggccgagggaggaatcttcttgtctgctttgacaagtgagggcactgaggctgaggccactgctgcag

SEQ ID NO: 92347 - DNA, 1033 bp, Homo sapiens
tctgcagtgtctctcccaaaagtagggatagtggacccagaccctcatggggagacagggcccgaggcccctcagtgcacagggtccagcctcttctcgcaggccctgcacatggtccacacctggggacttcaccaggcctgaggcctcaggtgtgaaatgaccccctggacctcaggcgaggcggccgggaggctggagatgggggaagaggggcaggctcgagggcaactgcaggagcctggtgctcactgggagccttaagcctgagtgatggaggcagtgagcctgcgggcagtcccggggcggggccgggctcagcatgaggcagagggctgggacttggggagaggctgtgcccaaggtgggcactcagcccctgtggtcagtgcctcgtccagtggggactccctggggcgtctgacgcggcgctggttgtgtctatgcctgcagggcgccatgttttggaagtttgacctgcacacaagctcgcacctggacacgctgctggagcgggaggacctgagcctgcccgagctgctggacgaggaagacgtgctgcaggagtgcaaggtcgtcaaccgcaagctgctggacttcctgctgcagccaccccacctgcaagcaatggtggcctgggtcacccaggagccgccagatagcggtgaggagcggctgcgctacaagtgagttccccagctcctggccagcccgtccctatcagcatcacacataccttcactacgcaagcctcacagctaccctgaaatgcgtcagtgtcagtaaactccagtttggggatgaggaagacgaggctgggagcagccaggctcctgcacaaggcctcacagctcaccgggtgcagaccaagcctgtgctctggagggcagtggcacagtcacgggtcacggcagccacaaattcacgggcccaggtgatcctcccgcctcagttgcccgagtagctgggaccacaggcatgtgacgacatgcccggctggtttttctctttattcgccgccttttattttatt

SEQ ID NO: 92348 - DNA, 1150 bp, Homo sapiens
gagatcctggccccaggctggcctggcttcaagctagccaggaaggagaggaaaggaggcccaagaggcgttcgacctgcctgaggccatgtgtgggactctgtcctgcgttttgtcagcccaggctgctctcctaagctccgatgaagtctcttccctgggcctggtgctccacgtctccctgtctcttccctggggcctggggctgagtcaggcctgggggctggtgggcactgaggtgacaggtcagcagggctcgaggagatggtggaggcctgtgcagagggaatgactgaactggaagaagctgcagaagggcattggaggagagggactagcatctgtgcctgggagtgatggtggtgagggcctgcgggagaggcacccttggcctcttgtgccggctctgctctgttctcagcatcctctgtagtgacttgggggtagcagtggcctctgccttagctggtgatgcggttgtcaggaggcaggtaatgagcgtgagctctggtcagtgtcttaactggtgagagctccgtgaaggctgtctgctgggaccagatggccttcgagattccaggatgccgcctgacttaccgggctttggttgccccttgtcctgtgtggcggagtgatgacagctttcttgggggctgctggtgagcttggacatcatgtgcacagcacacatgcagagccaggaccattgtcatcaagtgcccagagcacaggtcacaggtcaggtctgtagtggaaggtctgtgtggaggctttctagggctctgcggagcagtgatgtagtacagggcaggggctcagaatggagttgcctggcatcttgttaatactctgtgtgtgtttccttattgccagtgagttcccatgcacgagcgtttaggggctggaaccaggctgaggaaccaggcactgtcctccagagggcgggagccagctccagatggggacagggtcagggccgggtgttgccagctttgttcttcccccacagaatctgtctatcccaccctgggttccttcaggtcctggtcagtgactattctgggagcccctcccttccaacttttcctcttccttgttccagcccaggtgctgggtgagaggatggttggggtgtgtttgtgtgtgagtg

SEQ ID NO: 92349 - DNA, 1066 bp, Homo sapiens
ttcacggggccttggaacggagccggtgcgcagctgcggctcactgagctgtctgggtttattccggggcagaccgttggcaccaacgggcgcaagcgcgtctgcggcggcggggttcaagagtgggcggtgtcgggagcgcccgggcgcacgcgcactgcaccgcccaggcgtgcaccccgccccccgcacctgcgcaccaacacagccgcgggagggcggggcctcctgcgtcgtcctgcgctagggggattgtgggatagtggcggagggagccgggcgtcggaggccctgaggccggccgcagagcccggagattgagcggctttggggaaggggtggttaaggaagtaggcctcggcttccgtcggtcgctgctcggctctgcggcccgtttggaccgcggaggaggtcgccttcccctcccgtggggcgctcggttggactgtggaaaccggggcaacttcccccgtcttcccggctgaggcgcctgcgtgggcctcgcgacccggctcgccaacccgcctcggcccgcacgcccacctcgcctgcggaccccggaggtgcctacgcggactagtgacgccccccgcccgtcggcaactccacccggcgctgaccccctcaactctgcaggacccggcgcgcgaggaccccacgacccgcgggcgcctgcgcggaccccgcgagccccggcgcctgcgcgagtccccgacgccgcccccgcccccactcaccgggccccgcagcaggggccggagccgccggcggcggggcgggggggggcgccccgatgagccccgagtgcgaggagccgccgccccccctcgcaggtgagcggcccgcgtcgcccgaccctctctctccagggccaggcgcccacgtcttcccctctccgcgtcccctcaggcttttccctctcgggacccccgcgggtcttttctgcttcggatcctttccctccttccttcgggtttcctctccacggcaccccgtttcttccccctcgaccctccccagtctcttaatctcttcacctcagctccgccgccaccctagtctcagt

SEQ ID NO: 92350 - DNA, 1210 bp, Homo sapiens
tattcgttgggagtcatagggtctccaaaagattgaaaagcagagaatacaaggaattgatggagagagacagagaaagtgggggggcgggggcttggaggagacagactcggggagacacggtgaggaaagaatgcgtggcaggcgggctccccaggacggagagggtgagggccagggggtggctggcagaggagaggggcacctggctggatggacagtcaggaggaacggactggcaggagggaggggaagggtggttttgtgggagtgtgggctctcagccccaggagttcaggtctgatgtgttcaggccattgttaaacagccagcccaggaggaaggagcaaacagggtggccaaggggggacataggcgctggggacgaaggggacccggcggaacaccccacattttcaccctgctcctgcagggctggttaaactcggggtccactgcatcacgggtcagaaggtcgccatcaagatcgtgaaccgggagaagctgtcggagtcggtgctgatgaaggtgtgtgcgcctgctgcagtgtgcctgcgggtgggggggcctccggggctgagggcaggggcggggccgtgctgacctcttttcccgtgtccccacccctcttgaccctcaggtggagcgggagatcgccatcctgaagctcatcgaacacccacatgtcctcaagctccacgacgtctacgagaacaagaaatatttgtaggtatttatagacacccagccctaccccatcctccctctccaggttaccagggtgggacttctccagaaacagggcctagggggacctgggggacctgcagctctccaggctggaccgctgaaggcccagttccttgcctgttgcacagggaagcccctgacacacagggaaccccactgttgtcacgctgtgttgggcctgaggccaagggcaaccatcctcctaccgtgtccccagctccagctcctcgccctgtggcactgcatggaatgcgctctgctagacaagcagggtgccctcgaccagacccaatctgctatgggcagatgcctcctgtttgtaaggcaaggggcctagcaaagcccaaaggatcttcccaaaccccaactctggagcactggagagcccccctcctcccccggcataacttcgggtgccgtggctggacaccccaacaatgggccgccttaggaggtctga

SEQ ID NO: 92351 - DNA, 1036 bp, Homo sapiens
gtgctgtgattacaggcgtgagccaccgcgcccggcaatgcctggctactttcttaactttcttttgagatggggtcttgcttgctatgttgcccaggctggtcttgaactcctgggctcaagcaatcctcccaccttggcctcccaaagtgctgggattactggcgtgagtcattgcgcccggacaactgctgatttattctcactacaggtgttcactggggacttacatgtgtcaactttaggtttgcaaaggcaagccagcaaaatgaaataaaacacacaaagacagatgccccagacatcggccctgacctcagggagttgatgatacagaagggaagggagatgccactcaacgaattaggcaacaaaatgcacagcgacaactctgatcgttgccaggaagaagggagcctaccacaggggggtctgaccttacaggagtggggaggaggagtgggggcaggggaagcttcctggaaatgtgacaactgagcagagagcttgaagaagtctagatatgaactaggtgagcaacaaggctaataggtagcagagtgtcccaggcagaaaggccctgtggtaggagcagggctgatagcctacgatctggctatatatatatatttttagatagggtctcactctgtcgcccaggctggagtgcagtgacgcgatctcaactcattgcaaactcaacctcctgggttcaagcgattctcctgcctcagcctcctgagtagctgggactacaggcatgcgccaccaagcccggctagtttttgtatttctagtagagatggggtttcaccatgttggccaggctggtctcaaacttctggccccaggtgatctgcctccgctcggcctcctgaagtgctgggattacaggtgtgagcctccgtgcccggcctggttatacttgttattacagtatcacaatgccctagaatcagctggtaaacagtcattgtatcaagccctccaggtgctcctggatgacttgttcctttctggggttcttcctggagac

SEQ ID NO: 92352 - DNA, 1052 bp, Homo sapiens
cgagaggctgcatcgcgagctgcgcagtgaggagtaagaccccaagacccctgcacccgtgtacccacgtggggcgagctgcagcagctccctgcgcacatgcagagtgctgggcgaggaaccctggcctctcatggggcatggtttgaagctcccgcctgggagtgatggaaccagcggagaaaacggcccagaaacacgctgagaaagtattaatagatgctgcgacatagtacttacatatacatagtacttacaaatagttcttgcctggatgttaggtgttacagtgttattataattgagtgaaacacagctgagatgtaccctaaaccagagaaactgaccatactgatacctagaaaaaatggaaccatgggcagaaatacagggagcggaggagacctcctctgagcattgatgttggacctcagccctctgctacctctttccacctttcccaccccctgccttagggagaaccaagaaaagatgatatattatctgcttttggatcggaaggagcggtatcccagctgtgaggaccaggacctgcctccccggaatgatgttggtgagaaggcagggctaggggaccagacacctgggtctcgagattggaagaggctggccacggggaccccagattcccaaggaaagaaggggctgcaggctctgagcttccagctttagactgcttgacttgctctttgacatttatcaaatcccctctccactctaggcctgtttccccatgtgtgcagtttctgaggcagttgtacacagctgggtgaaaccatctcttgattgggttgaaactgttgtccctcagaccccccccggaagcgtgtggattctcccatgctgagccgtcacgggaagcggcgaccagagcggaagtccatggaagtcctgagcatcaccgatgccgggggtggtggctcccctgtacccacccgacgggccttggagatggcccagcacagccagaggtgggagcccctgtccctccaggaggatccacaatccctgggtctaggagttcaagattc

SEQ ID NO: 92353 - DNA, 1786 bp, Homo sapiens
aggaggctgtgggaggtgttggcggcggcggcgcgggcgcctgaggaggaggaggagaagcgggtgaggggcggcgcggggcccgatctctgagccccttcacggccccagccccgcgccgccttggctccccagtcgccccctgccccgactgccccccaccccgcccggcccctcctcgtgtccaggcgcccacgtctcccggcccctcgccgggcctcgggctccgcggcactgcagcctccttcctgtgcttcctcacccgggccctgacccccttcttacgtccacggccctccctgcatcctcagggcctctccctgacctcttgtcactctccaggcctctccctgcaccccccagggcctttccctgacctcaccctccaggcctctccctgcacccccaggtctctccctgcaccctcagggcctctccctgacccttctctcacccccgggacctccctgcactcccagggccaatccccgacctcctctcaccctccaggcctccttctggaccctctaggtctttctgtgccctagaacctctccctgacccctctgtccctctcctggcactccctggaccctgaggtcggcctctgaccctccaggtcccttgccctgggctctcaccgcctacccaggcgcctccctgggtccccaggcccttccctagggtctccctttcctggatcccccaggaccccaccaagcccgtttggatccctgggcccctgtccgccctctcaggcccttcactcactggacacccaggatcttctccgccatccctggaccgccccccgacccaggtctcccgtctggctcctccctgagtccctaggccattccccgctctctgtcctccctggcacccccatcccttcctcacacccctctgagcgcccccaggcccggctgcagccttctccctcccacagccccctgccgtgcccaccgctgtgcgtttctctccttgcccccagccccctctccagcttccccgctgtccctggcgtcctcctgcagcgccccctctttctctcccgcagcctcgcagtctgtccccgacccctccacagccgtctctgcagctcccgctccttgccctgccccatctcctcctctcctgggcgcggatgagcctcgagcgccgtggtgcggggacgaggctggccctccgtccgggttaggggtttgggtggttttcttcatctctccgttctctcctggctccgctttaaaaaaatgtttttgtaaatattgacctgtgctgcctccccatagtcttcctttgctcccctccccacccccgcttttgtcctctgagcccccctcccctggaatccttggagagggagcaggtgctgggatccctcccctgccctccctcccgtcacccgcctccaggctgcctggggcttcacccggagcctcctgaccactcccgaaggctgccggggaggcagggggcggagaccgaggctgggtcgaggtgggggtggagggcgggacctcgggctggcgggaagctttgacttttcctccttgagggctagaggtgaagcggctccccacggtgctaagcctttagggtgatcccggctgccaatcagtcagccttctctgggcccaaagagatgtgtgtgtgtagggggtctctgtacatatgggcaggggcatctgcgtgtgtcagtctgagtgtgcatgggtgtgcatgtgggggttgtgtgtttaggggggatctgtgtctgcgctgcggagcaagagcaagagct

SEQ ID NO: 92354 - DNA, 1066 bp, Homo sapiens
ttggggccggggcccgggaaggccctgggacccaggcatgccctctcccccagccctgtgccccccctgcggcgacagcagcacctgcgctcagcgctggaaactttcctgaggcagcgggacctggaggctgcgtaccgggccctgacgctgggaggctggacggcccgctacttccagagccggggcccgcggcaggaggctgccctcaagacccacgtgagggcgccctcccctcccccgccctcaccgcgtgtcctccccgctcaccgggcctggtcccgcctggcagacgctctagagtccctcagcgcagcccctggggccccctgacttcctagcccttgggaccatctgaggcaaggctcagagaatcctaggagaggagagttgggggggccctctgagatgtagtccaacctcttcatttgacggatgaggaaactgaggccccgagagggaacatgaggcccccaagaccacacagtgagtcagtggcatggcaggcctagagtcctggagagagagggccaaagatgcccctgccccgcctcctcacccccaccctcaccctcaccaggtctatcgctacctccgtgccttcctgccggaaagtggctttaccatcctgccctgcacgcgctactccatggagaccaacggggccaagatcgtgtccactcgtgcttggtaagagggcaggactccctgcaggtatccttggaggagacagagctcagaggggacaagagagaccctctgttcatggactggccaaccggggaaaagcgaggggcctggtcctccgggcatcctaggaaggtggtggggctaatcccggaagacctttgtggctaccgtggtgccgctggagcaggagaccccggatgtgaccccagggttcctggggcttccaggaaagaactaggcttctggtcagggccgtgctgtccttacctccttgtgacctgagcccccaccacatgttaaacacccctgagtgcaatgaggagcccctgcccctgcccctgcggggttcacagtctggtgaggaggtggggggcag

SEQ ID NO: 92355 - DNA, 1041 bp, Homo sapiens
agtagaagggtcctgtggggctgtgggctggagcagggaagcccacccaggcaggaggggaagagggagatctggaagatggatcgccaatagccagcaccagcgcccaggagtccctccttcctgggtgcctctgtgccggaggcccgagtcccctgaacacctgcaggaggccaggcatcgcccacagccctgccccctggcctcttggcaggaaaaagaatgagaagctggagctgctggtgggctgcattgcagagctgcgggaggcagatgaggggctgctgagggccggtgagaatgacttcagcatcatgtactcaacccgcaagcggagtgctcagctgtggctgggcccagccgccttcatcaaccatggtgagggtcaggcaggtggatgggcaggacgggatagagccaggcagggctggaggggtgtagtgggagggttctgcgactgagctgccgagctcatctacctctcttctctctcctgccccaactggctccagactgcaaacccaactgcaaggtaaggccttgggactcgggaggagagggcacgcaggaagaaagggtgcctgtggcctggggaaagggtttttggtcagtaaagagccaaacaccggccgggcgcggtggctcatgcctgtaatcccagcactttgggaggccgaggtgggcagatcacgaggtcaggagatggagaccacggtgaaaccccatctctactaaaaacacaaaaaattagtcgggcgtggtggcgggcgcctgtagtctcagctacttgggaggctgaggcaggagaatggtgtgaacccgggaggcggagcttgcggtgagccgagatcgcgccactgcactccagcctgggccacagagcgagactctgtctcaaaaaaaaaaaaaaaaaagagccaaatgctgccccatgtctccatggcttcccacgggtcctggaaggggcagagtgggtatttgctcacaaggctaccagaaaggaggaaggggttccagtttggccagcgttgcccggctgtt

SEQ ID NO: 92356 - DNA, 1034 bp, Homo sapiens
agtgaggcaggcctcagagaagcgggggcggcccgcagcaggcagagctcggacctcagctgccaaggcacagtctggcggggggcaggcagctcaggaggggatgggcttgggtgtggcagaggaggtggggcttggcacggggccacagaggctggagggagtggtcaccactgctggcactgcacgctgccagaaggtcaggttagatcatcgtcctgcagggaggggtggaaaccagccagtgggtggattgtccaggggctacaggcaaaggacaggccctcggcaaggcagccgcctcggaatgccacttttaggggctcagctgttgccccattccaggagaggacgctccgggccagggtgcccggccaggtgtggggagtgggtgagccctcccctgtgccctgggccagggcgctgagtgggcttggccctcagtttgtgcctgcagatgggaacgcagcctgcgtgaaggtgctccgggacattgagcctggggacgaggtgacatgcttctacggcgagggcttcttcggcgagaagaatgagcactgtgaatgccacacctgtgagaggtgggaccgggcgagaggcggctgggttcgggtcgtctgggcttcttgagcccagaaacgcaccctcgggacccatccctgagtgtgtccaaccccagcctctcatctcccttccacccggcctcatctccccttcacccggtctcccaggaaaggtgaaggagctttccgaaccaggcctagggagcccgcgttgccaccacggcccctggacaagtaccagctgcgtgagaccaagcggcggctgcagcaaggcctggacagtggcagccgacagggcctgctgggccctcgggcctgcgtgcacccatccccgctgcgccgggacccattctgcggtgagcacccctccctgccatcccagcagcccctcccctgtctgctcctggtcatctgtctcctttcttctgagctctctgcctagcctggaaccctccctcccaccctcagtcg

SEQ ID NO: 92357 - DNA, 1338 bp, Homo sapiens
gttttaataaaataaaaagttcaagtgcttccaagcccccaacatacccctttctggtgtgggggaggggagggagctccccaccccaatagcaccaggatagcaccatgagaaagatgaggtcacacccggcctccctgagacccacggggggtggtgaggggaacatgcctccagacaccccccaaccttccccccaccgcagacagctgcagagctgagagcgaacccagtcccctcgtgagggcagtctctggggagtgccaccccctacatcagttccacctcctcctgaggcctgtacttctggggagatgccgtggggtggcccctgccccttatggctttgctccctggggaggaaggggctgaggggggcggatggctcctgcagtcctgaggctggggcaggggtggggagggcagcaaatggccggggctccctgtgggagtgggggtggctcaggggtcagcagtcacaaagggtcagggctcagatccctgggggtgtccaaaccaaccccattccagggtcagagctatgctggagtcaagggtcagctccctcccagaggtccaagggctccttctggaggtcctgggtagcagctaggagagagaccctctctccctgctgggcctccccgtccggcctgtcacagctcttcaccgccgacatccaggtcgatggagccgtggctgaccaccagccgtaggcgcttgggtggggagaagggggcgaaggcgagggcctgcttcgggatcaggatggggcctggggtcccagcaggggctggggtagctggtggggctggggccaggcgacgaaggtccacacgcaccacgtaaggcagcccatagcgccgggcccagtgccagtcctgctgaggggcccagcgggcgtgggggggctggcccagggccaccagggcctctcctcgcaggcggcagtgggggccacagcctccccatcggtgcagggagacgcgggcagcgtggtgggtggagagcactggggccctccggggccgggggcgtcggcgcttccggggccgcactcggggctggggctgaggcagccactggagccagaggggtgaggtgtctgggcgggcgctgcaggctggcaggcgcaggggctggcaggcggctgtgaaggcccaggtggcagggagaggaggaacaaaggagaggtgaagtcagtgcaagctgggccggtcctcctctggacaaggaggcagccctgccctgcgctccccagaggaatgatgcggccgaactgctcaacagcgaggcctgccagcgactgagggtgggagggagggttccaggctaggc

SEQ ID NO: 92358 - DNA, 1029 bp, Homo sapiens
ggagtcagccccctgagctcacccagccctacctcctctgataatggggccctgagccatcttggtttgccttggggaacctcgggctcacacaggtcaagaagcttgtctagggtcaccctgcaagttgtcatgattagttgtagtcacctttgaaccctggggttgaacagggcctcataggaccgcttcagtcagaggatggggcttccccctcctaggagcccctctggaaggctgatagctcagggagtacccgttgggaaaaccagcaccccaggctgactggtctcacggctccctcagcaggaccaggctggaaccctagggctttgtcaagcggcactccttggcctggggagaggcaagacttcaaagggcgtctggaaccggaatgcggttccgtgttactgccgggatggggaaggagtaaagaatgattccgagggagctctgagcgtcctctgggtgctggcagtctggcgggggtcacaggagaaattgcggcgatgtgtgcggtgggagagactgacagcggcctctgcggggtgggggtgcggggtgagcctgatgcattggagaactgagcaggctgctacgcctggctgtgggtgcgggtgccgaaagcgtggacaccaggggattctgttggaaataagctggctcacatgatggggatctcgatgttctgggaggggaaatgagccaggtgggagcggggtcgtgatggagagtggtggagagcccagagagtgggggaggaagggatggagtcagcgctgggtggtacaaagaagacccctcaggacccgagatgggatggatcaggggtgggatggggaaggagcctggggagatggtccaggcaggaggggagtagggaaaggactgaggtgagaggtaggtgtggtgattggaggcaggagcaccttggagccatctgggtgggacagtgttgagaactggggaccctgggctggctcgtagctgtcaacgcgaggcatctacctgctggaatggagagggaga

SEQ ID NO: 92359 - DNA, 1494 bp, Homo sapiens
attaaagcttgagcctgagactcagcgagtcgcacctcggtgcctgtgtgcacgcgcaggcccccgagggggcgtcgggggagcaaggggtggggtgggggcgcccctaccagccccgcggtgcacgacggctcccattggctggggctcgggcgtcctagccaatccggccgcggggtgcgtttctcctgacccgggtgggaccgcaccccgcggactcagaagcgagcggcaccccgggaccatcccacagcagatccagtggccgccaacgtcaggctggtgagggcacgacgggtggggttcaggggcgggggtcaggatggggagacgggtcggagcgagggcgccccctcggccccacggagtccccgtcccgtcccgtctcgcaggagttgcctccttcgtggatgttggatgtggaagcccaggagccccccaaggggaaatggtcgacgccgcccttcgacccgcgcttccccagccagaaccagatccgtaactgctaccagaacttcctgggtgagacctgctcagccaggttatgggaggagcagggtgtgacaagggacggcagggaggggcactcccaccctaagtcccgcggagaccgttagggtgggaggccgggcggggccgggttggtgggggcggggcctggtcgagaaaaggcggggctgagcctggaggggcggggcgaggttggtaggggcgaggcctgatctggaaggtgcggggccgagtcgtgaaggtgcggggcgaggtaggtaggggcagggtctgggtaggaggagcagtgtgagggaggtaggggtcggggcctggctgggaggggcgggacggaggcctccaggggagagggaggcgggacgaagcagcgaagaactgggagggcccgagcagtggaggggcgggtcctgtcctggaatgggcgtggcttgccgcgtgacccccgcccgccacagactaccaccgctgcctcaagaccaggacccgccgcgggaagagcacgcagccctgcgagtactatttccgcgtgtaccactcgctgtgccccatcagctgggtgagtcggcagagggggcgccgggccaggcgtgtgcagggctcggccgaggctgagccggcgtcccgctccctgcctttctgcttcccaggtggagagctggaacgagcagatcaagaacgggattttcgccggcaaaatctgactgccccagcgcggcttcctctgaagatgcagtgatcctgcatctttttgtctcgcggagccccgggtctcggttatccacccctacctcccagtgtctaagccacgaataatggtatgctgttgctgatgtttcttcttaatgcccagccagcgatgcgtcgtggtggtggtggggatcctccgtgtgcctgtgtccgggctaacgctgctttttccgataaggggcaggtgggggactgctgctccatcaggtagcagcaggcagtcaaggccctaagaca

SEQ ID NO: 92360 - DNA, 1048 bp, Homo sapiens
tcccaggctgccttcctggtgcttactctgtgcagggccccaggggtccagactccaccccctcctccctcagacccaggagtccaggccccagccccctccttcagacccaggagtccaggcccagcccctcctccctcagacccaggagtccaggccccagccccctccttcagacccaggagtccaggcccagcccctcctccctcagacccaggagtccaggccccagcccctcctccctcacacccaggagtccaggtccagccctcctccctcagaccaaggaatccaggaccccagcccctcctccctcagatccagggatccaggcccccagcccctcctccctcagacccaggagtccagacccccccgtcctccctcagatccaggagtccaggccccagctcctcctccctcagattcaggggtctgatctgggctcccctccctgggtgacccagtatttcagcggctgctcactccatgggtagaagaatccctggattccatttccgtctgcgagagaaagggcagtgttagggctgtgtggagccgggcgtccctcctcagctcccccgcctcaccagcccctcacctgccgagccctgcagcagcaggagcaggcccagcgctgggatcccacagcccaacatgtcacctccccagacccctggggccactgtgggaagaggccttacaggacatcaccccagcaaccggccccgcccgcctgcccgccaggccccaggattgtgagttctgttgctagggagtcaggggtgtgctacggacgtggaagggcttcacaccagcctggccatgcctggtctagggtgttgattctttagggacctggtggaagagtgggggcgtctcaggtttagaagagcctctttggccacttatggtgggaaagagaagtctggaagggcgtgggagtctggggcgtgtctccatatcacccggggcgccctgaggggtggggaactgggaggctttgctagggagtttctttcctaaggaaactgatacctgagaaggt

SEQ ID NO: 92361 - DNA, 1073 bp, Homo sapiens
tcgcgtggtcgccatctccggcccgccgcgcactccctctcagtcctctgcctgccttctccccttgcgcctcaagggtcattggcggaccccaacccctccccgtgaagtcgttgtgaattttcaagttattttcccctcactctcattcgccgcagctagtctcggctgcctgaattcggtcccgccgccttaggtcactcagtcccgcctgacaagagttctaggtcgctgtctgccctcaggggtctcccattcacccaagttcccagtcgctctcttcctctgctgtccgagcgtggcccgtggcctaacgctgctttagttctctgtgtctgacgctttccctgtgcccgtttccccgcagccgccgccatgtctgcgcatctgcaatggatggtcgtgcggaactgctccagtttcctgatcaagaggaataagcagacctacagcactgtaagtggggcccggatgcgtggctcctgcgggaggagggtcctgagtctcttgactctgggtcagagggcgggaccttcgcatgtctccgggtcccttattcacgatgccttgtgccgcctccttcccaggagcccaataacttgaaggcccgcaattccttccgctacaacggactgattcaccgcaagactgtgggcgtggagccggcagccgacggcaaaggtgtcgtggtggtcattaagcggagatccggtgagttttgtctggtttgggccagagagcggcccctttcccgggtctgggagctgtgattttttactgtcaggcaggaagagcggtaactgccatcgcggcgggcatccctggcgccagggtgttggtctgggtaccggcttccctctcggccgacttgtcagctctgtgagccgcgcgcgtctgagcccgtgtcctcacctgtaaagtggagaaatgaaaaaggacctgaacttcctcggtggttgttgagagttaaggcacggggttgatgttttcagatgaaattctcaaagcaagtcagggtggggatggatggtttcatcccacaggtgggaagattgaggcacaacaggggaggg

SEQ ID NO: 92362 - DNA, 1014 bp, Homo sapiens
tgtcccctcctaagtgtggtagcgagggcccctcccctgttgtgcctcaatcttcccacctgtgggatgaaaccatccatccccaccctgacttgctttgagaatttcatctgaaaacatcaaccccgtgccttaactctcaacaaccaccgaggaagttcaggtcctttttcatttctccactttacaggtgaggacacgggctcagacgcgcgcggctcacagagctgacaagtcggccgagagggaagccggtacccagaccaacaccctggcgccagggatgcccgccgcgatggcagttaccgctcttcctgcctgacagtaaaaaatcacagctcccagacccgggaaaggggccgctctctggcccaaaccagacaaaactcaccggatctccgcttaatgaccaccacgacacctttgccgtcggctgccggctccacgcccacagtcttgcggtgaatcagtccgttgtagcggaaggaattgcgggccttcaagttattgggctcctgggaaggaggcggcacaaggcatcgtgaataagggacccggagacatgcgaaggtcccgccctctgacccagagtcaagagactcaggaccctcctcccgcaggagccacgcatccgggccccacttacagtgctgtaggtctgcttattcctcttgatcaggaaactggagcagttccgcacgaccatccattgcagatgcgcagacatggcggcggctgcggggaaacgggcacagggaaagcgtcagacacagagaactaaagcagcgttaggccacgggccacgctcggacagcagaggaagagagcgactgggaacttgggtgaatgggagacccctgagggcagacagcgacctagaactcttgtcaggcgggactgagtgacctaaggcggcgggaccgaattcaggcagccgagactagctgcggcgaatgagagtgaggggaaaataacttgaaaattcacaacgacttcacggggaggggttggggt

SEQ ID NO: 92363 - DNA, 1024 bp, Homo sapiens
tggctagtgatcctcctgtctcagggacacgtagtccagggagcagccaattgcttggcacttggggaccccgttctggggagtcctgaaagctttcacctcttggattgccgaatacatgggtggcccttcctagactaagggactggcctgagtgaggctgggcctctcagccaagctgatgttgaaccactgctgtggggatgggcctggggttcctgggaagctgttcatacccattgccaggagcgtgggctctggctggacctggatcagatcctaactgaagcggcagctttctggcatgagaaaggagtgttttcatggtggacagaattgggctatgagtgtggcagaagctgtgtcctcagtactccgtgatgacgagtgagcctctgtgaaatggacaggtgggaaaacagctacctgctggcctgcccaggcacccgccacgggcccacgctgctcagcttctcaatgtgagactgtccacacctgcgaggtgtgctaaaggtgcaggttaggtggactgaccccaggacctccctgacccccaaccaggccagcggaagcctgccacctcctatgtgcggaccaccatcaacaagaatgctcgcgccacgctcagcagcatcagacacatgatccgcaagaacaagtaccgccccgacctgcgcatggtgagctggggtttggggatcaggcttggggagactggccagtgctgtggggaagggcctcccactactggttgcaatatgggctggagagggatggattcttgctttcagcctactccccacacccagcattggcctagggggcggcttgtggagtgtatgggctgagccttgctctgctcccccgcccccaggcagccatccgcagggccagcgccatcctgcgcagccagaagcctgtgatggtgaagaggaagcggacccgccccaccaagagctcctgagccccctgcccccagagcaataaagtcagctggctttctcacctgcctcgactgggcctc

SEQ ID NO: 92364 - DNA, 1078 bp, Homo sapiens
aggctgaggtgaacaaattgcttgagcctaggagtgcaagaccagcttgggcaacatagtgagaccctatctcttaaaataaaaaagtagccagacctggtggcatgcccgtaatcccagctacttggcaggctgagatgggatcacctgagcccaggaattgcaggcggcagtgaactgagattgtgccactgcactccagcctgggtgacacaagagaccttatttcaaaaaaagaaaaaaagaatcctccagtctgttggcagagttggcggggcacccacctgcatcacaatcagaccgtggagactggactttggggtgttgaggtgccttgggactcctgagtgccctgaccctgtacccctccctccactccagaggggaccccatatgctggaggtctgttccgcatgaaactcctgctggggaaggacttccctgcctccccacccaagggctacttcctgaccaagatcttccacccgaacgtgggcgccaatggcgagatctgcgtcaacgtgctcaagagggactggacggctgagctgggcatccgacacgtactgctggtgagttctgggctggggctgggcctcctgcctcctgcctctggaggtctgctggtgtctgagccatagcgctttgtttagtttttctgaatcaactctgaagtggttgaaggtttccacataaaaatccatgttgctagctttcctggaaagacaaacagtgccagacccaggacacccaagtactgttgagaagtgcccaggagcaccttactatgcaacgagtggtgagtttgtattgtaggatggtttttctcttctcccttttttttaaaaaacaaggatagggtaggccaggtgtggtggatcacttgagctcaggagttcgagaccagcctggccaacatggtgaaaccctgtctctactaaaaatgcaaaaattagccgggcatggtggcacatgcctgtaatcccagctacttgggaggctgaggcaggagaatcgcttgagcctgggaggcagaggttgcagtgagccgagatcgcgccactgcactccagcctgg

SEQ ID NO: 92365 - DNA, 1595 bp, Homo sapiens
gtctcgtgacccaccagtcactaaagcgcatccctattggcccgagcgccttccatcacgcgtttaaaaccccgagtcccgcctcccctcgccacgctccggcccccaggaagaccgttagtcgcgtgcgcgacttcctcagcgtcagggcgcgcccgcgcgtatgccgggccgtggcggcgtctcattcaaacggtccaatcagcggccgcgtcgccttccccgtcccccttcctctcttcttccccttttcagcccctccgttctttgagaaccctcccgacccccgcgggcccccattggccggcccgctacccagccctctccgccacttccctcgcttctgaccatagtttgcggggaagggagcgagcgcgtcgaaaaccaaggaacgtgcgcgctgacgtcacggttgaggctcggagctgaggggccgcggagggcgtggcctgcgggcggttataaagaggcagtggtgcgcgcgcggccggctcagtgctgccgggcaccggggcggcgggttggtctacgctgtgcgcggcggacgtcggaggcagcggggagcggagcggggccgccggggcctctccagggccgcagcggcagcagttgggccccccgccccggccggcggaccgaagaacgcaggaagggggccggggggacccgcccccggccggccgcagccatggtgagcacgggcgatgaggcccatgaaggtggtcgggggtgtccctgagggaggaggtggagtctcaggggcctccgacgggcggccttgaggggtttgagggccagcctgggggtccctgacccgggatgggcccgagggccttcccgcaggcggagcaggagctcgggcggcccgcagtctccctggcggcgagggctccgggcgctttgcggcccgcccatgggtgttaccaggagcaaggacgccccgccgccatctccagacctgagccggggtttcaaggatgctctaaccaaaaattagtggagaagggggagagagtagatctctggcctacgtggaaccactggggaccaagcagggttaggagcgggctttggggggggggttctggggtgggtggagttatctgcaagcccccccgtgaacccgcccccatttctgttggaaactctgcctgggctgatggcctgaagcatcctgggtgagggtctgggagttcaagggtgattgacagcctggggccactgagtcaagacttgggcagtctcagcatctttaggccctgcgggaagcccagctcttaacactcgctcaccctgctctcccatccgtgcccagaactccaacgtggagaacctacccccgcacatcatccgcctggtgtacaaggaggtgacgacactgaccgcagacccacccgatggcatcaaggtctttcccaacgaggaggacctcaccgacctccaggtcaccatcgagggccctggtgagtttggaaggaaaaagagaaggggctgctgcttagatcctccatcaccctgctctagatcaccctagcgggaagtacccattacaggctggcctcgtgtcaggtgttgggatgcattggtggacaggg

SEQ ID NO: 92366 - DNA, 1016 bp, Homo sapiens
agtgagcctgtttcctcgtgtggatgccaaaagtggtcatctctctcccacattgttgatggagcctggggccaggcactcagtgggtgctgacaaatgcccagtacccccctcttggggccctcttccccagcatcaagcccgtctcctgagcagaggggctggggtgagaagagggagcctgaactgctggaactgatgggctacaatctcagatttctaactccccaaagaactgctgggtctgagggaggaggggctgggggcctggacgcctgggtctgagggaggagggctgagcctggatcctgggtctgagggaggaggggctgggggcctggacgcctgggtctgagggaggaggggctgggggcctggacgcctgggtctgagggaggaggggctgcaggcctggacgcctgggtctgagggaggaggggctgggggcctggactcctgggtctgagggaggcggggctgaggcctgaattcctgggtctgaggtggaggggctgggggcctgcactcctgggtctgaaggaagaggggctgggtttctggactcctgggtctgatggagcaggggctgggggcctggactcctgggtctgagggaggaagctgactgaccctggccctgccccctctaacccagactggcgagccttgccgccgcccagcccctccttgcactactccacgctgtcctgctctcggtccttccacaacctctcgcatctgcccccgtcctacgaggctgccgtgaaatccgagctgaaccgctactcttccctcaagaggctgggtgagtcctggcaagggcagcgcggcggtgaaggggagggggcggggccagagcctgggttcaggaccgtggacagtggcccaagagccttccaatggtttagcttctctcccaggttttactccaagttcgttctggaattacctgtggtacttttgtatcagaatcacttctgatttttttttaatgcaaccttctggtctcccctccc

SEQ ID NO: 92367 - DNA, 1136 bp, Homo sapiens
gggcgctgggggtgcgggcggggggccagggcccggccaggccgggtggttggaagggggccggactgggggtgccgggggccgcgggggcgagggccccgggggcagcacagcctacgtcgtgtgcggggtcatcagcttcgccctggccgtgggcgtcggcgccaaagtggccttcagcaaggcgtcccgtgcgccccgggcgcaccgggatatcaacgtgcccaggtgcgtgtgctctcgggcgggaggactgcgagcctggggcggggcccagcaagggaggtggagccatccgaggaggaggggctgcagggatagggcgtggtggtcagagacccaggtggcggccgccggcgtagctgaaggtgggcaggggctgagaaagtcgcgccagagccggcccggctgttgcggagtgatgcagggagagggagaagcccagactctcattcattcgacacatatttcttgagcaccttctgtgggccaggagctggggatacaccagtgaacaaaacaaggtctctgccctggtggaaaagcctgacttccaaatccaagttcacagcctacaggctatgtgacagtggatgagttgcttaacgtctctgttcctcagtttcctgtccgcacaatgagactaatcatcgtccccacctattcggattgtaattaactgagttgattcgtgcagggtcctggcacacggtaagggctcattaactatcagtggcccagtccgtaagcatgtgcagtgtaattttagatgactgctgtgaagaaaatcagcggaaagtgttgagagagagggcgctggattagaggaagtgatccgaaaaggcctctgaacggagacccgaagggagggagcgaaccacgcagagatctgtgggcgagaggttttgggcaggggaaccgcgtgcaaaggccctcggtggcctgcagggcagggaagcgcccgtgcagctggcggcggtgggcagcaggaggtgaggagaagtaggcgggcccgggtttatcctaagtgtgatggggccactgcagggtcctgagctcgggcgtgatgccatctgtccattttttaaattatgcgggctgcgcgtgagactggagtgtacggggctagggtggga

SEQ ID NO: 92368 - DNA, 1025 bp, Homo sapiens
ccggatgcgggacccttggggagccgggggtggcggcgtggggggcggccggaggcggcggcggagcgcgtgtctgccggcagctgggctgggcgtgcgcgcgccggctgggggcgaccccggccgcagttctcctccgagcagatgcgccgcgtccgtgcagatgtgtcagccgccagccctcgcctttgcctcgcgccgagaagaggcacctccccccccccacctgctggggaccccgctttctccctcctgcagcccccagtcgcccccgggatcccccccaacccaagaatggtttggtccacagccacatatatgtttattctgcgagtccgtgtcccacagtctgagactcttcttcccctccccttcccgccccgtgaagtggcccggggccgagccccgcctccatcttggctcagccaattcccacccagtttccaggagtctcatttgcatttccgggagcagctgtccaatgggaaggcagcaccctgccccccccacaagggggcggcactcctggtggatcgcaccactcttgggatccagggatggggggaacgggcttccactgaggtccgggtgacaggagggtggtcttccctcaaggcagggttggagttcagtggaggagggagttctggccttggaagaggcccagcagtccgctgtctggggcgggctccttgatgagtttctggatctgtaagggcagggggcgatgggtcaggaagcgtctagggtcccgatctccatggatgacaaatctgagggacacctctccgtcttcatctctcggaccttctggctagcagctgcccaagacaacactccctcttctcaagacttttcctggggcctccctttcattacacgtgactggttgagctcctcactgcctgccatcttggtgtgctttgcgggcttggaccactaagggtggacagctctgtgctggggcttcctgtctacaccttcctcttcttaagtaacctcatttctcccatccctcttctggg

SEQ ID NO: 92369 - DNA, 1110 bp, Homo sapiens
gcgtgagtggcggccgacggggcggagtcgcgcggtggtctccgaaggctcagactctggctggagagagggcgtctcggccggccccattgcacagagcagaccgccgaggccgggagagagagagaggggtcttacctagagtagaggcatgtctgcggttcgaaacctggccctctctcaagaaacggaggcttacaaagatacccaagcactttccaggaaggggctggctgagggagcgatcaagtgaggaatttgacgcccccctgtcctttgcgctctgtgctgcctcagtttccccatctgtacagcacctgcctcctcgggtggtgtttagaataatttagactctgtgcttggaaatggaggttgagagaaagagagaatttcctatctgtcttggaataaatccaaactcctcccaattcatggtcggccttcctggtccgtgcagacctcgcctctcaccactccccctgctcactccgctccagccacaggggtctcctcttgctcttccctcaatgtcccaccgcagggcctttgcacgtgtgctgcctcagcctggaatcctaggactccccatggcccaaccttccaggctttcaaagcctttcctgaccacctggtgtcaggtagcccttccatcaggtcgctgtttttaatttttttgaaacatcaaaaaaaagaaaaaaattgctctatcacccaggctggagtaccatggtacgatcacagcttgctgcagcctcaacctcccgggctcaagcgatcctcccacctcagcctcctgagtagctgggaccacaggtatgcgccaccacacctgactaattttttaatttttttgtaaagatggaggtctcactctgttgcccaggctggttttgaactcctgggctcaagtgatccgcctgccttggcctcccagagtgctgcgattacaggtgtgagccgccgcacccggccttgtgttttattttcttttcagcactaactccaatctgaattggaaatgaatcttgctttttgaaaaatgcatggatatactcttttattgtctgttccccgccaaaacacacacatgcacacagaacagggagctcc

SEQ ID NO: 92370 - DNA, 1013 bp, Homo sapiens
cttgggcccgggcagtcaaggctgcagtgagctgagatcacaccactgcactccatcctgggcaatacagagatagagatgatgagggtgagaaatggataatgaaaaaaagagaccaacagcaagtgagaaacaggagcagagatggattcgcagggatcctgagagatggggatacaaggaagacaggcaaagaaaaaggcagaagaatgtggtgacagtgatgtgggggccaaagcggggcgtggtcccaggtgtggaaggagctgcagcagcaagacagaggccatagagcagagggggatggagctgtggccctggaggctgattctgctggccagagggaggggatggccagggtaaggagagaagctgcactccaggagtccccacctctgagccataccaggcccggaccagagcgtgagcttcaagaatgggtgaggtttcgcttgctctgggggagctggggtggggacgatgatgtgatgacagaatggcccttggttgtgggtttgactgagggccccaggcttgcatattgtgtggcttacaggagggccatgggctcaggattgctgagcttagcctgatctcttagatggtgtccttggctctgaagaagtgtcaccattgagcccaaggaggtaatgcgtttagggtctcaggagccaaggaaaacctttccagggtgccccgaggcctcagccagctcattgagaagggtctttctggaaaccctgcagggaagcgaatggaggtttatggaggccctccatggccaccccaatcaggcctctcacctgtgtccggcaggcgccttattgctggggaggagctacccgggcgccgggtggtcctccaggggagagtgtgtccaggtacccccgctgtggtagtccccttggccaggtcctctcttgaggtggggtcccaggtccaggggggataatcgtcatagtctgtgtagcctttggagaaattggggtaatggttgaccccatcctctttct

SEQ ID NO: 92371 - DNA, 1129 bp, Homo sapiens
tgggtagccgtaagtccccaagacatggggactttgcagtgagcaatgggtctccacaagtacctctcatcttgagagccctaatactaaaagatgggcacccacccccaccaagggaagactgccccattccctgagagccatcattcctaacgaccttgatctggagaatgtggagggagcatgtccctgaattttcctagatccctccaaatgccacccaccagagtcactggtgaccccagaaaatggatatagccgaaatctgcctttcccctttttcattccctgtgctgaaagagggaccagggtagatgccccctgccctcgaatcccccctccccgactgtggaatggatcgaccctaacgatcttccccgccccaaacactagaatagactggcctgaaatccccttgcccagtagaatggactgatctatgtgcacacacccccatcacatggaatgggctggtctaggctgtggcctgccaccttccttagagtgaatagggcggacactcctctcttttcctgtagcgtgtggaccggtccacgcaattctttatcctgtgaactcatctgagtgggaggtggtggacactggggtttccttccctctctccgtagcatccgttggtctttctctccatctctgttggtttgtctgtctctgtcttcctcccaatccctaggggaagggggcatttggctagggggtgcccctgtgagcctcgaccttgccccctcgtccctctccccagtgtttccaggacccccaataaaccttgtcctgtcagtcgctgatgcctcattttctgatccttggctccaggcgggggggatggggaatctcttaggacagactccctaaatagagacgggtcctcgttttctcctgagaagtttcaaagctttgaatagtacatgcccttttaaattagagtcggtttaggctgggcttggtggctcacgcttgtaatcccagcacttggggaggccgaggcagataacctgaggtcaggagttcaagaccgtgcctggccaacatggggaaaccctgtttctactaaaaatacaaaaattagccgggtgtgatggcacatgcctgtaatcccagctactcggga

SEQ ID NO: 92372 - DNA, 1025 bp, Homo sapiens
gcgccctgctccgtctgctgcaatgtggggccctgctcggtgtgcgggggctcaggggccggcggcggagagggccccgagggggcaggcgcgggtctgggcagctgggggctggcagaggcggcagctgcggccgcggcctccttgcccccatttgcgtgcggcgcctgcgcgcggcgcttcgaccacggccgcgagctggcggcccactgggcggcgcacaccgacgtgaagcccttcaagtgcccgcgctgcgagcgcgacttcaacgcgcccgcgctgctggagcggcacaagctgacgcacgacctgcagggcccgggcgcgcccccagcgcaggcctgggccgcggggccaggcgcagggcccgagacggcgggcgaaggcaccgctgcggaggcgggcgacgctcctctggcttcggaccgcaggctgctcctgggccccgcggggggcggcgtgcccaagctcggggggctgctccccgagggcggtggggaggcgcctgcacctgcggcggccgccgagccctcggaagacaccctgtaccagtgcgactgcgggaccttctttgcgtcggccgcggccctggccagtcacctggaggcccactcgggcccggccacctacggctgcggccactgcggggctctgtacgcggcgctggccgccttggaggagcaccggcgggtcagccacggtgagggcggcggggaggaggcggcgaccgccgcccgggaaagggaaccggcgtccggggaacccccgtctggctccggccgcggcaagaagatcttcggctgctccgagtgcgagaagctgttccgctcaccgcgagacctggagcggcacgtgctggtgcacactggcgagaagccgttcccgtgcctggagtgcggcaagttcttccgccacgagtgctacctcaagcgccaccggctgctgcacggcaccgagcggcccttcccttgccacatctgcggcaagggcttcatcacgctcagcaacctctccaggcacctgaa

SEQ ID NO: 92373 - DNA, 1054 bp, Homo sapiens
gatgaggaaggggagccaagagggcgggagaaagggggagtacggcgggggaagggagctgaggcggaagtcgaggggccccccgggtggaagtgacgctgcccccgctgcccaaaatgtcggcgcccagagggaggtgtaagtaattaaagaggaaagccgacggacttccccggcctcccggggccgccccgggtctccaggaccaacgctccgtacgagcgaggtggactcgcctggccccggggcctgcccgacctgccccccaaccgggcgcccagggctgcaccttttaggggcagggggaggggcacaaaaggccggctctcggggcctggggcctggagcagactgggcaagtgggggggcccgctcctcaggctgcggggtggaggaggaggcggggcctagtggctgctggggcggagcaagggctgggaggagcctgagttgggcggagcttagagtggaagtgggaggggcgtggaggagggagagtctggatagaaaatgggagggtcttaggcaaagaggtggggtttgataaaggggcgtggctcagaaggaatggtgggtaggccctggattgaggggtggaaggaaactcattgaggctggttgggtaaagggagcccaggaagcaggagggaggagtttagagtagaagggatggagtttgtctggggtgtggcttagagaagtaggtaggcctagtgaggggggtggagtttaagggtgtaatttggaggggtttaatgcaactatcaggtctttataatgaatgtggaaaggacttgcaggggatgggaatagacttcgtagagaaggcctgagaaggtgacgggagtccagtggagagtcttagaaaggatgtggcttctttaaaggaaaaattgggtggagttttggaagtgggtcttagtggacccgagaggggcttagataagtcaaataacttagcaatcatggtaggacttaaggaggaatccaggaggaacttacgggataatagtcatccaaacagcttacttgttgcgtctttgctgtgcaccag

SEQ ID NO: 92374 - DNA, 1001 bp, Homo sapiens
ggggcggcacttccggtcgggccctcgggtctccccggagcggcggcgcctcctccgcctcctcggcctcctcccggcggagaccccggcgccggtgagtgacggggtgcgtggcccgggggcccgggtgcagcgggggcggggggccccgccctggcccgctgtggtccccagaacgtcccccaacccctagcaagtcagtgcagctcccgccgggcccttgccaagggacccccaatcactgctccccggtaggatcactgcagatagctcccccatgaacgcccccagctaggatggctgccaaagcgctttcattcgtggcgatcccctaaacggctgccagggcccccaaatgatacctcctcgtaggatcccctccacatagcgctccccgtcattgcttcctccaggtcagcctccagatgccatcagcattgcccctccccatgtagggcagctgctcgtgaaccctcttattagtatcctctatataattctccccagagtgtttccttagtgccttgcagcagaactgtcccccgttatctctgtccatacagcaacagcccccaatggccctgaccacctccctccccagcagaacgccccttcgtgggtgtgaaaatactttctattctggtcagcaccaagaatgcctttttcccttctgcaggtcctccagtgattccccttaagaatgcccctttcaaagccacccccccatcgcagcggcacagctccctctagagttccttcacactcacatcctctcccgcctcaggtagaaatatccgcctgcttagctccaggctcccatgacatactcccgtacctcctctcaccccaccctcatcgcggtcagcccgtcttcattacttctgccacagaacagtgtcccgcagtgaggcggtgaagccttccttcccagaatgtgcctcatcctcttcctatggcgtgaacaactgttgccctgacctgcagcttctcacccagctctc

SEQ ID NO: 92375 - DNA, 2029 bp, Homo sapiens
tgctagttgagggggcagatgattaaaagacaaaatacaggccaggcgaggtggctcatgcctgtaatcccagcagttgggaaggccaaagtgggaggatcgctggaggccaggagttcaagaccaacctcggcaacatagtgagaccctgtctttacaggaaaaaaaaaaaaaaaaaaaaaaagctgggtgtggttggtgggcacctgtagtccccagctattcaggaggctgaggtgggagggctgcttgagcccaggagttcgaggctgcagtgaaaaaaaataaaaacaaaaaccaagagtatatgtgcgtgttcagaatatcacgggataaagagatagacctggggggctgtggttcaggatggcctcccccaggattttcctatgtcttgtcatcttgtccctcccaaaagccacacaccaaaaagttatacaagagtaaaaattccccttctcctggacaactgtggcccacttgggggctgctcttaacagcgccctaaccccaggagcgaagtgattgggaggatgagccctggattccactagggttcacagctttgagcaaatcactccctcctttcctagcctcattcattcacttcttcaaacaaaaatgtatcaagccaggaactgttgtaggtcctggggatggaacagtgagcaagagataaaaatccttgccttcaggaagccgatcatctggatggggagaccaacaaaatcaaggcaaagaagtagattatgtgaggttataaatgatgctgagcagtaaggagagaaatgaagcagggttagggagatgaggatgtgggcctgggtgacaggtcattggttactgagaggctcattgagaagacagttgaccaaagatggggaggaggtgaaggggtgagcgagatggttgcctgagagtcagaatattacaggcaacagcaacagccagcgcaaaggccctgcagcaggaatagagtgggcacatgggaagagcagccaggagactgtggaggtcattgtaaggactgtggctttttttttttttttttttgaaaaggagtttcgctcttgttgcccaggctggagtgcagtggtgtgatcttagctcgctgcaacctccgcctcccgggttcaagtgattctcctgcctcagcctcccgagtagctgggattacaggcatgtgccaccacgcccagctaattttgtatttttagtagagatggggtttctccatgttggtcaggctggtctcaaactcccgacctcaggtgatccgcctgccttggcctccaaaaatgctgggattacaggcgtgagccaccgtgcccagtcaggactgtggcttttgaatgagatggggttactgtttggtttgggaccgaggatagacatgctttggttatagtcctcctgtcagtaaaatgggaataataataacacatttgttgtgaagtttgaatgaaacaagccacataaggcacctaagtacaatgcttgttagaggtcaacaaatgttggtgacttgttctggtcttgggtcaagccaagagacttgggatttgttggcagggagatgggtggagcaatgcatgtttccagtatgaagtgggattgggggcgggggtcctccttcattttggagggagaaataccgaaagacagcatgtgatgggactctggagccttgctgcctttcttcaaccactggccctgccactagttaacaatgtgactttagaagtttgtttgtttgtttttgagaaacagagtctcactctgtcacccaggctggagtgcagtggcgtgagctcactgcaacctctgtgtcctgggttcaagcaattatcctgcctcagcttccccactagctggaactacaggtgtgcaccaccacacccggctaatttttttatttttagtagagacggggtttcactatatattggccaggctagtctcgaactcctgactatagttgatccacccacctcggcctcccaaagtgctggcattacaggcatgagcc

SEQ ID NO: 92376 - DNA, 1041 bp, Homo sapiens
atcctctatccatcgggctgctctctcctcccacaggtgaggggtgagtgtctcttccacccccaccccaaacgccatcctggagtgagatatttttagtctccagctccgggtgtccttgtccttggacaagactcaacatcccatgcccttcacaccccctccgtttaatctgatctccggaaagaggacaggcttggctggggtggtaattggaaggctgtaggtggaacctaagttggggagacagctctggagggggctgactggccagggaggcaaacacaggccataaggatgcagggaatagggggtgatttagggcgctatggggagggagggcaagagtgtttggggaaagaagcccctgactagcttgtctccactagagcacaggttaatcgtagctgtcactgactggacatctcctagaggcccgccacggttctaagcacgttacacatattaattcactgactccccacaactctaaataggggcagctgttcccgccgttggataaattagaaaactaaggcatggagaggcaaagtgagttgccatggtcacggagtaggagtctggatcaatgggcttgaaccccattcccacccttgcccccacagcagtgtttcactgggctgttccccgagtgaacaaaggtgaggggagaactatcaggataagagctttatttagggatgtcttctgggttatgaggggtgtctatacaaggggcctggtgggagagggtggtggttactttctcttctgcctacagtgttcttcgccagatttcaacaagactccctctggagcctccttgggtctctactcagcactccccaccccatcactctccagtccctcatccagccgcaggtgtttcattatagttattgccaccaactcatgtcattccttttctgtgtgtttactgtttggcccctctctaggaaagcaaggacttggcctgtcttgctcgcccctgtgaccccagcacttagcgtagcactggcccagtgtgggtgcttgacaaat

SEQ ID NO: 92377 - DNA, 3606 bp, Homo sapiens
cgcccgaagccgcgcccgcagatgccgcagcagaacgtctttcctgggacgctggcgcccgagcctcccgccccgctggtccccgcgccgccgagcagcagcgggtgggcgcccaggagcgggacgggcacagcgccgtacaccaccgccgccgcggccgccgccgccttctcgctgtctgtggtgggagggtcggggggcaggaggtacgggcccggggggaaggtgggcgggggctgcggggccgaggccgccccgtccttgggcgcctccgcagcggcagcgggcggggcgtgggcggccttgtggcggagcaggctctgcggagccgagtaggacttgccgcacaggtcgcaggggtacacgggccgaggccccccggcgcccgcccccgcgtgggccgcctggtgcttgaggaggtaggaggcgtcgcggaaggccttcccgcagatgccgcagggcaggcgcaggaggtcggccgagtgcgtcttcacgtggcgcttcagactctccctgcggttgaagcttttgctgcacacggagcaggagaagggcttctcgcccgtgtggatgatctggtgctggtggaggtgactgggcttcttgaaaaccttccagcagagtgggcaggcgaacgggccatcgccacccccggtggcaggagggggcaccccaacaccagcaggggcggcgctcccgtctgcggagggggcaggcgccacgggcgtggctggagggcccgaggacaccgtggagggggcggcggcggtggcggcgctggcagcgggtgctgggaggcccagcggcgggaggtgggggccgggctggggcgggccccccgcggccggtggcacgtccttgtggcagcggcggtggcggatgaggctggacacgtggttgtaggtgcggccgcagacgccgcattcgtagggcctctcccccgagtgcaccagcatgtgctggaccaggtgcgaggactgcttgaaggacttctggcacacgccgcaggggaagcgccgctccatcaggtacttcagtctccggaagtagcccttgtcgtccttggtggggtcgcaggccgccgccgcggggggtcctggcggggtctgcgagggggcaggaagcggccctggggcccccgcgggagcgcccagcccaggcgtcacccccggcccggacgcgggccctcctcgcttcaggttcccaaacaagtgctggtgccccgagaggtccacgatgccccactgcggagtggggaaagcagcgtcaaagaggggaggagggggcgccccgaaggcgggcggcaggggcggatcgggcttcttggcttgggaagaggaagaggacgaagatgacgacgaggaggacgaagaggaggaggaggaggacgaggacgaggacgaggagggcacctccgccttgggcttgaaggtggactggggcgggtagtcatactgcgggggagggggctgcggcgggggctgcggcggggggccgggggcgcagggcagggccgccaccgccttggcgtgttccccatacagttccatgggctcgaagcgctggtggttgaggaattccaggaagtcgaaggggtagctctggaagtgcaccccgtcctcgcccccgatgccgctgctcccgccacccccggcgccgctgcccgctgggttcgcctccatctccggcgggtgggagacgggagaccctgtgaagaggaggacggggctgaggacacggccgcggcgctgggtctccccgcaggtgaatggagctgtgcgcccactcatccatccttgtgcggatcaccccctagccttccagatttaggcttccagtccctctgcctgtccaccccaaagggcagcccttcctcttggctccctggccccaggactctcctactcaccttcaccttccctctctgtgttctcaactcccacccactccccacctcttttccttctctaattccttccatctctccccatcttttctggggtcctgacacagctttgtagaggggaccctctcctccacaccacctgcaggccctctattatttgtagaaacggggttttgctttgttgcccaggctggtctgaaactcctggactcacgccatcctccagcctccacctcccaaagtgctgggtgattacagatgtgagccagcgcgctggcctgggccgtctctactttctctccttttcagactccaattgtccaagcatcctgggggcctctggactcagttttctttccaaaccctctcagaccctctgctgtctctccatactcctgcaccctaccccacccacagccctccgtcctcatcccttcaggttttatcctaaaatgagcataatgataaggggaatcacagtttctatcagcgtaattaggagggaggactctggggccagaatcaaatgtaagccctgccacttctagctgtgtggccacgggcaagtgactgaacctctctgtgcctccatttcctcatctacacctggggaccacaaagcacatgcctacctcacaggactgtgaggattcaacacacacatatgtgcaaggctcttagggggcggttcctggcactctgtaagcactccgtacatagaaggtatggactgggcacagtggctgacagctgtcatcccagcactttgggaggctgaggcaggagagctgcttgagcccgggaggtgaaggctacaatgagctgtgatcacatcactgtactccagcctgggtgacagagcaagaccttggctctaaaaactaaaattaaaaaattgaagatacgatactgttatcactgttactactagtagtagaaatggggaagtcaggacaagcctagagaactgaaaaaagtcagtatggggagtgcactcttttaatattaatagacagtagaaaggagaatttgcttgcctgggagaaacaaattccagcaagggggctggcatatagtcagaaggtggtctgatacaatcaaaacacagaccctgggcttggacagacctgggttcaaatcccatctccactgggatccacactttctccatgtttaaaatgggggaacccctataccgcagggagattcaacagggttggaacagaacataatgaaacacatgcatcagcagaatgcattcaaccccctgagctatttgtaccatccatgacatcacacacctgggctaagcctagcaacagaagcagggagcttgagttccatccttgcccttagtggggcttctcctgacccccccatgtccttgcccttagtggggcttctcctgaccctccacccccggcatcattctctggcacctcctttacacgacttttcattccagatggcaggtatccatgtgtgtaccccacaccacaccagaccctcagcacccgtaactgatctccgagttcttggtctacttgctggcctggggaagcacctccaccaagtgggcggagggtgagtcggtgaagggcccatgaggtctgacccgcttcctgtccatcatccctacccgatgggggccaggctctaagcccagcccgctatgggggtcaagggggttcctaccaagg

SEQ ID NO: 92378 - DNA, 1046 bp, Homo sapiens
tccccaggccagcaagtagaccaagaactcggagatcagttacgggtgctgagggtctggtgtggtgtggggtacacacatggatacctgccatctggaatgaaaagtcgtgtaaaggaggtgccagagaatgatgccgggggtggagggtcaggagaagccccactaagggcaaggacatgggggggtcaggagaagccccactaagggcaaggatggaactcaagctccctgcttctgttgctaggcttagcccaggtgtgtgatgtcatggatggtacaaatagctcagggggttgaatgcattctgctgatgcatgtgtttcattatgttctgttccaaccctgttgaatctccctgcggtataggggttcccccattttaaacatggagaaagtgtggatcccagtggagatgggatttgaacccaggtctgtccaagcccagggtctgtgttttgattgtatcagaccaccttctgactatatgccagcccccttgctggaatttgtttctcccaggcaagcaaattctcctttctactgtctattaatattaaaagagtgcactccccatactgacttttttcagttctctaggcttgtcctgacttccccatttctactactagtagtaacagtgataacagtatcgtatcttcaattttttaattttagtttttagagccaaggtcttgctctgtcacccaggctggagtacagtgatgtgatcacagctcattgtagccttcacctcccgggctcaagcagctctcctgcctcagcctcccaaagtgctgggatgacagctgtcagccactgtgcccagtccataccttctatgtacggagtgcttacagagtgccaggaaccgccccctaagagccttgcacatatgtgtgtgttgaatcctcacagtcctgtgaggtaggcatgtgctttgtggtccccaggtgtagatgaggaaatggaggcacagagaggttcagtcacttgcccgtggccacacagctagaagtggcagggcttacatttgattctggccc

SEQ ID NO: 92379 - DNA, 1053 bp, Homo sapiens
tcaccctcgtctccctgcctcaggtgaattcacttattcaagtctcaccctccccgtgaggtaggtcctactgcgcacctcctccttactgatgaaagttaaggaggtgcccaaggtggccctgccctcgacggtggaccaaaacttaaaagtaaacccaggacaggccatgcgcggtggctcacgcctgtaatcccagcactttgggaggccgaggcaggtggatcacgagggcaggagatccagaccatcctggcaaacacggtgaaaccctggcctctactaaaaatacaaaaaattagccaggcgtggtggcgggtgcctgtagtcccagctactcgggaggctgaggcaggagaatggcgtggacccgggaggcggagattccagtgaggtgagaatgcgccactgcaccactccagcctgggcgacggggcaagacgtcccccccgccaaaaaaaaaaaagaaagtaaacccaggaccacacgtggaggagggagagacagaacccggtgggtctttctccagcaaggctggaggggcttggagagaaagggggacctctgggaaggacacacagcaattcagcagcccgggcccctcagcgcccgccccatgcaccccactcacctcgctgcctctcccgggccttgggcttcccaaagcgcctccgactagcacctcccttctgcttctgccgcctcctctcactggcgctgccttcttcggacgctccgctgagggaggaggctgctgactcagggtccgaggcctcgcccccagccccaccacggctgtccccctccatccgcctgggcccaggcttcatccggcagtggtcctctggggagatggagacacacacatgaaccaagggaccagacatcccatcacaggtcccgggactgagagaggctgcagtccccgaactggatcccccaacctgggctggtcccctaaagagacagagagacaaggagtacggtagagacgctggtggctgagtagagccagttggggtctgtgggaggtggtaatgggtggagcatttt

SEQ ID NO: 92380 - DNA, 5465 bp, Homo sapiens
aggattgtcggaagtggccgattgcttggacagggccggcggagaagatcggagcaagtccgtggaagaagccaaagactgggacggattgaattgttggaagaacccgaactcgcagaggggactgggcgcagtggcacacgaggacacacggaaacctccgaacgttgaggagataatctcggaaaagttacggaaacctgggaagtcggcgaaaccctacgttcgggtgttttcggaagcagccgaagcggccgcctgcttcgccttcgtccagtatccggagatagccgaggcgcttcggagccaggctcggggggaggggcaagctcgcgggcgggcgggcgggtgagggggcggagcccgggcggggcggggagggctgccggaggcttgattaggtaggaggtggcgaagcgccggcggcggccggaagtagccgaagccagcggcggaagtagccgaagcggctggagcgggcggcaaggcgaggcgaaagctgcacagggccctacgcggccgcctcagcatgtcggacttcgacgagttcgagcggcagctcaacgagaataaacaaggtgagggcaccggggtcgcggggcggaggtgtgggcggctcctcgcgtcgctctttgcccccccgccattttctccctcgcttccccccacttcacggccgcgcggcgccccccaaccctggttccgtggcgcgcgcctcgttcacgtgacgtccccagcgttccgccgcgcgctaggcgaggggaagggggcggcggggcgcgggcccgtgacgcatgcgcacggcggctgtccctgcgccccacgtggtcctggcggaggtggcgcgggggacgcggcacgagcgcgccagatgcctcgacgtgaacttttgttttttaaaatctttttggtttctctgaaaaggagattatgttagtccccgtaatctcttttctcccgctgccttggcacttccgcttccggtcgggcccacggcagcgtctccacgccccctttgtttccaaaatggcggttgtgagaacttggtgggggggcccctttccttccttcacgtggatgagggcagagccgtttcggcggatgcttggaggccacgggcccctcgcgtaccccttttcctttttgctgatttgctctgatctctcccgccaggtggtttctgccccgtctgttggtagtggggcgcctcatattaacgtgtttggcacatgttgcctaaaagcatctgcattctttgagtgtccgcacgcacacatcctgcatatgcggggcttttggcggtcccgagaatcgcgatatggagtgtttgagacaaacctcaaatcatttacaatcccaatctcagggcacctgataatactcagtctcagatctcaatatagagataagaaaacaggttctgagggaggaagagggatctggcccactgcgctaaactcttcacttacggggaaggtgggaggcaggttcccttcagggtatcgaaaattgtgatgggttagaacaaaaagcctggggccctgatcttagggattccaataatattagaagtgggagagttgttaagacgctttaaaaatcctccgtgtttcagtttgtgaagaaatacaggaccagggaagattggagacttgtttcttttcaggcttcagctgcccatgttcctagctcgttcggaggacgaaatgagggctgaggaattttcctttgaacccgggctagagttgggtaggggctgtattaggaaacagtgtcctggggaagcaataacgtttactgagggtctgactctgtcttagttgatggactgctcaagagcataggctttggagttgagcacatcaggaagtttagatacctgctttgtcgtttagtaactgcttttaatacgtttatatatttttttccatttgtagactgattattattttcttgttaccggattttgagaagattaaaaaggatgatagtaacgatagatgtagttaaactctgagcgcttaccgtgtgccaggctcttcgctaaactcttagcatgttttactaagtggatccttttaacagccttgtgaggccaaaatgatttccacctctactggggaggaaactgagggctcagaaaagttaaaaactttctcagggctcagctagtcagaggcagagctgagattaaatggggtaacatgtaaagtgtgtggcatgtggctttgcgtacactgggtgtgcagtaagcgatatttgcaattgtaaaattccatgcttagagaggagggtcttccgctcacagagattgtgtcagagttgggaaagggcaggaaaaggtgctttccaaatgtcattctgccacacaacacctggatggagtagatacgaccctcgtttaaagagaaaaccaagtcttaaaggctaagttgcttttgcatggtttttgttgttcataagcagaaaagcaggtactgattctgagctctggctgcaaggccaagttccactctgctggaccaagtggagctgattgggcggttctttgaggctctcagatggtgcttcaccggttctcccggggtttcccttttggtgctggtagggcagtccctgagacctggcacggctcctgggttggcggagctgctcccataagatgaccacaatacagtgttttgagcaaacgaagctctcattgtttttacctgtccagcatcagtgtgtgggagagggttcttgccataggggaagctctgcccgcgtgtcactgcctgtagtctttgtctctgcggaggacgggccagcttctgtacgtgtcgccttctgcttcagtcctttcctctgctacctgtatctacagggaatttccttgtctatatcccaggcacccagcgggcatcattgctttctctgcgtgggttcctgtctgcctgcttgcctgtttcagagccttagcagcagaaagggctcttggggctcacagcctgtccatcttataagcgaggagctgtgcccagtgccgtgcctgtgtgcccgctgctctacactgctggcctgtcctgccgattgttcctcccaatttcagtttttgattttggggtttttggccttcaaggggacaattatattgtcattaatggttctagccagacctgagtgttctgcctgatccacattcgagagtatggcctcgtgcttaactcactgatgtcagagtgtttaaattctggtgtcaccatttcctagctgtttgaccttggtaattgtgatctctctataccttagtttccttacccattatgtcagcccccagcagtgtttttccgaagcagtagtgaggattaagaacaaacaaaacaatttagtacagattccggttgtaggaagcatctcaatatttgttgctgtttttttccctgctgggtgcatatttttctgagtgttggtggttttggaattgtgatgcttttccagacattcacattgcatcgcaaaaacgtgagacaaaacactgtgggtgaggctgaagtttaacatcctccctcagtgccctttcctcctcttgtccccagggatgatcactccaggagatgcgtgttaacatatataagcaccttaacgtgtgcatctgttttgtgtgtgtgcttcatggctagctgagaaatctgggtgtctttgaattaaggaaatggtgtggcggtgctcatgaacccccccgcccccccatgctcatggtttatcctccatcttgaagggccggtctctcttcaggggttgaagggtctggtgagagcagaggtttctgtggttttgccagtgaggctccgttcctagtggctacctcaggcaaatagagggttgagggagcctgctggaggctggcagagatacccgcccctactcacgcctttacagtctcttcagtacttggctttgaagggagtgaggctgagagattcaagtggtttgggattcaagtctggatggggcaagctcctcccctgacctgctgaaggagaggagggcctctttccccttcagtctgcagattctccgaggcccttctcttcccctgggaagggtgcttgcttctgcattattcaccggcttgggaagggatgggttgagtttccctgcttcctggggatatcagatcctgcctggcacctgacccctagtcctgatggtggggctgtgggtgccagctagttgcagaggtctttcctgaggggtcgctgggtcccttcaggaaaacatcattgggtctcttgattccccagcctctagccctgcccctctcagggacgaccctggggtcaggcccctcagccctcgagggggaccaggagccagcctcctctgtcttctctggctccccagctcctcctgagcatcctcaggtatcttacaccccgggggcatttccaggccccgtccccctggtcccctcatggtccctggactcgcttgtggacccaggaggcctgttaattcccttcctccattgaatcccttccctttgggggtggcctccctggggcttgggacatagccaccagcgcgcagggtgggctgggcccgcatccttactccgcttatcccgtgcccctcctctcacccttgcccagagcgggacaaggagaaccggcatcggaagcgcagccacagccgctctcggagccgggaccgcaaacgccggagccggagccgcgaccggcgcaaccgggaccagcggagcgcctcccgggacaggcgacgacgcaggtactagggctcagggatcccctgggccagcctgggagtcggggggtcggtgttggccggcctgtgggtggcctgtgtgtgtctgtgtctgggtccgggccctgtgtggctcgttcgttctttgtgtggatctgggggagggatctactgcttggtctgtcttggattccgattttttcccccgtttctggggtttctttcattttctgtcttggtggttgctggtgggttgctgggggcaataggctctttatctggagcctgggaattgattctgtgttttccttcacaaggggttgttctctgtctctgactctgagggcctgttccttcttttcgactctctgtggctctctgtgggactctcttcgagggggttggtctctgcctccagtttctttcttccctgcctcccaggagaagggagctcttgggaccgaggcagtatccacagcctgggctgactttttggcccaggggtgtcggtttccaccgcctcttcccttctaggctcccctttctgttctctgcctccttaggtgaggaagggcaggataggcggaagtcctcctgcctcctcccggctcagtttctccagctagagactggtccttcctggcccctggcccctttctcctttcctcacttcctctttcctgggggtgggagtgtttggggggaaatggcagggccga

SEQ ID NO: 92381 - DNA, 2588 bp, Homo sapiens
ggtaggcccctggccaggctgctcccagagcgggagggtacaggggttgggattctccgtcagtcattcccctgcgtgtgtgcttggagggggtcaaagacacaggtagagggttgcacacccctgggggttctggtctctgcgcttttgaagcctccctagaggaggaaatgaccagagacacccgtggttgacaggggaatgaggcctccatctggacgccattaggaagtgaggcttctgaggagcagcagttactgggtgggggccccgagggtggaaagagggttctggaaggtgctaagaccgagagcctgtaggagctttctgctgaggaggggaactcccagtgtgtggtgaggggtggtcactgagcattcccctgatggggttttatccggcttttattccctttgaagctgcgggtcagattccagccactgctcttctccccaccatgacccctgacggtctggctgtgaccccaacgccggtgcccgtggtcgggagccagatgaccagacaagcccggcgcctctacgtgggcaacatcccctttggcatcactgaggtactgccctcccctgccccctaccctctcccttgtccctctaccccgttcctccccttccctccattccctttccccaacctgcacgggtcagactctgctcctgcaagaccccccggccccctcccagacggaccgatggagttgagccagccaggggccgggctgggggtggccctccctccctcctcttcccctctcccgtctcccctccccccaacctcctccagcaacccagggatcaagcacacacataatgtacccacgtgttgtacctacgtgtcggagagagacagagagggagacttggacacacacacacacacacacacacacacacacacacacacacagacgcacgctgcccctcagtttttttctgacacgcctctcgttctctgccgcctgtcccctatcctctcccccacgtccctcccatggtcgctgttcttttatttttgatcgcccctgacctcccccttccccaccactccttttccctctcccctctccccaaccccttcctgtggcaccccctgagaatcccgagatcaaagagttgtttccatttctctttaaagtgaaatattgtggggctgagatccctcgtagcaacaaaaagtttgctaccatcgtcgaaggcaagtaaggtccattctgactttctcaacctgcactttgctacatttgataaaccagcccccggactccagggccagattcctccacatcactcttttctcctcccctcccgtccctgcccctcctccctacactcctcctctcctgcccctgcactcttgacttcctcctcctcgctcgtctctgtcctgctctccctttctgtcctttgctcgtctctgcccctgcctgccacttcctttctactttcctgccacttttctgtctgtctccactgggtggcccttcctgtgtgctctgtctcttcatctcttgtgtttcgtgtttttcttcattttgtgttgtcatcatgccctctgccttttcttgaacaatcttctcctttcccctgattttttggggcccctgtggctgtcccccaacgcctgtccatcgcctgcccttggccgtctcttgctactgcttcctccccattttctctcttgcttctgttcttactattgacttctacacccccacccatattccactgttccttccccccctcctccctcccctcatccctctccccttacccccaaacccctctgtgtctccctctctcacccttcccctcctctctccacctcccttcccccgcccccccccttgtctcctattccctctgcaggaggccatgatggatttcttcaacgcccagatgcgcctgggggggctgacccaggcccctggcaacccagtgttggctgtgcagattaaccaggacaagaattttgcctttttggaggtgagctgggggagtgagtgaggtccaggaaacgtgtgtgatgtgagggcccagcccttaggctgatgttgtgtggagctgccttgtgctgtttccaccaggccctctgcagcctcttctccacccggtcgctgaagtgagccctgttatagcattacagatctgatcctactttctgccttccatttgctttctgtgtgacctgagaggcctgtttggcctctgtagacctctttggccttttccagaccattccggcccagtcctctctgcactctggccacactgaccttcccagaacctaccatgctcctgcctgcttggctagagttctttacaccagctaactgatgttcctaactagtcttctgttaccccagctaactgatgttcctaactagtcttctgtgtctgtgtttctcaactgtcgggaaaaggccttggtttttgattttcgactcttggtggactgataactctcatgaagtattgtgaaggtgtgggcagtgttagcttactgcagagatttctgagcactccctctcactgtctgagcactccctctcactctgtccctctcactctgtc

SEQ ID NO: 92382 - DNA, 3244 bp, Homo sapiens
gcctttttcctgcctgtgtgtctttgctctgtgcctcagtttttgccttctgtgctgtatgtatagcattgcagtaggaggttgaaagtcttacaggatgcctggcccatggggtgagtgcccggtgtgtgttcctgctcccgggctgctgctacttgtccctgtagcataggagctgggtctcctggggtctgtgtggccccagtctggtggttggagctggctgggttggtgcttccagttctgtgggggcagcgtcatcatgggctggaagggcttgagtgagtaggtgggagagggtgtgtgggggcatctcccctccttccatgggcacagcggctcatgcttctgaggctctttcccatttcctgtcttacctattccttcccagcatcaggatggaggtgggatggggccactcacacttggtgtggaggctgcagaggaaggggaggccatatggcctaggttttgaacttgggagtcaggctggttggttaccggggcctggcatagctgatatctgacaggacggcgtcaagttacattggcagagcctgtggggtctcaggttgaatcatcccaccagcaggcacttgtctgtgagtccagagttcagtggatagggcaggatcgagggccagtaaattcagctgataagcccccactctggtatgtcagccctcgaagacactggatcctgcatcccacagtcagcccacagttcccagtgagatcagagcagctaatgctgcggatgctgttctgagacttcccgggcagccgcggctgctcatcgtgtcgtgccacccctgtgagggcagttgcacccctgcagtggcacctgcagttctgacagggcgtgaagggaagggactgagcttttttttttttttcctttgagatggagtctcactctgttgctcaggctggagtgcagtggagtgatctcggctcactgcaacctccgcctcctgggttcacgccattcttctgcctcagcctcctgagtagctgggactacaggtgcacgctaccacagcccgctaatttttgtgtttttagagagacggggtttcaccatgttggacaggatggtcttatctcttgaccttgtgatctgcccgccttggcctcccaaagtgctgagattacaggcgtgagcccccgcgcccggccgggactgagctttaatgggagccttgcctgggtggctgtcagagaaggggtggggtgtgttgtgactcaccagtaggtcccgagcccaggtgacctgccagcattccacagcagcaggtagcagatgtgggtgtgaactttgtgcctttggagcgttctggaggatgttctagtttgaggttcccctgaggctgggcagatttgggagacatggtgcgttctccccgaggagcctctgtgtgccactgcccaggaccctcactggtcagataaggctggggtggggtgggcacgtggcgacccctccctcgtcagatcaggcaggaagtgttctctttggcaattgaggagctcgccgtagactgtccaggttttgggagataacctggtactggaattgaagtcctcctcttctctacccataggggttgtgtccactgtggtccccgactctgcccacaagctgttcatcgggggcttacccaactacctgaacgatgaccaggtaacttccctgcctccctccagacccgtccccccaccccgccccacctcatcccagccctgatggactctcggctactgcaggtcaaagagctgctgacatcctttgggcccctcaaggccttcaacctggtcaaggacagtgccacggggctctccaagggctacgccttctgtgagtacgtggacatcaacgtcacggatcaggtgagtccccggtcgctggccgctgccgcgtctgtccttccctgccctgcgctgttgccaagccatggtctcccctcctcaggggacggggcgggaggcggccaacctgaggcagtgccctgtgtgtgggctcgtccctgtcccatggcgttggctttttccaggctcttaatcccctttgccttcccctcttcccccaccaatgccccggcttgggggtaggtgtcgggctcctggtccctgaccccacctctccccgcaccccccgacccctcatcctccaaacacaggccattgcggggctgaacggcatgcagctgggggataagaagctgctggtccagagggcgagtgtgggagccaagaatgccacgctggtgagccccccggcacgtcatcttccattggcttgagggaccctgggggtgggaggggctggctagtaggggacaagtgttcctgatctttctcccagctttcatgggaaggcatttggggggcattcagtgcagtgttggggagtcgggctttaggtgttggaagtggagagatggcctttcccctgggggggcatgtgaggggcctaggcttgagcagagggagactgggtctgggccccctgtgacgccgctgcctcccctggccccacagagcaccatcaatcagacgcctgtgaccctgcaagtgccgggcttgatgagctcccaggtgcagatgggcggccacccgactgaggtcctgtgcctcatgaacatggtgctgcctgaggagctgctggacgacgaggagtatgaggagatcgtggaggacgtgcgggacgagtgcagcaagtacgggcttgtcaagtccatcgagatcccccggcctgtggacggcgtcgaggtgcccggctgcggaaaggtcaggaggcctcgggctcagtgctctctcaccctctgcccctcctcttctccgcgccctctttcttcctctcttgctccctcaccctctccccctcctcttctccgcgcgctctttcttcctctctctctcctctcgcagcgcgtgcgtataggtgtatgccatcactgagtgccgccctcaggccgggccatgggagatgttggtgaccctgaggggtttgtggccctgtgggggcccaagacctgcaggcgagacagtagttggggaatgtagctctgtatcgctgtagaacttggccctgctcccccttatatggcctggcttgtgcaaatggttttgcctggtctgtggagtggggaagagtgccgggaacagtcccgagacacctgctggtgtctcctgtgtgccaggcaccctgccgaagctgtgtctgtgctcaccctgagccctc

SEQ ID NO: 92383 - DNA, 2464 bp, Homo sapiens
cccgactcttatcaccgccgggacttctggtagaggcggctgggggagggtgggggcagggctggctgggggcttctccccactcccgccccccccttatccccctctgaagacgatgggcagaggagtgacagccgcagacacacgacagccggcagcaactggaatggcagcaattaagggtggggggcgggggttggggggttggggggttagggcagggaggggactggggaagtgcgcacacagcccacacagacaacacgcacccacacagacacagagggaaggggttgggatggggacagggtgcacagcagggcggggtaggaccccagcccctcccaaaacagcctctccttctcccatagacccctttcttctccccttccccacggtaggaacatagcgtgtttatattttatggccaaactattttgaattttgttgtccggccctcagtgccctgccctctcccttaccaggaccacagctctgttccttcggcctctggtcctctctggtcccctcctgggtttcttacgtagttgatttttcctctttagtctcccccgacctgcgcccagccccgtggcccctgcccctctcctactctctgtggcagtttcatatttgctaagacgaatttgctcattaaacattttgttgtattttactttatggagcggctgtgtgtccagtatgtccgaccctcttcctcggttctgggctcgggtgggggttcccttggcaaactgcgggcccctggctgggacgcccctgctgccggcgccggcagcctcgaggccttccctgcttgcgcggtgcccttctcggggtcggcacaggcacagccccgggggacgtgaggttcccgagtgctctcccaccccgccgacaggagggatggtggccgagcgggccggggcgggcgtggcgtgggtgtgccaggagctccgcggttgccgccaagcgagctggagctgactctcggcgttccgtgagcaccgcgcggatcccccgctgcagcgggcggaagtgacgtagaggcgcctagcaacggggcccagcgcgccggaagtgatgccttccaggttggcttggctgcggaagcgactcctgccagggcggggtgcggcacgggagggcggggagcgcggcaatttccgcttccggtccgtcgcctccttctgttgcttcccgtctcctcggcggctcccctcccccgcccggctctccgcgccccttctgggcggcggggcggcggagccgtcggcgtgcggccctccttgcgttcgtgcgtgcgcccgtggcccggcgcacgtcccgcgacaccgaggccgagcggggcagggggctgaccgccatgaccccccagagcccggcgtgagggggccgaggtgagcgcggggcggagcgcgggggacgctggcccgcctgctccgggtgttcgggcctgggccgcggcgcgcgcgggctcgcgtctggccagttctgggtgtctctggcggcctttgtgtctctgctcctgtgtcggccttgactgcccccgtgtcggttgtctgtgtctgtctctctcgtgtctgtgtgtctgtcagcgtctgtttcctgtgggcctctgcctgtgcctgtttcagtgaacttagaaaagggtttggagataggagtgtgtttgtgtgtctgtcccgggtctctctctcctctgtctgtcgtgtctgtgtctgtcaggatttgttcgtgtctcgttgagtttccgagtcttcttttccctaggtgtctctagcccttccctgcgggcttttctgcctatggtgcaaatcttacccccgccccgtcttcgcatctgagttttgcccccatacctatcacctccaatcctgaagtttctttccaggagtctgttaacttgatctagaatctgccccttttccccagttttctgagtctctggtgtgatggtgaagagccccagccttggattcagaagcccggctgcctgctaagctgtgtaattgccaggtgatagtctctgtgtcaaaacctcagtttcctagtcgtaggaaatccatagttcgtaggcattcgtagttcctacatcatagggtccttgtgcatgtaagttgaggtgatgcttgtaaagtgcctgacggtatctgacacatagcaagtgtgtaattactgggagctctggtttttattattacagtgcttagagatttttacacagtaagtgttagatatcggtcggttattggagtactccttggagaactttgccatatcctttgtattctttttaatgtaagaattctctttgaatcaatttaatttgaaatacagtctcattctaagcagtatctgagaaatctcagctttgatgtgctagttgggtaattttttctaatgcacgccaaataagtacagagtattaagatagtgccttttctgccgccacccttttgga

SEQ ID NO: 92384 - DNA, 1264 bp, Homo sapiens
accaggtaggaattctttcatttcagagttgagcaaactgtgtctcaaggaggtgtgcgctgcaggtagctgatgtggccaggatttgaacccacattttatattctttgccattagattccatttttcttatctcttatttctcagcgccaggtctctttttgtttctgggcctctttcttccttggcctcctgcctccctgtcttcccatgttcttgtatctgctgctgcctgtgtttttctcattgtgtctctgcctagctccctctgcccaggtttctatgtgtctctttctgtcagaactgtcttctatttcttctcagtccccttctctgcatttgttacatcatctcttcatcttaatgtattaggctggggctgttttgggactccagagagttactttttaactagctacatctgtcttcaggtgcctggctttctggcctgaggtggaagcagaggccagcctctctccgtcatccctatctcccctgggcttacatcatggcggggctttgaaaatctccctctgtggcttcttggagccgcatagatgggtgatcagagctggctctggaaccaggctgctccaggagtaaggtgtgtgtccctgggcaaggggctgaacctctgtgtctcagtttccaccctgtgaggtggctatgaatcatggggttgtttcaaggattaactgagttaatacatgtaaagcacttaaaacagtgcctggcatgggataagagcagtgcgagtgtctgctggtgtcatcatcatttgcttgactctcttgtttctcgtcaccagtctcgggatgggttaatttaatttaggttaatttaaaagtatgagttttggagttcaggtgggcctcgggttgagtctgccctgccattcctggtgtgtgaccttggttgaattatttaacttccaggagcccagtctttgcatgcagtgttgaaaaaggtaatgtccctcttgtgctgagcgagcacctggcacacagcagggacccaggcagtggggctgttaggttccttatctctcctgagccttgggcttccgctatccttgggacgtctggtcttctggcttccccggttcttcctgccgccctgggttggttccctgctcctgcctctgtctttaatcccttcatcagccttctttcccatgtgtccttgtttctgctgtggattcctgccccctctgcccttgttccagaggtctttcctgccctccctctccacttcctccttgcat

SEQ ID NO: 92385 - DNA, 1342 bp, Homo sapiens
gaagtttggagccttgtggttaaaatctgtttttgagtgagtggtgcgtacgtaagattcatgtgctgaggaggcctgagagggcccacggtgcccatctcttctgtgtgcccagacacccagttcctttcctcacagcagccaagtttccgctctgggccccatctatgaatgcctctcaggcaggtgtgtgctccccgtggcacaggcgatgccacgctggggatgaacgctgtcgtgcctgtgagcaggactcagcgactgggttttcagtttgctgctcttggggtccaggggccttggcatccccacctttggtctttggttactgtgttcctcgtgttacggcaaagtggccaaggacatgggctggggccgggttatactcccagtggcgggatctcaggctcgtccctgaatctccctctgtgagggcccatggagccgattcacgtctgacttggggcaggggctggtgagtgttagactcctgctgttgcggtcccgtcggcaagcatctgcagaaggcccgctctgggtgtcttggtgcaccagaccaacaaggccccaccctcatgcgcttagacctgggcctgctctggcggaggtccctgtccttgctgatctttgagacttctgcctaggtgagggtggttccctccactcacagatgaggaggctgaggcctggagcgttgcagcacttacacatgggagcaggggttgaggctcgtttcctgtgactcgttttcatacccatcccgacacaccaggattgggttgagtcatagattgaatcagttattggtcatttattgtgaagggctgggtggcgtttgtttagttgagaatcttggaaaaccctggaggtgcaggtgagcctctctggaggcaacgaggagggatggggctggaggggtgggtgtgcagaggggatgaatccagaggggccccagacgcacatccttcctggtcagtggctggggtgatgctgctgggggcagacacagagtggcctgtgggcagggctggcaggtgccaaggcctgagagtctgctggggagcatgtggtgctggcagccagggtggacggcaggacagggcagtgcaggagaggggacgtggcctccagtgccaggcggggcttgggctgctttactgaggtgtaatttgcacacagtgaaacccagcctttcgagatagagttctctggattctgacagatgcacatatttcataactgtcatcacagtcaaggcatagaaggtttttgtcacccccaagacctcccctatggtttttgcagcccctctgggactctccccaggcctggctgttcctgc

SEQ ID NO: 92386 - DNA, 1115 bp, Homo sapiens
gttttaaactttatttctgcattgcaggatgtccttgataaagctgtctttaacattaagaaggactatcattttatgcagttgcccactgctttttggttgttttcagaaaagcaaaggagaaataatgacttattttgcaaactttttttttttttaacttttttagagacaaagtgttgctctgtagcccaggctggaatccagcagtacagtcatagctcactgagccttgacctcctgggctccaagcatggttgaggaatagctgggaccacaggcacacaccaccatgcccggctaattttaagatattttaaatttttttgtagagatggcagtctcactgtgttgcccaggctggtcttgaactcctgggctcaagcgatcctcttgccttggcttcccaaagggctgggattatagtcatgagccactacacctggcccacttgctcacttctaaaataaggttttaaatttttcattaagaagttgtatactaagcacatcatgaatgtataacacagctgttacgcatgtggacacctgtgtagccttcacctagagggaggtagaggatgcattcagccttccaggtttcctcaggagacctgtctcccacagcaccgtgtctgatttctgtctgccaagactgttcttgagctttatatatgtggagtcacacgcgtggtcttttgtgtctggcttcttttgctcaccatcaccatcaggtcagcaaggttgaccgtgctgttgcataaagcagttgttcatttattttgagaaagtctcactgttgcccaggctggagtgcgttgacatgttctcggctcactgtagcctctgcctcccgggcttaagcaatcctcctgccacagcctcccaagtagcagggatgacacgcatgtgccaccacgcctagctaattttttgttattttatttatttatttttttagagctggggttttgccatgtcacccacgatggtcttgaactcctggactcaagcgatccaccgactttagcctctcaaagcactggggttacaggattttgccactgcacccgattttatatatttatttaattattgtttcttatttatttattt

SEQ ID NO: 92387 - DNA, 1528 bp, Homo sapiens
ttgagatggagctcctacactgtgcagcccccttcatatcgcacagttcagtggccttcggcccattcacagtgctgggcgaccacctctgtccagctccagaacgtcttcattgccccagaaggaaaacccatagccttcaggtggtccctctccatccctccctccacccctggcaacccacaatccactccgtctctctggatttgcccattctggatgattcacgtcgatggaaccgtaggctgtgtggcgttctgtgctggcgtctgtcgctgagcgcagtacctccgcggctggtccccgtcacagcgtgggtctgtgttcattcctttgcatggccgtgtcgtattctgtggggacagatgtgtgtccacccactggcgacaggtgggttgtgggccttgcgcccagtcggccgccccagagcccgcgtcgcaggcagtctctggcccgccttgtgcccggcgtgctgaccgggcatccccgtgcccgctcgcaggccatgacgctgatggagtacctcatcaagaccggctcggagcgcgtgtcgcagcagtgcaaggagaacatgtacgccgtgcagacgctgaaggacttccagtacgtggaccgcgacggcaaggaccagggcgtgaacgtgcgtgagaaagctaagcagctggtggccctgctgcgcgacgaggaccggctgcgggaagagcgggcgcacgcgctcaagaccaaggaaaagctggcacagaccgccacgggtgagtccctccctgcggcccctgacggcctagagtctgtcctccgcctactgcggctcccggcacccggccgcccactgctttctctcccagccaggagggaccgcggcatccccctttgcttctcctcacctgggccccttgctctggtctcacttgggccctttttttcccttagcacctcccatgcagcagctctgggacccttcctgcctcttgcctcgtgccccagggcaggcctagaattgggaacttttattccgctcccccataggctcagggcctgagggtgatcagtgctggggacagggctctgaggggacacgcacagtgacccccgagggtgctgtccttctctctgcgctgagatgaggggaacatcggagaggcagaggggggcctggaagaggcacagaaggaaggccagagccagggcctgcaggttgcaccaggcatctgggcctgtgttaggagccttgacagtgccttctggaggtggaggactcagtctggtgggtggtgaccagcaccgaaaacaaaacttgaaatagtgcatcccacatcgtcaagccaagatctgtcccacgaaacatttccagttatgtgatgggtgtgtgggtctcggactgttccaggaagtgtggtctgtgttggtcgggggctcacagccgtgaagaggctagtccggctgctcaggactgggagggaggctggagaatgtctgccaggctcttctgctctccaggaagagtggaggtgcctcagttagtggggat

SEQ ID NO: 92388 - DNA, 1240 bp, Homo sapiens
gggttccccacctgcttatcagactgacttttgctctggtccttccctgatgcctggcccctcccgtgggtggggctgcctgcatccccacccttcctcctctgagcacctggcgtctggtctccgcctctcagtcctagtcttggcctgcagaggttgtagggtgggggacttggggggtggggttggacacagaagcccccgtctgtctaggctatggggtttcctgtctctcgttccctggtctgggtctcacgcgtttctcacccgccctccagcctcatcagcagctgtgggctcaggcccccctcccgaggcggagcaggcgtggccgcagagcagcggggaggaggagctgcagctccagctggccctggccatgagcaaggaggaggccgaccaggtactgggcgtgcagctggggctgtctgtccgccacccgcctccacgcctcacttcaggctccctcccagccaggcgtgggcctggccctcactgtcgctgctccacatgctgtcactcgtctcctccccagtcctgcctcatcctcaccccgccgtccctctgcgtgtcactctctgcctgtccctcactggttcagggacccccagccctctctttcttcggctctatctgaccctggctctgcctctgactctgcctctggcccctcccgtcatgcccctcacactctctctcccccagcccccgtcctgcggccccgaggacgacgcccagctccagctggcccttagtttgagccgagaagagcatgataaggtcagagcagcctccctgtccctgcccctgccaggggctcccctcagaccagccccgtcgccccttcctaagtcaccccccaccatcctgctgggcccgaagcccacaggctcacgcgtgttgaaacctcagtaccttcagccgtaggatgtaggaccacaagtcagacagagcctgggtggtggccagcacagctgtgccaaggttgctcgggtgaccagggtcccttcctccccccaacgcaggagataccaccgaggcgggtgcccgtcctccccgggtgcgccagcacagcaccccactccccttatcccctgtcccgcctgacctttgacccaggtgccccatccccatttcatacattgtccgcatcccatcgaatccttcagccgctttcgttggggtgggaggggttgctggggcttccaggctgaggtggcatctgcccgtggctcacgtt

SEQ ID NO: 92389 - DNA, 1796 bp, Homo sapiens
tgtgtgcattttttcaacattaggtagaattcttaaatctatttaaaaggaaaatcaggccaggcgcaatggctcacgcctgtaatcccagcactttggaagctcgaggtgggtggatcacctgaggtcgggagttcaagaccagcctgaccaccatggccaaaactccgtctctactaaaaacacaaaattattacccaggcatggtggcgcacgcctgtaatcccagctacttgggaggctgaggcaggagaatcgcttgaacccaggaggtggaggttgcagtgagctgaggttgcgccattgcgctccaactggggaaacgagcgacactccgtctcagaaaaaaaaaaaaaaaaaaaaaaaacagaaaatcagacctctagccaacagatgtcttcacgctggcccggaacacgtgtctgtgctgtctgtccacttggaagctccctctggggctgtgtactcaaggagcgtctgagggcaggctcctctgagcctggaggcacctgtgaacacgcccccgctgccttcccccgcgggcctatagaccctggacggccccaccctgaagcagttgctgccctctggttgtcagagggtgacacctgcttctgtcatccctcttgtgtttgctcactggaatcagacccaccttatgggaatctgggctgacgtgaggttttggcctgggcaagcgatgcttccgctctgcacctcagttcctccttcccgaggcctctgggcaccgggctctttgaagcgccccctatgatggcctatactgctcccgggttggagcctcactgctgtctgccctgtctgagcccctctcccggatccttccaggagagctggagctgctggcaggagaggtgccggcccgaagccctggggcgtttgacatgagtggggtcaggggatctctggctgaggctgtgggcagccccccacctgcagccacaccaactcccacgccccccacccggaagacgccggagtcattcctggggcccaatgcagccctcgtcgacctggactcgctggtgagccggccgggccccacgccgcctggagccaaggcctccaaccccttcctgccaggcggtgagtgtgggcccatcacctgctcaagtccttcctgtgggttccaccagaggaggtgcctcacggggcagggacacttcgccctttgcctgcacatgctggatggacacaggtgggctgcgccactgactccactccgtgtctctggtttactcttcctgcaggaggcccagccactggcccttccgtcaccaaccccttccagcccgcgcctcccgcgacgctcaccctgaaccagctccgtctcagtcctgtgcctcccgtccctggagcgccacccacgtacatctctccccttggcgggggccctggcctgccccccatgatgcccccgggccccccggcccccaacactaatcccttcctcctataatccagggcggaagggggcctggctccatccggctgccccattccggctccctgggagatcagtgttgtgagtgcatgtgaaatgggggatccccacccccagtgcccttccccttcctggggcccactcacactacaccctcttcctttcccaccccacctccccggagagaaactggacatggggcctggggaggggagctggccagaggaggacccctttcccgtggcattagaagggggaggggtggctggggcccccacccattccccctccctccaaactcccaacccccagtcagtgtttgagcctcctc

SEQ ID NO: 92390 - DNA, 1021 bp, Homo sapiens
atctagcggaaaagttcttagctatggctatgggggcactgaaacttcctaaagatgattatgttcaaatgtttatttactttccctcagaagaaactggggcactggcagtggatggattgatcacagaacagatactcaggatgctctgatcatcttgacttccacgtttatgagcaaaaaatggacgccagggctcgcaaacaggaatctcgatgaatgtgttgatatggcacccatcactaacattgtaaaaggcaatggacctcatacctacatccaggaaaatccccactctgtgcaactggggactcacccagagaggagtcataggcacagtgctggcagcaaagacctttccttctctgcaacccacagtcaagaagccgtgttctgaagaaagctcaatcttcccctgtcggttgacagattccttgcacacgcccacatcccacacttggctggtgcccacgtccacctcccagtaatggcggccggaagtgaagcgaggggtgcccaggacgcacagggcagtgtcgaacctctcagcttgctccttcctattctggctcaaatccccacttcggaaactcctcaggtcttcagaaatgatgagatagttgttggctgtgtccacatcgaaggtcatatccactgtgcaaagaagaaccaggagttcagcaaagacacacactacagactccctctgccctttgactgcaaacacttaaacacattattcacttttacttttattctactttctttcccaaatcaaaatttcctggggaaacttgtttggccacctgatgaggttaaattgtatctataggttgcatgaatatgatcattgtaacaagtccaccttattcatattagaaatgcctttcgaaataagttagtggataatttgatgaaaattagttttccatttagcacatatgatacatgaaagaagacagtagcttgctctccaaagtattctacaaacttgcacagattccatgaaaatctctacgca

SEQ ID NO: 92391 - DNA, 1084 bp, Homo sapiens
gggaggtggaggttgcagtgagccgagatcacaccattgcactccagcatgggcaacaagagcaaaactccatctcaaaaaaaattaattaaaaaataaagataccttcaatcacaccagacactttccccgcctccgctatcattcctctctcaagccaacagataccacgtggtctaagctgttcacaggagtggacaaaacagtggcccgtcaggaaggaataaaggaaactccagttaatgctgctgaaccttctcccgctgttccactttcctcgagagaggcagactctctctattccccgcctcttgcaggttggtaaagtgtcatctcaccgccgcgtgctgtgagagtctgtcctgtgtgatctcgaggagcagacacctgaagagcctggatctcacggacaatgccctgggtgacggtggggttgctgcgctgtgcgagggactgaagcaaaagaacagtgttctggcgagactcgggtaacttcctggggcgcctctttgcgggccgggctgggaggaggtgggggaccccagcatgaggttgcttgaacagggatgatgatgatctggtttccatgagtccctcaagttagatggagtgcaaccttcgcagcaccacagatctgggtataagttccagctcggctcctatggatgagacggatgaagtggcaaatgcttgggaacaaggtctggaggtagaaaaccctcaactgccgattgaacgacccctgcgtgctagtcctggtgctaaatggcggaagtatggaagtgaaaagacctttgtgttgtagtgtgaacagtctagagacaaagacgggcagaaagcaagtgattacctgagtggtccttaaaacttcagtgagcatcagagccagccaggggcttaagacagagctccaatatagtggactatggttcagccatgaaaagaaaagtgctgaggctgggcacaggggctcacgcctgtaacaccagcactttgggaggccaaggtgggcagatcacttgaggtcaggagttcaagaccagctgggccaacactgggaaaccctgtctctactaaaaataca

SEQ ID NO: 92392 - DNA, 1016 bp, Homo sapiens
gcgctgcggccgcggcttcagccagcccaagagcctcgcgcgtcacctgcggctgcacccggagctgtcggggcctggcgtggcggccaaggtgctggcggctagcgtccggcgggccaaggggcccgaagaggcggtggcggcggacggcgagatcgccatccccgtgggcgatggcgagggcatcatcgtggtgggcgcgccgggcgagggggccgcggccgcggcagccatggcgggcgcgggggcaaaggccgcggggccccggtcgcggcgcgccccggcccccaagccgtacgtgtgtctggagtgcgggaagggcttcgggcacggggccgggctcctggcgcaccagcgggcccagcacggggacgggctcggggcggcggggggcgaggagccggcccacatctgcgtggagtgcggggagggcttcgtgcagggcgccgcgctccggagacacaagaagatccacgcggtgggcgcgccctcggtctgcagcagctgcggacagagctactaccgcgcgggcggggaggaggaggacgacgacgacgacgaggccgcgggcgggcggtgccccgagtgccgcggtggggagggccggtaggggaggggcccgggggggggggcgggcagggcccctcgggcttggcgggagcgacgacgtgcaagaccaagagacccagggagaagcggacggggtgcgatggaccccgcggcatccccggctccccgccctcctctgtccctgcgccgtccgtgggggggcactggggcgtattagggcccgttcacttctccgcctcgagactctgccccctcagcctggcccgcccttcctaagttatcggcctgcgagccggagagacaatggagagaactgcagaggccgagtggcgaccaggccccaagcggaaggccattttccctgctcttcctcagttgtccggggcgggggtggggggtgctgcgaggaatggagaaaccaggccctttagaggatcccagagagg

SEQ ID NO: 92393 - DNA, 1004 bp, Homo sapiens
ggcctgtctgttcctgcaagggacctggcaacttgaggctgtttttcgtgacgttttcctggttccgtctctgccgtggcctgagccttctccctttgggctcacagagtgtggacgtctctcttgtgctaaatgggggtcccatctggcccccctgtttcgaggccttgcagtggatagtgttgggacccagagatgcatcagaagtggtccttgcctcagcccagggtccagccagtcagagccatggattcctgaggctgctgtgtgcagggtctttgctggaaatagccccgccctcaagtgcacagtctgctggatgcactgtgggactgatggggacctatagtaggtgtcgcagaggtgaataagacacggagtaagacacagatccccctgcgggacacaggaccatcctcaatggtggacgttaaaggggacaaatgccgttgtccaagagttagaaggaagcaagctgtctttggcagctggccgactcaggtgtggctccagcctcctacgttgtggctctgtgacattgctccagccactccgctagtggaagcctcgctgtggctgtgtgagattgtactagccactccgcttgtggaagcctcgctgtggctgtgtgagattgtactagccactccgcttgtggaagcctcgctgtggctctgtgaggttgtactagccactccgcttgtggaagcctcgctgtggctctgtgaggttgtactagccactctgcttgtggaagcctcgctgtggctctgtgagattgtactagccactccgcttttgaaagcctcgctgtggctctgtgatactgtactagccactctgcttgtggaagcctcagtttccttgtctatacaacaaggaccacagtgataggctgtgtttactgggcatctccacggcttttgggtgagcacttgacacacatctcatttaatcaggagggacgggtagcccaagcaccttgcccaggtcatgtggctggt

SEQ ID NO: 92394 - DNA, 1239 bp, Homo sapiens
gcgtctcaggtcggaattgaaggggaggccctggggctccagaggcagctgggagcacaggaaaatagcacagggtagctgttcaatgtagaagccaaactcagaagattagcagaggacaggttgataatcaaggtccaaactcaatatttgaaaagaatagtagaatagtgcaaaccttcagcaagttgactaggaggaaaacaagaaacagcacaaacactgatggtggaagcaagcaaagccggggatggagcggatttgacaaccgttgagaacaccgtgttcaacgtacacaatgcattcgaagtcctagatgaaatggacagttttctaggaaaatataaatcaccaacatatgctcatgatgtagtggcagatgtgagagtctggaaaccagaggggggagatcaaaaggtgatgaaagaccttcgcgtatagaaggcactggattccagcactttatgtgtaagttctaccaggcctccaaggaactgatcattctcatctgttcttttttttgaggcggagtctcactctgtcgcccaggctggagtgcagtggcgtggtctcggctcactgcaacctccgcctcccatgctcaagcaattctcctgcctcagcctcccaagtagctgggattacaggtgcatgtcaccatgcctggctaatttttttgtatttttaggagagacggggtttcaccatgttggccaggctggtcccttttacacaaacttccagaacacagggaaggtgttcctcagctcactggcaaggctgccacccccacccccacccccaaccacctaacaggacaaggacagcacaggaaaagaaggttgcagccagtctcatgggaccctcaacagaacatcggcagcttgattccgcagtgggtggacagacctatgtgctggggcaggtggagcttagcccagatacacgaggatgcttcatccttaggggatcctcagcagaacatcagcagcttgatcccacagtgggtggacaggcctatgcactggggcaggtggagcttagcccagatacacgaggatgctgcatccttaggaagtctctcagttagtacacagacttcaaagccgaccagagtctctcagttaaagtacacagacttcaaagctggatatgagtcctgcctccaccttttccaagctgggtgaccttggacgcatgtctgggactctcagagccttggcttcctcagctgcaatt

SEQ ID NO: 92395 - DNA, 1036 bp, Homo sapiens
tgatgaaactttgggcctgactctggcatgcacagccttgttctactctgtcctctctgttctgatccttgtggagtttgtgtggcaccaaaacactcccatagtcaaggccagcaaccagactctgagctacaccctccttgtctccctcacactctgctttctctcttcctcgctcttcatcggccgccccagccctgccacctgcctcctctcacagaccacctttgcagctgtgttcacagtggctgtgttttctgcagggccttccaggctataaggccagaaagcaggatccgaaagtggatgggtccccaaaaaacaaattctgttgtcttcctttgctcctttacccaagtgaccctctgtggaatctggctggggacagagcctcccttcgtaaacaaggaccctcagttcatgcctggctacatcattatccagtgtaatgagggctccgtcactgccttctactctgtcttgggctacttgggcttcttggttttagggtcccttgctgtagcctttctggcaaggaacctgcctgatgctttcaacgaagccaagttcctgaccttcagcatgctggtgtcctgcagtgtctgggtggccttcctcccgagttactaaagcacccagggcaaggccagagtggccgtgagatcttctccatcgtgggctccagcactgggttacttggctgcatctttgctcccaagtgctatgtgatcctccttcatctagaaaggaacactattcaatgtttaaagaagcctagtccaggcatggtggctcacacctgtaatcccagcactctggaggccaaggcggctggatcgcttgagcccaggagttcgagaccagcctgggcaatgtggcaaaaccccatctctacaaaatatacagaaattagctgcaggtggtggcatgcgcctgtagtcccagctactcaggtggcggaggtgggaggattgcttaagcccaggaggtcaaggctacagtgagccaagatcacaccactgcactctagcctgga

SEQ ID NO: 92396 - DNA, 1065 bp, Homo sapiens
gagtagctgggactacaggcgcatgccaccacctgcagctaatttctgtatattttgtagagatggggttttgccacattgcccaggctggtctcgaactcctgggctcaagcgatccagccgccttggcctccagagtgctgggattacaggtgtgagccaccatgcctggactaggcttctttaaacattgaatagtgttcctttctagatgaaggaggatcacatagcacttgggagcaaagatgcagccaagtaacccagtgctggagcccacgatggagaagatctcacggccactctggccttgccctgggtgctttagtaactcgggaggaaggccacccagacactgcaggacaccagcatgctgaaggtcaggaacttggcttcgttgaaagcatcaggcaggttccttgccagaaaggctacagcaagggaccctaaaaccaagaagcccaagtagcccaagacagagtagaaggcagtgacggagccctcattacactggataatgatgtagccaggcatgaactgagggtccttgtttacgaagggaggctctgtccccagccagattccacagagggtcacttgggtaaaggagcaaaggaagacaacagaatttgttttttggggacccatccactttcggatcctgctttctggccttatagcctggaaggccctgcagaaaacacagccactgtgaacacagctgcaaaggtggtctgtgagaggaggcaggtggcagggctggggcggccgatgaagagcgaggaagagagaaagcagagtgtgagggagacaaggagggtgtagctcagagtctggttgctggccttgactatgggagtgttttggtgccacacaaactccacaaggatcagaacagagaggacagagtagaacaaggctgtgcatgccagagtcaggcccaaagtttcatcataggccaggaaggtctcctatttgagaaggtatgttcccttttcttgtttggataatgatattcaggacaaagcctgcattgttttatatctgaaataaacaaaaagggtgtca

SEQ ID NO: 92397 - DNA, 1031 bp, Homo sapiens
tattattggacatgcagctttgtgcactgctgtgtctctatggaaggacacatttatgtgctgataatggagcactgggcgtgctgtgtgtaatttgtctcttactgttccttccaactctatcccatttgttgatgcaaggcatgctccatgaagtggcatgcacaaagcctcagtttgggctgtagagctttttgtatatttggcggttgggaaaagagccaggtagactttcaaaggtgttatatttgctgcaggagagagttaaatggcctagtcctggaaaggctttattctaggctggggctatgcaaatgatgcaggccttctatgctccctggcttgagggaagccctccttgtccttgaggtaacatgtgggtctcagtcactagaacagccctcagcatccctgtcttagacttgcatttgcagcaaaacagaaccactggatgtttaggggaaatgggagggaaaggaccactggttcccctttgccttgcagcagctaaagctggtttcctggggttgggtgaggatccctttgcctccccctccttctcattttcttggtgggcagagggcaagcaggtggggacttgtaacttggcattctaggaactgtgaggcaagcctagcctctcatgtttgctctttcctcccccagctctaccgtcgcaggactctgcccttccccaagagaggaaccagaaggaggacctatcagcccttgaaattctaaaagtcatgtcccttgtgagtttttaaatcccataaatatttgctttccttatcttgaaactttccacctgggttccatccagaaatttggttctcagactttcccattttagggaataaaaggaccaggcaggagtctcctctcccattgtcctctcccctctgacaaatgcccacagatttattctctatagcattctgcatctcctgatggttttcgtctgctaggaggagaaactcatttccctgtatgaaatgagagcatcctttgtaagaactgaagtttgaaga

SEQ ID NO: 92398 - DNA, 1047 bp, Homo sapiens
cagtgatacctctaatttactcctgaggttggggaaagaaggagaaagagaaggaaaggtttctaggctgatgatactgagagctgcagggcaggcctggcattttatggtttcttttccttctccagctcgactttctcaggatactgtccctctcccacagaggagctgaaggagtaggacagaagaactgtcaaattctggaatccttaaagccatgtccaaggtaaggaagcatttcttctctcttccctaaaatgccatcttattttttaggttatacgaacattttgtttttcttccaaaattctgcaacctaataaggttccattcatccagtgactcgttcctcatatcttgctttccagtaaaagtctccaaaagcctagttatctttttttccacagccagcatttttatcttcactcaagaaatagttcagcaccttctctgggtttagtgtctgttagaagctttcaagatgcaaaaatacactcattggcatatgtaaaccttcattgtagtaagttgattgagactgaggtgtatgttcagatgtaaccactagcataaataaagcttttccatagacctaggtttgaaaagaaggcaagacaggagggttatcaggtggtcttagtcacagaacagggcaaagtctcttgctcaaagtgatcttgaggagtgagatgtgttgagtcttgaatattaaagtgtgggtcagctagggcagggatttttccaggcactccgtgggctttgaagaacagtattccagggaataatgaggtaccattttagggacattctgagtgtccacagctatgttattctaggtcatccagttaagattagtggaattaatatgtaaaaaatagcagaactttgttttggaaaagactaatgggagagcacttgaatctgcattaaaataaaagctgtatatgtctataataatgaaaacagttgatagtgtggaatggagccagaagaaacatacaatgttaagaaacaaatccaagtataagaattccataagaatggaaa

SEQ ID NO: 92399 - DNA, 1030 bp, Homo sapiens
cctgtaatctcagctactggagaggctgaggcaggagaatcgcttgaacccaggaggtgggggttgcaccgagcagagattgcaccactgcactccagtctgggcaacagagcaagactctgtgtcaaaaaaaaaaaaaattaccgatattttacttccagcatagttttaaagataatttattggtcacatacaacaaaatagaattgtgaagtccattatagggctctgagcctgatttaaggtcacagaaaaaagaatttgagtctgtttctcagatctagaattatcaaatataaggaacttctcggcaaaacagggtgccactttcagctgacaaacttgtgggtgagaataaagaaaagtgagtctttaggtagataaagttgtcactcataatggtgtgtaacagtagaaaccttactttaccatctccacggatatgaggatatatgatcttcatggtgtgaacgtctaacttggctgagacaagctatcagtaaaagaaccaagatatagtgaagaatgaggatttcagagccaggagaaatcagtattgttttatttggaaataaatcatctatatttatatgagtaaacattggtattttcatgtaacaatactggtatgcaataagtggtgtaatatgagttgttatggactgaatgtttatgtccctcccaaaactaattatgttaaaatcctcaccatcaatgtgatgttacttggaaatgaggcatttgggaggcaattaggattagatgaggtcatgagggtggagccctcgtgatgggattagtgcctttataagaagagacatcaggctgagcccggtggctcatgcctgtaatcccagcactttgggaggccaaggcgagtggatcatgaggtcaggagattgagacaatcctggctaacacggtgaaaccccgtctccactgaaaaaaaatacaaaaaattagccaggcacagtggcatgtgcctgtagtcccagctactcgggaggctgaaggagaagaatcgcttgaa

SEQ ID NO: 92400 - DNA, 1039 bp, Homo sapiens
ctaaaacttcatcctcttttgtccctttcgagttaacattacagccacagtgacctttcaaaaatgcaaattaagttactcttaaaactctagttaaaatacttgatgtacataaagtgcttagcaaaatgaccaactcatactaagtgcttagtaaatgttagataagtattctccagaattgatgtaaattatttttaaacagtgcattcttgaaagcagtatggcagtcataaaaattttggaaccaaaacagtatctttttttaagctaaaaaaaaagttttaaatggtgtctttctatgttgcccagggtggtctcaaactcctgtgctcaagtgaccctcccacctcattctcaagtggctgcaattacaggcaaccagcctgacttaaaacagtatcttaaggtagatggtgattagcacatgtagtatgcttaacatttaatattataataagacatcacagcggctgtctcatgattaaggctgtgttcccttgttggtgaggaaattaattatgacttgataaatagaacatgttttaagaagtggctatatagctctggataaaacgaacaaaagaattagaattcctgcggggaatatatacaagactttatttagtcaagtaaaaaaaaatcactaatgtttaactgaagaaagagaaattgaataatatagttctatttcaacatgtgggttcacagatttattctaaccttccaagtaaagttgttccactagtaaagttgttctggagtatattttttttaaaaaaaacacttaaaatgttccacttctttcatgaggctaagtcaactctgatatcaaaccaaggggaaagaaatgaaattataggtgagtttacttagttatatacaaaaggaaattattagcctctgctgatggagaacagaggctgtgaataaatggagatccataacatgatcctacatgaatgtttcaatattgtaatcctgtaagttacttttacattgacagttctgaaattcatgttgagtgttaattaggcag

SEQ ID NO: 92401 - DNA, 8184 bp, Homo sapiens
tgctgaagacgatggccactcccacatgacgcagggccactcatcaagatccaagagaagtgcctacccaagcaccagtcgaggtaagcaggaggcacatcccacagaggagccacacaaccagtgagatgctatcaaggaacttctacactttgcattcctaaacatcacagaagggtgcacccctccaagtcccactgtccttcttatggggactagggagtatttacatttggggtttctttccaggtctaaaaactatgcctgaagccaaaaaatcaacccaccggcgggggatttgtgaagatgaatcttcccacggagtgataatggaaaaattcatcaaggatgtgtcacgcagttccaaatcgggaagagcaagggagtcaagcgaccggtcacagagattccccagaatgtcagatgataactggaaggacatttcattgaacaagagggagtcagtgatccagcagcgggtttatgaagggaatgcatttaggggaggctttaggtttaattcaacccttgtttccagaaagagagttcttgaaagaaagaggcgctatcattttgacacagatgggaagggctcgattcacgatcaaaaaggctgtcccaggaagaagccctttgaatgtggtagtgagatgagaaaagccatgagcgtgagcagcctgagcagcctcagctccccctcctttaccgagtcacagccaattgattttggggcaatgccatatgtatgtgatgagtgtgggaggtcgttcagtgtcatctcagaatttgttgagcaccagatcatgcatactagagagaacctctatgagtatggtgagtcctttatccacagtgtggctgtcagtgaagttcagaaaagtcaggttggagggaaacgttttgaatgtaaggactgtggagagaccttcaataagagtgccgccttggctgaacatcggaagattcatgctagaggttatcttgtggaatgtaagaatcaggaatgtgaggaagccttcatgcctagccccacctttagtgagcttcagaaaatatatggcaaagacaaattctacgagtgcagggtgtgtaaggaaaccttccttcatagttctgccctgattgagcaccagaaaatccactttggggatgacaaagataatgagcgtgaacatgaacgtgaacgtgaacgtgagcgcggggaaacctttaggcccagcccagcccttaatgagtttcagaaaatgtatggtaaagagaaaatgtacgaatgtaaggtgtgtggggagactttccttcatagctcatccctgaaagaacatcagaaaatccatactagagggaacccatttgaaaacaagggtaaagtgtgtgaggaaacctttattcctggtcagtcccttaaaaggcgtcagaaaacttacaataaggagaagctctgtgactttacagatggccgggatgccttcatgcaaagctcagagctcagtgagcatcagaaaattcattctcgaaagaacctctttgaaggcagagggtatgagaaatctgtcattcatagtgggccattcactgaatctcagaagagtcatactataacaagacctcttgaaagtgatgaggacgaaaaggcgttcaccattagctctaacccctatgaaaaccagaagattcccactaaggaaaatgtctatgaggcaaaatcatatgagaggtctgttattcatagcttagcctctgtggaagctcagaaaagtcacagtgtagcagggcccagtaaaccaaaagtaatggcagagtctaccattcagagcttcgatgctatcaaccatcagagagttcgtgctggagggaacacctctgaaggaagggaatacagtaggtctgttatccatagcttagtggcttccaaacctccaagaagtcacaatggaaatgaattggtggaatctaatgagaagggagaatcctccatttatatctcagaccttaatgataagcgacagaagattcctgccagagagaacccttgtgaagggggcagtaagaatcgcaactatgaagactctgtcatacagagtgtattccgtgccaaacctcagaaaagtgttcctggagagggatctggtgagtttaagaaggatggcgaattctctgttcccagctcaaatgtccgtgaataccagaaggctcgtgctaaaaagaaatacattgagcataggagcaatgagacctctgtaattcactctctgccttttggtgaacaaacatttcgccctcgagggatgctctatgaatgtcaggagtgtggggagtgctttgctcatagctctgacctcactgagcaccagaagattcatgatagggagaagccctctggaagcagaaactatgaatggtctgtcattcgcagcttggcccctactgaccctcaaacaagttacgcccaagagcagtatgctaaagagcaagcgcggaacaaatgtaaggacttcagacaattttttgctaccagcgaagacctcaacacaaaccagaaaatctatgaccaagagaagtctcatggcgaggagtctcaaggcgagaatactgatggggaggagacccacagcgaggagacccatggtcaggagacaattgaagaccctgtcattcaaggctcagacatggaagaccctcagaaggatgaccctgatgacaaaatctatgaatgtgaggactgtggcctgggctttgtggatctcacagacctcacagaccatcagaaagtccacagcaggaagtgcctggttgacagtcgggagtacacacattctgtaattcacacccattccatcagcgagtatcagagagattacactggagagcagctgtatgaatgtccaaagtgtggggaatcttttattcatagctcattccttttcgagcatcagagaatccatgaacaagaccagttgtattccatgaaggggtgtgatgatggttttattgccctcttgcccatgaagccacggaggaatcgtgctgcagagaggaatcctgctcttgctgggtcggccattcgatgccttttgtgtggacaaggcttcattcatagctctgcccttaatgagcatatgagacttcatagggaagatgatttactggagcagagccagatggctgaggaagctatcattccaggcttagccctcactgagtttcagagaagtcagaccgaagagagactctttgaatgtgcagtctgtggagaatctttcgtcaacccagcagaacttgcagatcacgtaactgttcataagaatgagccctatgagtacgggtcctcctatactcacacctcatttcttactgagcccctcaaaggagctataccattctatgaatgcaaggattgtggtaagtcctttattcatagcacagtcctcactaaacataaggagcttcatctggaagaagaagaagaagatgaagcagcagcagctgcagcagcagcagcccaggaagttgaagccaatgtccatgttccacaagtagttctgaggattcagggcttaaacgtagaggctgctgagccagaagtggaggctgccgagccagaagtggaggctgctgagccagaagtggaggctgctgagccaaacggagaggctgaagggccagatggagaggctgcagagcccattggagaggctggacagccaaatggagaggccgagcagccaaatggggatgctgatgagccagatggtgcaggtattgaagacccagaagaaagagctgaagagccagagggaaaagctgaagagccagagggagatgccgacgagcctgacggtgtgggaattgaagacccagaagaaggtgaagatcaagagattcaggtagaagaaccatactatgactgccatgaatgcacagaaaccttcacttccagcacagcattcagtgaacacctgaaaactcatgccagcatgatcatatttgagcctgcaaatgcctttggggagtgctcaggctacatcgaacgtgccagcaccagcacaggtggtgccaatcaagctgatgagaagtacttcaaatgtgacgtctgtgggcagctcttcaatgaccgcctgtccctcgccagacaccagaatacccacactggctgagggcatggggtaaaggttagaaaaccttcacctaggacttgacccttaccaaaccacagagaatccaaaccaatccatgataatgtcagtaggagacttaaccttagtgtgttacacacctgacttaacatctctaaactcagattgaaaagagaccgaatgtgcagattccacagtcttaagctttccccttcagatgtcagtgtctgcatgtgggaaagccatagcacacatcttacctttccaagtaatcagattgagaaaaccctatgagtattccagactacagagtttgcccaaatcaactgtaaatgacacttgtgtaacgtatatatagtgtttcatgaggtgtatataaaatagcaaattatgacagaacagtgatcacatatatttggatttatatgatatacagttacagtttactctgcagaggtaccttacctggtattctttgaattttttttttttttggaggaggaagagagcaacaaatttgattatatttttaagtgtcttagatcctgagaaagatttattgtgcattatttgaaccctgtcaatatctttttgagtaattgttttgtttcttacccttaaatagtcttgtgaagctgtaggcatgatagataacatggcttttactccttactgtttgaaaagataagtactttagcttctttctgcagccatttcatctgcgccaacactttggaacctaatactgtgtaaggctttacaatatacggattggctttttgtgacccagattgattggttgccacatgttatgtttgttgaagtggttctcatgcaaaaatattacacatttgtgttctgggttttttttttttttaaccaactcaatatgtgtttgatgatagtgaattgataaaacccgaagcttttccctgtaaatcttacatctttgcctttaaagaatgggttacaaccatcactagatcacagtagtgcctaatgaaggttgagaaccgtaggagaggctctcatgctgtaaataatgttgcaggctaataacctttcatcacttcctttgtgcgcttcctgccttaagtgacaagtagcaacatggcttgggtcccctgtgcagcatcagcttatgctgccacaagtcagtttgcaccctaggtgcccaggagctagtatccttagatctttctatcgctaacttaattctcttcgttatttatctgaccctctaactccatgtctaacttgcattaaaaaaaaaaaaattctttacagtcaacccaagcttaacatggactcaggttccccagcagccttaatttgttttgttaacatctgttccttctttttcagctctcctagagtatttctgagtgttgtgttcatctaatcttagtattcttttaattacaaattgacctcacagcttgaggtttcttgtgtcctattctgtggactacctgtgctcctttgcttcccctcccctcgcataataactatattaagaaattttttttggccttgagttggctggaaaaaaaatataaaatttaaaaaatttaaaaaaaaagatttgcaaaatgtaagtgtagatcatttgaacaagcaaaattaaagtacccactgggggaaatgtgtctgaatcttactcttctggatctgcaggattagggcttggaagtatgtcaaagatgcagggagtgtcaaagtttaggaagattgtagagctgagagcaagaagcagaaatgagtgagtcaaagaagggagtcctaatatatcaccagatctaggaggggagaggagacagacagaagaaaacaccagaggcaagaactgtagaaggccaggtttctgagaatgaattgagcggggtgtcctgagcagtttggaaaaggagtttttgatggtatggtgtaggtgagggctggctgcataggaaggactgaggttggaacggacatcgggaaagctgaggggcagtgaggtttactacatgggaaaaggactcttgaaacgagaatcagtgttgatgtcggggtgaactttgtgggtacattacttggtgttaacattgttggcagtggtagccccttttcagaaagcaacttgctgtaagtcagggtgtccgttccaaccttcagctagtgaaaaggtagtaacaaatggtaaacaagagaatgattgtttaaacctatctgtggacacttaatgcaactgtttaaaaatgataatcacgagttatgtagcaacgtggaaatatatttacagaacattaagtggagaaagcaggacacgaaagtatatttatactacagttataactcaacagttcatttatatgctgttcatttaacagttcatttaaacagttcattataactgtttaaaaatatatatgcttatagtcaaaagctgttgtggtgttgttgttgtaggcttatagttgagcattattttcttaaatttcttgaatgttctttatggtagtgttactaaaaagtttatgatcacattttcattgtgaacataatttgaactcattatcacacacttggaaaatacagaaaagtggaggaaaaaaaatcatatccccaccatccaaagacatatactctcctcttatcttgttcattcttgtttctgtgcacaggtttatgattataactgtgtcaaaatgtatattcaaaatagctgttacattacctttgtggaattatggttaaatactttcactttaattttttcaaatgttccctataataatgtcctgataacagtgtattatgtgtgtctccattggtgtgcataatacatacccagaggaaaaattagaaaataaagtaaattattttaaaaaattacctatattcccaacacctaacaactactgctaacatcttgatctgtttcctctatcttgtttcagtgcacacgcttgtgataacagtgttaaatatgtgtgcataaagtcttaaatgaaaagatgtggaaaataactaaaatagtgttgtcattgtgggaatttggttaaatattttgtctcaaattccttaaataatctttggtgttttggtaataaattttatgtatgtattttccattacaaatataatacatactcatacaaaactttggaaattcagtaaagaaaattcacacatattcccaacacccaacaacaattaactgttaacatcttgatctgtgcactagtctgtgattattagggtgttagtgataagtatgcataaatgtcaaagatgggaagaaagatgaaaaacaagaaatagttgtgtggttgttgtgggattatggttattttgtttcggtttccttgaaaggtcatcattctagtgttttggtagtccacctttactacatatatttccattatatatgaaatgtgttcattatagaaactttgaagttacagaaatgtagaagagaaactcacccatgttttcaccatccaaagagtgtggttaacatcttgatatattttcttcatcttgtttctgtgcacaggtttttggtttgttaatatggttgtggtcattctatctgtaatagtgtcaacaataaaaataaagttaaaaataaatatttctcagtctcttttgtctgttttgtttttggggctttaaatatgttattttgttagagttataaatccaaaagcttagttcctcctttagcctaaaaagtttggtttgcaaatcttactctatttttaagtattatctatttcaacaattacttctaagggatttttaaatactgtttgatttcacatttgtaactgcccttatgaaactaaaacatatgttccaacaatttttttaaagttgataatgaccgcaagtacatcttagttacttgagtgggcatttttaattggaaatgtgagattgtctcaaacataaaaaatcacagacaataataaacccttaacataaaagtgttgatactatgttatagaatctcaagtgtttattcctgactcttgcctgaggttaaaaggtaattatcctgagtggg

SEQ ID NO: 92402 - DNA, 1050 bp, Homo sapiens
ttcttgttgatgccttttttcttcccagggatgcctccgcgggatctttcccttcctgtggtggcgaaaacaagctttgaaatggacagagaggacgacagggactccagggcttatgagtcccgatctcaggtatgctcaggtttcctctctttctagaaaggccatcttcatttcatggcagagacgcctttctttccccagatggtgtgtttatctgccccctagagtccagctggggtgagagtcccagcgctccaggaggagcccgggcccatcccttaggtgacaagtagcccaggttgctgctggctgtttctttgtcgttcatgtggtcagaggagctcctgccccctcagcatgtgtgtcacttggtaggttggtcacattggccgttccctacagggccagggaagcagagtgactctggagatgtttctggtcctcaggagggagccaggaaagctgtgggtctgcagagtagactggccagggagcacaaaggctctggagctgacaggagctgggtttaaagcctggctctgccacttgctagctgtgtggccttgggccatttactcataagctgaatttaagtttcctcatctgtaaaatgaatatggtgattgctcccagggctgctgtgaaaagtcactcacacacatacataaagtacctggcacatggtaggcacaccgttaaatgttaacaattatggcagttgtggtttaagaggcagcatgtgccggggagattcatgaagggaaaaaaaatgtggaacttgagcttgttttttaggaaggaggagaggggtcacttatacatggtggagtgtggaggaggaccccagcactgactggactcaaagaagggagaagccattgggctgagccttcctttccttcacatatcagtacccatcccatgtcagaaagcaggcctaggccctggggggcacagcagtgagcaacacagagaggggccctgccctgagaagcttttgacagttgcacaaataagtattgacacaaatgttgtatataactgctc

SEQ ID NO: 92403 - DNA, 2662 bp, Homo sapiens
atggttttttttcttctctggaagtaaagccagtaggtagtttatgctcccagacctagatttctttcccatattgccttacttagttgcaccagatgtgctgaccagtcattaaaatacgcaataaaatgcaaataatagcaaaaatgctttaaggaaatgtatagctttacttggttacataaaaaaaaggagagattgaaaatctttacatttatgtccaatctcaaaagtttaaaaaatggaagggggcagataataaaataaagagaaggaaataaatgaactaagtaaagaaacagtaagaaaggaatgtcaaaacagaaagccggttcttttagacagattagacctttgtcaagattgatgaaggcaaaagaacgtgcagtagcatcaagaggctcaatggtcacttctcactgtgtgagggaataatgtcatattacctagagttgagtacttttaatatttttgaatggtcttccattttttacatgttgtatactgtgttttaataattgtgttaagggaagaaatgttaggggaggatttgccccaactcctacttccccttttcatttttgctaataaacgtgctgacgtctgattttagtactggctagggccttgaacatttctcttgtgccttgcattgggcagttaagtctttttaggtatcttagtttatttaagcttcacaattctgaaagggatggaggtgctgttattcttatttctcagattacagagagacttctagggcattagacaagttgcccacagtcccaagttagtagcccaagttagtagccgagctaactcctcgagtaggtctctgtgaagcccagaggtcatgcttgtaactgctgtgctgaggccaactttgtgcggttgtttgcctatttactggggactcccatatcccaaaagcattgtcgatgcctctggtaaggtggcctccactgctgcctggtcttcaacttctgggacatgtgtatatctccttacgatccacaggtccctgagtactgacggtcacaggctgccgcgtctttcctgttgactcatgtttggttcctccagtgaaaattttacttagagaaatgctgcctccaaagcacttgtctgccaccaaacctaagaagtcctgggccccaaatctgtatgagctagacagtgacttgactaaggagccggatgtcatcataggagaaggtccaactgactctgagttttttcatcagaggtttcggaacctaatctatgtggaatttgttgggcctcggaagaccctgatcaaactccgaaacctctgcctcgattggttgcagccggagacccgcaccaaggaggagatcatcgagctcttggtccttgagcagtacctgaccatcatccctgaaaagctcaagccttgggtgcgagcaaaaaagccggagaactgtgagaagctcgtcactctgctggagaattacaaggagatgtaccaaccagaaggtgagagtctccacggggtgttggtggtcagtgcaggcctcaggtgtcccctggggctctcagcctccacacttctgacatggtctggactggataactctctgtcctgggcagcggtggggatgtcctgtgtactgtgggatattgagctgcatcatgattttctgggtgtggccaccaaaagtgtctccacacatgcccaggtatcccctggtcgccaaaacctccctagtgcagaaccaccatcctgagtcaggagagggaaaggagacacttctgtagaagggagaaaacctcctatggctcctgcctttttggtgtggtgtgctaggaggttgccttctggctgtttgtgtctgggggtgaggtcggggtggtcacagccaccatgctccccccacccagtttttagtatgccaggagtggttggaagccgctgaagggttttgaactcagaaatgtcaggatcaggtcattccaaccatgtgtgtctgtgacagggagatgcggctcagggattggggggaactattgtgagaatgtgggccagagatagtaacttggcgaccggtgtcctcttagacgacaacaacagtgacgtgaccagcgacgacgacatgacccggaacagaagagagtcctcaccacctcactcagtccattctttcagtggtgagtacccatccccactggtcacccatgggcaggcgctgccagatgcttccagatggagacacagtgggttggggcctccatgaagatgacccgccatccccgagtggtcagcttcactcagagatctgaggagagggtaaattaattgatgtcataatgagacatttttatatctaaacagacaccttaaatacttaataccgttttattcaacgataaagtatataaagctatttggaatttgcaacaggctgcttccagctgtacccccagcctcctcaggaaggttcattaaagatgcttcagtgagcttttatagggagcactgctttcagggagggtgtgtgtgttgttttcttgggttttgttttttttgtagtagaataacgtgtactttaagatcggctgccagacagtagggggtctgcagtccattctcctgaatgtggactcagccccttaggaactgggaagccagcaaagagtctga

SEQ ID NO: 92404 - DNA, 2649 bp, Homo sapiens
gagaaagggcagggcctgatgtgctgtaacaagctgggcaggaaggaaaacaaacacgctaggaaacagtaattgcatttacttacatttttatattcagtttttttcctgattgcgaagttaaaataacattttaaatagagatggaaaaagaaacagagacttgttattattaatcatttattctgatagatttcctctattttatgaatagtcttaatacaagtttatgtgagttttcttccagtttagtttgtatgtactgccatatgtttgattattttttacatacatgagatcatgccatttattaaacagttcacactcaaggtctccatctatagctttgctttctgaaaactgcattatattccattgtgtggacattctcattctctgtgtacacgtaaatgggaatatttgcagtaagaacaacataagtatagattttaagatttattaatagcaacaaagttaaccagtgggtgtggcttgcagtttctatggtgaatgttttgcaatacctgcatgtagtgctgtgttttatttttataatcagaaaataaagctgtaacattccttgacaacacgacttaatggttatgtaacattttgctaaatactttgttttcattccttgtttaatgaaaactcaggagagatgctgatttttggatgcagtaacttacttagaacaaagtatgtttgtcactggccctagtggccttagccttccagagatgtgtagctgaaatacctaatttcttaggggaggctccatgccagcagtggttatattggcctttcctaacgtcaaaggccaaccctaattctagaaatgcatgcttgagtaaccaaacactgaggtattagcggtcctgtcatggcctttttgttaaagttatcctttgccatttagctgtaagaaagttcctagtttatatttaaataaggaatccatttccagtcctttattataaattaagtccccatgtgtctatagacttttacacagttgaattctggactctgttatgtcccagtggtatatttgtcctagtgcttatatccttatattggaaaaaacactttatttttgtgtgttggagtcattttacagacaaaccacctcccactccaaatagaccttatgcagggttgtcttgatattcttgtacatttattcttccagaagaactggattatcagtttgtcaaaactccccacctcaaaataaaaaggagctttttaaatgtgatacacgtgtctttatgtatttatttcagacttattgcccttctgtcatttattttattttattttattttttattgttttttatttttttggtgattcagtctagttctgtcacccaggctggaatgcaggggcatgatcttagcccactgccccctccacctcccagggcccccctgcatcagcctcttgagtagtttggattacaggctcatgccaccacacccggctaatttttgtgttccttctgtaaatttttgaaattttgtttgaagttgcaggtaactttgttaaatttatttatggagatttatttatttgttttgctattaatgggaattatttctcttgctgtatttactcataaggttttgtagttcaaaataatgcttgccccatatttatacttttctttttcttcagttgcactagctaggacttccagggtcatgttaaattgtagttgtggtatagctgtcccttccttgtccccacttccagaggaacatctttaatgtttaataacatgcttgtttgcatgtatttgagataagtctttataatgcttagatggtctcctgcttttactctgctaagaatttatgaggaaaggctgttgaagtttgcaaatgttttttaacttgaaatactgcttgtgggctccccttcccctttcatcctttatgtaacagtttaccctgatgggacatcctccttgtattcctggaatagcctttcaagatcatgggctattatttggactttgttagtttgggtttattaaatgtttttgcatctatatgcaaataatgtttattgaacacctataaaaatatagagatgaaaaaggtaacagagtctttgcccatggagccttgcggtagggtataaatacaggtgctctgttgttctgttggattcatacatcttcaagcacagctctgattaataagctacgtttttattgatggcccgtttaggccatcctcaggcagattaactcctcagctttaatatttcatttgatagcatcaggcaagcctttagacctttcttcctctcagcacctgcaaacacgtatcttctgttttcttcagtggtaggcgtggctgttgccatggagaagctggcctggggaagtgggggccaagtgggcagagcagttatgcttttgattggccagactcgctgtcacagaaggtcacgtgggatctggtcttccccagtcagggtgaggtaagtatgtggccctggcaggtgcaaatttcagcatctggccccactgctagttgccctttgggcagcaagtagaggacgggttgaatccaaggctaagggttgggccactcggccaggaaggcagctaacctcattgcatatggcccaccttgt

SEQ ID NO: 92405 - DNA, 2649 bp, Homo sapiens; identical to SEQ ID NO: 92404

SEQ ID NO: 92406 - DNA, 3952 bp, Homo sapiens
ggacggccagcgccaaaaatggggttcttgaattgattccttaatctagagccccagagaaggttgtaagacaccccagaaattgacttgaatgcctttgatgtaaccttgttggagaaagtctatgagtacatcccagggtgtgaggtggtctaagggagctatacccgtggccattcatcctggatgggatgcttttcatggtctcatttgacctgtgccatcatagaagataaatgtggaactgttgtggtattgttcccccctgaggaacccagtaactgcaaaataaacttggcgtctcacattttcttttcctctacagctttgccttcttgatcttccgtccttcttggagacgactggcgagaggaagagggactaggtccaaacgctaggtggctgggtccaggtgagttgaatttcctcctcacagtgccacattcatctttggagtgaccaccgcacttccttactctgacactttcctactgcatatgtgttccacatagccaccccagcaccatttgtgccctctgagaacacccagactcttctggtggattgtgtattctctaaaaattctccttggcctcacaccatccatttcagtatcctccctctttttctcatactcagctactccttcagggctactctttttctcttgcctggtgattaaagaagcatgagagattcatccactcatttgtgaatattgatcaagtgtgtactttgtgccaggtactgggacatagccccaatgggggaaaggaagtgttttcaaagagtttttagtctatttgggaattaaagctgtggaaaacataattgtttgatttatacttttgcaagagaacatctgctagcaacagctgacttaatcttagagaggccacataggggcctccctgagatggtaaagaacattaaagctgagccctgaaggagtgtgaatggtgtgtgtcatggggagagtagtctcagcagaggggatagggttgttgttgagagatgcagagagaggagctgaaaatccaggattcctagagcaagggaatcgttgagtggcatctgattgaggtaggaagaaggtaagttgtggtttcattgtgaaaagacttgtaatctgtggtgagtaactgggcttgaccttaagtgcagcgggaagtgcttttaaccatgggagtatcatgataatcagatttgtggttttaaaaagatcatctggtttcagggtgcagaaggggagggtggacgcagtgggtgtggggagaccaacttgggcctgggtgagagatggtggcttggtttgtggtcatatcacagggaggagtgaagtgggtagattatttgagaggtgttgaggagggagactcctcactttctctgttcatggcctgctgactgattcagaggaggcacagtgagtcacatgatgtggggaagcaagcacatagctagaggttgtctgtttgttcatttgttagcaagcattgatactgggcctgatccaggacaggatcatgccaggcttagagtctccagaagtgaatgacataatccctggcctcagtgtctactgaatggaaactcccatcacaagaagagtaagaatgtgtttaccaagataggtggctatggtggtggtggaatactgcttagggagaagctgacatgaccaggtgagcccttgggatgggttggtgtattcctggcctcagtgctcaagatatgcattatggtgcttaaccctgtggagacttggaaacctcctttgcccgagggctcatgttggtagatccacatttaactaagctcaggagacttaaaaccgtactgacatgtgacttgaaataggatgttcctgttcccacaattctggtttattaattcatggtaggagtacaatagcagggacccaagtactcagcagtgtgtatgatcagcaaattctctccctgtaggcagacctacatgggaaacacaaccataatgagaaggttgcttggtgagtacggaatcagaaccaagaggatgtgggtgagctttaatagcgctggtttgtcacatagcctggtacagccatgttgtcacagtgaaacccttgcttagggttaccaagatatcggaagccccttatctaacacccttgtcctccccaaactccattcaagttaggtctgatgagagttgttcactatcctgtagatggttggatggaccaagctttgtggcctactttttagtactccctccccttaaaaaaatcagatgagccaattattgttattagaatatagtcaaataactcatactgttctggaagacattttgtctctttaaagtagctttatttgtcttgaaccattttgtgctggtcataagactgaactcttagatattatttcctctctttctaaacttttggggaaatctctcaaggatggacaacaacaaggagattttgctgcagtgtggtaagtgctaagcttaatgtggtagaaataagcccaggatgttgagattatctgagagaagccagccaacagaccagagggtggaggttgtggcctgtgagatggagttggtggtcatttactccttgctcctatataaaattttccctctaaagtccctatgtcccatatgtaccttattcataggtgattggaccagactggataccttagagcagtggttctcaaagaacagctcctggagtgattgtaggaatgcttctttcctggggaaccacagacctcctgagtcatcccacctggaaaggtagctccgtatttcataagcaccctaggcaactcttctgcacatctgagtttgagaaccactgccctagaaggaatcaggctgtagcatgcactttaatactgagaatttggatgaagggacactgagtgtcgggcatttaaactgggaggtgacgtaggcctgggctgggacagcatcttactccatgtgcgtgctgaagtagagaatgtcggtctgcagagagaggcaggagaatggagcaaacaagaagagagacgagaccacacaccacgctgtccctgggagacgaagagagtaacctcctcggttcctgactttaaagttctcaattccagcccccttttaatgaggtaggtagaacgagttagggggctgaatctaggtgcaccatggtgagggaccaaagtaagtaaatagaaatgggactgaaggagactcggtggattttctcctgcatcagatgggatgtgggagcctgaggccaaaccggagtcacaggatttcttctcacacatggtcccagacgctttctagtgcatgatgtgttctttcattaagttcttccctgctcagttgaacactgacccatcatttctctgattaaagccatggatcttccctgacttctggcaaggatgcctgatgagtttcatctttattatgtgttatattaattgtaagagccatgcttttatttcctactcattttaatggaatagaagtaaagtgtcataaaatatccaaagaatggcatcagtaccaccatccagacttcaatggcaatgctgtcatgcagcaggcagcgccaggcttgttctgtatacagagaggtttcatgtttagacatctagtgtaaagaaaacatcctttggagatcaaagaacgccagactcccagaagcacccttcctgcctggctgtgtagagggatcctttattagtggccccatcacttggcgcctctcctccctccccttgaagttggtgacctttctttgtcccctggcccagagtcagctagcccttgtgtgcccctaactgctgttggctactacttaacactgagtcctgctctgaagagagagcagagggagatatggaagctttagtaatgaggggtgtgtgggagcccaccttcaagccaggaaggatatgggtttgcc

SEQ ID NO: 92407 - DNA, 1056 bp, Homo sapiens
gagacaagtatctcttcaatccctaccatccctccacctacccacccatccatccacccatccatgtatccacacttccatctaatgcacacaactatccaactgtccatccattcagccacccatgcaacaacccacctaatgcattaattctgtcattcttccaattatcaccacccacccatcacttcatacacccatccacccaccacccatccatccacatacccccatccatccatgcttccatccaatcatgcaccctacacctgtccccccacccatcacttcatacacccatccacccaccacccatccatccacatatccccatccatccacccaccacccatccatccacatacccccatccattcacccttccatccaatcatccaccctacacctatccatccacccaccacccatccatccacatacccccatccattcacccttccatccaatcatccaccctacacctatccatccacccatcattccatacatccatctacctacccatcaatctgtatacacatctatccattcacccttccatccaatcatccaccctatacctatccacccacccatcattccatacagccatccacccaccacccatcaatctgtatacacatctatccattcactcttccatacaatcatccaccttactattaatccatctactctactatccatacttccacccaccatccttccatccattaacctatctactcatccatctgtggtgagctgaatgatgaccccccacgtcttagtttccagaatctgtgagtgtcacctgatgtggcaaaagggattccccgcagtctaggttacagcaactcaactctgcctttatagcacaaaagtggtcctagacaaaacacaaatgatggatgtgtctatgttccagcacaactgtattgtacaaaagcaggcaggccatagtttggcaatcagccatcttgttctgaatgatcaggcccctacttcactttccgacaaatctctatccactttttcccttgctctctccaccgt

SEQ ID NO: 92408 - DNA, 1044 bp, Homo sapiens
ttgaaagcaggaatatgctgaaggaaattgacaaaacttcattttacagcatttgtaacaagccaagttatcagaagatgcctttgtttatgtcaaaatcaccaacacatgtgaaaaaggggatattagaaaatcaaggtgggaaggggcaaaacacactatcatctgatgtacagacaaatgaggacattctgaaggaagataaccctgtaccaaacaagaaatataagacagattccttgaaatatatacaaagcaataggaagaacccatcaagtttagaggatttagaaaaagatagagatttgaaactcgggccttcattcaataccaactgtaatggaaatcctaacctagatgagactgttcttgcaacccagactctcaatgccaaaaatggtttgacatctccattggaaccagagcacagccagggtgacccaagatgcaacaaagcccaggtgcctcttgactctcattcacagcaactgcagcaggggttccccaatttgggaaacacctgttacatgaatgcagttttacaatcgctatttgcaattccatcttttgctgatgacttactcactcaaggtgtcccatgggaatatattccctttgaggctcttattatgaccttgacccagctgcttgctttgaaagatttctgtagtacaaagatcaagagagaattacttgggaatgttaaaaaagtcatttcagcagttgcagaaatattttctggcaacatgcagaatgatgctcatgagtttttaggtcagtgtttagaccagctgaaagaagacatggaaaaattaaatgccactttgaatactgggaaagaatgtggggatgaaaattcatctccacaaatgcatgttggtagtgctgccaccaaagtgtttgtttgccctgttgttgctaattttgagtttgaattgcagctctcccttatttgtaaagcttgtggtcatgctgttctcaaggtagaacctaataattatctctccatcaacctgcaccaagaaacaaaaccacttcctttgt

SEQ ID NO: 92409 - DNA, 1404 bp, Homo sapiens
cctcctcctctctttcagtggctacagcaaaccaaacagcccagcagcccagcagcccagccatgtgagtcccttgggattggtatctggaaaaggaaggaaggtgggacgtggggatgaagaacagactgggtgtgtggggtgctggctcctgggaacgagaactactgatagggctgggtctgtgtgagaagggaaagcggcagaggaaggatacaatgaaagaggaaggggagcattggcatccctgactttccctccgcctaccctacctcccaagctgaggcttttttcttcctctcctgtcaggcggcgcctcacagtcgatgactttgaaatcgggcgtcccctgggcaaggggaaatttgggaatgtgtacctggctcggctcaaggaaagccatttcattgtggccctgaaggttctcttcaagtcgcagatagagaaggaaggactggagcaccagctgcgccgggaaattgagatccaggctcatctacagtaaggacagtctctgcttcctctttcatctttgacgtctgagcccagcattttccccaaatactaaccccaagtaaaccctgcacttgtaccttgaagacttctctgcagttcattccatttacactacctcctaccctgggtcagacactcgaatcctggttcctgttctccgttctcccctcacttgctcccagatagggctgttgttattctggtcccagcataatttgccacttgtgtgaccaggcagtgacggtggcatcatatgataggcctcagggagaaatctgactcttccaacattaatccttcagacaccccaatatcctgcgcctgtataactatttccatgatgcacgccgggtgtacctgattctggaatatgctccaaggggtgagctctacaaggagctgcagaaaagcgagaaattagatgaacagcgcacagccacggtgaggtgcgggtctggaggctctggggtctctgagtttactgtgggctggtgggagctctgtttgtggctgtcaggagggtccgcattgccttctgagaagtttacttctgaatgttattgtgtaaatttaatataatggcacgtatgttctacagctttatccttggataccctaattaacctcattgtatctccagaatattaataagtactgcgtataggtttggattctttggttataagcaacagaatctaactccactgccttatgtaaagaaacatattgaaaggctctgaaggagttcactgaataaatagctagaactggcttagagataggtacaaagagatttctagagggttccggaaagggaaccatggcaatgattttcccaggagcaatggtccaatcagcttgctgtgtcaggatgagtggtcttccatc

SEQ ID NO: 92410 - DNA, 1043 bp, Homo sapiens
cccgctgcaggagccatatattgaagaccatgtctggaagcttctactttgtaattgttggtcaccatgataatccagtttttgaaatggagtttttgccagctgggaaggcagaatccaaagacgaccatcgtcatctgaaccagttcatagctcatgctgctctcgacctcgtagatgagaacatgtggctgtcgaacaacatgtacttgaaaactgtggacaagttcaacgagtggtttgtgtcagcatttgtcaccgcggggcatatgaggtttattatgcttcatgacataagacaagaagatggaataaagaacttctttactgatgtttatgatttatatataaaattttcaatgaatccattttatgaacccaattctcctattcgatcaagtgcatttgacagaaaagttcagtttcttgggaagaaacaccttttaagctgaatggagaaaattccaaaataaattatatcaccacaatggtgtatactcaggaatgtgtacattgtaaattacttgattaaatagcctggaaatcttttgtgtattctcagcttatctaaacttaatgaaatttcttttatatttaaaaatagtacattctgtctcatgtcacatatcagtagatcaattagtatttccttgtgaacaatgttatttataaagaactcattatcaataataattaatttctttcttttttttttttttttgagacggagttttgctcttgttgcccaggctggagtgcagtggcacagtctcgtctcactgcaccctccgcctcccaggttcaagcaattctgcctcagcctcccgagtagctgggattacaggctcccaccaccatgcctgcctaattttttttgtatttttagtagagacggagtttcgccatgttggtcaggctggtcttgaactcctgacctcgtgatctgcctgcctcggcctcccaaagtgctgggattacaggcatgagccaccactcccggccatgaaatatttttacttaaaaattgggaataagctttcttt

SEQ ID NO: 92411 - DNA, 1104 bp, Homo sapiens
actacaatgaaatactacttcacacttagtaacatggctaaaatgaatggcctatgacttctacacatataaactgtcagtaatgtgaagaaatggaaaatctaatatattccaggaggaaatatgaaatgctaaccatttagaacacaatttggcaagttcttaaaatttgaaacatttggatcaacttacagaataactgaatgaggagctttgcagacctgttacacagccaaaagggtgaaaattataaaaacacaattcagtctctggaaatggtcataagggtgtatgggaaataaatatttattaaagaagatctaacattcacaagaacagcaaaagtgagtcacatttgaaccaagaccactcctttcctcccccaactccaaactcagcgagatcaaaactccattcgacgggtacagccaagaatacagggctccctctctctggagctccaaggcagagggctgtcttctcaggaaggacaatctgtcaggaattctcatcttgcctccagtgtgcatatttagatgaatgatgttcaattgccagctccctcataaaggccatcctcagagtttctgttttaagtgaggtcatattgattcagagacagtacataacctgtcaccctaaggcctttctccagtgtaaactttctggtgttgaatagggttaggcctttggctgaaacctttttccatattcactacattgtccacattgtaaactgtccagtgttgaatgagactggaggtgtggctaacggatttccatctgttaccttcaagattttttccactgtgaactttctggtgttgaatgaggttgaaacgctggctaaaggatttcacacaatcactgcatttctccagtgtgaatccttcgatgtttaaaaagactggagttgtggcgaaaaaacttcccacattccctgcactcataaggctttgctccagtgtgaaccctctgatgtttaacaaggctggaattctctctaaacaatctcccacattcattgcacttaaaaggcttttctccaatgtgaacttttcgatgttgcatgagggttgagctttggctaaaaaatttcccaca

SEQ ID NO: 92412 - DNA, 1057 bp, Homo sapiens
cgagatcctcatgtccagtacagtgggggctcgtgggtggggtccctatttccagaacttgggtgatggggcacggaagagggttacaggcaaagggaccagcgtttctaaactcttggagacacagtgaagaaggttcatacctggagtgccaaggtgaggagttttccctcaattcttaggatgctaggagccgtggagggttgtgtacagaagcggcatatggtctgagttaggtctttcgaagttttccaaaaacctcatggagttagactagaatagaatggaataacacagaggcacagggaggttgagttcttgtgcaaggtcccacagttgctaagagttggcactgaggactggaacgctgaggctcagaaataatgcaggcatcctcagtccacctggctctggcctggacaggaatccagggaagcctgaatccgtagagccctgtatggtcacctgcctttcatgatctttggctttccacaggttactgtgtctccagaaacacatatggacctcacaaaggtgagtggagggtgtcccaggccctcactggtcctggccccatcctggggttttttcatggatctttttgccaccatccagttctttgacctaaggactcttcacaaactggaagcttgacatcctgattctagactggtggttatttgtagacgttcttattgctggcagacaatggaatgaggtgtgaaaggttgccccgcctacgtacaataatgtgtaaggttggcagtgaagctgagctgattcagggaaacacaactctcctttctttctcatgggaactcagagcagcagggcaggactcaggcctggaatggctctgagaaattgggtgttttttctggaggtgatgagaacaatgggaggtttagagaagagaacggaggttatctgacactggtctcatcaggttcactgttaatgcagcatagagaatactctgtgggtgtgatggaggcgatagaaagaccagggaggaggctactgcagtggccaaggtgagttttgatagtggcttcac

SEQ ID NO: 92413 - DNA, 1632 bp, Homo sapiens
tcatgacagggctgtgtgacctttgaggacatcgccatttacttctcacaggacgagtggggacttcttgatgaggctcagagactcctgtaccttgaagtgatgctggagaactttgcccttgtagcctcactgggtaaggccctaataccaactccagtgtcctggtctgtctatggtcttttgctgacttctccactttcttgggatatgtgctatgggatccagcactgtgcactgcctgagtagccctaacacctgctgcccagtggtctgggaacacctgctgcccagtggtctgggaacacctgccactgggcagcaggtgttcttcagtcagccaaatggatctctgttccttgctctcttcttggctgggtgtctgtgttcagatccatgacaccttgtgtcccaagttccctgcacccccatctgctagctgacattttcttgtggctacctgtgtcatgattgtagtcattgtcattgtctatacttatggggacaatgggctcttcttactcactccttctagtttgtttgtttgtttgtttgtttaatgatattaactttcttgcccatgggctgttgtgtgctgagtcgttctgcatcagtgctgatcactcacatgttctgtctttctggtaggacttggcttcatgaaggtcccacatagctagacaactgagggtgtgcagagaaacctggttgctttatagggtgaacatggtctcagagaaggcctgggcttgttgagtggcaactggttgggggcatgatatccgggctgttttccgatcacataaggagcctgtcctgtcttcaccactgtttgggtgcacatgccactggccaaatctcatttctatattttcttctcagtacttgacacttctctctcttattatttttatctatgacttctagcacctggctacctccacctttctgatcttcatgcatcatctgcttctctgcactgctccctctgcaatgttttccaacattgacacacacataatgtctcatgaagtatgtatatatgaccacatgaagatatgtgatcatatcacttgctactcagtttcaattgtattttcctgggcttgggcacagtcaaccttctgcacagcatgcaggtgtcaccagcagacaaggtcctcctgaagactatgtggtgagttttaggaattggaaggctactcaaggataatttttgaggctgttggtagaggaatggtttgaaggcaatgccattccctgtccttcatcccatccttgtgtcctttatttggtgaggcctccctcattctgtgatctttagagatccagtattgcaaagcaaccccttcctcaacttgcccccagctccattatcctcaaaacaaacctggtgaatcattcgtttggtatgtgtgtaatggggcttcttgctctcagcatagtcaatgtatatttcatcagcggttctctgctttcaggttgtggccatggaacagaggatgaagagacaccttctgaccagaatgtttctgtaggagtgtcacagtcaaaggcaggttcatccacacagaagactcaatcctgtgagatgtgtgtcccagtcctgaaagatattttgcatctagctga

SEQ ID NO: 92414 - DNA, 1050 bp, Homo sapiens
agagcctcatatgtgaagtgctgcctattctgtatgtcattgaagccctttcgcaaatgggaggttggaaaggaccttccagccatgttgcggcttctgaggtccctggtctttcctggaggcaagaaacccggcacaattactgaatgtggggaggacattcgcagtcaaaaaagtcattacaagtcaggtgaatgtgggaaggcttccaggcacaaacacactcctgtttaccatccaagagtctacactggaaaaaagctttatgagtgtagcaaatgtgggaaagccttccgtggcaagtactcacttgttcagcaccagagagtccatactggagaaaggccttgggagtgcaatgaatgtggaaaattctttagccaaacctcccacctgaatgatcatcggagaatccacaccggagaaaggccttatgagtgcagcgaatgtggaaaattatttagacaaaactccagccttgttgaccaccagaaaatacacactggagcaaggccttatgagtgtagccagtgtgggaaatcctttagccaaaaagccacccttgttaaacaccaaagagttcacactggagaaaggccttataagtgtggtgaatgtgggaattcctttagtcaaagtgccattcttaatcaacaccgaagaattcacactggagcaaagccttatgagtgtggccagtgtgggaaatcctttagtcaaaaagctaccctcattaaacaccagagagttcacactggagaaaggccttataagtgtggtgactgtgggaaatcctttagtcaaagctccatccttattcaacaccggagaattcatactggagcaaggccttatgagtgtggccagtgtggaaagtcctttagccaaaagtctggtctcattcaacaccaagtggttcacactggagaaaggccttatgagtgcaacaaatgtgggaattcctttagccaatgctccagcctcatacatcaccaaaaatgtcataacacatagaggcctcatgaatgcagcaaatgtggaagcgccttc

SEQ ID NO: 92415 - DNA, 1038 bp, Homo sapiens
aaaataattaaagggttttattttttaattcttgttggttttctaggttgttcacctcaagtgcattgctgtagaggcagaaaaaggaggataaagataacagaagtcctataggccagggatgtattgatagctcttgtgatttccaccagtgttgctgttgtctcaaattgccacagccttcattgcttgccaacatttcctgcatggagggactcatggttgcccttccccaggcctgaagagagagtgcagtcaacatgagattgctaggcattctggtttctgaaagttgggtgatcagatactttattgtgaaacatgttttacaaactttcttgatgtgtaagtgacatgccatagtttacatccatttatggtgtataatttgaagagtttgtcatacaagcctgtgaaaccataatcatgatcatgaacatattcatgattcacctcttgctgttttacaatctctgcgtgtactttccaggccttcaggagtcctgtcatttactttccctacaggagaatagtttgtgttttctaggattttatgtgaattgaaacgtaaaatacttactccatttttcctgatgatgcacaattttttttttttttttgagatggagtctcagtctgtcaccaggctggagtgcagtggcatgatcttggctcactccaacctcctcctgggttccagcgattctcctgcctcagcctcctgagaagctaggactacaggcatgcactaccacgcccaactaatttttgtatttttagtagagatgtggttttaccatgtttgccaggatggtcttgatctcttgacctcgtgatccgcccgcctcagcctcccgaagtgctgggattacaggcgtaagccaccacaccagctgatgcacaattacttttaagatttatcaatattgcttatgtgaatagttcatttgtattgctgagaaatagtctgtggatatgtcacaatttggataaacagttggatgctttccagttttgggctgttgcaaataatgctac

SEQ ID NO: 92416 - DNA, 1033 bp, Homo sapiens
agcttcaagccacaaacacacacttgttcagcatcagagtgtctgttctgaaggagggctttatgagtgtagcaaatgtgagaaagccttcacttgcaagaacacacttgttcagcaccagcaaattcacactggacaaaagatgtttgagtgtagtgaatgtgaggaatcctttagcaaaaagtgccacctaatcttacacaagataattcacactggagaaaggccttatgaatgcagtgatcgtgagaaagcctttatccataaatctgaattcattcaccaccagagacgtcacactggaggagtgcgtcatgagtgtggtgaatgtaggaaaacctttagctacaaatctaacctcattgaacaccagagagttcacactggagaaaggccttatgaatgtggcgagtgcgggaaatcctttagacaaagctctagcctttttcgacaccagagagttcactctggagaaaggccttatcagtgctgtgagtgtgggaaatcctttagacaaatcttcaatctcattcgacatagaagagttcacactggagaaatgccttatcagtgcagtgattgtgggaaatcttttagctgcaaatcggaactcattcaacaccagagaattcacagtggagaaagaccttatgaatgcagagaatgtgggaaatcctttagacaattctctaacctcattcgacaccgcagcattcacactggtgataggccttatgagtgcagtgaatgtgagaaatcctttagccgcaaatttatcctgattcaacaccaaagagttcacactggagaaagaccttatgaatgcagtgaatgtggaaaatcctttacccgcaaatctgacctcattcaacaccggagaattcatactggcacaagaccttatgagtgcagtgaatgtggcaaatcttttagacagcgctctggcctcattcagcaccggagacttcatactggagaaaggccttatgaatgtagtgaatgtggaaagtcttttagccaaagtgctagcctc

SEQ ID NO: 92417 - DNA, 2022 bp, Homo sapiens
gcccatcagagaactcacacgggagagaaaccatataactgtcaggaatgtggcaaagcattcagagaacgctcagccctcactaaacatgagataattcattctggaattaagccctatgaatgtaataaatgtggaaaatcctgtagccagatggctcaccttgttagacatcaaaggactcatactggagaaaaaccctatgaatgcaataaatgtggaaaatccttcagtcagagctgtcaccttgttgctcatcggagaattcacactggtgagaaaccctataaatgtaatcagtgtgaaagatcctttaactgtagttctcacctcattgcacaccggagaactcatactggagagaaaccatacaggtgtaatgaatgtgggaaagcatttaatgagagttcatcccttattgtacacctaagaaaccatactggagaaaagccctacaaatgtaatcattgtgaaaaagcattttgtaagaattcttcccttattattcatcagagaatgcatagtggagagaaacgctttatatgcagtgaatgtggaaaagcctttagtggtcactcagccctacttcaacaccagagaaatcacagtgaagagaaactgaattgaatttatgcgagtttttcgtttcttgtacatttgacaacacattgaggaaaaccctataaacataatcaagaggggacatttttcattaagagttcagtaagacttctcccacattatttactagaaaatatcatcttagaagaaaccccatgaaggaaaagaatagggaaaagctttcagcagttatttagcccttactcaaaatcagataattaacaatgaaggaaactctaaactccccttatggtctaccagtaattcatacttgaggaccatgactgtggggaatgaggcatcttttagcaagagctctcaccaattgtagattggtgtgaattgctaagggaaaaaccttatgcagagaaaagtttttgactggaaatacactgttttgcatcaagctggagtactggatggaaaactctacaataacattttgtgcataattgtagaaatacagattttgttgttataaggggagggtctgggtgcccaggagtagaatatgaagtgctaaatctgaatgtaagaaaaataatagtattgaatggggtatttactgttgattaacctccttagagaaaattaatgaatgagatgactaacggtagaaaagttattgcctaggagtgtgagactgatgttgctggacagaaagtgatccttagcccagtgtgtcagcgtccattgttactcatcactgcattgttgggcaattagtttgtaatttgttttaggcaatcactataaattataattatggacactgcatcagtatacataacatgaaggaataaaaaggatacagaattgtatatacatacttactgtaacacatctaaaaaaatgtatatgggtaaggacctgaaagatccatggaaaagttaacccagttgagatttttaaaaagttttacaaatacatataacacttatgtgctgggctttcttttaaatgctttccaagtgttaacttgtttagtcccctttactctgagataggtactgttaccccagttttacaaatggctaagctgaagcagagatgttgaaggatcctacctaaggggcacaactagtaagggagtagagctgagattggctccagagttcttgttttcagccaccattttatgctgcctctccagtgattttttttcccattttcttcagtgtttctatagcagagatttgataataaaaagaaaatcctaaacaatgagaaataaagttacctggtttctctgtctcgaaggatttatagtaacatgagaactagtatccctttggaatatgaagtctgtgttggacattcagaatcactgcattttctgggacctgagttccctagaactttgctgcctgcaaccccaaggataacagggcagcagggcct

SEQ ID NO: 92418 - DNA, 1110 bp, Homo sapiens
ttcccactttattctaatgtctttctctatgctctcatagctttttttctgtctgtttcagaatgggtgagaaatcttgaaagcaaagcattgatcccagcacagagcatttttgaggaagaacaatcccatggcatgaagttggaaagatatatatgggatgatccttggttctccaggttagaagttttgggatgtaaagaccaattagaaatgtaccacatgaaccagagtacagctatgaggcagatggtcttcatgcaaaagcaagtactatcccagagaagctctgaattctgtggacttggggcagagtttagccagaacttaaactttgttccatctcagagagtttctcagatagaacatttctataagcctgatacacatgctcaaagttggagatgtgactcagccataatgtatgcagataaggttacctgtgaaaataatgattatgacaaaactgtttatcagtccattcaacctatttaccctgcaagaatacaaactggagataatcttttcaaatgtactgatgctgttaaatctttcaatcatataatacattttggtgatcataaaggaattcacacaggagaaaaactctatgaatataaggaatgccatcaaatctttaaccagagcccatcatttaatgaacacccaaggcttcatgttggagaaaaccagtataattacaaagaatatgagaatatcttttatttctcatcctttatggaacatcaaaaaattggtactgtagagaaagcgtataaatacaatgaatgggagaaagtctttgggtatgactctttccttactcaacatacaagcacttacactgcagagaaaccctatgactacaatgaatgtgggacgtctttcatctggagctcttaccttattcaacataagaaaactcatactggagaaaaaccctatgaatgtgataaatgtggaaaagtttttaggaatcgctcagcccttacgaaacatgaacggactcacactggaataaaaccctatgaatgtaataaatgtggaaaagccttcagctggaattctcatcttattgtacataagagaattcatacaggagaaaaacct

SEQ ID NO: 92419 - DNA, 1020 bp, Homo sapiens
taactccctgctatgaaagatgaagaaaaagagtttcattacttatttttaggtcttttatttttaagttaagataatgaatcaagcagatgtgagatacttggatataaaacaagatttaaaaatgatgtctctactttgtgcctccccctcaaattaaaaaatattattgaaaccgcccacagtttcaaatctggtgggtgaagtccatcataagtatgctgttcccacttggcagtgttgctatccctggtccaggtgagatgggaagcagaagggcctgaaccatatgatgcaaggtgattgttgcctggcatcagaacttgggcaactatgaggtttgctgctcttacaatgtacagtcattattaaatcctaagacagaataatcagtagtgaagctagactagcctgaaagatggcccctgaatcagactctgaggagtagaagttagctgtaataaaacactgcgaagaagccctgttaaccaccatgctacactctgctgttaatttatgctaggctttctgagaattatctaagttaatgctgagaaaataaaacagaattaaaaataacaacaccctccaatgtctgaagagttgtgatttctgataacatgctcctggctggcccccctccccacactctggattttttcctgtgggaaactcggatttgactgctgtgtgtttttaactaagtgagatcttcaggaatgcaaaagaaccctgtgtccctttattgttccctccaagttaagtatttattgaaataaagcatttatctggtgaaaacatcaaatgctgtcatccctcattatctgaatagtccattcatggaagtatgttgaatagtgaggttttaactacagaagcccagatcccgttatttctaggaataggggaaaataataattgtaatgataatatctcatttcatctaaaaaaccccaaccagcctttccaaatacggaagcattcaaacccctctgttaacagtccacctaggatatctgc

SEQ ID NO: 92420 - DNA, 1005 bp, Homo sapiens
tcaccctgaggagctcccagacccttttccagggttattcactcagctaaggagatctcacggcctacctggagccacacgtgcagtgtgggacaggagaaacctgagacgggtagggtaggcctgcaggagcacagtcacctgatgagtcgggagatgggacagagtctgtgtggagctcagcttttactgtggaggggaaggctgcttcgtagacctgggccaagaggtgaaaagaatgcatcagccagttgggcacagcctggtgagtgggggtctggcctcctgcagcaccacaggggtcaggggtggcaggcagcacactgtgtgaccagtgtttgagtgagactgactccagttagattttaggctggagaggccaggccctgaatgcttgctgcagaacctcagaagtcttgggatcaggcggcaccagggtccaaaatgtggtgatgggtgtggaaagaagagggctgtgggaagcaggctggtgtttcaggcttcagtctgaccagggccttggagctatggaggagaggtataaggaaatcaaagcaggggcctttgtgattatggggacagggtggctcctgagagaaataggacaatggagttacttaggaaaggtgtcatctctctgccgtcctcctgcccagcctcctcaccagatgcagccacttaaaaaaatttttataatagctttattgagatggtactgacatattataaagtttatccttttaaagtgtgtaattcagtggtttctcgtatagtcacagaattgtgcaacaatcaccagtatctaattctagaacattttcatcaccctaaaaagaaatcctgtacccattagtagtcactccctgtttcccctactccctcccaaccactagtgtactttctgtctctatgaatttgcctagtctggacatttcataaaaatggaatcataatatggcacagccttttttgtctggcttttttcacttagcataatgtttgcct

SEQ ID NO: 92421 - DNA, 1329 bp, Homo sapiens
gatacagcccagcactatgtggtgttgctttttaggatttccacgaaggccaggcacagtgcctcatgcctgtaatcgcagcactttgggaagccaaggcgggcagatcacttgagcccgggcattcgagaccagcctgggcaacatagggagaccccatctctacaaaaaatacaaaaattagccgggtccgcacttttagtcccagctacttgggaggctgaggtgggaggattgcttgagtccaggaggtggaggttgcagtgagccaagatcatgccactgcactccagcctaggtgacagagcaagaccctgtctttaaaaaacaaacaaaccaaaaaaaaaaaagatttccatgaatccagtggacttgaatgggcatctctggggccacccaagccctgtggccaccgcgctgctttgtaaatcagggaaaggtgtagtgtccgttgagccttgggtgctgctgtcacagaagcacactggggcctgtgtgggaggcagcgggggctccttgacccttgagggcacctggccacagggagctcattgcctcagctctgcctctccttctccccagcctggctttctccggaccccctgtttctggaacagaggagggtcagagaagcaaagaccgaagaggacggccctgccaacaccgagcaggtgggtgggcacgagcaggtgggtgaggggccttggcctcagcttagaggcatccccctccccatcaccagtgctcagcagagggctgtggccccaaacgtccacagcgctgaggcccagaacccaccctggtgggagcgtgagggcggaatctttgtggtgcgaagggggctgcctcctgcagtgcacctgggttagagtccctggccagggctggctcctagcctgctcctgtggctgtggggctgcggcgggtcctcccttctctagggcaggtgggaggtctcagccacgactaatgtttcagaagctgaagtcctttccagaggaccctcagcacctgggggagtggggccacctggaccctgccgaggagaacctgaagagctaccggaagctgctcctgtggggtgagagtcgcctgcctcggggtcacgccccactccccatccccttccgcaggggttggtgcaggagactgtgaccccagggactttggctgggacactgtgatgtcttacaggatttgaacttgcacgtgttggagcttgaatttattcgctgaagcccccaccctttctgatctaaacatctgagttctgcccaggccctgcctgtaggactgaagcctcggaatttggaaaggcctcctggcccc

SEQ ID NO: 92422 - DNA, 1001 bp, Homo sapiens
acctcgtgatccgcccgcctcggcctcccaaagtgctgggattacaggcgtgagccaccgcgcccggcccccagcctcttaacagtaaatattctgggtactttgcaggctggaggtctcctggtccaagatgaggtgcaggatgggtagtgatgtggccctggagcctgcaggtccctgtggtttaactgtgtgattgttgttggcacgtgtcctgacctcttggggtcacaggtccctccactgttgacagggatgctgctgggctcccctgcgggctcatcctcaattcttagcgatggagtgtacgagaggcacatggaccctctgctgctaccaggcgagctcgcgagccccagccaggcccttggagctggggagatcccggcaccttctgagacacgtgagtgcccagctagcctggcagcctctgctgggccttaggtggggtgttgggcagaggcctgtggttgggagagggcagaagggcagccagggagtcaggggctccatggtccatgctatcattgggacttcctcctgtagtttctctgaatgttagacattgtttattaaattagtcttcagagattatgcagatcatccatacttaccacaaatagtgaagaaacatcaatacataaagaaaagaatctcccaacccccgaccatgaaccctctgaaaataaagggtctcaagtgtcctgatgcacgtcccctcatgtctccctgcacatcacacatgcataatcagggcctggggtcgggctctgtgtgtgtggtgtgctgtgtctgagtgcttgctgttcgaggggtgggtcccccaggctgtggttgggtctggttctttagttgcccagcatcgcgtgctcagcccatccccatcctagaggtgggctctctgccccttggagtgaagctgccctgacacctcctgacttgtgtgcccatatgtgaggctctgggcactgtgggtggactcctcaggaccactgggcaag

SEQ ID NO: 92423 - DNA, 1051 bp, Homo sapiens
actggggctgctaggctaaggactgtttgctgctgggttgcaggtgatgatgatggagcttgcatcaggtgaaattccgtgccctagcttcttccttcggcagttcattctctgaggttgcttggcttttgagttgtgggcagtggatagagattgggacggtttgggaaaggagctgtaactcagaaactggattgcaggtatgtgcttcctcagtttgcagagcgtttgatagtgacagattctgcagttctttgcctattcccataccagaatgcctactctgtgaggtggaggtcttcatctgtctgatccactgctgaattattgatacctagaacaggtcctggcatacagtacgtgttcagtaaatgtttgcagaatgaaagaaaaagagccatccttgtgaccacaggaagctggcccttttcccacagacttaagatcacagagggggtgtgtgatgaattcactgcacatttatctagtgtgcccaggccgttttttgggggttttttttagagttttttcctttgtgatatccagtgcctcgggcaatatggagtatggggtgtttgtgtgtgcatgcgtgcgtgtgtttgaaattggcatgctttatgtgctacaagactttgcaaccttcttctctccccaaccttgtactaggtgaagctttcagtacaccggccttcactgctctatactattctaccttgtgaaaatgccacagttttttttgtcttgcctttcctgttgatgaacatcttggaagtttccaggttttcagcgtttccaccagtgctttagggaggcaagttgaatgtgtatccttgtaagggtttttctagcctgtaggttttcaaaattttcacacaagcattgagagaaacatgtacatgatgacttgcatgcatactaactgtaacaaaagtttgatgaaaccacgcttgctaaatgtgagatcctctgatactacttttgaattttaatttgtcattgtaaaaaggatgccagtgtggatccaccacatctcttggcatttagaattttt

SEQ ID NO: 92424 - DNA, 1001 bp, Homo sapiens
tgatggttaatttaataaccaaggtggcttctaaaagtaactaatagggggtatacagtgtggacacactagacaaatgcctggttcccatcctgggcgggatggtgtggtacagcatgggatttaatcatgctactcagagcagtgtgcaatgtgaaacttatgaattgtttatttctggattttccatttaatattttcagaccacagttgacctcgggtaacaaaggtggagaagtgaaactgccaatcaggagaggctactgtaattcaatcacagaggatagaaactcctgaccaaagagaatatgagatgtggactaggtgagttccagatggattctggggtagcctgggccattgcaagtttggctgaaatgagtgggacatgagatagagaagaaggtatcctggattatctggatgggcccaatctagcacacatgcccttaaaagcagagattgtgggctggagtcagatgctgaggaaggagcgagtagagagctgaagtgtgaggaatctactccctgttcctggctttaaaactggaaaggggctgggcacagtgcctcacacctgtaatcccagcactttgggaggccgaggtggatggatcatttgaggtcaggagtttgagaccagcctgaccaacatggcaaaacccatctctactaaaaatataaaaattaaccgggcatgatgtcatgcacctgtaatcccaattgcttgggggtctgaggcaggagaactgcttgaacctggaaggcagaggttgcagtgagccaagatcgtaccactgcactccagcctgggcaacagaacaagactccatctcaaaaaaaaaaaaaaaaaaaccaaaaaaccaacttatgttcatcagaaagcaatattatgcaagtgaaagggcaagtgacagagtgggagaagaccattgtagagccaacaaaagattggcctccaaatatataaagaactcagcatctcaataagaatgcaactt

SEQ ID NO: 92425 - DNA, 2137 bp, Homo sapiens
tccaccttgtacgtaagcaaacactgaatcaacttttttttttttttcggacagagtctcactgtgcagtggcatgatctccactcacagcaacctctgcctcccaggttcaagcagttctcctgcctcagcctccaaagtagctaggattacaggtgcctgccaccatgcctggctaattttttctatttttagtagagacagggtttcactgtgttggccaggctggtcttgaactcctgacctcatgatccgcccacctcagcctcccaaagtgttgggattacaggcatgagacactgcctggcctgaatcaaccttttttaagtgtaatcagaaagagaggctttggcaggggctcttactgtgttttctgtaacaacaaaggtgtacaatgagagagtccacacagtgctgtactgcacacaccacagaatgtgtgagattttcctgtttgaatgtatgtctgcattatactcctgcaataatgctgaggactcgttgcaggagggcaaactaggtgaataaattacctgtgaatgaacaatgaagtcgttcctcttaagactgaaacaagcaggccagatgtggtggctcacgcctgtaatcctagcactttgggaggccgaggcggccagatcacaaggttaggagttcaagaccagcctggccagcatggtgaaaccccatctctaccaaaaatacaggaaattatctgggcatagtagtgtgtgcctgtaatcccagctacttgggaagctgaggcaggagaattgcttgaacctgggaggtggaggttgcagtgagctaagatcgcaccactgcactccagcctgggtgacagagcgagactccatttcaaaaaaaaagactgaaacaagcttgtgctaagatggaaagggctgcttctaacagatgtggtttgttgctttagttgttgaagcaaaaatactgagttgttatgtttatgttatcaccccaccactacctccatggttgttcatttaggatgcttctaattcagccactgtgaaccattataaaggttttattgccatgttgaaaatgtttataatatggcaaaaaggggcatcaaatagaagatttactattattccagccatgtaaaaatatgtgcacatatggatgtatgttgaaagtggatgatggagaaataaaatgtggttttctttggggactggaattttgtatcatatttttttctctgttacagatacttgttggcataataatttggtaataaattaaaaagtgaagccaaaaggaggttaatttggggtttctttggacctttagtagtagggactggatcagggcaacagggaagctgtaagtgtggatggaggggcattgggcagtagcgtctctggaatcagcatcccaaagcccagggcatgagaataacttccttctttgggacttgggttataaggggttgtcagtgtagaagagagagtgagtcccagagaatggagaacaggaagcctgtagaaaatttgggatgactttggagtggcccttccgaggcagtgcagtactggccgagtgaaagccagtcaaggtggatgacacagccttgaagccccatgagtggatccccttgggattttgcctctagacaatttcctctcctgggagaagggacaggtgtgacgatagtgaagattagtgatgagtcagtccaggactggggtcagccaggcccattgtattagctggatcaaggttcatgtgtgtgtgacctggtgtctccatggtgctggtattctgaggtccggaccctcaggccagctcgtggggagcttcaagcagccatgcctccttctctgtgtgtgttctcttttgtctggcatcagctgtggcctccatggcacttgctgtctcccatgaggcagccaaccttggtatgcctctgatagctgtgtcatgggaagggtgggcagccagtcctgagagaggaatgagtagataggtaatggaggcacggagtgaagaagggaagagtggccctgaaagagcatttagagaagtaaagctcccccacacacattgggatatggtgatctcatggtgagaggtgcaggggcatggaggactagcggggacccttgttgaa

SEQ ID NO: 92426 - DNA, 1400 bp, Homo sapiens
aggagactgaagcaggaggattgcttgagcccaggagtttgagaccagcatgggcaacatagaccgtgtctctattaaaaaaaaaaaaaaaaagaaactccacagaaattccagacaatgcgatgccagtgtcccaacagcttaggagtagcatcaaagagcctgtccctgccaggcacggtagcttacgcctgtaatcctggcactttgggaggctgaggcaggcagatcagttgaggtcaggagttctagaccaacctgaccaacatgatgaaaccctgtctttactaaaaatacaaaaattagccgagcaccccagctactcaggaggctgagccaggagaactgcttgaacatgggaggtggaggagattgcagtgagctgagatcagatcacagcactccagcttgggcaactgagcaagactccgtctcaaaaaaaaaaaaaaaaagcctgtcccttcaaactctggttattgtgaacctttccatgttccccctagtcattgcacagctgtggctccaagcattgcatctgtgttcaaggcagaaacaaggagaaggggtagccctttcacagctgtcatgtttaaccagaaagcaaaagctttcccagctgaccgatctccctttgtgtctggctgaccagaactggaccccttagctgcttggcaaaggagtctaggaaagccaacaacagggatggatggagttgtgttcactgctctaggccagaagtcatgtgccttagcaggggagaagctggagacggcttgtgctgcagtaggatagcattttctcctgaacacagacccccacaagccctgtctcttttcctttgagcagaacatcagctttccaaaccagatgtggtatctcagttagaggaggcagaagatttctggccagtggagagaggaattcctcaagacaccattccaggtgagaaccagacatgggaagcccccacagggaaggggccaactgatgagtcagggaccagtatcttggaaaagcagtagacattgggataccccaggtgggatgctgtgatgagcagttgcagaaccaaactcgaagtttttctctggctccacagtcagcagtgtcctacttggttgaaagtgaacctgttgctggtggcaggtgatacttgtgttgacagtaggggctcccttagtctgttacacgcattgtctactgccctcccctcataatcactggtaaccctggtgtgtatttccagccagactttcttatataggcttacgtgaatgtatgtgaatatatatacacattttgggggtgttataatacagacaagtcagcttctttttgttttggagacagggtctctgtcaccgaggctggagtgcagtggcatgatctcagctcactgc

SEQ ID NO: 92427 - DNA, 1049 bp, Homo sapiens
ataggccaggcaccaggggctcatgcctataatcccagcaatttgggagtccaaggcagtaggattgcttgaggctaggagtttgaggttatagtaagctgtgatcatgccactgcactctaacctggttgacagtgagaccctgtctcaaaaaaaaaaaattaaaaatccttcagcctacgtagagttggctgaagtaaatgacaactctttttcttctttatcaacagcaatttgtaatggtctttttaaggtttgcagatctgatgggataaatacaatatgttcaatttagttcacattttccgcacaacggaccaagttggacatattttataaatctatggcctgtttgtattttttcttttgtgagttcatatattttctcatttttttcttgtttgtgggaattctctatgttctggatgttaatattgaaatatcatatcccagaccatatattgtctacctttatgtagtctctatacagaagttttataatttctttttcttttcaaatatgtctttgtttctgttttagattctgtatcatatataggtagattatccaaacactttagtgtgttgtggtatttgttatatacctcgaactgctgcgctcaagcagtcctcctgactcagactcccaaagtgctgggatcacagcacttaaatttttttctttttagttcagtttatctggaatttcgttttatatatgggtggggttcatcctctgcttattggaaatatcatatttgtcatgggctaaatagctgtctttatatactggcctctatgggctctcccttgatcttttctgtctctgagtaaatgccatgttactgtactttgatatatagtagttccccttgtcatttaaaaaaaagaaaaagtcttagctggctttagcgatctatttctccagatgaacacttattctcagcttgtcagtgttcattgagaaaatcttgttgggatgtgtattacatttaattaggttttcattattactattacctgatcaggttaatcctgcctcatggtct

SEQ ID NO: 92428 - DNA, 1023 bp, Homo sapiens
tagatgctgtccttcctcttctccttcttccacctcacagatacttatggagggccttttctgtcccatgcaatatacttactaaaaacttcggtgataaaccaaagcacttacataatctctaccatcttagacttcatagtctaaacaatgatggccttttacaaacatgttacacagatacagtgataaatgtactgagaaggaaaaaagcctgatataaagaaggggagcagtggggaattacttcagaagacctagtcaggggacactgcaggggtgagattttagccaattcctgaaggaaaataagtccgtggacatataggattggtggtgaagacagcttctaggcatggaggcaccatttgaggtgactgtcagatgggaaagaacttagcatttcgagggccacttcgagcctagtggactaggagtaggtaaaatgaagggatgtgacattgcttttcacagctcactctgggtggctgtgaagaaagaattgtggtatgtcacagattggaggcaggcagggcccgcagttatacttggtaatacctgctaacatgtggtaataagtggcctgagagtaacagcacatttggggaaaatcaggtgtgtgtgattcataggtggactcagtggacctaggtgagtgattgagagggatgaaagaacaagccatcaagaatttctcgtaggtgactgcgtctaacatatttcatacgtaaagtcggacctcctgcacataacaaaatccacagatgctcaagtgcccaatataaaatggtgtagtgtttgcatatgacttactcacatcctcccatatagctgaagtcatctctagattacttataataccgaatatgatgtaaatgctgtgtaagtagttgttacactgtttagggaatggtgacgaggaaaaaaagtttgcacatgttcagtacatttgcagccatcttttatatatttttttgagttgaggtctcactctatgtatcacccaggctgacgtgtagtggc

SEQ ID NO: 92429 - DNA, 2346 bp, Homo sapiens
aggaaaggaatgcagggaagagactattatgaaggtcatgatttaggaaaccctgcagggcattttacattttttacttgtcaagaagttaagtagaggccaggcacggcggctcatgcctgtaattgcagcactttgagaggccaaggtgggcagatcatttgagctcaggggtttgagaccaacctgggcaacatgacgaaaccctattgctacataaaatagaaaaaattagccacacatggtggcgtgtgtctatagttccagctacttgggaggctgaggtgggaggttggcttgagcctggaaggtggaggttgcagtgagctgggatcctgccactgcagaaaaaaaaacaaagttaagtaggaaatgagtcctacaaataagaacttagcagcttttttgaaacatagaccaaacatgagtctgaaaaataagtttgatgaggtgagtgttttattgggaggaagaaagccaaattcttcttgagattccatcctttgtatagcttgagagggtcacataggctatagagtgatcaacagcataccattcttttatccaagaataagatggagtaaatgtgtttagtttgaaaaaattcactttcagcctgtctttgccctctttaatgtttttgccctctttaatgtctttgccatctttcacgggacattaaccagcaaacaccccaaatgaagtaagtccttttcatgaacttttcaccatctgagaactcacacagggaagaaacctcagaaatatgatcacgtgaggaaagacttctggcctaactcagtcttatcttgagaggattcatactggaaaagttcttacattgagtattacatctaagagcttctgaaaccatgagaatataattgctgtgggaaaggttttatgcatagctcccttattcagcatcacagaagttgtactagagattacctgagaacatagggctgggaagccttcgggtgtcccagaactcactggcaaggatccctctctgaacacagcattttgggaaccccttcagtaggagtcctcattgttttcagcatcagaggactcatatgggcaaacatcctgtgaatgaaatctgtgcagacaaatgaccagccttaactctcaccttatgtgacagaacgaaaaaaatatacactgaaaagaaccccgttgaataataaaaatgaaatgtctcatcctatttttatatcatgtcgtagagaaggcaaaccctacataaaacactgataagtatataaatgtagtcttgtctcttctaatttgcttattatctgacctgaacatctagaacaaatatttaaaatatggatgagagcaggtgttcttttacttctgtatgtccccatttgctaacacaatgactgaattactaggaactcagtacataacgttgagtgaatagatgtctgaagaagttgcaggagacaagaatatgtcttcaaagagaagactgaatacaaggccaggctttgaaacaaaagggtaggtaagagagggtaaaggaaaatcttgagagagtgctacaaagaactctgcggggcccacattcttggcaactaggttgagtctggaatgttgggtggctgtcaaacatgttttggctggaattcagtgaagcagagtcatttcatgctttgtgatcttttattgaagaacactttacattctctgccacctcccacatatctgatctctaagacctgtgtaaatcgtgatcctcttatctggggatcactctccctgtgttctagggcttgtactcagggataacttcaaagtctgaaatgtcttaagtagtaattaagaaggaaaacaaacgaactaagtgtttgaagcagacatttttggggggaaagaaaaataccatcaacagtcctatagaaagaggaacaatggctttaagaaaaaaaaagaagaataaatgagtcagaaatagagaagaaaaaaatattccaagagctcattttctggataggcagaatgccaaaatgactttgagtaagtaaagaataaataaccaaccagtaaacctatacaggggaaaagaacctgtacagatattttacatgtagtttttagttacagtagtttgcacagctgttacaaagaatgagcaacctctttatgtattgatttgaaaccacatgtgtgtacttaaagtatatgacattttaatatataaatatacataaactatttcttaaaatttaagtgtgcttgctttggcttcacatatactaaaattggaacagtacagaagatgagcataaaaatttaaaaataacaaaatacatagtcaagtgcgaacacaca

SEQ ID NO: 92430 - DNA, 2825 bp, Homo sapiens
atcacaatttgcttatacatccctcagttgatagacaatgggttatttgtacttgttggctattatggataacactttggtgaacattcttatagaagtttttggggacatatgctttcaattttcttagctatatatacttggggggaatgtctgggtcatggataactatgtgtttaacttctgaggatttaccaacctgttttgcagagtggtacagcattttatgttcccaccaacagtgtgtgagcattctagtttttccacatcctctcctgttatcatctgtctttggtaacagccatgctagtgggtttgaagcatattccactgtggttttgacttgcatttccctagtgaataatggcgttgagcatcttttcatgtgcttgttctcatttgtcttgctctgcttttgacttacagagtatcctgagctccagctggaccctaaattggatcctcttcctgctgagagtcccctaatgaacattgaggttgttgaggtcctcacactgaaccaggaggtggctggtccccggaatgcccagatccaggccctatatgctgaagatggaagcctgagtgcagatgcccccagtgagcaggtccaacagcagggcaagcatccaggtgaccctgaggccgcgcgccagaggttccggcagttccgttataaggacatgacaggtccccgggagccctggaccagctccgagagctgtgtcaccagtggctacagcctaaggcacgctccaaggagcagatcctggagctgctggtgctggagcagttcctaggtgcactgcctgtgaagctccggacatgggtggaatcgcagcacccagagaactgccaagaggtggtggccctggtagagggtgtgacctggatgtctgaggaggaaggtaagtagaagggtgggtagagggacagcttaatgagggtgtcttggagtaccctgtgggggagataagaactccaggcttcctaggaaggtcatgggaaggattgtgtccgctccatacagaccaaggacatccatgttgcccacgtgttcctgagtcagagccactgaaacccttgcattctttagcccttcgtgggcttctgatggaagcacacagatgaagtgcttcatttttatccctctggcatccctgctgcaccataagccctgtagcacttgataagatagatgggaatactgagctcagagagcccgcagtagcaggagagacagggatttgacaaatgagaatgcatagaaaaatgctgggactatgaggagctcgaggtgatggtgaggcttatgaaggtctgcagctgacacctggtgtggagtggaacttggccagggtaaagaaagggggcaggaaagatgtgccatgcagaggggagcactgcctgtaagggccaagatggaagggatcacagtaaatgcaaaactcagaaaaatcggttatgtttgtgatggaagggagcagaggttggagctggcactgccagtggggactttagtcctaaagcaaagcaaaatgttcttctaaaacagtagggctcgatccctgagttccagaaactggtggcaccactggatttgacctttagagatttaccaggctgcatgtgtggtggatggtggacagaggatgggggcgaggctggacacaggctacccgcagctattgccatgccctctgatggggtggtgtcttggataggagtgatggtgatgtctgactggggagagactacacgtgtggagtgtgtatttgggaataagactgcaagacttggtttcttcatcaggctgagtttcacagagcgtgcatgcttctgcattgctcacctccattttccacatttcacgggtgcccagaagatgtttctgatgtgaacgaatgattgactggttgatgtttgtgattgcaggaaaggggaaggtatcctgcagggggatggtgggattctaagaggccagggcatcctggagatcgggtatccgaggcagcagggcaggcacttgcatgagttgtgtcagatgcaccaagtctggggtgctgtacttggcagaataattgccccaaaggtgtccatgtcctgactcctggaccctgtgaataagttgcctcacatgacaaaggggactttgcagaaacaattaaggatcttgagagggagagatgcactggattatttgagtggatctaacataaccacaggggcccttaggagagggaggctggagggtcagaggagatgtaatgataggagcagctgatagaggaagaagccataagccaaatgtttggggcagcctctagaagctggaaaaggcaaggaatggattctcccttggagcctccaaaaggaacatagccatgctgacaccttcattttagcccagtgaggcacaaaccagacttctcatctccagaaccataaggtaatacatttgcattaatctgagccgctggcattgtggcaattcactataacagcaataggaaactagttagttaggtgccaaggagacagttgtggggttaatgaggtgaaagtcagtgaattcaccctgtgtttaacctcaggggtgaataaaataaattagtgccacagaagacaatgggaagaggctttccagagaaccctgagaatctcacattatgtgatcagtgtgttagttgggacgcttgagtgtgactgctgcaaagccttgcacagaatggctcaagggagaaggagaatttattggaaaagttccagggtgctcgagcatcaggcagggctggacccaggagctccaatagtgtcctccagac

SEQ ID NO: 92431 - DNA, 1030 bp, Homo sapiens
gtcatggagccacagtacgatgcaggggtgcggtggccccatgggttgcagagaggccacccttgccctgcctaagggtccccacacctgctgacctcctctggctggtgtctcctcccagtacttcctgcaggacaacctgccgagggcaccacctgctgcctcgaggtcactgcccagcaggaggagaagcaggaggatgcagccatctgcccagtgacagtgctccctgaggtaagcggggagtatcaccctgttttggtcacagcatctcctgtgaggcaggcccacccctgaggcatccactctgccctgggctttcctaagacctcccacaggctgggacattctgagattctgagctcttaggtctgtgctgaagcaatctgagtatgaagagcagccctgccctccagccactgtggcatcactggagacaacgcatggtgacccgggagctgagaaagcaggaggcaagagggaagggactaagtgtttacagagacttgagaggtggaactaccacaggcaggcacatctgtatccaggtcagaacaagagagccctcaaccttcagaaatgcatacttaggtatttatctttggtatctgggatttgcttcagaataacccagagctggggtgtgggtgaaaaagattggtcctgatgcgctgaccactggggtagtggtatgtatgtgtcattggtcagacctgtttgcactgcaaatggcttatactggctcaagcgtagaagtcaatttattggctctcatgtattctctggtaggcttcaggcaaggctgcatccaggtgctcccaggtgatgggaagaatctctggccaacctgtttcatggctctgctttctcccctttcttcttctttttttttgagatggagtttcactcttgttgcccaggctggagtgcaatggcgcgatctcagctcactgcaacctctgcctcccaggttcaagtgattctcctgtctcagcctcctgagtagctgggattacagacagctgccact

SEQ ID NO: 92432 - DNA, 1838 bp, Homo sapiens
gggttggtgtctctgagcaaatccccaaagcaggagagtccctagcaccgtgagctctgtcagaacctcccagctggcctttcttctgccctcattgacaaccctctgaccctcttgctgagcatagacacatatgtgatgttacaggagccagtgaccttccaggatgtggctgtggacttcagccgggaggagtgggggctgctgggcccgacacagaggaccgagtaccgcgatgtgatgctggagacctttgggcacctggtctctgtgggtaaggctgtgccccctcttcacccacctcagggctggtaggccacaggagccccaagtcaggggtgttcaccttctctagactccacactgggcattccctcaaggggcccttgctgcatccagggcctgtaagtggaactgtagacctagaggggtgaggtcactgggtggccagaagcagccttaggtccggtgaaggagtgatttgctatctatctcctgagggagtatgagagaacaggaactcgaagagctcggaggacactccctgcccttcctgtcccttgttcaccaaggtcagtgctcccctccctgccgcttcattgcttttcagtctctctccaggttgcatgactctatttgggagaaaaaaaaaatcctgacttttgaacttaattatgcatttcatgctctcagacccatcccagcacatctctctatgggatccacatcttttgtttatttttttcagggtgggagactacactggaaaataaagagttagctccaaattctgacattcctgaggaagaaccagcccccagcctgaaagtacaagaatcctcaagggattgtgccttgtcctctacattagaagataccttgcagggtggggtccaggaagtccaagacacagtgttgaagcagatggagtctgctcaggaaaaagaccttcctcagaagaagcactttgacaaccgtgagtcccaggcaaacagtggtgctcttgacacaaaccaagtttcgctccagaaaattgacaaccctgagtcccaggcaaacagtggcgctcttgacacaaaccaagttttgctccacaaaattcctcctagaaaacgattgcgcaaacgtgactcacaagttaaaagtatgaaacataattcacgtgtaaaaattcatcagaagagctgtgaaaggcaaaaggccaaggaaggcaatggttgtaggaaaaccttcagtcggagtactaaacagattacgtttataagaattcacaaggggagccaagtttgccgatgcagtgaatgtggtaaaatattccggaacccaagatacttttctgtgcataagaaaatccataccggagagaggccctatgtgtgtcaagactgtgggaaaggatttgttcagagctcttccctcacacagcatcagagagttcattctggagagagaccatttgaatgtcaggagtgtgggaggaccttcaatgatcgctcagccatctcccagcacctgaggactcacactggcgctaagccctacaagtgtcaggactgtggaaaagccttccgccagagctcccacctcatcagacatcagaggactcacaccggggagcgcccatatgcatgcaacaaatgtggaaaggccttcacccagagctcacaccttattgggcaccagagaacccacaataggacaaagcgaaagaagaaacagcctacctcatagctctcaagccagttgaagaaaccttgccttttcagcttgaccctgcaatataacatgcacaggcctgcttgtgaatcaggactgaatgtgaaagggaagtattgagt

SEQ ID NO: 92433 - DNA, 1102 bp, Homo sapiens
tgtgctacgcccccaggggcgacttccggtcattgcagcaccgtgatgtggatccgcaagtgaaccatcagggctgagctacgactgaaggccttcccacagtcgctgcacttataaggcttctctcccgtgtggatcctctggtgctcaatgagggaggagctctgtgcaaaggccttcggacaaaccttacactgatatggcttctctccagagtggattctcagatgtcggatcagggctgagcagtcgctgaaggctcggccacacgcgtcacacttgtagggcttctccccggtgtggatgcgctggtgttgagtcaggtgcgtgctctggctgaaggctttcccacacgcgtcacactcgtagggccgctcccccgtgtgcacccgctggtgctgggtgaggtgagtgctgcggctgaaggttttaccacattccccacatttgtagggtttctctccagtatgaatcctttggtgctgagtcaggtgggtgactcggctgaaggccttcccacattccttacactcatggggcttcgcccctgtgtggacaacctggtgctgggcgaggtgagtgctccggctgaaggctttcccacactcgctgcaggcatatggggtcttccgagaatgggtcttctggtgtgcctcgagcgccgaagcactctggaacatcttcctacactcgcgacacttggaggacctcttccctgagtaggtgtatggaggctctgtcccataagcatccaccagatcaaatttgtcttctgaaggaggcttctcttgggaggtgaggtttggccacgcactagaactgttcctcgaggcaccagattcacggccacgctggtctgtggggacatccttgtaaggccctgaagttttcttgaagtggatctgttgggtgacagactttgtccagatctcccctgatagtccagacctctctgagctgccctcaggttcacatgccttgacaaaggcgggtccaagggaaacacctcccatgagggtctcagtgacatttgatggctctgactctcccaggtcactctgcttgcagcttgcctctgtgggctcggctcctggatcccatc

SEQ ID NO: 92434 - DNA, 1048 bp, Homo sapiens
cacgcctggctaatttttttgtatttttagtagagatggggtttcactgtgttagccaagatggtctcgatctcctgacctcgtgatgtgcccgcctcggcctcccaaagtgctgggattacaggcatgagccaccatgcccggccctcttctgtctcttataaggacacttgtcattggatttagggtccaccctactaatcctagatgctctcatcttgggatccttgactaaattacatctgcaaagatttttttccaataggtcacattcgctgggtctgggtattagggcatgaacttacctttttgggggccaccattcaatccattacaggtgggcatcccatagaagcagacagtggctaggccaaagtagcccatgaagtatcagccatgggcacaagatcaagtttgggatgcggcagggccaggcttggctctgccaggcaactgggtggactgaatccagcacactccaaacgagttgataatcaggctggggacttcaacagacaaccaaggtgccagtaaaggcattaaggagctatcacggccaggtgcggtggctcacacctgtaatcccagcactttgggaggccgaggcaggcggatcacgaggttaggagatcgagaccatcctggctaacagtgaaaccccatctctactaaaaatacaaaaaaaatagccgggcgtggtggcgggcgcctgtagtcccagctactcgggaggctgaggcaggagaatggcatgaacccaggaggcggagcttgcagtgagccaagattgcgccactgcactccagcctgggcaacagagtgagactccgtcacaaaaaaaaaaaaggagccatcacaaggatgtaagatcagctaacagtaagactgtggctggtagggtggacaggcaaagtgactgcctggagagtgggcaggtggcccagcagggcccagagggtgccttcccagaagtgaggagtccagtctggggccggccactcaggatggacacaatgtaccagaagtgaggtagatctctgcagagtct

SEQ ID NO: 92435 - DNA, 1942 bp, Homo sapiens
ctgcggagggcggcggtgaccactgggcctcactccgctaacccaggtccgcatcaggcgcgtgccggtgaggcggctgtggccgcggcgaggagtcagagggaactgaactggctactcccgcggcaggtgggatttaaggtcagcagctgaacaaagaagcgagcgctggccagacttttttctttattagacatggctgcgttggtctcacggaaatctctgcgcttttgcaggcgcccacaagacagggcaactacggggtagcggacatccgccaggcacgcttctagggccgcttctgcaactgcgcatgcgcttgggctgcacccattccgtctagcccaaaaggttcctctacaaccttcctccggattggtctatagggacacgatggccttttacgcaagcgtcacccgtgctgacccggaagttttcttcccagttaaaagtgttggcccgcggcgcgcggcctcttcctgtctgtaccagggcggcgcgtggtctacgccgagtgacagagacgctcaggctgtgttctcaggtgagaccgccgcggggccggggatcctagggacggttcatggtctttcggggatagtgccccgcggcctgggccttttctcattaggtctcatttctgtctctggaaaagaaaatgtagaagaaacgggcgcgggccgagttactcttgacttctttctggtgctccgccgcttctagcttttccccatagcggggcttggggaacttggtttgaactatgcggttgtactctgagataggaagtttccatttcttagggacacgatgccctcttttgctctgtgtaactttccccccgtaatagcagcccctagagccttcatactgtcggtcaagaatcgaaacctttgggttgattgtgccacacggtacctaccgtggtccttgatgtcatataacggtcccgcctcacggccaaagaaacagtccgagacggaacgttgacttgggtcaaagaccatgtaaatcgcgagattgtggtttgaattacagcccatgcagtgtgaggacgtatggcatctgctgagccattataccttggtcccagtgcagcagctgttgactggtggctgccaagtcttgggcccaggggttctaggtgaaagacagatgcttcttgctgacagctgagtaatttttctagtgcttgaaaacacgttcacggcctttcttggtcctttgcgaccccccagttcatcactagatggcggctagcctcagagttgggaatgagtgcgcctttgctccatgctagctgagctctgacgtttttttcctgtcatcaccctgtcccaggatgaccgagtgggagacagcagcaccagcggtggcagagaccccagacatcaagctctttgggaagtggagcaccgatgatgtgcagatcaatgacatttccctgcaggtgaggggaacttggtgattggccttcctggctgggggcggacattattccaggaaggcacacatcaaacttgttgctgtgccattaagtcaagaatagagatcataacaggtaaagaagggatcccttgaccaccacatctaccacatctgctcttacgtcctgttcaaagatgactacaacttctgtcatgagaggactccttcaccagaaggagcatcacatctcacatatggtatttttgttactgtttttgtagtaaaatacataacatccagtgtcattcttttgcatgtgaatatccagttatccagtaccatctcctaaagagatgttttttttccctcaattgaatggccttggccacttgtcataaatcagctggccgtagttttttttttttttttttttttttgagacggagtctcactctgttccctgggctggagtgcagtgacgcgatctgcctaccgggttcacaccattctcctg

SEQ ID NO: 92436 - DNA, 1535 bp, Homo sapiens
gcctggccaacatagtgaaacctgtctctactaaaaatacaaaaaaactagctaggcttggtggcaggcccctataatcctagctactcgggaggttgaggcaggagaaccatttgaacctcggagtcgtaggttgcagtgagctaagatggcaccactgcacaccagcctgggtgacagtgagagactcaaaaaaaaaaaaactgaaggggttgccagtggcataccagatggctgttaaacatcctatagtgtgcaggacagccccccagacaattatctggtccaaaatctagtctccttagattcccactcttccattacgaaggaagtgtactttttagcgacttggtaaagtcacctgttcagggtttttttcctcatggtggatggggcttacatccaagtcccctgttgaggcataccaggatcccagacagctgttggactaccccgaatgggtacttgatctctcctctggtgtctggccaacgcccatgctgctcctgaccattttcccttcatttcctgctccctgctgccccaggattacattgcagtgaaggagaagtatgccaagtacctgcctcacagtgcagggcggtatgccgccaaacgcttccgcaaagctcagtgtcccattgtggagcgcctcactaactccatgatgatgcacggccgcaacaacggcaagaagctcatgactgtgcgcatcgtcaagcatgccttcgagatcatacacctgctcacaggcgaggtagggctctgtggcctggtgagggcaggctgtgccctcagtacacccgaaagccccacggagtgtatgtcaggcttatcccctgtgtggtgtggtcactcttgttttaggtatgaggaaaggggaggaatgcatggggctggatgtcaggctcatatcccccttctctctagaaccctctgcaggtcctggtgaacgccatcatcaacagtggtccccgggaggactccacacgcattgggcgcgccgggactgtgagacgacaggctgtggatgtgtcccccctgcgccgtgtgaaccaggtgagcctggggcttatgcacgtggcagggtggacacagccacgggagtgggtggggtcttgcctggggcaggaaggctcctctctgtctgcatgttttacctgcagcatcacttcctctaggaagccttcctggattcccaccctgcataggggctgatccaggctctgggtcctcttcgggaacacatttggcagaggtcttctttctttcctttgggtgtatatttttacactgtgtgtatatgtactttttttttttttcttggacattttgagaatcagttgcagacattttgattgtgttttccctgaacactgcaggtgtctttaaaaacaaagatgacctacccccgtcgtcacccccaggaaggaatttatattcacagcaatagtcgttgttccatttagcatctgtccccagaatgccagaatgccctttatagtggcgcattgtcaattgggtccaagttaaaa

SEQ ID NO: 92437 - DNA, 2104 bp, Homo sapiens
gggtgttcttgaattcctggtctcaaatgatcctgtcccctcagcctcccaaagtgctaggattacaggcatgagccaccacacctggccgccttttttgttgtcgtcggtttttttgtttgtagaggtggggtttcaccaagttgctcaggctggtctcaaactccctgccaaagtgttcctcctgcctcagcatcccgaagtgttacaggcgcaagccaccgtgcccggccgtctagcagtttgctgttgaggcaggtctcaatctcctgtcactggggacgcaacttcagcctgtgtgtgtgtgtgtctggacacttgctcttgtgaccctctatctgattgcaaatcaggcatgatgccaccacctcttgtctcagtgggcctatgggtgacaacgtggctggcagcatcagttgggagtggccccagggtgctggaggaccgcagtctgtccttctagcctgacccctgctgtcttcctaggccatctggctgctgtgcacaggcgctcgtgaggctgccttccggaacattaagaccattgctgagtgcctggcagatgagctcatcaatgctgccaaggtgggtgagggcactccggttggggggtcttaagttgggcatttgtgggggtccttcagaattcagagctgtgtgtctccttgcagggctcctcgaactcctatgccattaagaagaaggacgagctggagcgtgtggccaagtccaaccgctgattttcccagctgctgcccaataaacctgtctgccctttggggcagtcccagccacctgtgctgttgtctgtcttcggtggggggatgtgggtggcatagccctggtggccttgggagctgctcaccttcctgacctgttggcctgtggggacctggaagtattgctgactcagaaccatggcaccccagggctagcaggtggggcactggatgcaggccaggctgcctggagtgtcccagcaggtactggaaatgagatggggttatccataacttctgagggcgtggcacatgagatgttgctgtggtctgggtggatgggtggcttgggtgcctgtgaggtctgggtagtcacaagaccatcctgagaggcttgtcaccttgaagtagcactggggagaggaggaaagctcagctgtttagggcacacgatttcagacccctagcttcacccccctcttggagtgtggggtggtttcacactggcgaggttgtgctcctggttacctccccggctacactggttgtggctgcaccctgggcctgcacacccagtttctgtgggctgtacgggttcccttctgccagtgtccatgcagtgtcatcaggctgctggggacaggttgggacccacccagggccacaggctggtgactctggtagaagactcatcaggttctgaagggtggggtgggcccaagcccacccaccgtgtgccatcacccttccaccgcccccaacatctggccaagacaggcttggtgttcatcctggtggggctggcccagggggcggggcaggcagtcaaacgggtccagcgggtacctgggacctggaggggtggtgccggttgagcaccctccccctgggagggtacttttgagcccagctgctggcaggccaggaacagacagggacacgccactggccagagggaggaggcttccacaggtaggaaggcgcccacaggctggctgcggtctgtcattactctgtggggggtgcctatctctgctcctctgtgggtcaggtcctttccatccctgtctggggtcctccccatctccgtgttcaactgcggtctgtctctccgtttccaattcaggaactggtaccccgtgggtccattcctatccccagtctccgcctcgggcctccccatctcccctgctcctcgacgctagctacacccttctcgggatggggtgctctgtactgggggatcctctctaaagtacagtccccagtcttccctggattccctgctggtctcagaacccgctccaggctccaccgcctccttccctgcctgacctcctctcctcccaggtccatccggatgccctgccctcggccgttctggc

SEQ ID NO: 92438 - DNA, 1038 bp, Homo sapiens
tggggcttgctcctgctccgcaacccctactccgtgggggtgcagttggaagcatccctgatcctcatcccttgtaggagtccagctgtggacgcccccgactgacatccatgcaggtgcccagccaggggcagccccacacggatccttgaacgggtcttgctgggagtgcccccagtcatcctcaccacagattcctgggggagcgtccttgccagcactggaggccaaagcactcatccttcggattggccataggttgcaggggcccgcctatctttggagggcagagctgctgctgctattcttccttggtcacctcctccccaactggctcattgcaggggacgtcccaccactccacccatctgtggagtttgttttctactgcctgcaggctgggcctgggtgggctccagctgtctacatgctggtcccgggtgtagagttgccatcctgtacacctggttggggctggggctcaggcttgaagtaacagggtgtcctggccagggctggggaggaacttgagccttaaagactggctcccgccccaatcctaagtcccaaactgctctgggagcctccacttccccctgggtcgtggcttctaggatcctcccaatatgctgtggtgcagctgtgcttatcatggctcagaggccaacatcaccccaggggtcagacagaggcagacaatggtgggggtgggagtcctggacctccttggttagccagagggatcctagtccctttccctggccaccagagtccccatcacccccgattaatatcttgatgccagttactgcacttcttcctccagggctccatctgtcctgcccagcctcctttcttgtacctcgaggtgaaccctgagccttcccaatagacagcagcctccagggaaggtggcatatgggctcctgtcctcttcctcccagaagtcttcctgggttagttatgggggtagatggcagctattctctgtgcagactgaacctggggcttctgtttcctcccaggccctgcacacca

SEQ ID NO: 92439 - DNA, 1107 bp, Homo sapiens
cagctgctgcgtgccacccacgtctccacactggctgttccaccccctccctttccatagctcactcccttctcccctggtgccccgtcttgggcacccactcccaaacctgctcttgcaatgacctccaaccaatgctcaagactgcactcctgaatcctacgtactcactgcgtctcccctagcaccatcagccccacaaaggcaggaccatgagtgtcctggtcaaggctgtgtctacaatgcccacaagccctcaggaaacatttgatgaatacaaagataaatgatgggcgaaataaatacctatcaataatggctgctagttgtggagggttcaaggccacacagcccagctgaaggtaggcccttctgtgtgaacccagctcctgtgcccttggagctctcccttcaagggcacctactaaggcagcagcctccaggagaggctgatgatggaagagaagggagtcaggtaggaggcaggagaggaggatgtgtttccagagtcagaaaagcagggacatgggcttggccacaggttggtccttagttcaccccacctgagctcccactcaccagagttgagcctcccgtaggtgttcctggccagggtcatgtcctttccactgggaacccagggctcctcgccacgctcaagttgaatgaccacacgaggtcgggaggtagagagtcctgtgaggaggagcaggtgagagcccagccccaggtcaagacaacccacctcccaacagagagcaggagtcagggcttcatggaaatagacagtaatctgtgcaactgggagaatctaaagatagcacagggcaaggggctcataggaatagctcatgtgtccccagagcagcaactgtgcccagagcaccaaagcaacgggactgagcccaggcatgagagaggccacagctggacagggcggcaaggagtggctgacccaaccaaactttgtgtctacaggaccagacccttgttccacgtggccctggccagatttgatcctgctcatcaaccaggagggaagtgaagaggcagtcctgattgtcaccaagtgcacttttcatggagcacccagggccttaccaagtg

SEQ ID NO: 92440 - DNA, 1055 bp, Homo sapiens
ggtctgggttcccttctatggctgaccagtgcctgtggggtgactgccaagcaccaggctccctccctccctgtgacatggcctgggctgacaacactccctctcctgggacctccttgcctcaggtgggtgttcaaaaactgtgccttcccactcgtctgtgcagaggctgggcctgaggtctcagtgtggagagcagcagaagacccaggaaagcacagttggcttccgtttctcctgctccctgtgtgtgttagaattttaacataaattccactttcataatatggagtttctgaataagaatcctgatttctggcttctgctggtcgggaaataggcagtttgctgtctctgcccagtagctgcagcacagggcagttgagcccagaacggccaaacctctgttgccacagaacccaggtcccaggtccccagcctcccttgctccttgccgcccacatcactcaccagcctcactggccttggaactcatcagtcccggcttgagagacacaaaggggatttcctttcgaagtacggctggacaagggggacctctgagaagaggggctgcaagcaggggttgcgccaaggccatgggtacttctaggtcaggccgcaccctccatagttagctggtcatgcagcaggaaggcaaaaggtcagctccctgggaagcaccggatctctgggcagtcactggggactcgccaatgcactgtattagttttctgttgctgctttaacaaacttggcagcttgaaacaacagattctcttatagctctgaaggtcagaactctgacatgggtcccactgggctaaaatcaaggttttgttttgttttgttttgttttgttttgtctgagatggagtctcgctcagttgcccaggctgcagtgcggtggcacaatctcggctcactgcaagctctgcctcccgggttcacgccattctcctgcctcaacctcctgagtagctgggactacagacacccgccaccacgcccggctaatttttttgcatttttagtagagacggggtttcaccgtg

SEQ ID NO: 92441 - DNA, 1021 bp, Homo sapiens
ataggcgaggggggccaggacccagtgtctccctgtgccgggtgggtaggggttgagggggagggtacctgagggtagagggagatcccagtgggcagtccagatggccaacagatgttccagacaggctgggttccttgcagacagggtgcttgctggatttaggggtgccctgtcacagtgatatcccaggataacagaaagggggtccctgccaggaagggatgggagaggggtacctcacagtgtatgaggatccctgttgggcaggaaagtcccaacgtgaagggaggtcctggagaggagggggtgtccctgctgggcaggaagatcccatagtgaggggagggttctctgataggcaagggatcccggggtggtggttcgggaggggaggggagcccctgctaggtccaggagcccaggtgggggtggggtggggtgggggcggggagctgtagagtctgacttgcgttcgcggcccgccctgtcttccgcaggggagaagccgcaccagtgcgccgtgtgctggcgatccttctctctacgcgactacctgctcaaacacatggtcacgcacaccggcgtgcgcgccttccagtgcgccgtctgcgccaagcgcttcacgcagaagagctcgctcaacgtgcacatgcgcactcaccggcccgagcgcgcgccctgccccgcctgcggcaaggtcttctcgcaccgcgcgctgctggagcgccacctggcggcgcaccctgcgccctgatggcgctggggcctggcctcgcccacggtggatccggggcctcccgcacagtcggccacgcccgctgcgggacccgtggttcccgccactagaccacgctccctcctgagcgcaggtcctctctctcccttcaccctttctccataccagggcctaagtccgccttactcctctcctccatgtacttgaaccctccaggtggtgccgggctggggctggggctggttagaccacttctgagaactggactatttcctgcgtaaa

SEQ ID NO: 92442 - DNA, 1052 bp, Homo sapiens
gcttcctcactgctgctgctgacagcgcgtgcgaggagccccctgcacccactggcctcgctgactacagtggtgccgggagagattttcttcggggagctgggtcagctgaggacgtatttccagacagctatgtatccacttggcacgacgaggatggcgctgtccccgaaggctgtcccactgagacccctgtccagcccgactgcatactgtctggatcccgcccgcctggtgtgaagaccccagggccgcccgttgcactcttcccctttcacttgggtgcccctgggccacccgcaccacccccttcagcaccatcggggccagcccctgcgcccccacccgccttctaccccacactccagcccgaggcagcccccagtactcagctgggggaggtcccggctccctctgctgctcccaccacggccccctcaggcacccctgctcgcaccccaggtgctgagccacctacgtatgagtgcagccactgtcgcaagacgttcagctcccggaaaaactacaccaagcacatgttcatccactcgggtgagccagggcgggggaggagagggagcaatctctcatcggagagttaaacctgagggggaattgagcactagttacagggcactggcactgttctgttacttttggttagcagggggcctagaaattgagccttcccccaagtgcaaggtatgtgggggaggggaaagccccactctgtggagcagcaggcactggcttctgtggagggggatcctgaggctgggtagggaagcaggagcctgtcctggcctttggaagggtggtggtggaaacttgagcagcctgggatgcacatgatgggtatggagccttggcaggaggtcctggcaggttgggaaactatgctccagggagcctcctgtgtctctctggtttccagctgtcccgttataggctggcagcaagggaggatgggtttacaggcccaggggtagaaagccctcagaggtggtgggatgaaggccccaggaactcctgagactggggcatgagtagga

SEQ ID NO: 92443 - DNA, 1044 bp, Homo sapiens
agggccagggagcggggtggtgtatccggatccgtagtctggaaaagctccctctggctgccgtgtggggaacagaaggggaggcgaggggcgcagagacaccagccaggtttcttcatccgtccaggacagcgggaacggggcagtggaggtgctcgaagtggtctgagggtcaaatgtggggcatgcaaaaaagggaggcgtctggctgagcaaagggacggcggattgggcataaggagtcggaggggttgaatcttgagaccccagtagagcccgagggtgtaggggcagcatcaagccgagcccaccctggggctttgtgactccaagggagagacaggctggtggagcctatacggatgtcagagtccagagctcctaccctcctcccttagactggaggtgtgtgcagtctgggtgcgggatgagccgagtatctcatcccttgtttgatagaaggggaaacaggccgaaggatcacggtttacctgcttgatggatggagtagcagaactcctcagattccagagtcctctgaggactaccccctcccctttctggtgcctgatgttgggccgtgtccccgattactccatgggcagctatccagtcacacacccctgctcaatccacacttcccctctctgtgccacacccacaccctgggccccacaggccccatcgagatggcaagaagctggggctgcaggagccacctccctgctcgctatgctaggggctgccagggagcatgtactggtttccctggggcatctcccaaggtactgcccaaccttttaccctcagcccttagtgactaggcacacccagaaccaccctgcccaggaagcaggtcatgccaccccactcctgcgagagcctctgtatatactagttaaggtgacctggttctgaggcagcaatcctgcctatgcacagggtctcatactggggggatgtggctaaaggaaaccaaaaggagctgtcagcaggggtggaggaggagtggaagctagctgggtagagagcaaggtctactcg

SEQ ID NO: 92444 - DNA, 1106 bp, Homo sapiens
ggaattacaggcgtgagccgccgcgcccggccacatttttctccatctgtggtctaggctggcgtgcagtggcacaatcccgcctcactgctgcctcggcctcctgggctaaacggagcttcccgactcgcctaagaaagtggtgggattacaggtatgagccacggcgcccggctgtgatctacatttgattcagtcaagtttctgtgtttctcaagtttaactatagcgtggttaaaatccaaaagtcagcacccgagctcacacaggagcttcctccctcttgggatggagactctcctcccctctccctggacacagcccttcactcggtcttggccccgcctacttctccatcggccctgccccctatcccgaactcttagtgacgcagaggctggagacgactctacggcggcgaagagacgcgggttgaggaagagggacggattgcccatgcgcttgggcgcacagcggcccgcttctgtgtggtctggaggtggagctgagaggggaatcacactctataaaggttcgcataccccactggcggattcaattgcggcagtgacgtcacagaggccccgccccgcccccacaagagccccaccgacgtggggttggcggtggtggaaggactaggagttggcgcgtgcgtactggcggcctctcccgcaccgaccggcctgggccccgcccccgggcgtgaggcgcccaatgcgcgtgcgcggcggcgtcggcgccagttatttctgtcccgccccccggcctcggctctttctgcgagcgggcgcgcgggcgagcggttgtgcttgtgcttgtggcgcgtggtgcgggtttcggcggcggctgaggaagaagcgcgggcggcgccttcgggaggcgagcaggcagcagttggccgtgccgtagcagcgtcccgcgcgcggcgggcagcggcccaggaggcgcgtggcggcgctcggcctcgcggcggcggcggcggcagcggcccagcagttggcggcgagcgcgtctgcgcctgcgcggcgggccccgcgcccctcctccccccctgggcgcccccggcggcgtgtgaatggcggcctccgcggcggcagcctcgg

SEQ ID NO: 92445 - DNA, 1313 bp, Homo sapiens
gcagagatgaggatgccacctgggcgagaggatgggggcccggacagggcacgggaaatactttctgggtcctgcatacgaacgtgggtttgtgctggccgctgagatgggacatctgactaaagttggagaaaagaaggctcggggaggggaggggctggttcgctgcgggataatggtcgggggcccacccagcaggggaatggtgggggccataacctgggtgggaacttgtaacagtctcccacatccctgcttctcgaagtggtggactgtcccgtgtgcaagcaacagtgcttctccaaagacatcgtggagaattatttcatgcgtgatagtggcagcaaggctgccaccgacgcccaggatgcgaaccaggtgcgtcctatctcagcaaccacaaggaggtttctggggagggggcatctgcgcaggaggagcttggcaccagctccaggctgttactccactttcccaaggctctgggtgggctgcctaggttgggtcaagggaccaatcttaaatctccggttgtattttctgggatgtaaacgtggatctatcaagttgtcttgccttctctgaccctgcctttgtctggcagtgctgcactagctgtgaggataatgccccagccaccagctactgtgtggagtgctcggagcctctgtgtgagacctgtgtagaggcgcaccagcgggtgaagtacaccaaggaccatactgtgcgctctactggtacatgaggctgaggggggctgttggagttgttctcccatgtgtgccctcagttgcttttatgatgttggttgcatctggtggatgggtcctagagttctctagggggtgccgcccgaagggcccgagggcagaactccagaagcagaaaaactggggttgtggtgtgtagtctctagggcctaggtgggagagggtgggaaggggaaataagggagaccttaatgtgctgcagggaggtacaaagggtttgagaaggcttatcagggagttgtcagacctggtggtgaagggctcagcatatgcaaacagggaaaggcatggtgtgaagggctttctgggtttgtggttccctggcacacatctggtataagatgctgctagggaaagtagactgtgggtccatggattataagtgatgatgatttttggaagtgttttagcttttgagttggcagagacttacccaaagtttggtttggcatttccagcttttcacagacacagctagctttggtttggaaggagcttgagagtcttttgagtctagccaagttttggggccagaatcctccc

SEQ ID NO: 92446 - DNA, 4228 bp, Homo sapiens
catttcatctctcccagtatgagaacctctacaaggtttcctctgggcccttggattgtaagagaccctggtgttctcttgtcagggaagagggaggaagttaaccatgaaaggagaagaaaaggaatccagggtggtgtgtaggcagaattctgagtatgtccacttggagaagtgttcagtaaagggaacagtgtggggaagggtcagcgggggtggggggtggggtggggtggtcctctttttctagacgctgttatccttacccttacattgttgttatctctagaagctagaagaaagggatgtgtttctcagctatgttggggcagaggattctgggagcaaggagttgggcttgcaggcctgtgttcttccctggccacaccctctacatcttcccaataaatggcccagtgtcacagaacaggccggaaatgaggccccaactcattctgcttcctgagttgggggtggtgaagggcaaggtccagccttatgattcccactccccagggccagccaagtctcgggatggtgaacgtactgtctattgcaacgtacacaagcatgaaccccttgtgctgttttgtgagagctgtgatactctcacctgccgagactgccagctcaatgcccacaaggaccaccagtgagtcccaaggcatagtggttgggtgggtgggtgccaccccttccgtagcttagtgctcaggaacacatctgtctgctctcaggtaccagttcttagaggatgcagtgaggaaccagcgcaagctcctggcctcactggtgaagcgccttggggacaaacatgcaacattgcagaagagcaccaaggaggttcgcagctcgtaagtgtgggttctggggctgtgggggtggcccagggcagcaagaccctacctagcctgacctgctgtgtcccctagaatccgccaggtgtctgacgtacagaagcgtgtgcaagtggatgtcaagatggccatcctgcagatcatgaaggagctgaataagcggggccgtgtgctggtcaatgatgcccaggtaagccttgtgccggtgagaagggtccctgagccccctctgctgattgatgatgctgtctggggtgaggagtgatcctagtattcttctgccttctctgcttacctcatacaccttctatctgcagaaggtgactgaggggcagcaggagcgcctggagcggcagcactggaccatgaccaagatccagaagcaccaggagcacattctgcgctttgcctcttgggctctggagagtgacaacaacacagcccttttgctttctaagaagttggtgtgtactggtgggctcctggctggtgggttccaggcaggtggttcccaatacctcaaatccctatttgttgttggtgtgctcattctttcctccctttcactcccaaccagatctacttccagctgcaccgggccctcaagatgattgtggatcccgtggagccacatggcgagatgaagtttcagtgggacctcaatgcctggaccaagagtgccgaggcctttggtgggtccccagctttacctcactctgttattaccccacgtgctgcacctacttacgtttctctcttctttttgcaggcaagattgtggcagagcgtcctggcactaactcaacaggccctgcacccatggcccctccaagagccccagggcccctgagcaagcagggctctggcagcagccaggtgagcaggagagaggacccaggaaggggtgggcagggaatggggtccagtagcaggagagaggacccaggcagggggggtgggcagggaatggggtccagtagggttcctgtcccactgaggcagagggttctgctttgttcacagcccatggaggtgcaggaaggctatggctttgggtcaggtgagtgggtctgcctagtgggtggggaagggccccagtgctgtttctaccccaacctgccagtcttctttctccattttctaaggagatgatccctactcaagtgcagagccccatgtgtcaggtgtgaaacggtaagtatggcacctcccctgggggtgaggtggatggagggtgggggtgtactcatgccaggttgctgcatctacaggtcccgctcaggtgagggcgaggtgagcggccttatgcgcaaggtgccacgagtgagccttgaacgcctggacctggacctcacagctgacagccagccacccgtcttcaaggtcttcccaggcagtaccactgaggactacaaccttattgttattgaacgtggcgctgccgctgcagctaccggccagccagggactgcgcctgcaggaacccctggtgccccacccctggctggcatggccattgtcaaggtaagcctgtcccaaggaactatagctgtaggatgaagcctgtagtccaggtctggaccctgttgaacacccctcatcaccaccttgcaggaggaggagacggaggctgccattggagcccctcctactgccactgagggccctgagaccaaacctgtgcttatggctcttgcggagggtcctggtgctgagggtccccgcctggcctcacctagtggcagcaccagctcagggctggaggtggtggctcctgagggtacctcagccccaggtggtggcccgggaaccctggatgacagtgccaccatttgccgtgtctgccagaagccaggcgatctggttatgtgcaaccagtgtgagttttgtttccacctggactgtcacctgccggccctgcaggatgtaccagggtgagtgtgaggctggtgggggtcaagtctgggtgttgggctgtctggacaggatcatgtgcagacccttattttcttcaccctagggaggagtggagctgctcactctgccatgtgctccctgacctgaaggaggaggatggcagcctcagcctggatggtgcagacagcactggcgtggtggccaagctctcaccagccaaccagcgggtgagggctggggttacttaggtggggttgcccagagaggctttataggtgctgcccagagctgtgacatcccttacaatgtttgtagaaatgtgagcgtgtactgctggccctattctgtcacgaaccctgccgccccctgcatcagctggctaccgactccaccttctccctggtgagtcctaggatgggaaaggggaagggggtggtggctgctgggtctcgccctcaacctgtgcatgtatatgtgtgtctttgtgtgtgtatgtgtgatctctgcctgcaggaccagcccggtggcaccctggatctgaccctgatccgtgcccgcctccaggagaagttgtcacctccctacagctccccacaggagtttgcccaggatgtgggccgcatgttcaagcaattcaacaagttaactgaggtgagccagtggaatggagaggctgtgggcagggggagatgtgaaggaaagaactaggacccattcatccactgcattcctgcttggcccaggacaaggcagacgtgcagtccatcatcggcctgcagcgcttcttcgagacgcgcatgaacgaggccttcggtgacaccaagttctctgctgtgctggtggagcccccgccgatgagcctgcctggtgctggcctgagttcccaggagctgtctggtggccctggtgatggcccctgaggctggagcccccatggccagcccagcctggctctgttctctgtcctgtcaccccatccccactcccctggtggcctgactcccactccctggtggccccatcccccagttcctcacgatatggtttttacttctgtggatttaataaaaacttcaccagttcctcaggcgttggctggttgggggactgtggtcctggggcctggtttattgactgtatctactagtcagccttatcaagcactggtggcacaagggaggggggtcttgtcccccacctatcgaagcccatgtgtatggatgcctagggagtggggaagactgcctccttgccctttctgggtatggggagggtcacccagggcaaaggatgtacacactagaggcttgttgggtaccctgtgggatactgggtaggtgtgacctacatccctgtgtaggcagggttagccccaggtgtagcacagccactctactgaatgcttcctaaattttggtgctgtagctgtttctcatcttcagaaggtcccacag

SEQ ID NO: 92447 - DNA, 1499 bp, Homo sapiens
tcatctctgtgttatgatttagttactctacagtcgagcctgtgtgaatcccaaggccacccccttgcctctattggttggtctggactgtccttgagtgttgtcattaaaccatcactggaccaaacagtgttggacactacagcctggcagatgaggcctggactctcaagatcctaccagggtgtttgggcagtccagtatcttgggagaggtgatggagaagggcccacagctcacctgaagctcccagctcctgaaaatcccaggtggactttgcttgttcacccctgccccaaacccccacccttagcttagtaccaagtgcctcttgccttagtgatgcccatcctcccagggaccccagtctggtcccacatcaggccaaaagtcacatgggcctggagactagtgtcaaatctcttttattacagaggggttgtggtaaaagatcctgggcatccactggttatctcggagtggcaggggcactcagtccctccgcaggttcttaagccgttcctccaggtctgcatcagcatcagctagggctgaggctgcggcctctgcttttttcccaccagcagccacactaagcgagcccccagttgaggggaggtctgcagagaaagtgggggtttgagcaggtggggtcaggcagcggaggggagtaatgcagggaaagggagggcttggagctgtggctgggccttgggtgggaaatggggtccaggatttggagcactcactcgacagctcatctgttaggctaagtcccagctcatccagaacctgggacaccacagcatcactagggaagagagagaactcagtgagggctatgcactccgtgagggccaggcaaacatctccaccctcccatccagtttccccatacctctcctcttcatcttcctcatcacccatggcatcatcaatggcatcattcatcatctcctccttcatatccatgatctctgcctgccgctcaaactccatcatgatcttctggatctggggcaacttcagctggaagtgacaggagtgtgagtgtgatccccatgggtcgtgggagtgggaagggggattgggaaaagcgcacctgtctgttcatggtgcccatggccttggtgacacccttcatggcttgtgccatcgagttgttggacttgagtgtctggatcttgagggacacagcctggatgttggcccgcatcaatacaaacttgcgcacatagcgccgggtgcgcaccaagtcttttgccatgatgcgaacagcatcctgcagagtagacaagggtatcaaggacacaggaatgagattatcctacacttcttgacaccccattagttggttgtccctccccaccagcccaatttgcaattccacttgaagtttccagagactctggctaacccaatggtcactggtccctccctccttctgacctaaccctcctctgcctcttgggccaccaactccctgggctcctttgtaa

SEQ ID NO: 92448 - DNA, 1046 bp, Homo sapiens
ctcgtacgctgccgcccgcacgcccgcccgggatccacggtccagcaggggccactcaccggagctgggacggacacccgtttccgcttccgggtcacgcttctctttctgggatccccgacttgcccaccaactaaggcccctcggtcctgtcgccgccgccgccgtttccggattaaacgacgtgacgtaacatgccccgcccgcacccggaaggttgggaaactccaggagcgcgcgtgcgcccgtgccccggaacgggccagcgtccgagcgcatgcgcaacagctcccgtttcctctgcgcgtccgagtgtttcatgttttgagtcccgcccgagtgacccaagccagtaccggggtgggcgctttccacccaacctccacttgaggacccagcttattcgtgagaccttgacttctgcctgaggcctcagatagaaggagcctcagaaggctcctcctcctcggtgggcccacccacacaagaaaggggcaaagctagagatggcttgtttcttccactttgctggcctcttggccaggaagccacaggtcactggatcctgcctacgcttctcatcctagagtaggcttcatcccaaccaaccccaggcacagtcatggtatccccaccaactttagagctgccccaggcactgggcagcctgttgtagggtgctccaatgccacctgtgaccacaccttccaccaccccagctttgcaggccctaatggacctcagctgcccctcccaccccatagaagtaagaagcagaggccatgcagtaacattcccctttaatagcctggtgggacctccagaggtggaggggtgggttgcctgggcccagctacccaggcccgttgcccacccactccacagcccagagtgggggctgaacaagcacccagcaggggggctagacaagccaattcatttcccatcgctgagtgggtcgggggaggcagcgccgaccttaatcacatggtgttaaaaaaaaaaaaataactaggggcacgtggcaggaaggggaggcaaggcca

SEQ ID NO: 92449 - DNA, 1025 bp, Homo sapiens
cgaggagcggaggcgacgcgggcggcggcggggggccgggtggccggggtcccgggccccgcggcggcggcagcggcggcggcggcggcaggatgatcaagctgttctcgctgaagcagcagaagaaggaggaggagtcggcgggcggcaccaagggcagcagcaagaaggcgtcggcggcgcagctgcggatccagaagggtagggggtcaggggatggggttggagccggaggtcggaggtcagggcctgaggcagggtgatgtgggagtcaggaaggggtaatgcggttgctgagggtcagaggtgaagggccccgagcgtggggggggtcggaggtcaagtcttgagggttgggatcatgcagtcacggggagggggtcagagataggggcccggtatgtggtggtttaggatattaggaaggcctggtgtctgctactagggactcggaatctcagagtcaggcagtggagtggaggaactgacgactcgagagtctgggggttagacgggaacttgggtttggggtgacaggcggagaagagagggatagtagaggccaggggttggggatatgagtggaagaggatttagtttattatgctggggtctctgggaatctctgagtcaaacgggtgaagtaggttggaggaccagggactcatgggcctgcctgagtcacagcaatttggggtttggggtgacaggtggaggagggaaggttaatgagtaccagggattggagacaggggtgaggggaaatttaggctattgtgctgtgaacctcagagtcagagggggtggggtagggtggcgggggttggggacttgagagtgtgggggtcacatggaaagctgggtctgagagacagagaagaggaaggacagtgaggactgagggttggtgggggtgggcaggatctttgagtttgggtgaacaggtagatactgtagagtggaggtcatggatggggagcctggggtttagggcggtcagaggatgtttgggagtgggggcattt

SEQ ID NO: 92450 - DNA, 1762 bp, Homo sapiens
gtgaagctgagttttcagcttgggcagaggcttaaggaataaaagatggaagagtaattaaggagtgggtcgtgctgtgggaagtgctgtgtcaagacacctgaggatggaattggtagccctctgttttgggactggttcagatggtgttttgggttcctttctatgacctttatctctgaaacttgattgtcttaaaatgtattttgtgggagaaaatataattattgtatattttgtgtaacagaatcagtgagaataagctgctgtcgcaaactgtcttgcctagagagagggcagtggcatacagctgcagaaggggccacacgggcctgctgagtgttccgtttcatttcaaattaggtcattctgtcttgattttgatatggatgtttcagaacaccctagcagatgtccctgtttaacttgaaaccatagatcagaaaactaagttcatatttcaattttacagagatttgaatagaaaaagtaatcaagttaaaacctgcaaagctaaaattgaactacttgggagctatgatccacaaaaacaacttattattgaagatccctattatgtaagtacagttcacgttttagggctaatatgaagacccaacacatttgtatcctgccatattaaataacagatgagattgtgttaaggatgtttttgttatgcaggttttgccattttcttctttttcctgtccatttaggggaatgactctgactttgagacggtgtaccagcagtgtgtcaggtgctgcagagcgttcttggagaaggcccactgaggcaggttcgtgccctgctgcggccagcctgactagaccccaccctgaggtcctgcatttctcagtcggtgtgtaatcacgttccagggcccaaagcccagctctttgttcagttgacttactgtttcttaccttaaaaagtaattgtagatggaaatcagttgtgtttggcaggagaatcaataaaaatctttgattcagacagcttatggggtattttaagcattcttagactagttgaacatctcactttgccccagttacaaaaatagtagaacaagcaacataaaacaatgaaggaaaacctcacttgaaggcccaggtcaacatctaagcctgttgagacttagataatcgagtctacctcttcagtaggtttgtgtggatggcctggagggcaggtgccctctgctccccagtgctacctctctcttccctagggccttttgtggattgacagtagtcccctccgtaggagctcacagtctagattagaagtgttttaatttctacacacccatagtgcacacttgtatattgaaaagatagggaagagagaaacatttatggaatcagtcgttggcaccttcaatacttcatgatttttgtcgagtttacttcatgaggaggtcagcccattggctcccatctgaaccactttgcctctgaaacttaattacatccagaaagaaggacacttgtatgctagtctatggtcagttgaggaatatgactgtttttatatgcacatgtaacccaaatgtccaatataaattggcttattttttaaaataattttaaaagttgggaaaagtgttattatttggcatgcttaaatattgaataagtattcttcatcagcatttaataaatgtataggcagatgtaaggtaatttctgtgtattttgagataatgtcaaaatcatgaatatttcaaaataaactggggagttataaaaataca

SEQ ID NO: 92451 - DNA, 1061 bp, Homo sapiens
ttataaacataggcagtctcagagtgcatctgtatttctctgtgatccaaaaagtgtagtctattgtatttttaaaaataccttctttctgcagttgttacatggctgcaatgctaaagcaatgaaaatcatcacagatacatgtggatgctttattacagcttgaagagtgcttagtcttacatgtgctatcagaatcctcagtagtctaggccacagggattaacctggcagttctgcaacctcagtgttcacagggttggtaaagctaataatcgagattagacatttgtttctagcattctttgttggaatatctaaaccattggtattctatttatttttaaagaatgataaacttcaaggttactaagattaggctgcatttgggagagtacaccatgtactcactactcaaaactccatttctttgacaatattccagagctcaggcttctgattaactgacctgtaagtccggacaatgaagtgtatctgtgactgttagggagggttggtggggacattgttctctttggcctgaggaggtctattaatgagcttcagaacgcggcaaatggatttgctctgaggtgaggagggcagagcccttcctgctaaaggcctgcttttctcaggctctgggcctttctttacaaagacaaggtcatggtttacggtcttgccctgccatccttgtgtgtcaggacagaagtgcatgtggcaggttaaccagcagaactgggactgcagggcctgcctgatgccacaccgtcacacgagtgtgggcaccctgggacacctgccctgccctctggtgtctcactgaggtctgcaaagcacagagaaagcccggactgtatctacactgtggtgaccagccacagtaagagtttgctgttgctgtttaacaatttgttaacaccagtaacaatttgctgttgctgtttaaaacttttggaatttgaagaaattatctttaaaaaataggagttatgaaattatagttaacagggtatcaatattttaaactttacctatctcttggccaaaatgaaccc

SEQ ID NO: 92452 - DNA, 1122 bp, Homo sapiens
atctgcatctctgggtcctgttgtatgtggggttgattatctgagtgaatggggcatctgcatctctgggttctagtttatgtggggttgattctctatctgagtgagtggtgcatctgcatctctgggttctattttatgtggggttgattctctatctgagtgagtggggtgtctgcatctctggatcctgttgtatatggggttgattctctatcggagtgagtggggcatctgcatctctgggttctgttgtatgtgggagtgatgctccatctgagctgggcgtctgcatctctgggtttatggatccctaagcccaactcactcacagcttggccctccatgtgctggtctttcctctgccttacccatgtttggttatttcttatataacattggatatctttggaacaggagaaaattgttaagtgtcaatttgctgccccttttttctgtaagtctatcttctataaagtaatgtagtccctattatcatgatgctatttcactatataacattattttcaatgcctgcatagtaaacacattgtaggggtataggctgaatttacgtaaccagttactgatattagagatgcagagtttttctaattgttttactgacaacagcaacacagaaatctccaacctcacatgcctacatttccactattgacttggaataaattcttacaagtgaaatttagtcaacatatataacttttatgtgacagttggtaaatgttgctaaatcaattttcagaaagcatatgccaatattggttgtacatatttcctgaaatccttgtctgcactaagtagcaacgtaaaaaaagaaacttttctgagtaataggtgaaagttttatctcactgttttaacttgtacttctgtggttacctgtgaggtttaacgcttttcaaatgattgttggtgttttgcatttttttagtgaataatctgttcgtattcttctttgttttgcaatatgggctttaaaaaacctatttctaattttatgtgttaaaattggtaacacatatagggcagaaatatgtgttactagtctgtagtttggctttggcttgtgttgaaaaggttttagaaagtcaaacagtt

SEQ ID NO: 92453 - DNA, 1293 bp, Homo sapiens
gctgctgatgacccagagggcttgcagggtgacgtctctctgctgggggaggcctcggggtctttcctgtgctgctgggtggtgtctccctgtcctgtgacccagtgtgttttcttcataatgagcattcattgcatttgggacagtacagtggagattaccgctgctcccaagggtgggcccagtgagggtgttgctcccacctcagtccacatcagctctctccaaagtcttatctaaatagacggtgtcactagaactttttggttgtattgcctagtaattttttgtttttgttttttaaacagattattttcgaaataccagtatttcgactccagggggatgttcatttctatagtattttcagccccactgctggtgaatgccatgatcattgtggtacgtagatgacactttcagttgtctttcttcatgtgtatgtttttcaaatctaaacatgtctcaaacaattgtgtttaggttatgtgggtatggaagactttgaatgtgatgactgacctgaagaatgcacaagagagaagaaaggaaaagaaaaggagaaggaaagaagactgaggggcagcagctgcttggagtttgcgtccttcccgtccacccagtgcagctcccagtgctgcagtgtgcgtggcgtgggcatccttccagctgactcatggtttgaaaaaccgttgttttatttaaatatccacagtggtagggcacacactgaagttggcttttcagccagcactgaatgtatccatcaggacatgcgtcttcaggtgcctgatctttgtagtcaggctgtgggaacggtctctgcagagcttcataactgggaatttgatttgaagaagtccatgtcatatgtgtaactagtactaattataaatataaaatacacaatataaaatatgaaactcaataataaacagtgccacctgtacatgggcaccatgccctcctcctcgtgctgtgttttctagtgcatgccacagttcgcagtagagggtgttttcaccttccaagacatggggcaaagtttggagacacctggttgtcactggagggggtggtgctcctggcttctcctgtggagcccggggtgatgcataaaatcctgtgtgcctgggtcagccgcatcacagacaatgacttgacatgaaatgtcagctgtgctggggcagagagaccttggaaggaagctcttggaaaatacgttgtatctcagtttgatgaaccaattcacaagaggctaggccctctctagcaaagttatgggctgcttta

SEQ ID NO: 92454 - DNA, 1059 bp, Homo sapiens
tgatgccctcccacggttagggattgtgcatttttctccagacattcgagcaaagcaattcttgcttttaatcattgtaattatagcggaagcgttgaagtggattcatcatacttcatgattgacccacttgatgagttattggcaataacgtcaacaaataaagcaactgcgcgtattctagtaaatgctctcctttgcgctcagtattaattaaggtgctaaatttgatgttttccagtcaagagtggcctctgctcacctgtttgctacaagatgtgattggcgctttctttctaataaggaccttgattatttgaaacagcctgtctgaattgtattgaaagaaactttttttttagcgttggaggccaagtattacaataagatggagcattttaagagcaagactcctaactttgcagtcataagtaattaggtatgtgctaagcctaccttagacaccagtgcatggtcatgttagctcagattcttatgtatttaaaacgaatctgttaagtattggtgttggcaggtttgtcttgaaaacatgaatgttcttagtatacaatgtcatccttacttaatggcagaattattttcttaccataactgcacaatattattcaacttgtgtaattatttaatcatttcagttaagagaacttggtgcttttaactagaaaaagatgaaagtcttttctaaatcttatatttctagttatattttttctatctgaagtcaaaactatacacattctttatcatgactgcttgtttgaatcatggaatttggccacgtttgaaggtctcctgttcggtaacagacctgttttgtttcccctttcaagtgcctgttcccgatgtttttttctaagttaagtgagttcatggagctctgtctctgaccatacctggatttgaggggtaaaatcccactggcagacaacctcagtacaatgtgcgaagtgtgtcttgcttgtagcttcaaagactactattggttgatgtttacagcacatttgctgcttttaaatgacaacacttcttcagtctggg

SEQ ID NO: 92455 - DNA, 1039 bp, Homo sapiens
gctgtttgctgtggcacacagaggagcagctggcaggtggacggacgcctttctccccactccctcagttggccatgaacactacagaatttagcgtctgctgagggagggaatgaacccccccttggttctgcagtccacattcattgtgagatgcattctggcctgcaaagtcaaccgtccatgtgttgaggaggaaaacggtatgcctcccacatgcaggagtaactccctctccctcctctatagaggatatccttggaaaccctctgtccacataatgggatttatttattcagctttattgagctacaactaataaaaattgtacatgcttaaggtgtacagggtatgttctcatatgcatatacattgtgaaatgcacactacaaacaagctaatacatacatcacctcttacagttacctttgttttttgtggtgaggacatgtaaggtttattctcttagcaaattttaaggaaatatggtattattaaccatagtcaccatgctttccattagagccacagaacttgtttaccttacagctgaaatgttgcaccctttggcctgcacctccgccccccaaccctgaacgcccctggtaaacacggttctaccctctgcttctgcgttcaacatccttagattccacatgcaggagaccgtgtggtatttgtctttctgcgcctggcttattcgactcggcacagtgtcctccaggctcatccatgttgccacagatggcaggatttccttctttatggctgaaggatgttccattcggtgtatctactgcatcttctttattctcgcatctactggtggacacttgggttgtatccatatcttggctgttgtcagtaatgctttgatgagcaggtttaagagcctgttactctgtccattggtgcagtgtcactgggaagcatctgtggcatttcaggtaaatactgagaatgtggatgcaatgagagcccgtggtatggatgtcccaggagtggctctgactttgctgttcacagtatctggaataca

SEQ ID NO: 92456 - DNA, 1069 bp, Homo sapiens
tgagggtgctctgcagaaaggatcactcacatgaagtcacctgagctgcgtgtcagcagggggaagccgatggcagggcctctgggacttggaagaggggagggagacctgccacggctgtcaggaaaagcctcagggctgggtctgagctgagtccttaagccatgcggttcaggtaagcagggaaagaacaatgatgagaaagacccacttcttcttttttttttttaattaatacacttgttttttggacgattttagatttacagaaaacagtggaaggtgaagagtagcctgtgcccctcactgcccccacctcccctgttcctaacacttgcatcctctggtacattgtcacagccaggagctagtgtggatactgccacacccataacatccatgtggctcaaggggacttcccacagctctcagggtggcagcattttcttcaagtccacaatagaaatggttccatccgaagcccgaccaccttcttacctgtgtctgcgatcgaggcacattctcttccctgaatcaatcatgttggcgaagatgatgagaattctggcctgaattgtgtgtggactgcgccttgcctccctgggctgtgggcaaggtcatagctctgggagcggagaagggatccccagggggagacacggccactggcaggaggaataaacgagtaggaggaaggcaggactacggcaaaaccagcagacgccacagggacgaacagaaaggggcttaataaacagatgatggatgcagcggaaggagggagagactagacctgcttctgcgaacaacaaagagcacagccccctccaagctttgtcttagaacatgactcaaatccctgctgttttgtcacatattgatatcagactagtatggaaaatgcattcaatgtgacataatctaatacagtgaccagatatattaatcacagcacgatgacagcggtgaaaacctaaaagcaatctacaatgtccatcacaaagataaagcttacaaaaaccgtaactccacacggaaattctaagctgtagttacagttgtatttctg

SEQ ID NO: 92457 - DNA, 1044 bp, Homo sapiens
gggcacacgaggcaccaaggtccgggccacctgcccgcagcaaggcccagctgaggtggtggagggagcccctgaggtcaggggccgtttcggttcagggtggcaggtgtccagcactggggtatggcgtcgaggcttccatggggtgggggaggccagcttccttctgacaggatgggcgcatacagtgcctggtgtgatttgtgcacaacccgtgttccaggtgcacatcctcccaaggagacacccagacccttccagcacgggccggccaagttgctgcggcggaggcagcatttcagctgtgaggaaggtcattggattcatgtgttttatctgtaaaaatggttgtcttaacttcttaacctcatattggtaagtgattgataaaaattggttggtgtttcatgacatgtggacttcttttgaaatagcaagtcaaatgtagtgaccaaattgtggaagagatttctgtcaaataggaaatgtgtaagttcgtctaaaagctgatggttatgtaagttgctcaggcactcagatgacagcagattctgggttctgggagtgttctgtgcctcttacatgccctggaggcctcatggtctcagtgctgaggcggcacacctgtagcacacctgcgtaatgtgcggtctgggccagtcacaaggaattgtgttgtctaagccaaagggggaagctgactgtgatttaccaaaaaaaattctgtaattcaaaccaaaatgtctgcggaatcaccagtttgatactctctgtaatcagaacagtgggcagtgcctgggtgaacgtgtctagcagccactgtgcgggatcgctgtaacaggagtggaatgtacatatttatttacttttctaactgctccaacagccaaatgccttttttatgaccattgtattcagttcattaccaaagaaatgtttgcactttgtaatgatgcctttcagttcaaataaatgggtcacattttcaaatggagaatggctttatttttttttacctgaaaccagtacatgaggctaaaactt

SEQ ID NO: 92458 - DNA, 1047 bp, Homo sapiens
cagctggtggtcttggcccctcagggtgagaggaccgtgggcatggacggaagggtgggacgggagcctcagggagacttgttatgggggctcccattaactcatacctgtctgcaactatgaaatcctaagagaaccacaaaatccatgcccacagggcaagtacagcgggcaaggcaggggcctcagggcaaggcctgactcatggccgtggctgacacctgtcccggagctgacaggctttgctcacctgaaggccatcccagagctgacaggctgtgctccgtctctcttctccaggacgggcaggtcacctgcttcgtggaagcttgcccccctgccacctgtgctgtccccgtgaacatcccaggggcctgctgtccagtctgcttacagaagagggcggaggaaaagccctaggctcctgggaggctcctcagagtttgtctgctgtgccatcgtgagatcgggtggccgatggcagggagctgcggactgcagaccaggaaacacccagaactcgtgacatttcatgacaacgtccagctggtgctgttacagaaggcagtgcaggaggcttccaaccagagcatctgcggagaaggaggcacagcaggtgcctgaagggaagcaggcaggagtcctagcttcacgttagacttctcaggtttttatttaattcttttaaaatgaaaaattggtgctactattaaattgcacagttgaatcatttaggcgcctaaattgattttgcctcccaacaccatttctttttaaataaagcaggatacctctatatgtcagccttgccttgttcagatgccaggagccggcagacctgtcacccgcaggtggggtgagtcttggagctgccagaggggctcaccgaaatcggggttccatcacaagctatgtttaaaaagaaaattggtgtttggcaaacggaacagaacctttgatgagagcgttcacagggacactgtctgggggtgcagtgcaagcccccggcctcttccctgggaacctctgaactcctccttcctctgg

SEQ ID NO: 92459 - DNA, 1112 bp, Homo sapiens
cattttagactgtaggaccagggggcagttcaatgccttttcctatcatttccgaggcagacggtctcttgagttcagctaccaggaggacaagccgaccaagaaaacaagaccacggaaaatacccaggtatggtggtctctgaggtcaaatgatgtgcagaggggccctcgcaccgcgggcgtcgggcagtaggaccggcatcctgctgtgggcctgtggcgaggatggttcctggcagggacgtcccagggcactgggggccaggccgcagcctgcgtcctgctgtgctgcccactcagagcatcaggggcggtgcacacccaggaaaccttgaaatgagacccagctcagagcatcaggggcggtgcacacccaggaaaccttgaaatgagacccggcgtgacctgccaaggttatatttccctcctcctcctttcccctcaccacagtgttgggagacagggggaacatctcagcaacagcacctcagccttcagcacacgctcagatgcatctgggacaaatgacttcagagagtttgttctggaaatgcagaagaccatcacagacctcagaacacaggtgaggtgcctggcggcctgtgtccccccactccaagattccacagcagcacagccctgcccgaaccttctgggtatagcattttattcccaggcaactgttcaactgcccacacaggacccagaccctggagccttgggggtgtcatttctgcacgctgggtcaggccgggccatgtgccactggtgtccctgggtttcccagcagatgggggtcaccaggcaggggcaatctgtgtcacggccgtgtgactgccagccaggtgaccttgctggagggaacacaggattaggatgctgtaggagagttcagacatgaagtcctgttcttaagcctcttattcaggaataactctgaatcatctctcccagggcgtggtaaggaggcacttccaggtcagccctccacaactgatccagcctctccgggtgtgaggaaagtcctggtgtctgtggtacgaccacagggattttcagacggggctcttctctggcgctctgtggaaatgagttctgtcctctccttcc

SEQ ID NO: 92460 - DNA, 1030 bp, Homo sapiens
ttagcagatattttctttatggcaaatatattttcaatatatagtagaatcaaatgttattctttaaaaatgtatatacttttaaaaatacacatgaacaataaactatatacatttagctatatatagtttattgttcatatgtttattttaaaaagattggaagggtatacattatgatgttacgtgtggttatccctgaatagttggaaaaggtgtggcttaaattttcttccttatcttttcttggcttttctaaatttgttataataaatgcgtttgtgtgtgtgtgtgtctcacatatataatagaaagtagggaaaatcctttaaagcattgtggagagatgcagcaaagaagtaaatattttctttgttaagtaaaattctaaataatgtaaaatagtgatagaaagaaagaactgtttttatatttgctgtattttttaccacgtgcagctttgttaggtagatttcagttttctctttattttttaggttgtatggctcgacactcaacatcgacctgtttccggcgctcgtggtggaggacctggtgcctggcagccggctgggccccaccctgatgtgtcttctcagcacacagttcaagcgcctgcgagatggggacaggtgagcacgtgcaccagaaaggggagcacgctcctaagccaccttcttagggactccagaggagaagagctgtcctggttgagactgagggaggcacgaggccctagtgtcttctgtgtgtccccggttgagaatgaggaaggcactgaggccctggtatcttctgtgcaccgccttgggcttacatgtccttgcagcctcaaaactcaaccacaccaggttcaatgatgcttttcccaccccttcatttataggaatatttctgttcctgtaaacctgttggacagtccatacagctaaaccactgtgggactttagaggagtttgggcttcgggcaagatctttgttttatctctagtctactgttattactttactttaatgtagtggaaaggca

SEQ ID NO: 92461 - DNA, 1066 bp, Homo sapiens
aggagttcaagaccagcctggccaagatggtgaaactccacctctactaaaaactacaaaaattagctgggcgtggtggcaggcgcctgtaatcccagctactcgggaggctgagcaggagaattgcttgaacctgggtggcagatattgcagtgagccgagatcacgctactgcactccagcctgagtgacagagaccccatctcaatcaaataataataaataaaaataaaataattgctcatcagtgttttcccattgtgattcttctcagtccttggattatgaatcagattcacaggtcactgtgtattaggagatgttattcccattcaaaaacattgttttaaaaagaagaaaaaccctttcttcttaagactgtcttcctgtatttgatggactctgcagttgactcctaagttacttaacgctgaagttaggacataccctgttaggatctgacctgtgccttctaggggaaagtgattttttacttgtaatttattgtaagttatgactaaatgaacatgatgtcctattaaatttaatatgttccagtattcatttaaataatgcgcttaaattactggcatttggaagtgtgtgcgcactccgttaatccagtgtaatttttttatcatggttttgctgaattaggactgatgtgaactgtctgtgttttttatgtgcttaaatatcctcctttgttcttgtccaaactgacacagattactctcccagatgattctctcttttgccaaacttatttcaaaacatttcaaaagagctagatgtggagcccagcgccaggtggaccgcggctgtgttgcatgctaggtccctggtaaagaagttaaggatgttacccacacactgagcccctcgtctctttatttatgttttcctgtctcagcccattgctgactaaggggaaatgaaacataaacatgagaaaagatgcatgaccatcagagaccatggggccaggaggacttcacagggcagaggggttgccttcggcagactgtagagattgtgtagttctcatctactttgtgtttcacgg

SEQ ID NO: 92462 - DNA, 1019 bp, Homo sapiens
ctaccagcactggctcccgaagatcctgggggaggtgggcatgaggacgctgggagagtaccacggctacgaccccggcatcaatgctggcatcttcaacgccttcgccaccgcggccttcaggtttggccacacgcttgtcaacccactgctttaccggctggacgagaacttccagcccattgcacaagatcacctcccccttcacaaagctttcttctctcccttccggattgtgaatgagggcggcatcgatccgcttctcagggggctgttcggggtggcggggaaaatgcgtgtgccctcgcagctgctgaacacggagctcacggagcggctgttctccatggcacacacggtggctctggacctggcggccatcaacatccagcggggccgggaccacgggatcccaccctaccacgactacagggtctactgcaatctatcggcggcacacacgttcgaggacctgaaaaatgagattaaaaaccctgagatccgggagaaactgaaaaggtgagctgaagaggctgtgtgggatggctcgtgtacctaggcacctggaacacctgaactgtggtgtgtgtgttatttgtctctgtgtgtgagttttgttcgtgtcgtgcagaggtgagatgaaggtcaagtccatgaaggtcaagatgggaacctgcagcctcccgtggctgcgtggttgtggggagggggcagagccaggggtggatggacggtggagggcccttccaccggcctgttttgttccaagagaggagctttgctgagctgtggcacattttcagcttagagatgagctatacttttctggcagaggggttgactgcagggaaaaatacactgttcgcaccagaaaacaccaaaactgacactgtggctgttgggcagcttcgggttcctgctgttgtatcaggggcagagagagaggcagagcttggtgtctgcagatccgggcccttggggccaccagcccctaaggcttggcctgtagcatcttccat

SEQ ID NO: 92463 - DNA, 1120 bp, Homo sapiens
aaaggggctgtctcttgttttctttaaaggtgtccatagtgatacctgtgatcttgacaagcagaaatgggctggagaaactttagaaaaaagaagcagtgatggcttggaactctgtgagtatgtgcacacgtgaaagtgtgagtgtggctctgtaagcatgtttgcatgtgagtgtgtgcatgtgtgaatggaaaacatttaagcgtgcatgtgtgtgtgcgtgtgtgtagcttttcggcaggcatgacatgtgcctggaaaggaggagtgttgaggaaggtgaaggcctaggatgtatgaatatgtggaggaagcactttggcgaacacagagatctgagtgtgtctgaccccaggacgtggagtagctgttgcttggagcaggtgtcttgaaggcgaagactaggatctgaacttaggaagatctctttcatctgtggagtgatggcccaggctaccatgtttggaatttcttctgtagctagtgggcaaagacagaaggtctctgagcaagaaggtgacctagtcggagcctgtgccaggctcatgggagcgtgcgcttgctgtggggagggcgtgtggatgacctccaccaggcaggaggcccttctggaattgaaggccagtgccatggaaatcagtcccaggattctgccagagaaatggagaggagggcgcggcggctaggaacattttgaggtagcgtgaaaggaagtggcactcttttggacgttgagggaacagcatgaagcctcagtggaccgagatgtgcagtgacaggtgtcaggaaatgccctgctcggcagcctgtggagaccgatggtgtgcactcgtgtggaggtgtggtgactgtctcttacacggggcgtttaaagtgaggttggaacagtgtcagcctggactggtcaacgtgggtcgggctccatcggttaggggtctcccagaggagagctgctggttgaaaccatgagactgctaagtggggaggggagacagggcccagaaactggggctgtggagagaatacctgtgtttggggctggaggaggggaggagcagttttaccaaacaggaggtgagcaggtttccagcaggaagcgcttgttgcatggcgcaca

SEQ ID NO: 92464 - DNA, 1034 bp, Homo sapiens
agcgattgcgactgttgacagagctataaactcaacccgaacacatttgtttgacaggtatcgtggggctgtaaacacgctgaccctcaaatcactgagctttagggtgaaggtgggagtgattaaagaatgcatgcagttctaatatatgaattttgatttgattatctgatgatcaaaatgtttaatttaaaaatcatgaacaacatgggcatctgagttttctgggggttgaaataacagaaggatgtgtgcttttcaaatagaatttggctatgatccacaaccaaaacattctttgaaaatttcaactcattcctttggcttatgactaaatgatttggcaaaaacaaatagtttaaaagtcattagtgtatttgttcacgttgctgattccaaagcagtttttctgcatcttatgtgaaatgcaatatctgtgattttctctattgacttaattaattatttgtttttagtgtcttccggtttttgtctgtttgttttgtttttgttttgttgcctcccacttcggatgaggaaggtatagtacattatgttgtagaaagtagccgtagaaatattaatagcaatgattatattttggggtactatgaattttatcttcagtaatttgtttcattcttcctttcttccccctaaactctggttagccgtcctcgttctccaaatgatttgctggccttgttccggtatccgagggatccttacacagttgaacaggcacgggcgggagaaatctttgaacggacattgcagctcattcaggagcatgtacagcatggcttgatggtcgacctcaacggaacaagtcagtgccaaagccttttcttcctcctccatggcctgagtaacggggttgaacacgcctcagttaagtcacattcctagggaagagttccagcattttctttcccactgtgcttatgaactgtgaaattatttccttaaactgtgattcctcttgagccctacagccctgtcgctctcactttggtttaataggaatctctggg

SEQ ID NO: 92465 - DNA, 1087 bp, Homo sapiens
agaatgcgggggtgggattcctgaacggctccccagatcccagcactcagccacgctcctgctctttcagaggaggaagctcccctctgtttccttctccgagagtcgggctctccccagagcttgttatcctctgtgggccctgcggcacagcatatgcctgagactgccccaccatcggtgagggactgggggctggaggacatggcagccagcccatcctggaccctgcggctgtctgtctctgagcagggaagacactggctatgctttgctctccttgccctgagaggcggggaggcgggcggatcttccctgggatctttcaggctcccctgccctgtgcagaggctgctgggaggcagagaaagggcccattctgaaactgactgtgagctcccagcatccctgagtgggcctgatggagggcaggggattttgttcttctgaagttttttgatgtaattgactcgttctcctggattctctacatctgccttccagtcaccccagtgtttgccagcattcccagcgacacaacagtggaggtgggcgccaatgtgcagctcccgtgcagctcccagggcgagcccgagccagccatcacctggaacaaggtaggcggtctggtgcccgagccagccaccacccagatacaaggtagacgggctggcacccacaccacccactacctggagcaaggtaggcggaccagtgcccacgccccagcctcccctctgctgtggggtatgatgggctggacagctgctgcctgcccacttcctctatagactttctgtagcagaaagaaaaacattcagatcttaagccttgaggtaaaaatactcagggcatccttactaataagaacaaaacaaacttggagcattccatttttttgatcttttcaataacaaaagcaaagaaaaaccctcttatagaactatggtctcatcatcaataaggaagggttttcatcgttatttcatttctttgctgtttttattaagctcagtaggaaaatgtgggtagcactcacacaccatgacccgtgtttctgtgaattccctcccgggagcacagggct

SEQ ID NO: 92466 - DNA, 1073 bp, Homo sapiens
aaaatggaatcataccagacaatactattctgtaagttatgtttttcatccagtgataataaccactatcatcatacacagctataccagatggcattttttaagcatttgcaaatattagtttagggtgaggattgagaggaatcgttgtaagtcggcctggtgtccacgagctgcagtgtgtcctcatccgtgccccgtgtgcattgcagctggcggtgtggttgaacggtctttgtgtgctttccagggtgatgctgagaacacacccatccttcatcttctttccgttctgctcccatcttctcctgtgccctctgcctctttctgactcttcgttgtagacattgctcctaatggtcagacgtctgccaagactgtggtcattttcttggtcgcgtttttaccccaggctgttttttacatgtcctgttttgaatgctttctctccggaagctcttcctcagttcactgtgacgcctcaggacagagtcgttattgagggccagaccgtggatttccagtgtgaagccaagggcaacccgccgcccgtcatcgcctggaccaagggaggtaagacccaggccggccctttgcctgctccctccgcggccacagacgcaggaagcacacatttccactgtgcccaggcaaccccagcgtgttctggacagggctgagctgggactggattccacaggaccaaggcactgggaagcgcagaggtgtctgcacatcccccgcggcttcctgtccatgcatggccgtccctcatggacatcatggcaggaaactctgagaagctctgtcattgcggaagagacttggggttcctgcctttgactccctcacacctgccttgtttcagatagtctctaggatgtgcttttaagtagcctcttgaaggaatctatttgcatggaggatagaattttctggaaacagtcgaggaatatattgaaacagacgaatagcttttgctctgactttgcttcccagagccctcactgtcacctccccattcggcatcatgacctttcatcacattctttgcctacagtcctagccctctt

SEQ ID NO: 92467 - DNA, 1044 bp, Homo sapiens
tgcccgtgatgatgggcgttgagtgacagtggtggttttgtggctgtggttttcatgttactgatttctgtgagtggctcccacctggtctccttcacaaacttccctgacctgtgccgctggcacactccctcgccttgagctcgacacccgatgcctgggtgtgcacaagccctatgctactcacgcctctacggttagtgccttgaggggcactgtgcacccctgggctcttcctggtgatgtgtgtgtctcgacatcactccctgagtcgggcaccggggctcagattccaccacgagacgtgtcccatccccatgtcgcaagcctggcaggcctggcacatgtttcccgacgcgggacctggaagccctgtctgatggatggatggacaagcccagccaccccatgtctcaccggctgcatcttccttcccacaggcgactggactcaaacacacttcactgcgactgtgaaatcctgtggttggcggatttgctgaaaacctacgcggagtcggggaacgcgcaggcagcggccatctgtgaatatcccagacgcatccagggacgctcagtggcaaccatcaccccggaagagctgaactgtggtgagtggcccgacacgcacacaccatccacacactcacaccatctacacacacaccatccacacacacaccatctacacacacaacatccacacaccacacacacacatttacacacacaccatttatagacacacgcgcagacacaaaccacacacacgcacatacacgcatacaccatccacacacacacataccatttacacacacaccatttacagacacacacgtagacacaaaccacacacacgcacatacacacacacaccatccacacacacaccatttacacacacaccatttatagacacacacatgcagacacaaaccacacacacgcacatacacacacacaccatccacacacacaccatttacacacacaccatttacacacaccatttatagacacacacatgcagatacaaaccaca

SEQ ID NO: 92468 - DNA, 1055 bp, Homo sapiens
ggtcttgaaggatatctttgtatctgataatatactctgtgtcaaagtatatgatgatgcccctgccaaatttatacacgagttaaaagatttgagggaaggtattcacctatttatgtatgtgctatcattaaagttatccttttgatttttgcttttttccatatattttggaagtgaaaatggccgagtcaggccaggccagcactgcccttctcacgcggtgtcaaggacctcagtgagcacctctaggcctccctcgcccttatccagtcactagggtggacatctgtgcctagtgttcagttgtatttattgaatcatttgataattttatgtattgttcatacaatgtaggaagtctagtgagtgagctatctattgatatctgaatttgaaatgactaggaaaaaaatttgggcaaaaatctggatctaagaaaataaattgtaagttatacttttttttcttttaactcctctagatacctgcactttaatcagatagaaactttggacccagattcgttccagcatctcccgaagctcgagaggctgtgagttgtgtgttgttccttgcctttccattcacagagcccaagcctcagtcactggcttggttagattaaggtcaatatctaccaaacacctgaaaactgtttcaatataaaatccatatttctagtctaacaatttggaaataggacttataattttctctttaattgagagtgttgataaaacaggaaaaaaaaaccatttcttttgttttcagattcatttgtattaaataaatgtaatcactgagatttttttaaagctgatatatatttgactgcttatattcttttctacacattttaagaaatatttttcaaaattggtttgttataaaatctctttcaacagatttttgcataacaaccggattacacatttagttccagggacatttaatcacttggaatctatgaagagattgtgagtataaaaccttttgtgttttctttgctgcaaagccttctttctctctgttatctattcacctggttcttt

SEQ ID NO: 92469 - DNA, 1409 bp, Homo sapiens
tccaacaagcgtttcactcagtgggggcgagcaaatcttcatagcaaacagttcttccatcctgagtggatcggaaaatcctcatctggctttgtgctgggtgagtccagtgttatttttaaggaaggaaagggcaagtcaggggagaaacgaggctgaatgaggaagggcatctgtgaatcaccaagtagatgtttgctgaaattttggatgatggggagggcttcttgagctggccaggctgcctttagcacccagggttaggtgagctggggtctctggtgctgcagcttgggttccattcgttaaacgctgtacagtgagcctgagggcagcccgagccccgccctcgggcagggagctgttggggaggggataagcgagtccaccagacctcagtgagagacttgggcaaagggctgtatgtccagggagggtggcttgtgcctgaccctggcgaactgcaccccttccccggatcggctctacagcccagagctattgaaaacatgcattcctggtgacactgggagaccggaatgcaggaatgcccgggagcccggatgcagtccagggggatctgagtgtccctgatccagaaagaaggctctttgggaagctgtggacacaggtcagaaaacacacctggccagtcaggaaacatgcgtttgaattcaatgatgacctcagtatacttggggagccatttcctgtctttggtcctgtttcctcaattgttcagggaggggtggaggacaccccaggctgcctggggccccagcctctctaagatcctgtgcaccctgggccgtcatttcccgtagcacctgtgcagcaggtgccaagtcccacccactcagccgtccccctggccaacctgcattgcagtctgggtggagggatttttacacccatcgctctccgtggggcttgaaataccccctttccttccctcggtcagtacctcctcatccttctgggctttgcttgggggactccacccctgcctgcctgcactgaagcctcgctgagcagctcacagccactgtgccgtggtggtgcctgggtcttacatcggtccccagctgccatgggctgtgaaaggccaaggaccccagaaaaccacaggcgccctgtcagcacactgcctggcagagacgaggctccagggattctgtcgggttcggccttcctcgggacccgcgcgtcaggtgcccgcccgtcatgctcgcccacggcggttttccttgtcttcctgctccagtttttccttccctcacgtttcccattcgtgcgcggagtgctgagcacagacctgtcccggggcaaggggcagggatggtctgcgtttgggggccctccggctgcaggtgtccgcagagactcagtgtggcctgtgtgggtgctgc

SEQ ID NO: 92470 - DNA, 1050 bp, Homo sapiens
tctgttgcttctgttttctaagaatgggattctaggggtgagttattcaaggtgcattcggtcttcatattgtccactccccaaattatttctaggtattttggagatgtatcagtatcagttatagaatcttacagccaatgcattatacatgcctgtggaaaatggtttttatcttcttcaggctttgaagcaaatgtattgtcagcaattcattagccatagtctaaggtctgtgagttgcctgaaaaacccgtcgcagtggtttgatcaccttcagttggcaccggttgcttttagcccccttgagatctgagggaagggaagcccttgggagaggcactgtactcaccgtgcagatggtttgtttgcattctaatacagtcattaattgtaaaactgtctccatgtgtcaatttaattcttcttttccgtctgaagtttgacctcctgtctgtgtgctaatgctccccaatgtttcttgtttcagctatctgtacaagaatgagatccagtcaattgacaggcaagcatttaagggacttgcctctctagagcaactgtaagtgccccttctcttcgtgctttagttcttggatgccgtctggctgttttcctcttgtagggaccagtggagtgagctagctgtttgcatgatgcatgactatgctacctgaggtgcggggagtacgtgcatgatgacggaaaaacagggatgggcgagtcatttgccctccgccccgccttccacccagccagccctccacccacccctcaggacgtatccctggtttccttacggcggcaccaggccctgggccatgctttcctgacaccaaggacagtaatatcgatggaatccctgtcacaacttagaggagagacaggcaggcgcccaagtccgatcaaggcatccttcacaggggaaatatccagggtgcccggggaggagagggctctttgcctcgttcactgttcctccttatgactgtgaacacatgaagctgaatttcttcaattgtggtgacattattttggagaaaacctttc

SEQ ID NO: 92471 - DNA, 1081 bp, Homo sapiens
aaattggaaaggtgacgaagtgtgtgtcgtgtgcttttagaagagtattcttttaagacttagtcactttccaaagagagctatttttaataaaaattatttcagccatttttgttggaaatttttatcatatgtgaacctaaacatgtttaagttattttgatttttttttattttactttaagttctgggatacctgtgcagaacgtgcaggtttgttacataggggtacacgtgccatggtgctttgctgcacccatcaacccgtcatctaggttttacactccacatgcattaggtatttgtgctaatgctgtagttattttgatttttaaaacaaagtcgtcttgttattgttgatgtatactctgaaatctgttttgattctagctgtgtctgtgactgttaattacagagctacctttaactctgtttattaaaatatattccctctgtgcgatatttgtcagtgttacatacatcctttttccctccatcattgtggcataggatgttaatttttaatttcatataaacatgatgaagcctggtcccacatttctatttctaaaatgagaggcaggccttttatttgtttatttaccctttttttttttttttttttttttggtattttgaatgttgtgcaagttccagaagagggcttttgtttcctggaaagtagatccagtcagctgatagccagcattccttgtgtgtgtatatgtgtgtttaataggtttaacaggttttttaatattttatttcattttttgtcactggttttgaattattaagagcaacttagtatgcactcagcaaacacgttcaaagtggagttgttggggatgctctgttttcactgatctcttttcaataaccctcttccgacctcatctgctgcacagccggctctgagcgcccacactccaaactcttccctctctccctcggtaacaaactgcggtgtccctggtggtggaggacacagatcactggggtggaagaagcacaggccagtggtgaaggggccgtgggtcatgactcagaaacggactaaagaccagggcagtggagggaa

SEQ ID NO: 92472 - DNA, 1225 bp, Homo sapiens
ttaaaatatttttatgcaagttacacatgttcatgttagaaaaatttaaaaataaacaggaacaaagtgaaacaaattactcacattgctgtcattcaggagaaacattagctgggctttgttctcagatgcacacacacagaagcattcaggcgtgtgtagtacgtagcagtatttgtctacctgttaatatttatctgtcatgtatctattttcaaaaattgggtcatgatacatgttctgctctataatgcactttgtatggttttaaaatctgggaatatattatgattgtgtgtctgttcaataattagaggcctccatcatcattgttaatgaccacacagtatttgtttgaaatgaccaaatctgcctaacagaatttttattatgggtcatttctttgtttctacttttctgctcctgcaaacaatatttccaaaatgtgattgcatgcatttttgtgtgtgtctgtctagattgtttttacggcacatttctagagaaatctttttttaaaaaaaatttcagtagatttttggggaacaggtggtgtttggttacatgaataagttcttcagtggtgaatcctgagatttgggtgcacccatcacccgagtggtgtacactgtatccaacgtgtagacttttatccctcacccccctcccccaccctgctgtaggaacattctgggaggttttgatctgcaccagggatggtggttggcctacggtgggctttccctgttgtgttttcttcctggcccctgttcatattatcctgcggatggatgttctctgtagctgagcagtggtgactgacttactacaggactaatatagaatgcaccttcgttggggagcctgtaatgggtcaggagggagggctgaagggagggtcaggggctgaaggcaccgtctctgaccccgggatggtggaaatacagcctgtgtaagtgctcatgtttctttgctgagtgactgcattttgattcttacaatttgttttttctgcaaatggtttgattttcggtatgccctgagagccaaaccatctagcgtttgtgcctgtcatgtatgtttatttgccagctctgtctttatcccaggttctgacagttcgcaccgtgtggcttgtctgtgtcttgtttgatctctgcctcacagtcagctgttcttaccagacccatagtcacaccgggccccgcactgggaggagctcaca

SEQ ID NO: 92473 - DNA, 1048 bp, Homo sapiens
tataatcccatcttgttctaaagcagacatctctgaattcttctgcaagcaggtgtggtaaaataaataacatcataaaataatgaccacattcacattcccaagctcatatttaagaaaagatgaaaatgactcaatcctggtgttctccatctgtctttggaatgctgttgccttagtcagggccattcggctttagttggtgtcctgaacaatggcagaacctcagtgccttaaaacagtgtgagttcctgccccactcacacaaaaccccgtgcaaatgttcttggctgggcagctcttcactggaggctcagctctaagccttgggatagctgcgtgttttgtgcctgagctctgtgggatgtgtcaggccgatctgtctccatttcgtctgtggctgcccacttctggcagaggcagaggtgagtagttgtcacaagccaagctgtttagtctggcttggtaagaacatgtttgctctgacattgacccaaggatcccagctgtgccccgcctgaagctccaccatcatccatccctggcctcgaagctgtcacggaaggggagagaggaggttatgtgaaggctctctgctcccacctgctcggagctgatgcgctgtttctgctcccagcgcactggagagacagcacacgtctcaacccagatgcaagggtgctgggatgcggaggtcagctgcctgtccaggaagcccagatgcaagggtgctgggatgcggaggtcagctgcatgtccaggaagtggaagtggaccgtgagcttctcagtttttgccatagctgtcccaaagtttaatagcacacaattattgctcgctctcttaaaacttcctctcactagttcatgtgtgtgtgtgtgtgtgtgtgtgtgtgcgcgcgcgctctcaacagtgttctgttggcaaggatggagcagctctgcctgcttatcacttttcagagaggtctgtgatgttgatattccctttgcttgcttctgtgttctgggacttacagtgattttaccacctcccaacccagcttcta

SEQ ID NO: 92474 - DNA, 1091 bp, Homo sapiens
cctagagccttgtctcacagagcccctgttcccacagcattaaagtggagatgacagagtccctcctggagagccggtctagccattcagtgagtcagcagcacagctcctccagcacgcagagaacagcggtccatggagggagggcgtgagcctggggttttactgaggaaggatgtaagtctgggtttaactaagagagggcgtgagcctgggcttcgctgagggagggcatgagcctggggttccctgagggagggtatgagcctggggttccctgagggagggcctgagcctgggcttcactgagggagggcgtgagcctggggttatactgaggaaggatgtgagtctggggttaactaagagagggcgtgagcctgggcttcgctaagggagggcgtgagcctggggttccctgagggagggcctgagcctgggcttcactgagggagggcgtgaacctggggttatactgagtgagggtgtgagtctggggttcactgagtgagggtgtgagtctggggtcttagtgagggtgtgatcctaggggttcactgaaggagggtgtgaacctggggttatactaaggaagggtgtgagtctgggtttcactgagggagggcgtgagtctggggttcactgagggagggtgtgatcctgtggttcactgagtgagtgtgtgagtctgggattcactgatggagggtgtgagtctggggttcactgagggagggcatgagtctggggttcactgagggagggtgtgagtcgggttcactgagggagggtgtgagcctggggttcactgagggagggtgtgagtctgggattcactgatgaaggatgtgaccctggggtccactgagtgagggtgtgagtctggggttatactgagtgagggtgtgatcctggggttcactgagggagggtgtgagtctggggttcactgagggagggtgtgagcctggggttcactaagggagggtgtgagcctggggtccacggagggagggtatgatcctggggttcactgagtgggggtgtgagcctggggttcactgagggagggtgtgagtctggggttcact

SEQ ID NO: 92475 - DNA, 1019 bp, Homo sapiens
tccagttctctgccctcatgttcacatggtgctgtttatgtatgtctgtatccaaatttccctcttcttgtaatgacatcagtcatattggattaagcatccactcttttccagtctgacctcatcttaatttaactaattacacctacaaagactttatttccaaatacagttaccttcacaggtaccaggggttaggactttaacatgtctttttagaggacacagttaaacttaccgtaaagcataatagcaacatctcaaacttggacctctgctgagttagagatgtcactctaggggcagtatgcagagaattttggagggaaaaagtgtcctgggaacaggtgtgtgaattaggatgctgttaaaatggttacagaaagagattacattctgaaccagagtgaggttggggtagattattttgtctctatttaaaattttgtatctggaaattcaaaggcgttttcaaaaatgtatttccctcctccccttcggtgccaggtgtctgagctttgcaaacatggattttcttgcagctcttctgcgtgttgttggaggccaagctcatcaaactgcccatagtggggactgagcagctgtgcatcgggctgctgagagctgagtttgtttatgtaaatgttgttttattttagtctttccaacgactgccatggggcctaattctcagccaagggctaggaggaaggcctttattgtttagatgtaggcatttgggataatgtgggaagcaaactccaccatgtaatacgtgagcccttcctgggcagctctcctcatccagtgcttcatggagaagcaagactgttgccgccttgggagaggctgcggtctcattgtgagtcaagcataatttttcctttttaatttccacagctttatttagctttggaaacattccttttcaatatattatgttattctggtatatatttccttcctttataataaagctgtggaaattattctaagcatagcctacaacaaagaaaaaa

SEQ ID NO: 92476 - DNA, 1075 bp, Homo sapiens
gggacacccgaaatgtcaccgaacccgtgaagaccctggaggagcactcccactggtagggccgctcctggctgcttcagggaggaggggattacgcaattgattttgctaattactttaccattgggaaagacacaaaccagcttagtttgtgctgctgtgaatcattcaatcaacccagttttatttttcctaaagaaacactaattccaaatctgaatgtttgtgatttataaacgtaggaaaagaagaaaaacattaaattctgttttctcttgaaacagtgctggttcaagtatacaaaaataaatgtgcacagatgttcacgcaacattatttgtaatgccagaaacctggaaaccacccaaatgtccatcactaggggactggttaagtaaattaggtgacatccgtgcagtggagatgatgcagctgtcgggagaatgtggagcatctctatgtggctgtgggaagatctctgaggtcactcattctccctaacatattatttgaatgtttttcatgtgctgggtactttttgctaagtaagtaaaaagatcaagttgtacaatggcatgtatagcatgaatccatttttatgcaaataaaacgtgtgtgcacacacgggtgtacacaagtgtgagtgacacaggtatgtggaggaaatgtctgaaagagtaagagccaaaatctcatcaggaatcctccccaagtcaaagaggggcattcactccctatggcctgcatctctgtattgtttgaattacttatctgaagctgtatgttaaaaccccggattggtagtgcacacttctgataaattcagtgacttgctggaatttcctgtggtctgagtggctgggcctccctgtgcccctggccatgctgggtgcacctcctagcgtcaagggcctggcactgtctgccacctgggccctggagcttgttttggcctcagcatgacgggaggcagaagctcccaggctctaggacccacgccagcaagaaagctgatcccagtagccaaaaccaaggacagcccttgtgccccgggaggccgccatgccctggtctc

SEQ ID NO: 92477 - DNA, 1056 bp, Homo sapiens
ttaaaagtttaggtattatattttagggaagaaatattaagatattgcaaaggtgcaggatataaaaaccagaagatttaaaagtggtttagggccgggagttctaatgtgagagaaaaagatgaaaggaattgagttcctctactttggagagcagagaacaatgatggtcttcagataaaggaagcaaattacaaggcacagaagtttcccattgctcatcagccccattgaggcctgcggtgaggaaggtaaatgatgcaggagtgatttcagtcccgcccacggcagtgctggggaggccgtgcaggtaggagctgctgggcagcgccaggccatgggttctttgctctcctgggcgcagccttttgttccaagccactgtccagcctcactggatgacctgccctctgggattcatgacatcagggccataggcaggatattatgacttcagaccctgcgaggagcagccaaggaccataggatccagggcaaagtgagatgtgtgagtgcgtgtgtgcgtgtctgccctctcatgcatagatgtgtgcatgtgtgtgtacatacatgtgtgggcgtgcacacagatgcacgcgtgagtgtgagaacgcacgcactgtgaacagccgtgtgactcatttcaaacagtccccttctcccaccctggagcgagtgggttgcactggccaccagcagtgttggacctggagctggtgtggacagtggaatggcaagcccagctggcatggtccttcctgctttcatggccttccccactgctcctccctttctctctctctctctgtatatatctatagatagatagatagccggccccttcctgcttccatggccttccccactgcccccccctttctctctctctctgtatatatatagttctatatatagatagatattttgtgttgtatgtgtatgtatgtatatatatataaaatttcccaacactatattctacctcaactccctgtctttttcttttccttcttcactgtgtccttccagaaatgtgtcaggcatcctgtccaaatg

SEQ ID NO: 92478 - DNA, 1655 bp, Homo sapiens
gttgatcagctgcaaggctaattggtagttggttgatggcttaattaattaacttactctttcaaaaatctagacgagtccttaagctgaaggttaggatgtgttttatcccgtgggttttggacgcaagcggtgctccattttgctgactgaacttctgcaaggagcacttacggagttagaagttgaagtgcaagagcttgggatggcagaatagctctgttgggggctcagcttgcattgctcggctcaagatttcgggccttccccttctggaatggccctgtggtgtttcgcacacacgagtcatcaagaacttgtccaggccactctgccgaatttgcattaccttctaaaggtgtgaccttgtgtttctgtcttctaaagagtttcataatgaaccaatatagttagtagaaagttaactggaacacagtatcgattagttagaaacaatatccagccttttcattatatctgctagttggtcttttttactgtattcattgtcatcaatggataatcattaacctgataagtaggtcttcagaaagctgaaatagtacctgtaaaaaatttcacttgacttttttctgtttacctaaagggaatactacaaaggtatttcttcattcatattgtccatgtggaagttaagacattgaacctaggccgggtgcggtggctcacgcctgtaatcccagcactttgggaggccgaggcggacggatcacaaggtcagaagatcgagaccatcctggctaacatggtgaaaccccgtctctactaaaaatacaaaaaattagccgggcgtggtggcgggcgcctgtagtcccagctactcgggaggctgaggcaggagaatggcgtgaaccccgggaattggagcttgcagtgagccgagatcgcgccactgcactccagcctgggtggcagagtgagactccgtctcaaaaaataaataaataataaaaaataaaataaaataaaaagacattgaacctaactaactgtaagttgccaaagttaaagccaaaaattagctcaccctgtgtttctgaaataatgtgtacactcgaatcattgctagtttttgacgtaatgttgctaccaattcttctctttaggaaactgtattccatcattgctgttggcaatgtttattttgacctactccccaactggcttttactaaaggttttcttgtggcttagcgtttagggtcgtgaattttccagctctgttttcttcctcggtagctttgcaagggggaccctctccttggctcctgtgtgtcaccctgcacactatatggttccttggagcttgctgtgggagccacgctctccctccctgcagtgcctgtgcccccgctctgtgtctgggtccatgctgagtgtatctgggagcccgcctcccgcaccagctggaaaagctgcacccttgccgcaaacgtaatgagaaggaagagatgctgtaaaatctgatggagtgaaataggaaggtgggaggcgcctctgattttatgcgcagagcactcccctcttttgttaacatcccccctccgccatggttgattgttcctggcgagtgcctggcccggctgtgccagtctacctccttctccaggaatttggggtgaggtctaagggttg

SEQ ID NO: 92479 - DNA, 1072 bp, Homo sapiens
agtgtcagtccctgaggatgggatgggaacgggctcagggtgggatggtcatggccgttttgtaagccagcccctcccgcttgccgtgcagcccagggtgcacaacctgggacacgcctgcaccaggtgcttcatacgtcctgcgccctagacaccacagccttgctgtttcttcaccctgctgttctctgtccaaggtgagagggtggtgcgtgcttccctctgctggtcctccattttccttggtattggtcagcgtgcatgtagtagggtctgctgtgagtgcggcctgcaagtagtagggtctgctgggagcacagtcctacatgtagtagggtctgctgtgagcacggcctacacgtagtagggtctgctgggagtgcgcctgcatgtagtagggtctgctgtgagcgcagtgctgtgttctctgtagttttcctgtcctccaaatcaagccacccttgtcagctctgtggctcttgatggcaggaaatacagctttttgtctctcaaaatcttccgctgagactcttcttagatatgctccacatgaactgctaaagacgatgccaggcacgtcattttgctcgttaggaggtgtattcttttgttcacattctggcattagtaacatctcccttgaaagttttgtgggcgcctttaatcattccttttggaccaggaagcactgaatattcttctttaatgtcgaaaaacagattactgcatgcattgcaccctgtggagttcttgctgagtgctgtctccatgtccccaggaaaccaaaaattgtgattgattaaccttacaacttacactgcaccgtctgccctgagtagaccctcagaaattgatggtgaaatatctttcaggcttttattaaaatttaccttccaggcttctctgcacctgtgagtgtgaagttttcagggcctgggagtacaggcgttagcatgaccaatggagtggagtcaggtgacagatcctgtttctgcctccagctggctgtggccacaggcagctcacccactctccctgggttctagttttcccagctgtgcagtaagggggg

SEQ ID NO: 92480 - DNA, 1074 bp, Homo sapiens
cttgataaacagactttttctaagtttattttttatgcatttaagaacgcgcaaaacatcctcacatactcagagggggcgggatgaattcttccctcctccttcgtcagcacacagtttactaaaggcctcttaggtgcctgtcacagcctgagctggctgcttgcatattcccatgagtgggaggtgtgagctcgttgctcatacagttgagagtctggccaggaacccgggtgccggtggtgatcaatgtgttgcatgtgtggggggagtgcaggctgccacgggaaaggaccagggaaagtcccagcgacctttgtggatcagtcaactccgtgggaggaagtggtgtttcgaccaaggcctgagaatgtgcaggccaagtgataggaagtaggccacatctctcttcgttgtcatctgcaaactacgcattttattgtaagctatgtgcccttccagcttcagtcctggtcctgtgaagaataatccatcttgccagtctcaggcttgggcagtttgtaggaccctgaggctcctgggctcagattcttctgaattgtctttcttgaccctttccctctttgccttgacatttatctcttaacaagaaagacacacaaaaccgtgattggttagggaaccgcccgtcactactctgcaaacatgtagccaccacccatggctgtgtttccagaaagccacgaagcttctgtttgtgtagttggtttcctagactcctagcaagatgatatctcgatctggtctctctgaaagcgaatccacgatgtcatcatgcacccatctacccaggtgacaggttttcagtctggcagtcattcttcagggccctccacgcccaggcctccctcccacagactcagttggtaccgaggctcaagtgccatgtgaccttccttcatttccctgtgctctttgcagacttcatcacagccttacaatgttccctgtgatcttcagaacccaagaagcatttcttgaaagctttacctgtgagaactcgaagccagttattttctaaagcaaatcaatattacctcctgtagtctttaa

SEQ ID NO: 92481 - DNA, 1496 bp, Homo sapiens
ttttgagacggggtctggctttgtcactcaggctggagtgcagtggtgtgatcacggctcaaccacagcctcggccttccaggctcacgtgatcctcccatctcaacctcctgcaaagctgggaccataggcatgtaccaccatgcctggctaatttttaaattttatgtagagatgaggtcttaatttctaaattttaggcagagatgaggtctccctacattgctcaggctagtctcaaactgctgggcgcaagcagtcctcccacttcggcctcccaaacactgagattacaggtgtgagccaccgcacctggcccagattcttgtaagaaagatttacatcagtgctggttggctttagccagcctagatgcgcttaggtgtgaagtgcctcacactggcatgctttcctggttactggctcctgagcagagttgtctattagctttccaaaggagctcagaatgatgcctaacatcccttagtttgtgcaggaaaagaacaacttgtgttattacaggagaatagaaaaatgtcttctttcaagtttgtttaaagtctccatttaaaatggggaatgaggctgggcatggtggcttatgcctataatctcaacattttgggaggccaaggcgggtggatcacctgaggttaggagtttgaaaccaccctggccagcatggcaaaatcctgtccctactaaaaatacaaaaattagctgggcacggtgatggctgcctgtaatcccatgtactcaggaggctgaggcaggagaatcacttgaactcaggaggtggaggttgcagtgatcccagatcgctccactgcactccagcctgggtgacagagcaagaccccatctcaaaaatacaatacaatgcaatgcaacgcaacgcaacgcaacggtaaagtaaaataaagtaaaataaataaaataaaataaaataaggaatggttatcagagtctcccttgccccatataaatgttattaaaattaattattagaaaggagatgatgagaaaatactttagtaaaatgcaaagtacaggcgcaacttattctaggaagagtcataatacaaaaatctaaatatacagtgcagaaaatatagataattacttatattgcaagagaaattcctatctcccctaggattttagttcaatttccattaaataatgtggttcaaaagtatgtttttgttgatccttttatgaagcaaatgggtgttttaggtaaagagaggcagatcggtgtgtccaggcgaatggctcagaaaacgccttagtccatttgggctgctttagcacaatcccataaaccaggtagcttccagacagcagaaattcattgttataagttctggaggttgggaagtccacgatcaaggcgctggctaagttggtgtctggtgaggcccctcttcgtggttcacagatggctcctttttgctgtgtcctctagtggtggaagggaagaaggagctccctca

SEQ ID NO: 92482 - DNA, 1078 bp, Homo sapiens
gcttttctaggtactctagattcctggagcatcttgaaaatagagtatcaagactcagggagaccgagcagccaccagcaggatcgtgtaaggatggcactctcatttctaggagaagaggctgtattgatggtgacatgaccaggctgggctgccacctgctgcccaccagggctccaggcctcagcatgcgatgcctctgaatggcattaccttccggtcccagatactcatcactttaggtaaactgaggcagaataacatgcgtgacaggatttccgaatggaatatcgctcagtgtgcctaatagtcatttaaggtgatctcatacagctatggagagaaaacccgtttaatgccaaccttagacaccagctgcgtgcgtggtgattatatctttagtcccccattttgctcccttttttgaagaactattgaagaagaacggaaggaaatcgattttgaggaaattaaattttcttttgaaacagcatgatggtttttaaaacaaagagaaagtggggaacaggatgctgattacgaaccgtgccgggttctgcctgccgactcaggctgtgcttctccctgctccgtctttgctgcctgcaatcgtacatattttaaagagcagatgcgcgctgcttatggatttgtgtaaatgtgcgtgtgctgtctgcagaatgcggggcacaccgtgctctgttgacattatccattatgctctgttgctcagcttcagacagcaaagtcctgacatgtgcagccgtgtggaggatgccgaaggaattggaatcaggcagccacgagtcccctgatgattcatccagcactgcacagaccctggagctgctctgtcaccttgacaacacagcccatggcaacatggcctggtaggattttgcatatttcatgcgcccagaacgagcctgcaggttggccaggtgcaggagcttgtgcagattcctttgcaggagccaccgtccacacctcggaaacgctcctttcttttaaaaagctgcgagaatttgatttttaattttagtccctgtgttttctagattagccgcattgacagaaa

SEQ ID NO: 92483 - DNA, 1037 bp, Homo sapiens
cttgtgcccactgtgtctctggagctcacggccagcgagcccctgacacctccacttctcagcacccccttcctgttggggcagcagcctgttgtgatgctggcaccacctcctgctgcctcctggccagcagagcttgtcagaggcgcgggtgcccctcaccagtgcctggaggataagagagttggtgtcatccttgtcttgctcatcagccttgccgccttctgcaatcagtctctgcccctgcacactcaggcgatgcaatctgtacatggtgccatccctaaggcatttaaaaggccatcgaggaaggtatttttaggcccagatcttcagacatcctgttgtgcaccccgaggcgtacctgcatcaggtgagcgcccagtgaggctgtcatttgtcctcatccatcctgctcagctcctgccagactcagagatggctgcgggctctaaaaatagtcccatcttaaggtactgcttatgcagccctggaaacctcctcctcctccagctggggatcagattatgtcccccaggcagggcattgttcgccctttagccgggctgactggagctactattcatgctcacaaaggctctgatctcctttgaattcctgtaagccttttgcctggtaatcccttccagcaggcagcacacccgtggctgcagttggcagtcgcgaatatgcctccctcccttcattttgccctgattatctctttatctcattaagggccttgagctcttgtgttaacatgtgaaaagtaggtagtggcttcaaattggctttgaagatgcaacttggaattttctctttcaaagcagggggctgttatgggagtcaggaggctccattcattctggacatcagcgctaatgagctgtttgaacttggaaaagtcagtggcttcactgggcctcagtttcctcatttgtgaaatgaaggggctgtgttcattcagcatgatatcggagttccctttcagcctaggtatcgtgtggttctctgacttctgtcggcacagacacagt

SEQ ID NO: 92484 - DNA, 1039 bp, Homo sapiens
agggcttagccaggagctgtggcagggcccatcagagggcattgtgtggttctgtgagcgaccgtggcagctggaactgcggcactcaccctggaggccgtgacaaagggtgtagtggtcgtgatgagaggcgtggatcaaggtggggccagtatcttgtggcctgagcaagcatgtagcactgatgctgtctgttgagacgggaagccccgggaaggataaggctgggggccgctggcgttcagctttggacactaagtgtgaattgcgtatcatgtgtctactcgtctgctgaagctggtggctgtgggagcctgcgtcggggagatgagcatgggaaatgtgaattgggtgctgttgacacaccctacgggattcaaagccctggggctcattttagacatggtgcacatagggagacaggatcacggatggctctgggcatgcctcgtttacaagctgggagggagaccgagggaaccagcacagaagcggaaggccaggaggctggtgcagagtggggagcagggcatggctcccaggatcccgtggtccctcagttcggttttgggtctgccattgcccttctcccacagaggacgagactgttccttctgtcatttttgtaggcatttgagatccaacaacatactctgggtccctgggtcacacgccccatcctctgtctggacagagagaaaaccctgagctcggcgttctttgttttaaaactataatttggaggatcacccagagagaagagagagacagcgaaatgattgagaagaaagagacaggaagagcgagccctgagaggtccaggaagcaggcggcaaagaggtttgccaattaatacagaaacaaatcctcgcttgtctcccctctcccctgaaaccggtggggagatattaatagagcagttctgttgcctaggaagaaagcaaatgggcaattaaaactccagaaagctgagcagtgcgtgagcgtcatggatttgaaagcctgcattttaattgcgggagatacggccgtgcaggca

SEQ ID NO: 92485 - DNA, 1105 bp, Homo sapiens
gggcctgtagggctcacggtcttttttgtacgagtatcttatgaaggggcacttgaagatgataaaccattaacataaatgatgggtcagccacttaatggactgggtcccagtctggccgcgcagtcacctgaggacttagggaaagttccagtgctgcaggcctcaccttgacccagaatatttcccaacagggccccagatgttagtaggttcattcctgagtgatgttagcatggagccagaatggaaaactcttcaaccttcctcacagagcagagcatgtgtggcaggagggttcagtggacataggctgccatgtggccccgtggcgagcacgtgtgcatggtgcccctggagtggatggcccagcggggcccctgacggccacaggaccaggacacagacaggcttggggctgacagcatccagctgtgccacctgctgtgacattgccatggtcatgcgaaggtgaccaacttacctttacataacattgtgtttctccaagaaaatcaggaaaacggcactaaggttgatatttgagaactttggtttgctctttataaagtgataacaataccatgatataaaaaggtaataacttccacgtctattatacagattaaatgagagaaaggatggaaagggcctgggtgagtttcttagccacactccctcacggcatcaccccagagaccacttgaatgtgttccctactcaagacaaatggatgcagattgaatttaaaaaccaattttttaggaggtatgctttatgtttagataaaactatcttttaaattatgacgtttttatgatataattttgatctatatcataatgtatttaacaactaaccatctctcttagactccttttgaaagcagatagttatgagttctaagtgttcagcacccagcatagtctaatatatggatttgggtacactgcagaactgtgcatgcagcccgctacgtgggttggggtacacggcagaactgtgcgtgcagcccgctacgtggattcgggtacacggcagaaccatgtactcttcatataggatgatagcccactttgtgctgatgtgtgtcctaattacaaca

SEQ ID NO: 92486 - DNA, 1174 bp, Homo sapiens
gcttgcatcctgaagctgaggcactgacgagaaggagagggggcgggcctgtgtaaaggcatttagatagacctgtgctggaaagaccagaagccagccattcatatgtaatcactgtctaggtacaaaggagagtacatgtgttacaggggaaactgtcgttttaatggaccaaatagaattttggagttttgacatcttaaaactagttttccataatataggacattcattttgcaattgtgaaaactgggaggttaaaagtcttgtttgggatttcacagggttgaattatatgaaattgctgaaatttgaccctttttgacctataagaatggcagtttcatatggttcaaactattgatttagtgatccagccacagctgtctgcactggagtttgcgctttgccaggccaggctgcatacctcactggggaatcttagggtccctgtcaagaggcaccttggagaccaaatagtgtgactcttgcgtcataaatttgctgagtctgggctctgagcacttgagtgactggcccaggatcactcgactgtgagtggtggtgccgagactgggaacgagatccttttcactcactgcctagagaaccaagctttctacagactgtcaagagagggaatgcagcttggtgaatgacatcttagggacgtataagattgcatgtaaactgccaggttgtctgtcttccgtgatttggcaaaacctaagaagagcttacatagcttacacgtatggccataactcaaagtgtgtgtgtgtgtgtgtgtgtgtgtgtgtgtgtgagagagagagagagagagagaaaatattttcctttctgaaatttaaaacatacaaatgggaatttcagcaggctatagtgtcaaagtcaatagtatgatttgcccattaaaacaaaaagccaatctaatccaaggactctcttttcctaagagaaggagatattcgtaacaaggccgcgcccagtcagatcacatccatgtggcatccagctctcagaatgccatcagcagagccccaagcagagtcgctgggacaatgagctgacccagggccgagcactgcaggacaaggggccaggacagtgagctgacccagggccgagcacggcaggacggggggccaggacaatgagctgacccagggcggag

SEQ ID NO: 92487 - DNA, 1056 bp, Homo sapiens
caggcttcaccagaaccacagaatatcaggcggtgactctgatcctgtgattcattagacattggcccagaggcaccctcgttaaactcaaagctgattgagtttaggaaatcaggggttttctttttgctgtatgccggaaagttttcaggtggctggatctggaaccccaagtcgctgagggagtattctatacacaggtttcttgaattcagttccactctggagattttcccactgctggcgtggcctcaggagccctgtaaaagagtcctgtgagcttctgctttatcgcatctggcagtctctccgccttcagagccctcatggtggtcctgtcaaatcctaactgatgcgctgctccgccttctggcctcctgacccttgttttagaagtgagaagcccagatgtgagttctaaatttgtttttattcccacgtgttcctgatagaaacacctaccacatctaacacctaagacattttaaatggtgggtttgagtatccacaggtatcaaagatgactaaccatcccttgccacttgtcactttatttttatcctactgtgttattttatcaccttgagactgtatttaatcagtctctgaaatgaaaataagaggtttgaggtgtcaaacaaatattataagaccagaaacacttttctcgtttggttttgtttttaacacagttcaggtatgtttggccaccattgtgggtacctgagtaagaactaattactcaataatgagcctggcccacttggaagaagaaagagcattgtctgacttagtgacctggcctgggagactcctcagtgttcagatggctgtcccctggcaggcacagggagtgaaggccagttctccttggagcattctctaacttagtgacctggcctgggagactcctcagtgttcagatggctgtcccctggcaggcacagggagtgaaggccagttctccttggagtccccgggacctgcctccatgcttgttgttgtgaaggggtcagaaagaagatgtgtgtttgttgccgtctactgcatctcact

SEQ ID NO: 92488 - DNA, 1013 bp, Homo sapiens
ctagctggaggctgggggagagagctttctgcaggcagtcagaggggcatcggagcctagaaccagaggagtcccaggatcaggtgtgtccttcagaaggtcccagggggattgggaggggacacaagagagggacggcaacaggctggccggtgagtgagaccaccgagggccctgagcccagctcctgctcctcttctgcctgtcacagaaatgcttgtcaccctgtggtcttggaaagatagtctttacgaagaaaagccaagtacagtgaaaatatgaaaatcctcaacatactggtgaaatttcaggaagaccaaaaaagagagtatagccttaaaaataataaatgtccacccatgatggagaataaatgtaaaatgatgtggcaaagattgataaattaggactgtgaagcctgctgtataattgggaactggcttagctcgagcaagccctggcctcaggaaagggggctgagtggcagctggcattagcggcagccggaatcaatctcctgcctctgtacttgggaacgagcgtcccacgttagaactgggatgaatttttcagcagaggaaggtgaaatgtcaggaagactgtagatcacgctggcgcagagtcctcgggaaattagagccatgaaaagctgccagcgcggcgccccaatgacatatggccagcgtgtgtgctctgcatccgccgatgttgctccccgggtggtgctctccggggagctagcgtgagaggggggctgggtcagctagtgccaccctccccgggtcccagcggctcagggccattgacccaggcccgcagctcggggacagccccggctgctgctgtgacccgctgctaatgaagaccggggggtgagggtcagatgcacataatgagccctcttgcctctgccttcctcgccctccctgatccgaatcctgttttttccttcatttctgcccaggccccagcttgggccttgagtttctcatgggaacaaagacagtttgact

SEQ ID NO: 92489 - DNA, 1047 bp, Homo sapiens
agatgctgtcgagaattggcttttggaatccttcattgtgaagagcagcctgtatcatttgagctcatgcgtggctgtgggcagcgtggcctttgtggagatttccactgctgaggagtccgtggatgaggcagcgtctgtgccttctgttcactgggagtgatgtctgatgtgcccgcctggtccaggacgtgctttttaagctgtagaaagaaggtgctgaactagagggttcctgagatttcttttagcttcgaggtctggaggctctctgctcatagtgaaaactgtatcctcctctacagattaacaagaaagtcaagatacaatggttcttgtttaaagatgcattttccccttgatctctgcaccaaatgagaagaaagttgcatttttgagtggttactttgcattgtgaaaataagctgagagaagaagtgggttttcgctggaaaatagtattcttagtctcctctttgtgaaaccagaattctgagagaaaatgaccgagagccctttgaaagaatggagtacgtgagaggtggggagaaaagttggaatccatcagcctcatcgtcaagtgcctgcttaaagacggggcggcgggggcagaggacgctctgctgcactcaagatgctgatacatttctcaagcatgccggcttgtgtgtctccggttaaagtttccttcccattttctgtgcagatgttaaaagattgactcctttccttttttcagggtataggtgctcagctgggaaaggtgagagttaaattttctcatgatgctggtgccaagaaatagcaccttgaaaagagaaagaaatcaagacatgatctccagggagctgtcgtttggagcacattcccgagagctctccctgggccgggaggctgcgtggtgtcgttcccctcagcagcatgcttcaggtggagcctcctgccctgttcagatatgttagataaaaacaccttgacagtgccagcccgtctttaattttcacaccatctcaagtaaaatatgttttgaaatgaaaacattttgca

SEQ ID NO: 92490 - DNA, 1022 bp, Homo sapiens
gcatttctttgttgccttggtagttatctgaggctgtgaaacagattcaggttattcttttagtttttctagttgttatctgcagaagagttggtttaaaccccctactctgctattgctggaagctattttctgctgtattgttgaagtataatttgtttaaccagtcttttactgttgaaataatagttttactaaaaattaatttaaacattgatgtgtagataatttacatctttattacttaattttgtacccatttacaatgatttccatatgcaaatttgaagtggaattgtgttgaaagtgtgcaaaagtcaaaggcatttaatacatatttctaaattgctttccagacactctgtactaatttatactttatcaacagtagatgagataaactgcctttttaaatctaacttcataatctctattaaatctaacttcataaatgtgcatgtgtttttcttccctcctgcaggcacgtgccttaacacctcaaactgcagaaacagatgccattcggtttttggttgggacgcagtctcttaaatatgataatcaggtaactatttttgacaaatgtatacatgataattactaagcctattcttagttttataaccattttgctctgattttccagcaacatttgagaaattaatgccacataaacaaaataaaactttcatttggatttaagtctatcttcaaatcaaagaatattatccatctatatgtatcgactgtgttcagtaatttaaacttcctctgtttggcatgacttccgtagtcttgtttggctcttgtggttatatagatttggctttatgagcaattgagaagcaaggatatgtggtcaccactaccccttcttcttggcctgtggattccttctttaattgctcatagaactctttctaggtgagtgtggggtgtgtcacaacctcatccctacttgacccaggccacttgatctgtcactgccccttgatccaggtggggatacagatgggaccctt

SEQ ID NO: 92491 - DNA, 1041 bp, Homo sapiens
tattcttcccagggagatgcagttaaagacttgatgcttcgctttctgggtgaaaaagctgcagcaaagagacaagtcctaaatgccgactcagtggaacaatcttttgttggattgaaacagctaatcgtaagtgacaatgtgtttgatttcagtgttgttttgtgataagtcctgcctgccttcataatattttctctagaagtcaattattttgaatattattcaaagctcttgcacataagtagaattttgttggagtagatgccagtcctgtgcaccaaaaagcatcatattaatacatggatacttttaagcctaattagttaaaaagccattattggaaatgatcaaattactcaaagcagtgcatactttgattgagtttgcttcatcatatataatagagataaatgatttgtgttcattttttaaatatattgcattttctgcattttgtgtagaaagtttattattgaatgggtgaatttctgaacatttttaagctttgtcatgaattctataagtaggtttttaaaattcatggctgggcgcagtggctcacacctgtaatcccagcactttgggaggccaaggcgggcagatcacaaggtcaggagttcaagaccagcctggccaacatggtgaaccccatctctactaaaaatacaaaaattagctgggcatggtggtgcgttcctgtaatcccagatactcaggaggctgaggcaggagaatcgcttgaactgggacccgggaggtggaggttgcagtgagccgagatcacaccactgccactccagcctcggctacagagcgagactccgtctcaaaaaaataaaaataaaaaaacattagtactggatcaccattgctgtacaggttgatttgtttccaatgaatttataatcttaaagacagctgtaattgcgttgggtagcttttctagattaaggagaagatattggaagtttgtcgcgtatgtttccttcaggaatcctatggtagccatggggtaagtactctgaaatgagagcccca

SEQ ID NO: 92492 - DNA, 1049 bp, Homo sapiens
gtcttgttcaccagtgcatctgaggacccagcacggtcaggcacagaatgggtacacggcgtcttcttgagtaaataaagggatgagggaatgaatagataagagaacccccagtcggtaagctactcttttgataaagaagtagcgtcagaatgttgggtttaaagaaatagagaaggagctcatacaaaaggatagagtggggggcggttacgggggagggggcgcaaagagtgaggagatgaaaccacaagaagattagtctggagaaagatggaacatttcttcctctgcaatgacagaaaaggaaaggaaggatttgaaaggaatgaaaatcgaatccagcacattttcaaactgtgattctgagaaccctcgggttccagggagggaccttggggtgactgggcatggcctgcggaggtgacttggtagggccagtgtcaggcagagcatttcagcagggtctactttatgtagaagtctctcttgagatgtctttttttgggggggtggggggaaaggaggatgaattttactatttaaaaatttgaaaaactaacatagtccaaaatgcccgctttgtagattagaacactaagatctacaaaggtgtagaggttggccccaaacaaatgtccttgctcctgttaccagtaccatccctactgccccatgtcccttacacagtccgcacagcccagcaaaaagcacagttgctggtgttggttttgctcattgactacctcccaccaaatgacttagtatttctgaaccgtcggatctacacaccgtgggaattacgcttttcaatacagcttctaggactggattgtatccaggggtaggatttcccatgagaagaccttatatctgatgggattcaaacaaacaagttctcacttgtgtttcttagtgtattcattgagcaaacacatattaagcctcttctctttccagcaataacaataaaggttgctaagctagtgctcttgctccgtgaagttctgccttcttaaccatttatgggatttactcagatttagaag

SEQ ID NO: 92493 - DNA, 1054 bp, Homo sapiens
cacattgttattaagctcaatagtaatttcttcttagagacagggtctcgctatgttgcccaggctggactcagactcctgggctcaagcaatcttcccacctcagcctcctgagtagctggaactgcaggcatgaggcatcatgcccagcttcaagagtaattttttaaatacgattgtgtaaatatgcaaagatagaaagttaggttagcccttattttaatatatgagaaattaacctctaacaccaactcataaggaatagcaaattctgaactggatatatgtagataacctattgtttccattgtattttgtttttagctctggtttgtcaggctggcactactagtgaagttgggccttttccagaatgctgagatggaatttgaacccttcggaaatcttgatcagccagatctttattacgagtactacccgcacgtgtaccctgggcgcaggggtaaggccatggtatttaatatttgtacatttgtctgtgtgtcgctctggtttgctttgatttatacataatttcgtagcctcagttttccttatttatccagtcttgaaaaatcagataagtacccagcaacaagccttgacttacagaatgctcccactccgatttaccgaaacactgacctggaggtgctccctggtgcatctgtttgtacatttagcagctacgtgtcaagcacctgctctgtcagggcagcatgatttggtgcaggggccgggtagtagacgtctgagctgcgctccacagggaagagccgtcccatatcgggacctggcgcacagagatgcagagcggtggaaccaaacgtgtccgtgcatatggcacacgccgtgacattttccgtttgtctctattctgatttaatttattttaaaaatctggttgtggttcaccctttgggtcacggtcacgaccattgtttggaaaacactaggctacagcatagggtagttctaggagagtgacaagaaaccaccagttgggaagggagaagggcgggttacggagagccttctgcagcactgggagcct

SEQ ID NO: 92494 - DNA, 1038 bp, Homo sapiens
aaatggagacctctccttatcctgtctgcacaagatacaggccttggccagtcactgggctgtagctgaagccacacgtggattgcacatgactgtggcagacgcgtacagaggcagtgacccaagcctcagtttgtcttcatgcttcagggctttagttaagcaaatcatttaaataagaaatatttaaggtatttttttctcttaggactttctcactgtttttgtgtttggtttgttttgttttgtttttaatttacaatgccacattaaagtcaaaaatgacttgttgagagctgtaagtgtgacactgtgtgcttggccgggcacagacaccaagcagtatccccagcgttgagcacaggcaaaccaaaggcatggcttatcctgcctgctgaggtcaggatagggaaggacacacccagacaggcagagacagtgggaaataaatacaaagcagtcttcccagcaaagcactcgcgtaacttgaaaatgagacggaaatgccagggcaaacttgtaagtttgtgccttactgaagaaagctgttaaaattgggcaaagggtctggaaggctcccgcagacccttctgtgaggcaggtggcacaggcgtccaggcatcatgtcacacctgctgcggcctcacggcaacctagctgcctctgggccctcccgccctagtttgcagtgacacagaaggctgcagagaggatgtgagccacccagcacaaacagctagtgagtggcggaaggtagcataccccactgaagggaagctgaaatgtcatctttgttccctttcatttttcactgcccagcaccaaggcccgggcaattcctggcacatttctcttttctatagtggcagcacggattttcagcacaacaagggacggtctgaaataaattttgtaggagtattttcatttaatgttttctaaatgatgaatgagaacacttctacagtatttataccaacctagattttggcaggtcacaactatacatgggaatcttccggaaaaatagatccacta

SEQ ID NO: 92495 - DNA, 1043 bp, Homo sapiens
cctgctcctcccacgcgccctgcaggctgtctccctctggggtcgagagagcttcacagaccatttgggaaagagccaagcaaacacacttctgcaagccatttgcataagtagacataatccatacggaatgatgcactgttcggttgtagtttcattcgtcagtgacctgcatctgcccgcccagtcttgagttcagctccatccctccctgcagttccgcagcctccggcttccccacctcagcttggctgagagtttcacgttcatccaagtgcttctttacagactcactcccagctggaggaggcagagggtaaggtacattttcgtgcactccggaaaagaaacgtattcaacaatgtccatgtagcttttgcttctctattgataattgctaatgtggtagtgagagctttgtttgtaggaagagttaatatcttttctaaaagggttttttgacagatggacattcttcagttttgctgtcttatttgttaagcaaagttagaaacataagtgagaacaggcgtggctggcctctaacactgtcagggccaggactcagggcctggccacccgcacaccgacagtggccagttattgccatcaccgtgcctgacccagagggtttggttgcccttcttttctgctgcttccacagaaaacaaattgattgtggcttaatcagatgagatgggaatgactggcaggtggggagaagaaaggaaaggccgagtgaggatggccatccatcgaggccacttccctgctctttgccattgaagcccatgctcctggaaccccgtgtgtgttcagaatgtgcaagcagaagaagaagagggagcggaaagcactgggcatcagggctttccaggggaatgtcttgacctggctggcagtggaaattcacaccttcagaaacctctagagttcatcgtggccaatcctgggacatggacttaggaatgcccaaccccgccacccagccgtggcaacccgattcaaaaccaaatgcaccaaatgtgaactcgaaggccata

SEQ ID NO: 92496 - DNA, 1165 bp, Homo sapiens
acaagagggatcttttaaagttaaattagaattcacaggacccagtaattgagggctagaaagagcctcgaatttatttgtgcacttacaggctgctcttaccttgtagcctctatccggctgtggaggtcacgtctgggccgggtgatgtactccatggcaaactgtctgctcctgatgaaggtacgtgggtggccaagcagggctgccatgtgatctggaagagcggggtcagtgggagccgcgagggagccgctggtataatagatgctggcagggaccggccgtgcagagaagccagctaagtactggcttaacagggagcccagtgacacattatggggctatatgtactttatttctactgcaagaaatttcaacagaatgtagaatttagatgatcagatttcattattgaaatgtgggtctaaatgatttaattaaaagtattgttcattttcccccatttttctctgaactccatccccagaaggtgtcctttgttctccctatcttcgtggagggtgtttttttcacctcatggttttgattttatgattgatgcttacaacacctgaagacaggcttccccacaagaccttcttaggacgtcaccccagagctctcagcccgcagggaaacagcttagaaatcaaggagctgaactgaggctgtcatctgtttttccgtgtctcctggctctcgccagcctgtgcaacggtgttttttggctcctctctttgtttggaacgcaccccacacctggctcacctcccacactgggcatcagggtgccctgtgtggagctagtgtccctgcagccagctgtgcgtactgagagctactgcaggaatcagctagcagcaggcgctccggagcagtgctcgtaacacctcctgggctgttcgaagacagcgaccttaactcccacacccatgcggctttcatggggccaaggtcattcctgagcttgattttcagcaaggcagagcaggcaatttaccagcggagaactgtgctcacgggctctgtcatgaaccctgaagtggcagccctgctttatgcacggaccctgcagcatccccagaggtgactgtgaccccgggcactgctccgagcaggctgggtgcgggtatagattcacagccatcagtggctcaggcat

SEQ ID NO: 92497 - DNA, 1155 bp, Homo sapiens
cagtgtcactgggtcattccagtgccccactcacgccactgatgctccaggctgaggcggccaccacagagagcgcagggtgggggcgtggtgggggcgcagcactcactgctagtgggcgatgccgtggccagccgcatcaccctaaccgctctttcagtgctcagggccaggggtcagtgtttctgaagataatctagtatgacaaaagacaggtttttacgaaaccaagccatgctctttgatgggaagttactttaggcatggctcttcccaaagagcacgtgcacaggcctgggagccgtgtgagaggaagctggattccaggccgggggcaggcgcggcagagaagggatctcgggggcccctgcacccgccggcagccactcccaccagctcagcaacagtagcgctcgccagtccctcaggtgtgaacatgacacgtgtctgtgtgtccgggctgcagttgggggaagaattctggggcacttcagggggcccatcgtcaatacagcagatgaggatttgggattgtgttacaaagtttccttaggttgacggttacttaatgactttatttactgaagaggaaacagcccttcacaggtaaaatggccaaaagaagctcctcaagagagcttaacctactctccagatcctgtggatttggcttttgtaaaggacatgaatgacttacttccagggacaagtctattttagctcaatcttcaccatttcttttcagcagccacacgtgtttacaggccgtgaaactagatttacaaccattctgcaaccagcaaggacttctgcagtctaatttcagcaagacggaaggtagctgatgcagctgcgtgctcctttccatcatgtgcggagccacggcgggttctgatgtgcatactggcgagctgtggggacaccaggagggaagtggcctcccaggggcacccgggggagggggggcccaagccacctaaggtggcaggcacctgcatccatatggtctgccagtgcaggtgccctaaggctacagtgaggcctaaggagaggaagaagtatttaaaaagtgaagatagtgacattttcaatgctttataatacatgccactgtgcattatagcatatcatgcagatttatccagggctaaaacg

SEQ ID NO: 92498 - DNA, 1030 bp, Homo sapiens
aaacttgttttgtggtttttctttacatgtaaaggtttgaccttaatttctagcatagaaaacgtttaagagacactttaaaaatttggcctatgtatttggaggatggagatgagacagcgttcgccaactcacatgataactttgtcaggaaagagagttaggtgcagtccaagtgaaatatgaatcgctgtttagaagatggaagcaggaaacagaccctcaggcccaactaaaccgcgacagcccccggtgacaggcaggaccccgccgttgcgatgcgcacagctcagaatcccggcccgactgcagtcgggagagcagccgccccctggcagccgagcaccgcgtgctggtttccagcttccccgccagctcctgcgtcagcgtgtcctctctctacaccgcgtctgtatacacttgtgctcttctacacgtgtgaaacccacagtgctgttctcagctctaaagtacgttgggtttttcttcccacaggattatgtgctggccgtggaggcgtatcattcggttatcaagtattacccagagcaagagccccagctgctcagcggcatcggccggatttccctgcaggtacctgtgcacggtcagacatgagccagaaaggccttatgatagttctttgctcagatgggcgactgtttgcttttaatcattttaatataagaaagactgcagaaaatattccaattcaaatgtatgtgaccatgaaaagggtgggttctttccaggagttctggtttgactgtgggaggccctgctggcttttgtgcctgttgctaaatgtgaacccacagaaagtgtcatcacagccacactgaaatgagttactctagacattgtcctgctgcagttacgaaagcactgactaaaccgtgaggaatctcagttcagcttatcccgtaatagtcactcgctgatattttgcctgaaataacccttgaatcatgtttgctggacagacaaagtccagactgaacagtggtctcagtaatgcacaaagctcggc

SEQ ID NO: 92499 - DNA, 1923 bp, Homo sapiens
acccacgccaaaaggccattcttccaggccagcgtcccagggcgctgctgtgcgtggttcgcagccccggcaaacgatggcctgcactgcgtgctgtccgccctgttcctgctggactctctgcactgtgtcctgatcaccctctcagctgatagtgggcactgcagtgtgaatcttctcatggacaacagaccaatcctgcctccaccagtgccgtcgccaaatcagtaacacagagcaacctcaaacatttctgaatgtttaggtcatctaatacttggcaaaagagtgggccgaacacctccaccctcagctttctcttctgtttgtgtgtgagtgtgtgtagcagagtctgagaaagatacatacagccaccttccttttctgagcttgggaaaatttgaacaagagcactgaaatgcaaacactaatcaaaaaggaagtattttccattttaattctaaagagtggaaatagaaaaaaatgattttgctaaaacaaaatatgcagacacctttgggaaaacgtgctataaaggaaccatgctaactccagagatgacccagccggacagaggtgaaaggggtggacggacagcaaggttctagatgattccacacagttgggctgagaacactgtcaccgcacctcctctttgtgtttaaaattttgcattgaatgtaggtgcctctgaaatatgcgagctaaaaataggaagctcactcactgaccacaccaacagttgcccggtcacacgagaagatacactggcgaatacaaggatggcacagatgccctcactttgtgttaggcctccgaggagctgactttcaattttaatatttcaaaacgtattctacttttgaatagcaatccttattctttccaagaaattcatagcataattctgggcactgagcaaagggtcacctgttcggtttgtgtgctgttcacattccagctggaaaccctggctcaaattacagaattgtacttggggtttaatgcctgcatataagggaggatccatctcccccctcggcctcgtcccgcaggcagaactatcatagccacgttccctgccaactgtcagcgcacccgccagacaggtgacagccgtgtttcaaaactcacatgcctgctgtgatcatttccacagtcccttcatcttcatcacacagagcctcctttagagcaccagggcctccacacagcaagggggctgggggttaggaggagagagaatggggcccagtgggaatttccagttctgaaggaaatctgtgttgtaagcaagattgaagtcatttgtattccagaggagtttctcacataatctaaattaaggaggggcagaagcaactgatcttcaaacagaagaagcattatattcatacttcttagaattacttcactccaacttagattccacctcagaatctcttgacttgggtcttagagggtcctcactgggacttgggactgagagggtcctcacttggacttgggtctgagaggatcctcacttggactgggaaagtagctgtggtgcgcaggtgcaagtccagcagccaagcacagacgaggggcctgtgcttggcattggggcagctgagcgcagggtggttctgcagtgtctgtggccagtcctaggcctcggtgtcctggaccaaaggtcagagcccaaggtgatcaggcaggagaaagcctcagccactgcaggagtggtgggaagttgggataaaccagccaccccaggcaggacgaagggggacgggatgcaggaccactcaccgctatggctgagaggacctcagcaagaaccaaggtcacctctgaccgagttcccagagagcaggaacccagggcagggtggggagacgctgaggtggaagaagggaaggaagggccagggaagcgctg

SEQ ID NO: 92500 - DNA, 1045 bp, Homo sapiens
gtttgagtttggtttggcttgttttttacagttgaattctatattatttggtcaaaatattactttgcaatttgcaaatgtggtggcacctaccattttactagccacaagtaactcataagttgacgtaggacctgctcatattataccaatattttaagtattttatgtttcatcttattagttattcattttattttatctaatgctctgccagaattcattccaaaaggtaaaaattactaaactataagactcttaaataaggcgtgtatattagcaacttagtttctgacatatagaacattaacattccactgtatcttaaatgtcttttgcctttttattaaaaaatgattaaatggttactgaagttttcctctgcctgacatataaatgtcttcatattctaacatgatattagggaactaaatatatgagtatagacttaatatttcttttgtcaactaaactgactaaattttgtcaaagcagattggagacataaaaacagctgaaaagtattttcaagacgttgagaaagtaacacagaaattagatggactacagggtaaaatcatggttttgatgaacaggtaaatattttaaaactaaatatatgttttctcaaatttcccagaggcgttcaagccccacttactgagttggaaagctccctagagaaggcgcttctccctgtatctcctcttgccctgtgtctctcagagcggagacccaaggagtatacaggtgttttcttgaatcgcagtgatgttcttttagtcacagaagctgatttttaaggagctattcccccttgttcttcagagaagcgcttgtattgcccccgttttcagcgtatgtgtgtgtaaaggtcaccattgctggcgtagcggccgttctggatcctgtgctctggtgttctgtgtctggatcccgtgctctggtgttctgtgtctggatcccgtgctctggtgttctgtggtagaacgcacagcgtcgtgcgagtgcacgttcgtgaggaggaaacacgccttggacaaag

SEQ ID NO: 92501 - DNA, 1046 bp, Homo sapiens
cctgcctgtaagaggctcaggatgtgatgtggctggggatgaggcccggtggcaccttcaacgcaggagaggagggggtctggatcccaccgtcagagcacgcacgcaacctgtccactccctcaggactgcagaaaaggtccattcttgtatttctttttaagttgaattaaatccatctctagcccctgcctctgaactgatggagtctggctgtcattgggcctccctcacccgcaaggggtggaaccagagcttggggctgaggcgctcctggagtgtttagcgcctctgctgtcaggacatcctgtggccactggcacgctgtctgcccacacagtgcccccgaccagcagcggagccacccactctccacagccagggttgggagccctggggcccgagtccccggtcccacgtgccacacaaggcaggacattctgggtgctgtcgcatccccggaatcagggcctggaccctggtcagagcaggacctgcaggtgaccccgggtggggcagactgtcttctgtccttggtggcaaagccggtgttctcggcgtcatgtctgcacacgtgtgcctgaagccacgggaacgcaggggctacctctgggcctgggcctggacctgtggagcaggatcggggaggacacacaggtgggcgtctcaagaactgtggtgtacacagctgagcccctgcagctctgctttgccgggcctcaccctcggtgctgggtgcaagacgtgacaagatggcatgggaagcttcccggggaacgctggaactgggtgtttgaaggaggacctcatggcggcagctccagcccaagtactgcaactgtggggccgtgccaggagcaggtgctgcggagcctgtgtgggtccaggacaagaggtaaggggagtgtggacggggctgcactgtcctggggttgagggcaggcttcagggggtgacactgaatagggactaggaaggtgcatgccaggaggggtccaggcagagagaacaagtgggggcacaatcctcgagggggcatagaagag

SEQ ID NO: 92502 - DNA, 1356 bp, Homo sapiens
caggaagctactcagtgggcgtttgtggttggccgctgagcattcccaaggtcacggccccatcctaagccctgggacctgtgcacgtgacctgttttggaaaaagggcttttgcagatgtaattagcttaaggatcttgagatgagaagattattctggattaccgtgggccccaaataccatcttaagtggctccgcaaaagatttggcacacggaggaggctgtgtgaccagaggagagaccggagtgatgtggccacaagccaagggcaccgggagcccccagaggccggaagaggagaggaaggagcctctctaggaatggcctgctgacggcagcctccagaatggggagggaatcaagtctgtgctctcatacttaggagtgtcttacggcagcctcaggaaacagacgcagtttcccattcacagcctggcctctgtccccatctgggggtttccccacagcctggcctctccctgttgcccaggctctccccatagccaggtctctccccatatcctggcgtgtccctgcagtctggcttctccccacagcctggtgtcttcccatagcttggagccttctcacagcctggagtctcccctgcatcctggggtctccctgcagtctggcttctccccatatcctggggtctccctgcagcctggggccttctcatatgctggggtcttcccgcatcctggggtctcccatatcctggggtctccctgcagcctggggccttctcacagcctggggtctccccacatcctggggtctccccgcatcctggggtctccccatatcctggggtttccccgcatcctggggtctccccatatcctggggtttccccgcatcctggggtctccctgcagtctacccatggtgccagggcagctcttcctcctgacatgtgtggggggccctggggtgcagagaataaactccacccatcggatgtgaattccagcagccctgagggtgggtgagtttcctggagcagtgggcgagggttcagggatgcagttcgctgactgtccagctcagcacgcccagggagctggcagggttccctgaccccgggaagcaggtggaggctgagacaaaggccaagccagctggaggctttagggagacgcactgggtccactccacaggcagcaggaccccaggctcactgtgggcatttgaggagtgggtgtcagggtgaccagaaggagccagggtggaggtcgcagggtgtcatctcggtgggcagagcctcggggccctggggtggagggagtgaggctggagagcctggctggctgtgctggacgcctaacacggtcccggagatggcacttct

SEQ ID NO: 92503 - DNA, 1234 bp, Homo sapiens
gaaaactgtagccaaatgaggcggagaggaggtggagggtacatggggttggagccagtgcttttcctgactgtgtgtctctatagagagcacggaggtgcggagttcaacaccaagcctcagctccagatgctcttacctggcacgtgaggacaggcagggccagctgcaccacctgatacaaattttccttccacgaataaaatgtggcctaaattgttaaagacgcagaataaaaatagcaagtaaagtgtttatagcaattaatgttaacaagttgatatgttaataaatactaagtagaaggccggctggtttaatgagatgctgggtgtgtttgtctgttttccagaactacacgaaggccatgcggctgtttgtgggagaaccggtgtggacagcgtacaaccggcccgctgaccattttgaagcccgcgggcagtacgtgaaatttctggcacagaccgcctagcagtgctgcctgggaactaacacgtgcctcgtaaaggtccccaatgtaatgactgagcagaaaatcaatcactttctctttgcttttagaggatagccttgaggctagattatctttcctttgtaagattatttgatcagaatattttgtaatgaaaggatctagaaagcaacttggaagtgtaaagagtcaccttcattttctgtaactcaatcaagactggtgggtccatggccctgtgttagttcatgcattcagttgagtcccaaatgaaagtttcatctcccgaaatgcagttccttagatgcccatctggacgtgatgccgcgcctgccgtgtaagaaggtgcaatcctagataacacagctagccagatagaagacacttttttctccaaaatgatgccttggggtggggagtggtagggggaagagctcccaccctaaggggcacacactgagttgcttatgccacttccttgttcaaaataaagtaactgccttaatcttatactcatggcttggagttaccttatattcaggtatatgtgatattttgcctggtttgttaaaattgccccatttagattccttctataattgttcttatagataagtaatttatatatgagctgtgttagtattttttcagtgtgagatctctggattctttcacaataaagctgttgaattttaacaggagtattagtacataaattttctactcaacaattccgagataggattatgcctagtttgtcat

SEQ ID NO: 92504 - DNA, 1045 bp, Homo sapiens
cttaatagagataggattgtgataaatgaaaatgttgaatgggaattttaggcatagaaagctgtcatgagcaaggttgtggggatgtgaaatatcaaatatttttaagatagccgatcatcctatttggtttagaatgtagagttctttaaaaagtaggagatgggaacagatagaagtagaaaagtcagctggggccagatgatagaaggtttctcattccagtttaattaacttgagttttatttgcaagctgtgagagcatacaatgttttggctcatggaaacaaactgaccaaagagatggcattgaggatcaatgagactcatgagtgggatggtggcagagaaacagggcacagtgagggacctgtggagtggacagaaaggcctgaggtggtgagactaccatctcaaaatgggaaaaagaatcccctgggatggactgttgcagagaagggaggcagaaatcaaacagaactccattgtatgtatagctggtgttttggagaatggaaaatccattaaatggctagaggagatgaagagagttagttgagggttgaaaaaataacaaatgataaatttggagtataaaatcatattggagatccagaaagagaatgtttctacatctccttgttaatctgagctcttgtttttggtgggttaactcttttagctggatgctgacaaatatgagaatgatccagaattagaaaagatccgaagagagaggaactactcctggatggacatcataaccatatgcaaagataaactaccaaattatgaagaaaaggtaagggagccctggattacctggaaaagaagtatcattatattcactactaatagacgcaatattttctttcttttttcttttaatgtctgtatgaggccattcttgctttgctataaataaatacctgaaactgtgtaatttataagaaaagagatttaattggcccacagttctgcaggctctacaggaagcatgtgcttcctgtcaccaccatctgcttctggggaggcctcaggaagc

SEQ ID NO: 92505 - DNA, 1015 bp, Homo sapiens
  misc_feature (1)..(42): n is a, c, g, or t
nnnnnnnnnnnnnnnnnnnnnnnnnnnnnnnnnnnnnnnnnnccttactgttttctctatttcccagcaagcccttcaggctgttccatttagaagacattaagtcagttttggccctcccaggaagagtggtgtagactcagcctcctccacagaatggtgtctgccctggcagcactcagactgggttcaacagggaacagccaggagggtatgagacctgaagtcgtggcattgagagcagctttgctcgtctctttcacttgcaagctgttggaaacactcaccagtaggacaccttggcagcttagtatttgtcatggacgtctggcctgtcggtctgcccttccaccgcccctctccctgaccagtcgtggggctgaggggctgccaggcagagcacctcccagactgggcacccggccaggcccagggtagtggagtctgcacctcgggctcccagagagatctaaagggcttgcagtctggaatctcccatgagactggatatcccatcattacataacagagctcttttgccttgaattgcaagcaagtgcagtcttagagctactggcggctgttttctgacccatgcagagagctctttttagtagctgagtattcagacaaggcacagagaaaagagggttgagatagggaggagagagagaaagagagaaggagagacagagggaggaagagagacaggagggagaaaagggggcagaaagagggagagaagagaagaaaagctaagtgaagagagagacacacacatatggagaagatagagacaaagagacatagacagagctgttaacatactttcagccctgaatcctgccatgcccaaggtgcgttctgctctaacccttctcatttatgtgatccaacatatctttgttcccgtttgtttgcttaggtaacttggacttttctttttttgagatggagtctcactctgtcgcccaggctggagtgcagtggcgcaatcttggctcactgcaacctt

SEQ ID NO: 92506 - DNA, 1159 bp, Homo sapiens
gatttcttctgtttttccagtaactgtgaagggaaattggtaggaggtgttgtaacagggcaggacccaaatgggaacggggggatgacattggtttgtcaggtaccgagcaaagagtgaggattttggagtctcccttctgctgctctgatgttttccacatgcttatttctttgccaggcactggagatgcagtcagaagtggaagtggctcttacttctagtctgtgtgtgtataagtcacttaagatggcgtgttgactgcttctttgggaaatgccctgaataggagcatgtaggggatgcttacgaggctggggaaggctcctgggagaaatgacatcttaagctgacagctgtaggtagaatacaagttaggggaaagggaagagaggagggtatttcaggctgtgccaaaggccaaagcaactaaggccagctaaggaagtgaagagtcaaggatggtgactcagaatacaagtgggatcaattataagaggtaagactaaggaggtgaaaaaggcaggacactcaagattgactcaccagtgatcgtgcatttttgtaggtataactaactgggttcaaggttggaagaaaaatgggtggaagacaagtgcagggaaagaggtgatcaacaaagaggactttgtggcactggagaggcttacccaggggatggacattcagtgggtgagtatcttaaatgttcatgtcctatggccattatgaccaaataagctaagtttactagagattaatggtttatgtaagtggtttaatgacataacaatttccatgatattaatatcataatgtatattacaacgtatttgaggctgggcgtagtggctcacgcctataatcccagcactttgggaggctgaggtgggtggatcacgaggtcaggagttcaagaccagcctggccagtatggtgaaaccccatctttattaaaaaatacaaaaattagccgggcatggtggtgtgtgcctgtagtcccagctactcaggaggctgaggcaggagaatcacttgaacccaggaggcggaagttgcagtgagctgagatcgcgccactgcactccagcctgagcaacgatatgagactccaagaccccgtctcaaaaaaaaaaaaaaaatatgtgagcctgggctc

SEQ ID NO: 92507 - DNA, 1158 bp, Homo sapiens
gctcttttaacactgtgcaacctgacctctgatcccaccacactactgaagtgtcctggtcaccagtggcctgagaatgcccccgtcagtccttttttaccttgttctttacagcctttgtgtgtcaatcataccctctatctagagggaaagaagcaaagacgggaaccacacttaactagcagcaaatatgccagggaagaaattagaccagcactggtcaggagactgggccctctggcaggcagggtcaccgtcatgctgaggcgctgctcgtctctggaggatggctccctgggagtgaaggtgaccctgccgtggagacagcgccattgtcctctgaacccacagtgtgggatgtgaacagtagtttttactgcagcaggctctagttttacaaggtgattgccttcaccccgaacttgcctggcctgcaagatcaaaatgtaagtggattccaagcataaatgttaggtgcccccttgtaaggaatggagcatgttttcctagagagaaaacgtctgcagcgttgtaaaataccctctcggtttaaaatgctaagtcgacctagtggatttttgaggtgaatttcagtttttagtaaggtcagcccagcagcatgtacttccttttcccacaggagacttcgtcgtcgtctacactgatggctgctgctccagtaatgggcgtagaaggccgcgagcaggaatcggcgtttactgggggccaggccatcctttgtaagttaaacgaagctgagttttactgaatcatgttccacaacttgtgaaaagatgaggcgggatctgctcattgtttgattattgggaaaacctgcagataagtagctctggcaggggtggcagaggagcagctttggttcgtgttggggctaagcggcattgcttttcagaacgtgaggtacctcagctttacttcctttgctttttttttttttttttttttttttaagacacggtctcacactgttgcccaggatggagtacagtggcacaaacacagctcactgcagacttcaccttctgggctcaagcgatcctcccaccttggcctcccaaactgttgggattatgggtgtgagccactgcacctggctttggtgtttctttcttgccctggggaggagtcttttttttt

SEQ ID NO: 92508 - DNA, 1050 bp, Homo sapiens
ggttcaagggcttcccgcggtgacccgagcacgccggggcgtggcccccgaactgcggcctgggggcggggagagaaggggcccaacatggtccatctcgaccttcctctgccgggcccagggcttcagccccgctcccataggccccgccccatcccagacctcgcccgccttcgggatctcagccctggctccgcttcttcaagtaccgacaggaagttgacgagttcgggctcgtcaggggccgagctccgggctccgccctacgacaccgcccctccctaggccccggccctcatcaggactccgcccagacgtgcgtcatcttcccgcgccggtgacggaagtgcggtgttgagcgccggcggctcgcgcccacgctgggccgggagtcgaaatgcttcccggtgccgggagtgagcgatgagctggcttctgttcctggcccacagagtcgccttggccgccttgccctgccgccgcggctctcgcgggttcgggatgttctatgccgtgaggaggggccgcaagaccggggtctttctgacctggtgagtggcccgcccgccgaggcgcctccctgccggcatcggggtcgagggaggccggagcccggctaaccccggcggcgggagcctggcggtccgagtctgtgccgcgcgctgtggctgtgggtggtcgggggaccgcctcgttttcctgctcggccggcggggttccaggaggctcatggcctgggactggaacgcaccgaagacttgtttgaaatatcagaaacgtcgcgtaaaggttaggggtggcctaataaaccctgtgtttaatcctccatctttgttgcagttaaagtgcaacaaaaagtgacacgtaatcagaacgaacccccgttaccagaagactttccgtaccagctaaattgggattggaactcagtacctaatcttcccttttaaaaaaggcaaattctaataagccagtatttgcagttggatccttgtaacaacccttggaggtgagagggattattctcactttcaggtatagttcttgggg

SEQ ID NO: 92509 - DNA, 1527 bp, Homo sapiens
ttttgtagacatggggtctcgccatgttgcccaggctggttcctgagctcaagtgatcctcctgcctcggcctcccaaagtgctgggattacaggcgtgagcctcagcgcccagccaagttagccttttttaaacgtcctgtctccggaggttgccgaagttggttttcttcggcctccttctctctcccaggcccagggctgggacgaggccggttcccgcctgcaacctgcactgaagacgggaaccttgggagccggtaccggaacgctcggaaacggcaccaaagtacgaatcctagggcggaaaagcgttaccaagacactcgtccccagagccgcttcctgggactctctagcctcctaccgcttctcagtgatgttccggtttccgccctcctcctcgcgctgtttccgcctcttgccttcggacgccggattttgacgtgctctcgcgagatttgggtctcttcctaagccggcgctcggcaaggtaggttggcggcctgctctccgacagaacttttcttcttgggttgaggaaaacgccttttggagtcaggccctggaggggcgagccttgctcacagggtggggatacagccgattacccgccctgtgctttccgatggcttctgcggggcgagcggggcctggccggggggtgcgggcgggagggcgagccagcggcgcctgcagcccgggccgcgtaacgctgaccgctgtgccttcagttctcccaggagaaagccatgttcagttcgagcgccaagatcgtgaagcccaatggcgagaagccggacgagttcgagtccggcatctcccaggtgagagggtttccctggggtctggggtggggggaggcgccccgcccgggaggggaggcggccgcgcgtgtgttgggcccggggtgctcggacgcgcgctcagggtcggtcctgctgttcgttgcttcttaggctcttctggagctggagatgaactcggacctcaaggctcagctcagggagctgaatattacggcagctaaggtaagctggcgctccctcggctgggagggaggttgcggcgcgtctccccgcgcagtgcctgagagggttggacctgggttacggttgatgatgacttgccgcctggccgcctaacctgaactcaggttcggccgtgttgtttgggagtgataccgcccaggtgcggggagtggggttgcaggtaccctgcggcttaagctgtccacatgcgggcggtggagaaacgtggagtagggagggcctgggcccatttcggaccttatttgcccttacttagttatagatacggcaaagagctgtggggagctcaggatgagattctctctacccttagcccggagttgccgcaagtgggggtgcagaagtggtagtgattggcctcctggcctgaacagtctcccttcctggaataaggaaatgtgaaggttggagagagatgagaacatttccgaaggatgcatttatgattaactcaaaactagtattagtttgtagtg

SEQ ID NO: 92510 - DNA, 1710 bp, Homo sapiens
tactcctgatgtctcatggtacatggtagctgccccaaaagcttgcaattaattgaaacttctcatttgttaggtggcaggtaggtaggttttgaacttggtagtgatattcagacgaggagcaagattccactggcagttctgtgatgctaagtaaatgatgtgatcatatccgtgctttagaaagattatcttgacattggaagggggtggttttggagatgagcaagagtgttaaaggttattgtagtgatttagttgagaaataatacaagtgaaaataaagatgtataaaagtcctctaatctcacattccctagagatggtcactcattgccttggtgagtttgtagtttatcccagagtaacatttaaaattgactgagcttttgaaataaatcagtaagctattaccctattctaggtaggcaaaggctttagtttggtacgtgaaatataacaagcttatttgaaaatgagtgttaatttgacttcaggaacctgggatttgcattttcattttgacttaaagaggtgccctctggagttgcccagagggcaggcgttgctaggttgcttaccttttaaactattcttttagccgtactctgacagctgtgcacgatgccatccttgaggacttggtcttcccaagcgaaattgtgggcaagagaatccgcgtcaaactagatggcagccggctcataaaggttcatttggacaaagcacagcagaacaatgtggaacacaaggtaataggtcaacattttatcatggaaaggttcagccacagtgagagtggattttagtgtaaccagtctccatgcgccaccatagcaatgactgtagtaaactcaggactagttcttttacccgcacttcagcctgctctcctttggattatgtgtcaggtgttaaatggagatgtttcaagaattgaacacttgaaattctctgtaccttttggaagtagactctttctgtggtcttttagttaggctgtatattcttggtgagttaggggtgggtggtgatgggatcagtgtcttggggggacataaccatgtgggtgactgctggggtcccctgatggcttccccggtgcagtggtgtacagttctgtcccacagcattggagaagagcttgtccccggtcgtgaagactgctgcagacatgttgtgtgtacttagttgctgaggagaaaaacaatacagggcacaatttcacgaaactattaggttttaagctgagtgtgtatttcaaagttctgtgatgaattctttcttttcttgtaggttgaaactttttctggtgtctataagaagctcacgggcaaggatgttaattttgaattcccagagtttcaattgtaaacaaaaatgactaaataaaaagtatatattcacagtactctgtttcagttatgtttttcaaaattccaaattcacggatgcgcagctgtcttcattatcagtggcgtcctgtgtgggccagaggatttcagtaggaggggtgtctgtgccagaaagcttgatgcctgtgaggttctgcttgtattcaggggtacaagtgtcatcacgtgatgctgcagaaatggctgaatattggcacttttgcatggttcaaactaaaaatatagcaggtactttttttattgtgctatacgtaaaatttaccatattacccatttgtaactttacagctcagta

SEQ ID NO: 92511 - DNA, 1039 bp, Homo sapiens
ctaagacaagaagaataaacacctgaggaacaagagtcctctgagcagccatgcctgggacagccacactgagagcagccacctgagatgccagagtcccccacgcagccatgcctgggacagccacacccagagcggccacctgagacgccggagtcccccacacagctgtcctcaggacagccacaccgagagcagccacctgagatgccggagtcccccacgcagccgtcctcaggacagtcatgccaagagcagccacctgagacgccagagttgcccatgtagccatgcctggcacaaccgtctcagaaacacatgattaaggggtaacaaaacaacaaacaccatgagaacaaaatgtgaaccatgttgtgaagaaacagtcaaaaactagaaaggatagcaagacaaatgaaaataaaagcggacattttttcacattatactaaagaggtatgctggtggaatattaaaatcatgaatttcatattttggtggcaagactttaagtttttaaacacatgttgtaagccgaaattcatgtggaattccttcctctattccctaactgtgcaagtctgggagggaagagggttgttagcgagactgggtgaatcattgcccgctggggccgaccttcccttcttacactgtcaacccacacttggcattctagagtgacttagccactttgcgaacggcacatgtttacatagttatctctaacatgttctccctttttaaaagcgaattaaggcatattataataattatacatacctatttttatctatacacaacacacgcatctatgtacatgcatttgccgatataggtatatatatgccttctatgtcctaaatggacagtagaatcctatgtacatttttggtggctaagcgaatggactctcaactcaatatacagttttggcttctctcctctttaagggtatgcacgaggtctgtggctcagtttagagctaataataataacgaactcacaggctgttgggaaaattacttaccataagcag

SEQ ID NO: 92512 - DNA, 1033 bp, Homo sapiens
taccataaacagtgtggaaattattagtgcatattgtttaaagtcttcagaattaaaccccttttgcagctctgtacacacactgatgttaagctgggcagtggttttctgaacgaggcctcctagcaaaccattttcacccttcctcctttcacttcttcataacaatatctattcagatcatttcgggaactgtaagaaatctctttatctattggactactataattagataatcatgtgttttacccacgtgccttatatctggtctttaactcacaaatacttgtcatgtccatatttcaatttgacttttcttacttaatttttatcataaaatttgtcaaagatgagttcttggctgaactggatcacagcccttctagtaaataaaaagtcatttctgttttcctgcttacagatcctagactatagcagtcattcctcatattattttagagtcattgtgttgagctgacaactgtaaattaatgtagaggctgagacatactacaagctaatgatgttgaaagtgtatgttaaaccatggagacagtatagcaattttggactaataaccattctagctggagtgagaaacgttcttcctaactaagaaagttctgtcatttttacctaatgagaataaggaagctggacgctgagcttcttataattaatgggatgaggaccggagtgatgcgggtccgctctcagtgtgcgcgtgtgctatgcgactcccttctcaaagatccaggattaatagctgccttctggctgttccctgaacgtgccgtgtgttttcacatcccctacatttgctcgtgctcttctattaggaagctcttttcccctgctcctttgactggtcaaaacctacttgccctttgaggctgcctcagaccctatctcctttgtgccagttgtgtgtttctggacaacgttgtttgtatttcaaccgggttttcagcagacagagcctgcctcactaggaatgtgcctgtctcctgctcctgaactctttatttattat

SEQ ID NO: 92513 - DNA, 1017 bp, Homo sapiens
ctggcattcatattccttttaattaaggcccctaccaagaaatctggaggagaatattacatagctcaggggccctcaactgcaaacagtctataatatatcaggaggatgttttaattggaataaaaggggcaaatcttcaaacattacatgtttaatttataggttggttgaatcacccaagttcaataatgtcccataatttctcatcacccccagagagtattctcttggatgaagatgattttcttaccaggagtgcacactcagctcatcctctcctcctcgtggtctgttctctgcttcctgctaatgcgcaggtttccgccctttctctagttgtgcacagagctgattggttcttcacgctggagttctcactttgatatttaagttgctcaccgctctagggaaggttgtccttattttccaccaagaagagcaggaggaacagttggctaacagggcactcagcagagagggtacaggcaggtcccccgggagcagcagcaagcaatgcacacaggagggagggcgggtgggtctgcagcacgaagctgcaggattgggcccttgattgcatttacttttgtcacagacattttaggaggttgtttcctaggtgacttattacatggtattctacaaagtgaccacttcgaaaacagcctgcttggttttgagggtggaggtcatattgaagtgcttatggggggctgtgaatcacactgtttattatgaagtgtgtacttcaaatgggtgcccctgccccccgcaacccaggatggcaccttcactatgggaaaagatgttgggttaaatagcagttttaaacaaacagacccagagataatggtgcacccaaggagacaggctttaattggcaatctttggttgctgaaaaaccaactttggtctaacctagccctaaaactcaagcaaatgacaacagcaaacccacatagtctatgacgtaacatgcccctgaagacctgccctccaccttacctatttggc

SEQ ID NO: 92514 - DNA, 1053 bp, Homo sapiens
atttatatttataagaacctactgagcctgtagaaggcccagtaagcttttttcttccttcccttcccttccttcctccttccctccctctctgcccccctctcttcctcctcctcctctcatctccttcttccttccctccctccctgcctccctcttttccttctcctctccttcccttccctcccctcccctcccctctcttctctttcttcttttttttctttctttcgtgattatacactcgtaacaaagaatgtgagtacacaaggcagtcttcccacttcgtagagttgaatcttctctgtggtaagacaatgtgcgctgatgcagttctaatagttaatataaatagggataaaagtttgaccctggctactcattgaacaaataaaaattaagccagtagggatagcatttctcatgtataatattgataaatataaaaataatcatttcctgtgtaggaaagtgagcactcccttttacttgggtaggcctaggtgttgatgcggtttttctgaaggacaatttggccctcagatgtgtttgtaatacatctgcaaacgccatgattagacactatccaaaggaaataattaacatttaaaggcaaaacttttaattttagatgttaataatattcgaaatgggggattttctaagtaatgatatggagatgattaaataaatatggcccacctatacactgaaatactatccaaccatttcaaaattttataggtgaatatttattgacatggaatgttgttcacaaagttgtaagtttcaaaaggtaaaatgggttataaaatattatattacgattccattttggtaagaacatgtacatgtgaacataaaattctgtctggaaaaatatatactgaggtgccaacagagggtgtatctggtattgtgagcatttttgtttaactctctttttgcttgcctcttattttttctttagtgagaatgtggggttttttttatatacataaaaaagatttatcactatgtaacccccttccaccttcaaccacttttctctag

SEQ ID NO: 92515 - DNA, 1044 bp, Homo sapiens
attagcttgaatatcaaacatttcattaaatatttcagtgctcttctaaactatataaaaggtttggatgaactaggtttgaaaaatcataatggcgtacccactcaccaacaccacttaaaagcatctgcttatccatcttgtcctcctaatgctatcacaaccttcctcattgagcaagaagccatttctgagctgcaaatacctttcagtttgtttctggggcttctgcattatctatctaactgagataacatttagtatgtataacttatacactatttaaatacttatttattgctttatcagtgttttgatttgttattctatggtaaacaaatgaggcatagatatcacaaaggtttcatgttattgatcccctgacctgaatttttgcatctgtgtgtttgttcttctcacaagaacatagctcttactccttagagcagcaagcagagaagattagggtgacttgcgctgacttcatgtgaagcctggaggaatcaatgacacaaaggaaagtgagtgtgagcatgacgtcaagtcagaccatcattcctgcatttttgctggaaacagctgtgtccgggtggccaaggaacaccagagtgggttggccattagtctctttggtagtttgccaaatcatacactccagaattaagtgacttcaatgctgatactctgaaaggccttggagtcatatttttatggaatagcattactatattttaagcattctctacttccatagcaatgcttctgcagatgctatatgagaacaggtgtacacacatcagaacattttctcccaaaccatgctattgcttagagatagtctcatgttaagataccaaggcccaaattatggtgctggttccttcaaagaacagagtaacaaccatatatatagcacattctatagcattttaggttcacctctgaaacaaattcacatacaaaaataaacaagtagctttgccaggaaagaaaggtctttcctgttttgaaaaacaagtgatgaatctgtactcgctatagact

SEQ ID NO: 92516 - DNA, 3225 bp, Homo sapiens
ttcatggtatggtccaagatcgaacgcaggaagatcatggagcagtctccggacatgcacaacgccgagatctccaagaggctgggcaagcgctggaaaatgctgaaggacagcgagaagatcccgttcatccgggaggcggagcggctgcggctcaagcacatggccgactaccccgactacaagtaccggccccggaaaaagcccaaaatggacccctcggccaagcccagcgccagccagagcccagagaagagcgcggccggcggcggcggcgggagcgcgggcggaggcgcgggcggtgccaagacctccaagggctccagcaagaaatgcggcaagctcaaggcccccgcggccgcgggcgccaaggcgggcgcgggcaaggcggcccagtccggggactacgggggcgcgggcgacgactacgtgctgggcagcctgcgcgtgagcggctcgggcggcggcggcgcgggcaagacggtcaagtgcgtgtttctggatgaggacgacgacgacgacgacgacgacgacgagctgcagctgcagatcaaacaggagccggacgaggaggacgaggaaccaccgcaccagcagctcctgcagccgccggggcagcagccgtcgcagctgctgagacgctacaacgtcgccaaagtgcccgccagccctacgctgagcagctcggcggagtcccccgagggagcgagcctctacgacgaggtgcgggccggcgcgacctcgggcgccgggggcggcagccgcctctactacagcttcaagaacatcaccaagcagcacccgccgccgctcgcgcagcccgcgctgtcgcccgcgtcctcgcgctcggtgtccacctcctcgtccagcagcagcggcagcagcagcggcagcagcggcgaggacgccgacgacctgatgttcgacctgagcttgaatttctctcaaagcgcgcacagcgccagcgagcagcagctggggggcggcgcggcggccgggaacctgtccctgtcgctggtggataaggatttggattcgttcagcgagggcagcctgggctcccacttcgagttccccgactactgcacgccggagctgagcgagatgatcgcgggggactggctggaggcgaacttctccgacctggtgttcacatattgaaaggcgcccgctgctcgctctttctctcggagggtgcagagctgggttccttgggaggaagttgtagtggtgatgatgatgatgataatgatgatgatgatggtggtgttgatggtggcggtggtagggtggaggggagagaagaagatgctgatgatattgataagatgtcgtgacgcaaagaaattggaaaacatgatgaaaattttggtggagttaaagtgaaatgagtagtttttaaacatttttcctgtcctttttttgtcccccctcccttcctttatcgtgtctcaaggtagttgcatacctagtctggagttgtgattattttcccaaaaaatgtgtttttgtaattactatttctttttcctgaaattcgtgattgcaacaaaggcagagggggcggggcgggggaggggaggtaggacccgctccggaaggcgctgtttgaagcttgtcggtctttgaagtctggaagacgtctgcagaggacccttttggcagcacaactgttactctagggagttggtggagatatttttttttcttaagagaacttaaagaactggtgatttttttttaacaaaaaaagggaccattgcaacttttgttaatttaattttttttttttttttttttttttttttttttggagggagaaaactgatgtcttctatgcatccgattcttaacaaaactgcagggagcttgaaaaaatgcagactgtacaaacgcttacaaaaaaaaaaactgtgaactgacttaagatcagagtttacttttcagatcaaattgtttatggttttacaaatgtgatttctacttgccaactttttttttgtaacttgttcccttatacctccttgattgaataccagacagcctagacctcagtacaaaaggtattgaaacatttttgatacataacagacctcagtcttttttaaaaattaatatattttcaggcgtatttttgtacagtgaaaagggaacattcttgctgtgttttttcagtaagactttcaggcacttcttcccttttgatttcttttttttcctctgttttttagcatgcaagtatgttggtacgttatgtcctggtttaaaaaggattaaaattttaaaataatccttgcatctaaaggccttgtggtttaaaaaaaaaaagcaaacttttttttgtacagctatagtagagatttgttcaatatttgtaggtaaagatttattgaaaatggtgatatagacctcagagctgttatcttagtttaaagattgtatatgtactgtactatagtaggactttatgtatctcatacgctgtgatgtggatggggccccagatggaaggtttgaaactggattctcgatttttagcaaaaaagaaaaaaaaaaggcacatagtttaaaaagtttctcattttgtgcaatataatctaaataaagtacagaccatctgcatattttgtagcaaatggtggcaaagcagactcaatgcactgtcgacatcattgcctgtttttttttttttttttttgtgctggaagtctgtatcttgacaattttaataaatcagctggaactgatagaaactcgcatcgccaatagtctctatggaagtcaaactggaggtcctgttgtcgcagagcattcggtggtgaggctgttgtgtgcgcggatgaggggaggtggcaggagagaattctacatttagggggttaggctgaaaagtgttcaattagcaggctgatttctttttcctcttccgctagttgtgaaagacaggggaagggtgttctttctctctgccctccctttccatctccagctccccatttcctttctcacctcctcctccactccctgcctcttctccccacccatcctggcgggcgggctgcgcggaggctcgggagctggccggggaggggcggatggaggggcctgggttgccagctcccttggtcggggtcctgctcgctggggcttgtgtgttctctgcggcgggccgcgtccccgctgagcctcgcggtgacagccgcctttggcagcgagcgctcgggg

SEQ ID NO: 92517 - DNA, 2643 bp, Homo sapiens
ccgcttgcttttgccttactcgatcttaccaccacccctcccccggccccccgactgagaactcgggcctctcacccgccccccagcctcccgctctgggcgagcctcctccccagcccccacccctgggatgcgaagccagcaagcttttgctgcagatggacaggtttcttttctgtggctttttcctttcgataaaccatcagatttcagtagtacatttgggaaaagaaggggctgatggcgttaaccaggttctcaatatagaactggatttctggagttgtttaccttaccccacaccccctcaacatgtagactaatgcagccattggtggtacatttattttagccacggataattgaaccagcggtttacaattgacacgtgctccgtgctggtgattttatgtggcagccctctgctgcagttccgaaacttgttggcaacgtaaacccattgataggctgatctatgtattttgaaagcctgaaaacttggcatgtcttttctgttttaatcatagatgaatcttggacattttctgtggtgaggtggaaactttaagtaaattagtaaagtaataatttggcttcagaatgggaagagatagtcaagattttttttttttaaagccatgtggcctaacttgatacaaaaataaaagtaattgtttggcaatctaaatttaaaacctgttagaactcaggacaggcgcttcaatgcgctttttaacaatatttaaggctgttttgatgagtgcgttgtgagaatcatcttaatgaattctttattgagtgtctaaaacatagtataatacacatggtattcttgccactggatagtcttcaataaaagtttaattgatttttttttgttggtctcttaagtaagtcttatttttaactaagcattgacagaatatcttaaaatggtaacctgggggtggcgggtgggtgctgtgtgcacggcagcctagccagtggggatcctgctgtttattataagtagttcacagactctgatggcattttggtaagctttccatctttaagaaattgaaccagcattctcttattaattctttaaactgtggaagtaatttccagttcttacactctgatacgcatcccttttatttaaaaaaaaaaaaaatgctaataaaaggcagtgtacttaaactgtgctttgcaaatattgtgtatgttatgaatgactacagacactgggcaaattatttgtagaatgattatcctttagctagagaaagaaatcattacaactcttttgggcagagatgtttctttttaatgttaatcaaggggaagtgatttaaatatgcataaatgtagcagtcagggtgatttagttgcttttttcatgaaagaaaaagactcaaaagacaagacttatttttctcttctgggacttgaaatcataatcatctgatattagtacagtacaagaaatttacatttgttttttacttcagaatttaagtgacttttgcccaaggaatttgagaaataaggcaaataagttgctctattttaaagtagtcattcaatataaatatattatatcaatcttaacttttttattctctgatatgattaataatatgtatattcttacttttcttctaatgggcatatgtatccttgtggacactttgagagaggttttcttggactctcccatttatagaatctttatactcttttactgtgtggttccctgcttttaacagatttctgaggcaaatatatttgtgcttttttcttatgtaggaagaccagcgaaaatagtttactgagttgtcaattttatcagtagataagaaactttctttattacagtttcagggaagattttttcaggatatttctcagttattctaagggccaaattttgtaaaatttccattaggaatgtcagtttcaaataccctttgtatagcctaagcctgtgaggataacaagaatgagccttacctatcctaacacagggatttacaagttcccaaagtaaccgtctccatgtaactcttgacatacttttctgagatttggcttatttttattattggttatttctcactgttcattctatttgatttattctacaacatccccttttatttaatgatctggaaaattctgctctttgataacaactcaggatttttttgttcagttttggtttttgccccttcctgtggagcctacattttcaaccacaataaagatgaaacaaaatttatgaaactgagctctcttccattttacttactgctggcttttttttttttttttttccttgattcctaccataccttcgtttttttcattgtacttttttaacactacctatatccattagctgcctaattagttttatctgttccatgtggatgcagtgagtttataagagaatttcacaaacaagtagttttttagtgaacttaaaataaacagaattttaaaggagacctatttttatactcaataaaagcacaaaagtgcagaaagtataaaacggcttacaaagggagacacaagctcataatgttccatgtataaaagtaataactttattgggtagagatattcttacaagatctagcacctctgccagtgcac

SEQ ID NO: 92518 - DNA, 2195 bp, Homo sapiens
atttaagcaacctggatgtgcatatgtggaggctcccgtctcactgtttgatcaaacttcttttatgtagtcacgtagacttgattttttctgctgtgaaaatgaaaaaataaagcaatatgacaaaaagtttaaaaatgcataaaaaataggatttcctctaggctcctcgaagagatttttttaatatgatgcttgtcttactttcttagacacgttacatttccccttccaaaaaaaaaaaaaaggacaactggaagtaatttatcatataaagaattttgatcaaatagatattgacaaagggccctctgtcacatttttcttcatccagcttttgttcaaaaacagtatgcctcctcccttgaatcacatagggagaaacgttatactccattctcattaatttcccattttgtctacttttactcttgtacatatgttgtgggtttaagagtcttttgcatttgttctgtgacacctttttttgaattgactgttttaaaacggaggcctattttttccggtttgggactcctagtggttatggcatcccataatgcttcgtgacggccaccaggacagaaccacctgatgttttagagcagttttcagcatgacactgttaacaagtgtgtattttccaaggccacatgaaacttactttcttagccactccaggtttgggagcagaaaagctgaaaaacccttttgtgtagaagtctgagtggtttgtgggggggaccttttttagagtttgcatgccagcgcacggcctattgctgtgaaacagagagaaggtaaagctacctgaggcagtgcgctggaggatgaagtgtttgatagcactaggggggaaagaaaatgcatggcaaagtttcgtcttctcgtagactatctagcatgcagagtgtagtgtgttgaaacggtgtatgacattgctgtatcaaagttgtaaaattaagcattatttattgaaaactatgtatttttttgtaaaaacctgatcacatagagaatatcagtggcttgtgcttgtgcttcgatctaaccagcttcttgacccacccccccttggtatgcagtgttaatgctcagggttgaaaatagtacactccaatgtctcttttgcaagagtttttcacagaggattacatttgttcaaaagactctaataaaattgtgtgatcaatcttcacttgtggtttttatgtgacttttttctagttttgcatttgataactgctgtttaattctgaaaatgttgtctcaaaccagatgtcagggacaggcttgaagattcctgatgtctcagcacccagcacggctgtcagcctcggcaggaggaagaccacggaaagtgagttttctgggcaggttggagagctgctgacagtgagaatgagcatggtgattacatctcaatatattaaactggctgatagagggaataaaaccacagacaaagtgtagaggggtagattaacatgttttgtcagaaatgtctgaagtagaaaatgaaggaaaaatatcaggggcagttgctgctattgaattcaataccagcaaactccattcctcagtgtctttttttttttcctataaacaatttacagtgtaaatgtattttgacatagaaatcattctgtattgagattcttgatataaaatgcttttatgagagcctgtaagtgatccttggaattattatcagattttttaaaagatgtgtttacatggtgagtgtgtgttgcatattaaatttggttttgtagaaacgtttgtgttgtattgtaaaaaaatctcaaagtgcacaattaacacagccgctcttaggttcttggttatgtcaatttccactacagaccaaagaacaaacatcagacctatctatggcaactttttctaataattacatcatttattcaatgtcttggcctcatttcagaatatttttgaatgtctttcatcttggtaggattttatttttatttaccttttgaaggaaacaaaacatagaccctgtagaatttttatctagcaaagaagttccttgcaatgaacactaatagatcctcaatatgtgtcaaattccccattgggactccttgtactatttgctatacaatttgcctttcagtgatgtggtgtttttcttaaatagatttttttttctaaaatttaataaatttatt

SEQ ID NO: 92519 - DNA, 1602 bp, Homo sapiens
tcaggatgtccactccaaagttcgtggtcttttttctagagaataataatttttaaaatccattgaactggccgggcgcggtggctcacgcctgtaatcccagcactttgggaggctgaggcgggcggatcacgaggtcaggagatcgagaccacggtgaaaccccctctctactaaaaatacaaaaaattagccgggcgcagtggcgggcgcctgtagtcccagctactcgggaggctgaggcaggagaatggcgtgaacccggaaggcggagcttgcagtgagcggagatcgcgccacagcactcccgcctgggcgacagaacgagactccgtctcaaaaaaaaaaaaaaaaaaaaaaaaaaatccattgaacaaacatcctgcgctgcctcctgcaggatcaaggctggggtaacagaggagtgaggtaaggccccagggaactatccccagtggatccctgctgccctgcggtgagagggggtctagctcctgcactaagagcctgggaagaaaacacttcccgtaatggggcctgggagatggaaggaggacatgccccagtgaatggggctggggttgagagttgagcctggcagataagatggatttgtaaatgaaatgccaggtagaaagtaagttggtgtagacgcctgtggagctgtgggagcccccaggagggaagggagggagtcagggtgtccctgcaaagggagtcccctttgcaagggagggggtgtctgagtcaaagcttgcaggtggggcaggtcagaggtggcaggaagggcctctgtccagagagagctgctccagcgcaggaagggggagggacaaggtgtgtgacaccgtgaactttcccaggggattcacccagtggctccaaaggagacaacagccttttttattgtattctcttctccggtactgagattagggaaccttgttttttgcacttttctaatgccttttacatttttgtttttatttttaaagcgtgcaaaggaaatgtgactagaggggtcagaagaggataaatcatgaaatctttgaattctaggccaagactttgggtttgactctgtgtcagtgggagccattgatggttttggaggaggagggtgatctgagccctgctttagagtgatttccgcggtgttgcgtggaagggaaggcatggtgtggtgtgccttactgtggcttccgagtcagacccccactggctgtgggcttccacctgcatcaggcatcaaaggctgtggatggattgaggacctcatgagaaaatgggtgcaaataacccaattttaatgggatggaaattttccagacccagtgcaatttgatttttgcagtttgtgtttttaaagagctcccgattctaatgtcagcaactctggaagaggaactaatgaagggcaaactcaaatgcacgatgcaggcacccccaggtcatctgtgccatgaggatttgggaaactcaaagagcattgtaaaatgcatatattttataaatagattccagtgccctcagcttgctagttggtaatccctgtatccagactgttgctagagtaagtcacgtctcctggggattcagtgt

SEQ ID NO: 92520 - DNA, 1574 bp, Homo sapiens
gcaaggaacccctggcttcacaggatgtgggatctcagaggcagcccagaggcggggaatggaatggagtgcttctaaggaagagggactctccgtgttttctctggggaattttctaacattgagatcgaagaatgaagttggaggtgcctttcttttctttaagaagtaatcatttccaagactagcctcctttctccgttgtttctgcattactgaaacacatgaataccctttcttagttagatgaagaaattaaattgaagccactgctcacatacctgctgggtagtggggctgaaggatagagcttattacaatttcctgacccagctgtctggccctgggccagcgtcttaacctccctggatggctccagttttttgaggataaaactgaggtgttggtgtaaatattttccaagatccagaaataaaaatgtactgttggatcatattttttttccaggagaataaatattacaggacgactcaccaagtacaaccattcgtaagggtttgtttgtttcccaagagaaaatattttaactttcagaagagtggattttttccaaagtgaaatggtgagaaatgaagctttgaggagggtggctcattgctgataggagccttcaccttgcttcactccacaaataacccaagacctgaatttaaaggtgcttacttcctggatgttccgtagaactggaaggcaggctttctctaaggagcaggcttataagctggatgcagtgttccagacaaaagcaagctccttggtggcatgcagtgtgtcaaccagtattttatcatctcaggtgtgtttggcactagaggtggaggaggtggttgatactcattatggatttgcctgatcttcagggctttgcttgcatcgtggatgcagttctcacacagccctgcagcacaggcgtatgttgctatccctagctgacagaggagcagagtgaagcagagagcagggatgttgtccaacatcgcacacacgtcgtcaattttgaagcctggctttgaacccagaggcctgcagataaggatagatcccatgaccttgaggaggctgtagtctagggagcgggaagctcaaacattaacagattgaaccgtggggtcagggcagcatgggaggtcagggcagagagcagtgggacccacaggagggtgcctggatcagccccgggtggcagggaggctgcctgctggggcgatgctgttggtctgggatgggagggacgggtcagagttagctaggcaaattaagagggacaaggtcacattctgggcctgggaacagcaagaaacagcctggggtggacagggaacttaggaccagcacacagggccgagctccccagctgccttaccattggcctttttagggtggctggtggtctctgagctgtttggacccagatttccgtgtgtaatacagccgctttcattactggcatctcctggaaggtcccatcagtgcattttccttttcactgttttgttttggagcgtctttccctatctgtgttccctccatttcctttcctcctcctccagttc

SEQ ID NO: 92521 - DNA, 1059 bp, Homo sapiens
gtgttcctgggaatactttttaggtttcccaagaactgctttcaggtaattctgtggagcagggcatgtttattgttgatgcatggtgtgttaaggtcctctggagggcagaggagtgcagaatgcagcaagcttgactgcctcctgcgagccatgcagaggggacccgcccggtttttcttgtttttcttttttttttttttttgagatggagtctcactttgtcgcccaggctggagtgtagtggtgcaatctcagctcactgcaagctccgcctcctgggttcacgccattctcctgcctcagcctcccgagtagctgggactacaggcgcccgccgccacaccctgataattgtttgtatttttagtagagacggggtttcactgtgttagccaggatggtgttgatctcctgatctcatgatccgcccgcctcggcctcccaaggtgctgggattacaggcgtgagccaccgcgcccggcctcctgctttttcatagtgtgtctcagactccagggtgtgtcacctggctggtgatctggtgggttgcaggagtcccctctgtgcaccctccgtcgctgactggtctgcagcctcctctgcaagtttccagcattctagagtgaactctctgatgtctgcaccacctgctcgacccctgctacagcctcttcagtgaggtctgcccatatcctctgaatgaaagggggcctgccagggaggcagcagcgcttcctcatgtccccatttgggtggtaggaagtgttccctccacagaaatactcagatgtctgcatgaagggactctctcctcaagttcaaacattcactgaaacggaaatgcgctgaagctggaatcaatgcacacctttttttttgttaactttcttgggaagcttgtgtgttaagcctgtcggtgtctgttaacacttctctattcagagacctccagccacgctcgttgcccaagttacctgtgagcccgcgggttgagtgttcaagcctcttcctgccttggctccagcctgtctttccagggctgatctcagcagctgc

SEQ ID NO: 92522 - DNA, 1070 bp, Homo sapiens
gtggtgccagttgtgcactcacaagcataacacaggctgtgtgctccaagggagcctttgctttgggaagggtgtgggcttccagagaccttggggctggctctttgacggatggagaatgtcaggaagcacctgggtccttctgtgagttttctggcgacctcgattgccacacggcgaattttgatagcgtatgcactggagctttgtagcctagggcagtggcatccaaagagcttccaggagactttctgagttggcaccttagatctgaactctcttgactaaaacacttgcatttccttctaaccacttggcagaagtaagtgattgtaatccctggtgtggatgggatggggctggctgtatcctcacagatctcactcacagattgcaggcccttctctcttcttcttgtctcagtgaagcactatccaaggccctgaaaactgagccagtctggtcattggtggccggcagagtggtggatagggccaggtgtattaggaaaaagaaaaagaaatctctttatttaatccattgtgagacactaagaaaccatctgtgtttcagcttctgtcctcccccttcccccccagttgctctctttactttcttcttgttatcatgtgtaggggtgaaagtggccagatatgagagtaagagttcccatttatccaaggacagaagcaggcaggaacctcaggatctgatgtgggcaagccgcaggtaaagggcaggttcaaggcgcagaatacaggtagatgattctctctgatatctgcctgcatcttcatgtggctgtcttctctgtctctgcgctgggggtgcacctcttctcacaaggacttcagtcatgttggattagggccaagcctgttgatcccatcttctcttgattgcatctgcaaacaccctaataaggtcacattcataagcatcaggggttaggagttcaatatatcctttgggggagacatgattcaacacacacgtgtgcgcacacacacaaacacacacatacacatgcatcaatacacacaacacatatatatgtaccagtatcaggc

SEQ ID NO: 92523 - DNA, 1005 bp, Homo sapiens
ataatatatatagatacacacactttatctatctgtatatacatacatacgtgtatatatatgtataatttatttttttgagacaggatcttgctctgtcactcaggctggagtgcagtggtgcaatctcagctcactacagctttgatctctggggctcaagcaatcctcccacctcagcctcctgaatagctgggaccacaggtgtgtgccaccacacccagcaaatttttatattttttttgtagagggggggatttgccatgttgcccgggctggtcttgaatttttgagctcaagcaattctctcacctcggcctcccaaagtgcttggattacaggcatgagccactgcgcctggctaactatatatatttcaaccaataaatccaccttatgtcataagtggacattttgctgccatgggattgaaatgaaacaaggaagaaaccctcctattattaataaactggacaaagccatgcaagcaaccacattgctcctaaacggctgccctcccaggctgacctgataccatgcacctgcaggtctgactgagtactgttcatgtcagaactgggacagtgtgcccggcagagtccagaagcatctcctagtgcagcggtcgtggtcagtgcttgagcagagaaggcaagactgtggggacagagacaggatcctgctcaagacttcaggccccactggatttgtgaaaagacctgtgacttctctgtaaatgttcctgttttattcatctctaaagtgagaattgtaccagggttacttcttttgtgggaatcctctgaggattaaagaaatcatgcctatgaaacttcaaaggaaaaccttgaaggcctgtccaaaatgcagattaacaaattaccattggaattacccaggtcagaagctgggttttgggaatggggagggacaggcctgctgacagcattcagagtccactgtggagaacttcattggctcataaaagactgccctctggtccac

SEQ ID NO: 92524 - DNA, 1681 bp, Homo sapiens
ttttcttgtttgtttttacatttaagttgtgttttgtggcctggactcttccctttgaactaaaggaatgtgtattctgctattgttggatggagtattctttatcaagtagatcgagttgattgttagtgctattcagttcaactatgttcttattgattttctgcctgctgaatttttccattcctgataaaggggtgttaaagtctacagctattagtagtggatttgtctgtttctccctgcagttctgtcagttttgccatatgtattttgatgctctgttgtagggtattacatgtttagcattgttatgtcttggaaaattgatctctttattattttgtgatgaccctctttgttgtgatgatttttttcttgctttgaactctgctttattcgaaattaacatagctagtccagctttcttttgattagtgttagcatggtatatctttttccatccctttatttttaacatgaatcttcctatttgaagtaggtttcctgtggacaatgcaacatgtagttgacacttgctattttaccctccctgaatatctgtaccttttaactggtatatttagaccattcacaattacacacactttaaaaatagaaaatactgtgtattgctatttggagatttttttttccttaatatattaagttaccttattcctttacaaaattacatagccaaaggaattgctttctaagttctttaaaattggtgtgtgttttatctcaccattctaaataaactatttttttcctgtggtaatgcctctactataacaagcttctcattttgtgcctaatttggtatccggtcagataaatcaattggttctttgtgagcagtttaagcctaagactcagcttcatttttatgagtgataccttagaatcaggaatgacggcagaattagccaaatgccttttatcacaataagagaattttaaacaatactcaatcaattgataaccaatgaaccaacaagtttgttccatagctataatttgacaaatatctccactgctgaagagtgtattttgttttcccccagagaagacaagtgcaaaataactcactgcagggcaactctaaagggatccctgtgtttcccagtgtacagactattagtatacgatgcatgcaaacagagaggtgctttattgaagcgggacaagacctctattcatagtaaagtcaaacaaaccacgcatgtgaaaacctccacttatagcggctgcataagcttaactgcgcagagctatactgctttttgaaatactaacttgcaagttcagcaacagctaagaaaacaatcctagacttggaaattgaaagattggaagagaagtggagggattcctttggaaccctttacgtacgtatgtgtaaggaattgtaggtaagtgggagggtctctcttgagcagtattttgctgtgatcactagtgggcacagagtctaaaatgttccttcattatggagaagagggagaaaggctatggagaaggaagagcctctactaacttggatttctatgtggatttcagagcagagcctactctaaggatttgcttcagggaggctgcaatgcaaagaaatgctgtctttttgtgggattttaatttagagcttgcaatatgttatacttatgagatacaatcc

SEQ ID NO: 92525 - DNA, 1035 bp, Homo sapiens
tgccaggcaggtctgcagcaagattgagtgacagtctgagatgctgctgtacttctttgttcaactgtcaaactttgggagataactttcctcctagctacaaaagggagattatataacttcttatgctaacccccacttaccctctttaactgcacatggcttcgtgtgtttatcacttattttttcctttttagaataatttttcaggtggattgggtggaacggaaatagccccggggggtttgttccttgagctaattgctgtttcttggagtggggctgtgggattggaagattccccttgacaatccttttccttttttggttccctctcttccaggcctctctggcacataaaccatcttaccttagagatttactgtttcgtacacatgtttcgcaggaccatagctaacaaggctgccagctgtgtctcagggttgtgttccaccctgggggtgcagtgcatcccaaggagtccaaggactgcggttctgttcctgagccacgtccaggcccaaactcccagagaaaaggacctacagaggcttgcatctggcaaagcagaagatccgcagggaagagtttaattctttgctagaaaggtgcatgccctctaacagtgggggtaatagttataataatggtagacaccagcaccagtgaagcccaagagatggtcacgtttatggtttgaagagtaggattctggagccaggttgactctgtttgaagctaggctcttgacatttactaactttgtgacgttggacaagttggggaactttaaagcctctattttcttatctatgaaatggggatgaatatgcctgcttcacagtttactgaagggattaaatgaggcaatatacaactaatgcaggttcagatggtgccttagtaactggagctagtgttaagtgttggcgatttgcctacgtggttgagtgtccgagctggggttcaaactcagtggcttctgatcccagaagatgcacacttttcagtataggatgttgtgtctaatattag

SEQ ID NO: 92526 - DNA, 1144 bp, Homo sapiens
accggcccacctgggacctggccctcgacccgctggtgtcttgcaagctctgtcttggggagtacccagtggagcagatgacaaccatagcccagtgccaatgcatcttctgtactctggttggtctttttggataaaatatatgttacagtgattttaggatgagctttttgctttcatttgcagagacactaggcaaacctttggactacattttgcctgacagtggagtcttcttgttgaggccttcacacagttcttggaagaattattctgttagtcaggcaggctcccagagtggaagatttccattacagttgcttgtggtgcaaaagcaatcggttaaacagaattttagaagctcgtgataacaattcacgaaacttatcatagcgcatgttctccttgctacacagcaaaagcttccacaccttatatcaaatgtattttaatagtcacatgtctgaggttatggcagtgctaacctagtgattgtgtgtagctagaatattcagtcctcagtgtcatctctcactggcttagtgctaaactagaatatagatattttaaaatcacatttaatatttgttatgatgtagccaacattcttttggggccagatgatccttcggggcttaatgaatatggggacttctaagtcaagaatctggggtttgggtcaaactcaaatcccaaattttatctatcggaaaagataaatgagtgtgtgaggtttacttttagttaatctcattgaattttacttgttttttctgtccattcaaggaatgaaaaaagaaaatgagtgcatagaagccggaagtaggacggtagtttcccggggtctgcagggaatggggagatgtaggtcaaagggtatgaagttgcagttatacaggttgaataagttctagagacctaatgtacagcatgataattatagttaatcatactgttttgtatacttgaaattttctgtgaggatagatcttaagtattctcaccacacacacacaaattggtaactctgtgagatgatggatatttaattagcttgatggatttatgatgtatacacgtatacaaaaaatgaatatcaaaacttcacattgttcacttgaagtataaaatggacagtctttat

SEQ ID NO: 92527 - DNA, 1048 bp, Homo sapiens
tcattttaaaaagtacagaaaagaaaaatgaaaaactgtcttcaaaaaaaaaaaagtgtcttctgaatttaactgctgttgtatgtggatggtgtagacggcttccctgtgggtttttcgaatgcctggattataatctgtcactcgaacagtctctcccaccctgtacactgatgcattcatctttcttgcatagctttcagactgtatttcatttgcacctcatgatgtccttggtatgtaggcacagcaaatattttatctttgttttatagataaggagagggagctttacaaacatttacatctgtgtcttctgtttcttgtttatgctagattcagcctttcttaagggcagaaggatttctggcccattctgtatccacctagcacctagtttagtgcaggacccagaagagctaatcagtaaaatctcacagattgaaatgaagtgtattgatctcaatactgtagttgccatccaagaaatgtgcctcattaaagcaccaggaagacagctccaacctagaggaaaggaagttgcttttgacattgttctgagatggagaaggataggagggagattgatctccatcctgttaacaccgtgaatggggcttattgtcatttctagatgagttaggatggtagaacccgtcaagatggattcaataactagccttatgcaaaatcacctcctcttacttgaaaggacatcttcccaactgatcgaatggctccccctctgccaaaaatgccttgtggggggtgggggcggggggcatttgcagtctctgcagtcgcctgcctgctgtcagaggccatagcttgtgttcttacccttgaaatagttcattctccctggcttttttgctgaggccttcatttttgttattgttgtcttagttttctatttctagagaattgtagtaaaaacaaataagccactcaaattgagaccaaaagcctaaccaaagtcagtggatgtgaaggaagaagctagcactgtgttctccgaaagaggctgctggaaacaccaaaaaaacag

SEQ ID NO: 92528 - DNA, 1615 bp, Homo sapiens
gtttatagacacttctctgtttttctttcagtgcctgaaacagtatgttgagctcttgatcaaagaaggattagaaactgcaattagctgcccagatgctgcctgccctaaacagggccacctacaggagaacgaggcatgtgcaattgaacagactgggctgtttgatgtgcacaggcgtgcactgctgaacttgtcagaataacgtgggttttgtttgggtgtgcgttgcattatattctagccctcagcttgttatcattcctgtttgcatttttttttcccttagattgagtgcatggttgcagctgaaattatgcaaagatataaaaagctacaatttgaaagaggtaggtgcctggtatatctgccggttatgattcctgtaatgtgtgaatgtggataattttgtggggagttcttttggtagatatggttatacagcatttgataggagttaaaaagttgatgtaaaataaacttctgaaattaaactgacattctggattctctgaacagctcacagtttgaagaccttgtctagtgatctatttggtagcaggaagaatttatggaacacaatttgtttataaggattgaggctcctgggggaggcttaaagttgatggctctcttgaggtattatatttcagccagcttaaggctgagtttgagggctaaactcttggactggcccagaagttaaaagatgcagagtcatggagggaagtcgtgagggtaggcatagcagaaattacagtaacccccgtcctaacaacagtccgatggtaggtgtcctgtctgcgcttactcaccactggacacagacctagatagtaggtggtgaatgaataatcaagtcccttatcccagtaagtgtcacaacaactctgcaaagctaatttgtcattatctaataaacggatccccagagaggctaactgacttgccctgatttctaaatatagtgggtgctttgggaccacatcccatgacccttcatcgtgagccctccactgggccctgaatagtccttctggctggagcaggcctgatgcagacccaggggtcctctgggagagcagtgtggcaggtgcacacagagcagaacatgattctcaggataatattgcaaagcattaagccatgtggaatgtccaggagaggtctttagctctgctctctgaaatactccggggtcatacaatgaaactgtaaagagtctgtggactctctttggctttgttttcatatctattctgggccccaggcttgtctggtaaagagcagagtgacagatgtgtgcaggcgacactccatatgcagaacatcattgtgtggaccttgcaggcggattctgagtttggattgctggcatctgctctccctctccctgcactgattctcgggttcttgacctgagcagggtctcaccactgagacacagccctggagggtgggcttacatgaaaacatggccggatggggagtggacggcagaggagaccagaggacaatatccagagactcccagtttagctgcatgcagagacctgttgtttgtatatttttgctttctaaaagaaatgctagagatagctgggcccagtggcat

SEQ ID NO: 92529 - DNA, 1105 bp, Homo sapiens
tgcatttttaagcagggagttcttaagagacctgcttcattaatctgccatgaatacgcctctgggagagaagagttaacattagtttcctctagtgtgccaaaaagcatatcatttgctttgtttgaaaatatgtctcatacacacacgtgtgtagattggggaggataatgcagaatgttaatagacatctacgcctcagcctggggccatgttcacagggtgtgacatgccccggcagcacaggaaggacatttgcagtctgcagtcagagcggccgtttgtccctgaccttttcgatagggaatctctccatgtgaggacaggcagtgccgtgtcacagctatatgaggacaaaactaataagatttaaatcgttcccatggaaaccttagccaggtctcccctgtgtgctatcctggggggccttttgtgatggggatgcttaatagcatcccccactgttgagccaggagggtggacaggaggtggtgcatgacaaatcacgtgcatgaagagaccgagacccagctttgggatgtctgctccttgctgatgtcagaagctcctactgcacaggagaggtggggacagcagtgagacggaagggtccctagcaggcagcgctgcccttctggatctagcctcagagctatatcgggaggagagcaaagagcgggtgaggatttctcttcccgcgcagcgtgttgtttagtgcacacagcacttgcaccctcccgcagggctgggcagacatgggcctcctatctcatcagggacaaagctgggctcaccccacagcactcacagagggcaggcagagagttgtcggaggcatcgcggggacgggatgggagcatgacccaggccagctgcctttagcctttggcgtttcctcctcactgctcagcgtggcgctcagtgccccaggctggcatgtgcaccccctccttgctttgctgtgactgtcagctcaggggagccccaggcatctgcccccacacatgtgacccacagacaacaactgcgttttctcaaaaagccattttgtcagacctgacagctaggaacattcttagaaaagcaaatgtggaaactatcaaca

SEQ ID NO: 92530 - DNA, 1852 bp, Homo sapiens
gcagccaataatttaaagaaatgcaatttttggacaaggatgtgaagaaatagatgtgtcaaagtgtcttgtttttagaaataaactttgtggctaattccattaaattgggcttcttagaaatgtgtgctgtgatttggagagaaaatctggcccttgaaggattggtttcactccgtagttaactcgtggcttggatttgagaaggggaggccatcttaggcaggtgaaccatttggttagaagaacaatccagccatcttccttccctcttcctctcggtcttctagcagcattttcctggtgctggctgtatgcccaacatggggccatcaggggtccagcttcagaaaactgtcccctaggggaggcagatgagctagcgccatgtgcattgctcagagaaacccgacaggcaggtgggccaagctttccaggatgtggaggcctttgagctgtgagctgagtgtcagaggcaagcagggctgacccagggctccaagggcattccaggggcaggagcagcattcctgagggatgtctgggtgtctggaggtctgttgcatgaagggagaagttgggaagagctacagcggaggtggaggtggaagggtggcttgggcggtgcttcggttggggctggtggtgctggctgtattacctggacatgttcctccctgtccgtgcactgaggggctccttcctctgaagcccacatgaccctctggcttaagtttgatttgtccattttgtctcactgtaccagaggtgctgtttgatccctgtcggacttggtgcccggcgtccacctgccaagctgtgtgtcagctccaggacgtggggctgcagaccccccagccagtgcagtgcaaagcctgccgtatggaattctgctccacctgcaaagccagctggcaccctggccagggctgcccggagaccatgccgatcaccttcctccccggggagaccaggtaccctttgtacacaagctgccaccaaaggcatggctgtgggccaggagaagcaggcatgctttcttcctaaaagtgctgttacagtgtaagtggctgtggctcagtcaaccctaacacacactgtacctcttgagcctcactcaagcctgtcattatttgtatgtctatttatttttgagaactgactatgtaccaggcactgtgtgaggccctggaaatagaaaggtgtgtgagaaccacacttaacacggcttggctggaatgacaaatgcatgcgtggtttgttacttttaaaggttgcaagtcctgcagtacctgaagtttctgcaagacttcactgtgttgaaggtgatctgaaatgggggtacagaaacaagaacaggagtagggtgcactggtcataaatactgtctggagggggatggggagacactccctggtggcggcctcccctgcagccatagtcgggctgtttgcccaggagaatgctgccgcaccacgctctgtactttgacatttcgtaggttgatgcataggaaattcatcatatccaggtctttttctcctacaaaatctacaaggtcacgtggttctgctggacacttgcccctgctcctgttgagtccaggatcctcatagaggagctgccactctacccaccaccctccccagggtgtgctcaccagctgctccctgtgcgccccttttcccattccaccgtccccagctcctgttcctttccgtgtgacccctgtgccctgttctagcccccgaccctctcagggtccctgccacacacccctggtctccttccgggcgaacctctcttcccgtgtctggagtgccctgctctgccctcctcctttccctggggg

SEQ ID NO: 92531 - DNA, 1056 bp, Homo sapiens
cctatgcctttcttgaaatgtgcattttaagaagttatagttaaacgacttttcaggagatttagaaagccttatgcactctttgtgtttttcttgaaacttgctgtagtaactttttgaacgctgtaagctgtgtactgttataagtgtgcttcctatattgttgcatttccttgataatattgacgtgtttaaaggaacatctcatctccattagatttgccttttgttgttttctctctttggtgattcagctcagctcatgggcctcatcccttctctcccaggtagcagaaaacgctttttattgtattcaatcccactgctttgctcggcaatggttctcctccgaattgctgccgtctggcctctggcctcagtcttcagatagacagtaagaagaaagcagcctcattgatccgcagatgtaggggcctcttggcagaggctggaggactctgggggctagggaagagcctgccagattttcacatttttaaaatgttctagtcattttgagaaatcatatatcttacacagttccaagtcctgttgctaaccgttttgctcttgttggggaaaagaacctcccatttcacttcgttttaacgtggggattttaccacttgatcttttacagggctgtctgtgaccatttccatggcagcaggatgcagggattaataaggacacatacacattattccaccaattgactttgaaaagtggagaaagtgtattctttaaagagaatttacttctaaaagccacaggtgcttttacaaagcaaactgcattgaatttaaaacttctaaaaataacaggcaaatattgtagctatattacagtgggattttaaaaatcttgttaaacattctataaagaagtaaaacaaaatccttttatctcagttatttgcccatcacaagcacatttttaaaatgttgctttgtgtgtgtttgacttctgcatttgagtatcagtctcaggtcctagtttactttccctggttggaaatttatttcttatttcctaacattgaattcgttagaaaaa

SEQ ID NO: 92532 - DNA, 1063 bp, Homo sapiens
caattgtgtgtattgctgctgagattgccaagtggcgctaagcacagcactgcaggtgaacctgataaatcctgttaagttctcaatgcagctactgcccacttgttatgcggggtgatttttcatgggctggagatatatatcaggatgcaaggtgctcaatttgggccagctgtgttcataaccagacagcactgtgatgaatgctcccagaaggaaaccaaagaagctactgtgatggaggacagagaacacgaagcactgtgcagaaaatataggaaaagggaggcttaacccaagggccctcacttagtaactggtgagtttcgccaaggttacgctctgtgattcttctggtgaatgcgccactgaagtacacggtcccttaagaaagtgcatgaggttcccgcacatgcccacctgccgccgccctcaacgccttctggcaatgtcccctggccttccagcagcatggcgacgtcttcacagtaccgccagctgctcagtgactacgggtcaccgtccctaggctacacccagggaactgggaacagccaggtgccccagagcaaatacgcggagctgctggcatcatcgaagagctggggagggagatcagaaccacgtacgcggggagcgagagctccatggagaggatgcagcgcggcgtgattcacgctggaggactggtgcgggagtgcttagcagaaacgcaacggaatgccagatcctagctgccttgttggttttgaaggatttccatctttttacaagataagaagtcacagttaatctcccccattcagatgaaacccttgttttcaaaatggttacagtttggtttttcctcccgtggttcacgtggctctgaagctaccgtctcaaagattgagaaaagattttgcagttaattaggatttgcatttcaaataggaactgctcaggtttctgtttgtttgtttgttgtttttaagcactgacttaaaagatgcacctaaagttatcttacagcaaactgtagtttgcctccaagacaccattgtctctttaatcttctcttttg

SEQ ID NO: 92533 - DNA, 1052 bp, Homo sapiens
cctctgacaaaggcgcttgggaggagcgtgtggagcaggagaagagtgcctgggagcaggggtcagcagggacaggggccaggtctacgcagaggatgctatggtggccaaggggaagggctgggagggggctttgcagacttggagaagctttaaggtggtgggtacagaggcatgaccagagaggtcggcccaggttcctggtgctcctgcttgtatttaattcctggcaccctggggtctcctagctccaggggaggtgagtgatgtgctctggccaatgggctgtgaactgtgctgattggatccccgctgtcctgcctgccccagaagatgggaagccacgtgcccacaagtctgggtcccaccatggcgcagccccccatgggcccaggccctcagcctgtggggacacgtgcagtgggagagggtggtctggatttattcagccacagagactcctcggcaacttcttatcccagctccatcagcctgtcgaggaggattaactaggcttagaagtagcccatggccttgggaaggacgcattgtatggggttgggaaacacaaaagcacgatgagttaatgtttatgggaggggaggtggggagacccaggtaacaatcgcgggtggtagtccaagatcctgcggtgaccaccagggcagagccgggtggggcagtggccacggaggggcaaacgctgcgtggggggaaactcttaacttcttgcttccaaacgaaagggtcccagtttgaagaacttcccccgaccccctgcccccccgcccctcagtttcaagtgtgtgttttatccattttcttgggaaccatattcctgaacccctaagcacctgaaccctaactaatttactctgaacccacctaatttacctaacttaccctgaacccctaagcacctacaggttttagaatgatgaataatccattttggataaaggcaatcatacctggattcagccagaataggaacttttctaagcagattttttggaaaataaaattttgggacttttaagttgagaaatcag

SEQ ID NO: 92534 - DNA, 1055 bp, Homo sapiens
cacgttcgcgcgccggcccctccgcagcgagccaagtccatgacttcagtgaggaggaacccgcctgcctcgcaccacgtgcgctcccagctggggcagccgccctgtgagccctgtcccggtccctgggacgggctagggcctggccgggacgcgcttgtcctgggcacaggacaagggctttggggcacagccctttctcggccggggaggcaggcgaaccgatcgcccgggcactggtgttacccaggcggcgccagcgcgagttggctggtggacaggtttttcaatagtttgaactccttcttccccttgccgcatctttaaggcgtttactcccagattcagccctctcctcataataatgacagtttgcagacttttcctttccagttagagtgcgtgcgcgggtcctgcaagatcccagccgcgcgtcaccgcgaaccattctgcgggaggggcaggacctaaggctgcatctccaggagggaacgtggagacaccgcgggcggaggggacctggaggagttcctggaggagcagtcctaggcacggggcgaaggatttgcgctctagctggtggagcgcacatcgccctggttagctctgcggtgggtcctgggctcatcccggcctcttcctgcctccgctgacatcagggcctctcctgtttagtcctaggcctgcccttcatcaggactccgcagaaaaggatgggtaaattaaggcatacatttaattttaaccatcatgcctgactttctaggattctgtgtgaagaatacagagacagacgttccatttcaaagaaaaaagagcaacacgaaggccctctttaaggagagagtaaacattcactttaggtaaaaaatagtcttttacacgcctgtgcacggcacacctcttttgctgttcaccttgagcccaagagtttggaaaggctgcccccatttcagagaggaagaaacgcaggcacacgtgaatgacagactcctctgtggtggcctagactccagccaacacttcctaggacagcctgccattgtgcaaaggtg

SEQ ID NO: 92535 - DNA, 1024 bp, Homo sapiens
aagcttggttctgtgcctcagggctgagtttaaagccaagaatgagttgagtctgggagtgtggaagcactacctgtctgagtgggcgttaagacgcttctctggagtaaatgaaagttaatcaggagaagaaaagaggctgtacagaattcagaacatgatttcaggtttaagggaaggcagaaacacccgagggttactgtttgcacagggaactaagctgtcacctggccccgggctcctgaggcctccttggcttcgcctgcgtccacacctgtagcccccccgccacaccccacccacctccgggcctccggagacggggctgggccgggcgcattttcccggacttttcgatcgccctcagccttgactgccgccctggactggaaggaagaggcagcgggcagaagcctttcccagccaaagaccgcgggtggccacgtgctcaagactggtctgcgttttcagtcccggggcgcgaggtgggctgggaggctctggaaggcgggtcccaggtggacgcgaaccgggggaggaagggatccgggcggggcagcagctcacctggggcggaacaggtgttcgggcggcgccaccgaggagtccgcgcgtctccccgccctgacccccgatcgctccccgcgggcgctggcgctggaggagggcgggggccgtggagccgcggccgcccggatcgccctgcggacccgcgccggggactgggctctgccggggccagcgcggggcggtcgtgtggttgatcatcatacccggaggaagccctgagggccgtaggggcgtcttccccgtcgcaggctacccgcggacctggcccccaggtccccgccacctgtcgccagccgcggccccggccgacctctgcgcggcggggagggaagcgcgctctggtcccaacccgacccccgcctcgcctccgggagaggcgcagacgccggccgcacgctcgccccccagccacggggacccgcgcgtagtccgctcggacggccctggggagcgt

SEQ ID NO: 92536 - DNA, 1468 bp, Homo sapiens
gaggctgagtaaaccgagatccagcgttctgtatggcaggggtattgcttatcacagaggttctgaagagtaggaagtacataatgaagagggctttaaaaattgccaacaaagtgagtcaccagggctggcagtagtgtgacggggctgtcctgagctgttaggagagtagatgcggggagggctggtgacctccgtgggtttatatgtcggaaactcttctctccaaatcccaggcctggcttccagcaccatccagctgtgcccaagaagccaccctggtctgttctccaactcttttaaatggtgcccaacttttctaagtgagcttagcaatgagaagaaaaaaaaacatgaattctttttctggaaaatcagggagacatgggtaataataggtactaataaatatttatagatgagtgaatgaggaaataattacatcaaaaaggtcagtgacaattgataaatgacaaggaaatatttaattaggtaaaactaaatcattgctctctatactaggatagactttatctacttcatctgttcctaagtcagcatgttagttctggggaaggatcataagaaaggaaatactttttaaaaaaaaatttggaaacatgtaacaaagcaagggtaaaatatatatatatatctatataagtgctgtgactgtaaaagtgtactttccattaattattagccgagttaagagaatggtcacattgaagtactgtgtggactagaaatgtaccctgtcatcatgcaatgaaatattgttatcgttttaacatagctcatttatgtagaatgaattctggtggtttaccccaagtcacagttaggacggtagatggtgagatcgcagatgcgctattatctagattcagtgttacattttcgatgtttatcactcagtgggtttttattaatatgctgattaagttatttactgggccagtcattgtgctaaatagttgctcttttgtgtttcattgccttgatgtttgagtgtaatctagcattttaatacagtgtttattttgcatgatctttaacaaatgttttaagcaattttaaaaaggcaggatgttattgacattatacactgaagtcttaacattttaacatttatagtgcttatttgcaaaattgtataattaggaattatttcagagacaatgttttctttttcaggtgagtagttgccgcgtaatatcattggagtacattctttatactgtttgtgaaattaatactagcatattaagtgtacaaatagatttagaaaacaataaaaaattgcatgctattctgactcatgaatttttattcactatgatgattcacattttgattaaaaataaaagtagtttgtgtgtttgttttgtcacatgtctgaagtttgttaaagactttcaggttcatgtacagtcatgcagttggcagaagtgttctgaactgctcc

SEQ ID NO: 92537 - DNA, 1050 bp, Homo sapiens
ctgcgctatcaaaaactcccaagtgacgaggatgaatctggcacagaagaatcagataacactccactgctcaaagatgacaaagacagaaaagccgaagggaaagtagagagagtgccgaagtctccagaacacagtgctgagccgatcagaaccttcattaaagccaaagagtatttatcggatgcgctccttgacaaaaaggattcatcggattcaggagtgagatccagtgaaagttctcccaatcactctctgcacaatgaagtggcggatgactcccagcttgaaaaggcaaatctcatagagctggaagatgacagtcacagcggaaagcggggaatcccacatagcctgagtggcctgcaagatccaattatagctcggatgtccatttgttcagaagacaagaaaagcccttccgaatgcagcttgatagccagcagccctgaagaaaactggcctgcatgccagaaagcctacaacctgaaccgaactcccagcaccgtgactctgaacaacaatagtgctccagccaacagagccaatcaaaatttcgatgagatggagggaattagggagacttctcaagtcattttgaggcctagttccagtcccaacccaaccactattcagaatgagaatctaaaaagcatgacacataagcgaagccaacgttcaagttacacaaggctctccaaagatcctccggagctccatgcagcagcctcttctgagagcacaggctttggagaagaaagagaaagcattctttgagaaaaacaagcaaaggagaagagtgttactgtacctttatgacagaattgtcctggattttgactccatccacgcccatcacctttctacattttgctgacagataactaaccgatgatgaggccgaggtaaaagagacatctgcagtgtgacagaagggagcatgagaagcatggctcaccagccagcctctgtggtctttgtaattagaagcttcagaactcactaatactactgtacctttcattggcgcattaccccataaaacttttt

SEQ ID NO: 92538 - DNA, 1032 bp, Homo sapiens
agtgggtgggcattcttcatatctgtatctaatataacggataaacaagtttgccaggcctacttcatttagaacgttgttagtgaccaacacgcttatgagaacagatgtctttgtcccctcccagcagcttgtgttcatgttcatattttctaagattagaaaacaaaaactaacagttttgttgttgctcatgacagcataggtagttttggaaataggagggttagttcttcggttggtcccagaaaatgcctaagacatttgggaaaatatgaagtggctgatgttgttcaaattcagcttgtttattgtattattatatgggatgataaccttttttttggtcagcctttctggtctctagagacttatttaaaactaaatataagcatacttggcaatcactagtaattcagaatatttcacattctgtctttatacccataattgttttaatttttactcaggcaaacataaatggccgtgtgttagctcagtgtaacattgatgagctgaagaaagagatgaatatgaattttggagactggcaccttttcagaagcacagtaagatatttgtaacattgtgatgtttacaacattattttatgataacattcaaaattatttataacattgtagaaaaccagtatcaataagtactggcctaaactggtatttttttcatatttttttaaatttaaaaactgcttcttacacttatgtgcaatcctgtgttgtggaaaatacacacagcagcacttggcagcctttgcctttttgggcatttcactcagagatttggggaagaggccgcctgccggttcttcatgctttcacctgccttaactctcatcaggctcctcaaagccttcgaggccttgaccttcagcattcatccttatagggcttgcattgcccaggtttagcaagaatcctgttaagtcagtttacatgtgtgatcaccctcagtatttgatcaaacgcctcactaacccccccacccccaggtgatgtcggctcaccctgg

SEQ ID NO: 92539 - DNA, 1303 bp, Homo sapiens
ttgcttaattgtctagtataggtactttaaaattattttgtaggtttattttttgtattcatataatattggcatcagtagttttccatctttttgcgtgtgtgttttttttaacctctcttcttcctcttattaagcacggcacccttctctcttgagattaggcagtaaacatttgagaagttgacctaggctttgttcatgaaatgttctgttttcttagaaaaaatggttttgaccaggctgtatcagctgtaataaaagctactcattaggttataacagtaactaaatctgttccctaatggtatttccttaccatgctaaacatatttgtttttttttactttacttcatggtataacttaatgagtttttctctgtcacatgacctcattatagatggcattaaatgcttattcatacctgtatttttccttgacttctctaggggtcaggcccagccccaggcccagtggtattactgaattcactgaatgtggatgcagtatgtgagaagctgaaacaaatagaagggctggaccagagtatgctgcctcagtattgtaccacgatcaaaaaggtgaggcagccacttacacacggaccagagacagcgctgggggcggaagacaggactgtgtgggtcgtgtaaactttatgtatagcttcccaaacatgcattccctgttaaaatgggaaagctctaaatggaaaacataattcttactagtttgtattctaaaattgccctgttttctcttattttataaatggataaaataaaataaagtagctgtcttaccatgttcttttttaaatgacgtaatacaagtaaagaatgccttgatgagaaagagaaagctctgagggattcccattgggataaacagaactcatctttccagtgtggaaccgaaaacctttgtgttacatttttttctaattgtaatatttgttagtgtgatttagtgattatcaaagtaagccacacttgcctcattttctccaaattctcattttcatgtcatgtaggacttaggatcatgtcacatttgatgaaaccacataggtttgggtttgcaaggttaatgcatttgcatagtttttttttcttctaagatcctattgcaattctagcagctatcaggaagttggctagagatgcctgagatttgggggaaggttttaacgaagtctttatagtaggtatttcactaaggtatactttttatatcagagtactgtgtaataaagtagaacgttaataaccagcctctaatatttatatacttgaaagaat

SEQ ID NO: 92540 - DNA, 1053 bp, Homo sapiens
aaaatataattttttttaggagtataattgtaagatgaccaagcacatgtgaatggaatgcagctactgtggttgggggtgtgtgtgcatgcatgtgtgctccttgctgtgtgctgttgtccgtggtccgttcagagtgaggaggaaataggaatgatgaagctctgcctgtgtatgttagacatttatagttgtgcatcggatgtgttactttatgctcttgtccttcactgtgttttattccttccttaaagctgtgtgactctgggtttaacaaacagagacaggtacagaaactctcaatgaaatcttacttttcttattagactactagaagcaatcattggcaacttcatgctgggctgtctataaatctgtgctcactaaggtgcgttcggtttattagttgcttccagccattgcatggcactcatttctggctaatcagttttgtgcttatttaataaatttaccaaagatgataatgtgtcagagtgtagttctaatctacttacaatacacagtgatatagttacctcagggtaatttcagtattttgatagctttacttttacctggagaaattctgatctgtgtaaattttgtagtttatttttaacagtttaaacacactaatatcttctgcattcagctttctgattcataaaaaaattttaacaaattctgatgttaaaatcaatacgctaaaatggtctcttcttgacttagataatttcaataagaatgcatgataaacattaaagtattatttgaactagtctgtgtattctcaaagtaatatgcttattttctagtaagaatttacctactgaattattgaatatgctttttgccctttccttatcatttttgcactctttctcctcccttttatgagatttccacccccaaattattattttggttataagattcatgtggtttcaaaataattttcttatgtatgattattttagaaaaggtctagcaggtaattaccatttcttctttattcaaagaagcatattataacatattttcattaattgataa

SEQ ID NO: 92541 - DNA, 1055 bp, Homo sapiens
aatactccaatcagtttagattcatgcagcctttttatctgttgatgcttcttagccctaaagttgttaatcggtttgttttcttagaatttagaggaatttctaggttatttgaatactttagatactttaaaattttgaaagctttccagggatgttttcactggtgcctttaccttctttgagtccagttcccactaggaaatggcagcattcacatgattctgtgaccccagtgaagcaaaggacctagtattgaggccctgtgtctggccaggtctcctcagtggcatgttgttctgtcatctcaaagagttgctctcgaagctctgtagtttggcttaatttaaggtatgctgctcctggtggtaactgtgtttcattgaaaagcacattttcaaaggagcaataaagcatttcttcatcctttcatttttccctgaattattttacattgagtaccaccgatgcttgtgtgatcagcgattagttcaacgaatatttattgagtgtaagaggcgctattctagtgggacacagcagtgaagaaaactgatgaaaatcttgcttcacagagtgtggacctgaaggccaccgagggaattatcggttttatgaagtcattctttcttgacctcctcagctacagggtttactcgttacctttggacagctttatttagatcacttttataacttgttgaaaaagcatgacaataattagcacaaagtttaatcataaagaatttcagaactgcaaaggcagtgttaacacagctccagtgtgctgttacctttacctttagatgttgatgaaaactattgaatgaagatattaaaactgaaagtcttggttttcattaaacagggtccagtcagtggagtgaccaagtaaaaagtgaaaacaagtccccatgggatggcccatgcagtaagcctgcacttaggaaggctgaggcaggaggatgacttgagcccacaagttcaagaccagcctaggcaacatagcaagaccatttctttaaaaaaaaaaaaaaaaattagccaggcagggc

SEQ ID NO: 92542 - DNA, 1051 bp, Homo sapiens
ttgctaccaaaacttttaaaactaagcctttacatttggtaatttctaatatcttcttaaagaacatgtgtatacagtacctttatagtatgtaaatattagcaccatgatataaaaaatagaggatgtattgaaggaagaacatttcaatcaaatggcaggaattaaacaagataagggaaattcttccaatgaactattgaatctaagaaagacatttgtgcccaaaatattagaggttcctgatgataaaagtaatagtttaaaaaaagaaactctctattaatatgtttttataaatcaggaggcaaaaacataaactgttgagtttcagtgttgtatattattttaccatcatgttcatttgtcttcacagtttggctccccccttccccttttcacccacactctcctgttttgtgttgttaggaagttatcaaggaggatgctgctgaggggctttcttcacccacagactcctcgagggtaatggagtagtcctgtggtgtggatcgctggcatctcattgcttctgcctcagtaatgactgtcttaattgtgatgatagcagctcactaactctgcgtttgtggtgtgatgagcagctagtgtagagtagctgaatgctaataattatggttcctgaattaattaaaaagcggatgtttaacttcacccattatttcctcctgcttttcccctttttcaatacatgggatggggtttttttttattcttcaataaggaagggctttttctatcagctgtcaggggtgttccgttggtagtatttgctcctcagtgtgagctctagctttgcctttgactgtttttgttaagcctgtggttgctattacacatgtggaatattttagaaaagtatccagtatcacccttgagactacaaaaagacacataagctagatggtgtagactaaaaatgcatctttaataactcaatctaggtgtctacatttagttaagtcttagtctgagttttagtgcagtgttataatacttttctttgtctatatatttgttaaaataaatt

SEQ ID NO: 92543 - DNA, 1062 bp, Homo sapiens
ttgtttgtttataaacaaatgttctatttgttatatcttgtataatagtttatattggcatttaaaacaatgataaacttaaattcctatagtagtttagtaaacctatacttaatatacctttgtcttttaaatgtgagataataatgggaaagtactgctgtggaactcagatgtttttccaaataatagcactgtagcccatttttagagtcttatgtcaagttatcttcagtcatctacaattttttagttaatataaataggataatttcccagatgaaaagatgaaatgcaactaattatcagtggtattcaggccctgtcaagtttagtaggcccaagctatattctcactttaatgacctcaaacactaatatttcctgtaggaaaatggagcatgaacctggggttacactttctggaactgttctcttaaggtgcattgcaatttcttatttttgctatctccctctttagtctaattcgagaaaacataggacctagttagtcatagaagcctagtgcctaaactgcctgtgtaaatacatctcatatgagctgggaagaaagagaatttaggataaatgtgacaaagaaaggattctagaatttaaactttcagtttttgaaaaatggtggccatataagtaattaggtactgtttaaagagtcccgagaaatgttactccgtttttctatttggacaaggagacaaaggtggaataatagcattttatcatgtattccatcttttaaaatttaactgtgtggtaggcagtgtgaaatgcaggtttttatttaccagtcttaaaatctgctgtgtaagtttgcataaaatagctccgttgataccaactgaaaatttgaaactgagaagcttattttaaaaaatgaaagattaccttaccatctagcctgaaatactatgttcactaatttcatgaataacaataatgtaatcatgctttttaatagtattttatcatttttaaaaacatttacagttttctcttgtttttaaatctagctactttttgctgtagttatttgagattttt

SEQ ID NO: 92544 - DNA, 1089 bp, Homo sapiens
ttttgccttttcacagatggcagtgggtgtataaatggactccattttttctttgtttctgactttttggctgcaatgccaagtggctgttttctgtctgtgtgttctgtctgtctcccagaatctccaaagtgttctgttcatggatggtatttaataaatggacattcactggtagaaagtatttgagagtctattagaagttaaatttgtttcaaggcaataaaattctaaggcatttaagagttttctctgtttaaatttttaaacaaattgtgtcttattttttaacatcctactaaataatgacattattaggcagctacttttagataaaatgtgataaataatactttcttcataaattctgctctaagaatctgtttatattttgatttaaaatagaaatcttttatgtaatttaaaacctcattttgaatggaagtgatatgaatagtttatgcaatttctgccaaggaattaatatggactttgtataaaccactgtcatttataatcaaaatgcttttaacttacattgatgttggcattaacaagtattgctagattggtagcatagaaggaaattgcatttagacttactaggagctcattgatgcctgaggttttataatgctttctttgggccatttaactgctggcaactttaattcacatgattcataatgctggaaattcaaattcactcttaactgaaaagtgaagttacttaaattctttaaatgctaacctttggaaaaatatctgaaaaataaaggcacatatgattttgatggcccactgccaaaagattatcatttacataaatatctctttcagcagaagagtttaatgtattgagctcagaaggttagaatagagacttcaatctggaagccagcagtagcctgttggcttgtgaacagcagcattgttcatcatactgagaacactgttgcattcaggcagaagcagagctggcattaaaatgcagttaatttgtttcatgtgacttgtcagctgtgtgtttttatctaaatctttctagcttctctttttagtattttgtgttcaactcctgcaatagat

SEQ ID NO: 92545 - DNA, 1042 bp, Homo sapiens
ggaacattaagatgacacactgttcattcaagatggttttaattggtacaattattgtaattttcttgcaattatgtgttgagttgaaagcttttgtctggatcatttgagagttttttttttttttaacatacatttagtaagaaagggagtaaaataaaaactaaaaattttttgtctagtttttattgcagcattttagacaaccattgaaatattttaatctaaaactttatttctggcatttaaagcagaatgatagtggtttttaaaaaaatgaatttaagtagttttcatgaagatagtgctttaaatttctgttttgacactgctcagtcaatcttttacccaggccatgatatggtcagaataagtttgtgataaggataacaacattctttattttggtactttattttgatgtttaaagaacagttgaataagttctaagggtgcttcagaatagtagccattttccatttcattgaagtagcaatttgctgtacagacaatatggacatctaatttatgactttaatagacctgttatttttaaattattcaagtaatgttatttctatacattatttaggacattctcataataaaacatcatattttatgataacctctcctgatattcacccaaagctttcataagcttcattttatcacatgtagtcatctcatacctcttgtagctctcactaacctgcttgctctctccatcattttctgggtgatgatcagctctccttccctctcttccccgccatcatttggcctggattattgcacaagcttgtttcttttgcatgtggacttaagttatgaatgtggatagcatgaaaaatttaacattagttagtttagaggaagttgttgcttcacctcctttgtagtacaaagtccatcctttgtactgataatttttctctttagtttttgagatactagcaatatttattccaaaaactgtttaatgcatgctattttggtgttttttatatatagcttagaatcttcatgaaattctttgttt

SEQ ID NO: 92546 - DNA, 1061 bp, Homo sapiens
tggttgtacctgttcccccttttatgagatggaattcctttagcccacccaccctgaagagtgccttttgttcatgtggcgatgtgaggatagttagagaggctgtcccttagttttcacatactttaaaataacctaaacatcaggccaggtgcagtgctcatgcttgtaatcctagcactttgggaggattaagtggaaggatcacttgagaccaggagttcaagaccagcccgggcaacatagtgacaccctctacataaaatagaaataaacacattagctggatgtggtggtgcatgcctgtagtcccagctactcagaaggctgaggtgggaggattgcccaagcccagaacatccaggttgcagcgagctatgattgccttactgtactccagcctgggtggcagagagagaccctgtctaacaataataataacctaaaaatcaaaatgctgaatccttaaaaccagacaagggcttatttgctttattacttaagggtttctataaatagccagaccccatggagtttgaatatcattctctttacacaattctgcctacttataatcttaaaagcattgagcttcctctaactgtaccactgtaacttaaaatgcatctgaagctaaaccatagcatttcatgcagttgctgtgaatatgactttacaattgctttacgaagattctacctcacagataataatttattactgtatgatattcctctttgactaaaactttggattttttttttgttataaacatttattaacatctcaaaaagccttaagttcttagactggacgcgtgggttccttctcactgacgacgtgctgtttcaggacacttaccgaagaaggcagatgcagaggaccatcactcgccagatgtcctttgatcttacaaaactgctggttaccgaggactggttcagtgacatcagtccccagaccatgagaagattacttaatattgtttctgtgacaggtgacttttgtctcttattgtctatgatagttaataagctttagcattcacaaaaccatttaat

SEQ ID NO: 92547 - DNA, 1712 bp, Homo sapiens
tttgcatccagatctgaatcttttcacattcagagcctctaatcttggcaagttagtcactcaacccagtttgttctttttagaacagatatggtagtgtctatcccacagtgtcattctgaggatcagctgctgtaatttatgtgtagtcacttggtaaattgtgaagcactcgctcttattttaagtggaagcacaactggcagcaaggactttgaatgtcttctgttcctattagatgactttctatcacgctttctaagaaatatgtttaagcttcttggatcttccttcagtgctttctataccttcctttgcaatacaggttcttaaatgtgaagtggaattgatggccaggatggcaaaaaccattgacagcttcactcagaatcagacaaggctggtggtcatcatcgatggattagatgcctgtgagcaggacaaagtccttcagatgctggacactgtacgtttgcgccacctcaaaagccaccattgttatgttgtggcacttgagagaatgtttgacttcacaaatatctaaaaatagaacggaattggtttttgtttgagtagttcctattttgtgatttttcttttgtaaaaacaaccattctttatacagaaatgtagcaagaataaatgtttagtcacaaagatatttaaataattttagcttagtggcactgtgagaaaaatgaatagagcatctgtattcatgaatgtttctcatgtgcattgatttacctctttagcagactgtaaatgtctgaaagaaggacaatattaattttctttgcaggttttatctatgtcagatgacaacaaacctagattgagctgtcagtaaaatttgcttttgtgcagagtaagttttgatgaaaagaaatagtagtttagaaatattgtcaccaaaaggtagcacatattttgaagagatgccttattcttttggacaatttaaaatgtatgtcacaactgtacatttcttctgccacaggtccgagttctgttttcaaaaggcccgttcattgccatttttgcaagtgatccacatattatcataaaggcaattaaccagaacctcaatagtgtgcttcgggattcaaatataaatggccatgactacatgcgcaacatagtccacttgcctgtgttccttaatagtcgtggactaagcaatgcaagaaaatttctcgtaacttcagcaacaaatggagacgttccatgctcagatactacaggtaaagctcaggctcctaaagtactttgagtttgaaatagttttgtagtttctttatggcgactctcctttttaccttgaaaaatattgttgttgtttcacatttctttaaatatcatatacaacagaattttggtgtaagtgatgctgtcttgataaattatttaagggatacaggaagatgctgacagaagagtttcacagaacagccttggggagatgacaaaacttggtagcaagacagccctcaatagacgggtaagatgccattggcttcgagctgtatgtttgtattgctattcaatttaatacaaataaagatgatgccacttaaataatactttgtaaatattgcattaaacgcttcaaataaacattatcattgaatttcctttcagcttcatgtgtttcagggaatgtctgcacctagaaccctaacaactgtacttcgtataggggtcccaacctg

SEQ ID NO: 92548 - DNA, 1148 bp, Homo sapiens
gagacaaaaagaaaataaagggtaagtgatgcaaagatgacatacattgaagttatttgttactttagataataaagtaatgtttgatttgttcttttcttcaaggtttttgtttacagattacaatagactgtccagtgtaggtggagaaacttctctggctgaaatgattgcaaccctctcggatgcttgtgaaagagagtttggctttttggcaaccaggctttttcgagtattcaagactgaagatactcagggtaggatttccttccttccttctttgtgtgtaagggatgggggtgggatagatgttcagtttattttcatgaaaacacaccttgaacattagactcatcaggtattgtgactataatgttaggattttctagatccttgatatgttaattattaaaaccatttgttgcattacaggtaaaaagaaatggaaaaaaacatgttgtctcccatcttttgtcatcttcctttttatcattggctgcattatatctggaattactcttctggctatatttagagttgacccaaagcatctgactgtaaatgctgtcctcatatcaatcgcatctgtagtgggattggcctttgtgttgaactgtcgtacatggtggcaagtgctggactcgctcctgaattcccaaagaaaacgcctccataatgcagcctccaaactgcacaaattgaaaagtgaaggattcatgaaagtaagcactcattggttattagaaaaaattgtaatgcgaatatgttgccactgccatgctcatttgggctttaggaagtacactctctaaatgttaaagtgttgcatttattttagtttaatttgttcattcattcattcgttcattcaagactataatttaaggtagttttaagttcacggtaaaatttagagggaagtgcaaagatatcccatatacccacttcccccacacatacacagcctccccaattggcacgattacccaccagagcagtacatttgttacaattgatgaacttaggctgacacatcataatcacccagcatccatagtttacagtagggttcactcttggtgtggtacattctgtgggcttggacaaatgtataacatgtatccaccattatagtcttatacagagta

SEQ ID NO: 92549 - DNA, 1019 bp, Homo sapiens
cttgggaggctgaagtgggaggactgcttaagcttcgggggttgagggtacagtgagccaagatcacgccaccgcactgcagcctaggtgacaaagtgagaccctgctcaaaaaaaaaaagcattaaaagatgaaaattttttagttataagaaaaaataagtgtaatttaagatgaaaataaataagccaaaccaggtaaaatattaaaactgagtataagagaaaaataaaggtaaaaacttttaagtaactagcatagagaattaagtattaagaaaaggatttaaaagtgaaaaagttaaaaggaaaacagaataaaataattgggggaatatttttacagaaaataaggaaaccagtctaaattaatgaggtggtatttttttttttcagttagaacaattaaagtagcatcgtcaagaccacacagtatattacagattgtattctgagagcaatgcttatctactggactgagatgagagtttaatttagagatggaagggagaaaggaactaacagaaataataatgattcagagactctgaatacaaataattcacttaattttgaagatcaattgtgaagagaatattttacaactatttctcaatccctggtagacgtggaagctataaataaaataagccatgctaaaacttgagtttttaaatggtattactgggcttgaaattctttaatgactgtaattaatattttttcagggttagagtctctttcgttggtgttagaaaactttcttgtgcaactcttggtggccacatcatgacacgtgtgtcaccttttaaccactatgtcgtgagatctgttggggtgtcttgatactccacatctaagttctggcgtaactttcccccgcctgtccttagtcagaattactttatatggccctgcacatttcacttttgttactgttttttcctaagaaaagtatgtaagattttagaagtggaagctacctaattacaaattcttttccctccttggaatttaaaa

SEQ ID NO: 92550 - DNA, 1095 bp, Homo sapiens
ttctcaatctgccattgactcatctgacactggtcccccaatttgcgatacagaaccaccagactgtatccttcaaggttccatatagccttgttaattatataatatgctatcttaagtaattgctttatactcattaataagtttcctgaaggcctctgccttggtattcttttgtgtgttgctgtgcccagagtcagcacatgatacttgttgacaaatacacatgatagttgcaacagttgttcattcatgaacacattcttactgaggacgggtaaagtgctatcctgctagaatttgggatacaaacttttaaaagtcttgaacctggatcttcatagagaatttcataaaaacaattttaaaagtgacgattaatgttatttttaccttgcccgtcactgctctctgattattttcagcctgtcagcaaagtatgctaatatcctccctgcatttataggaattttgtatctggcagaaatgctgctgctactgttttgtcttctcacaggtctggggatgagaattggaattgagatgggaaaataagatgaaattgggtttggatatgtttagtttgagggctgataagacattcaggagcctgtggccagtagacattgggaaatctagtactggaatctgggcaagaaatcaaggctggtgatggaaatttggcaattagttactaggatagagagttgcatgggagcgactaagatgatcggtgtgaagaaagatgaaagctgaagtcaaaatggactcttatgctgtgtgtcatactgcagtttttaaattgtgcatgtttatccagtctcttcctattacgacataagctacttaaggtcagcaactattttgtcttacatctttatatcctccaaagtacgaagcacagagccttacatatagtgagtctggtgcatagttatgctaccacattttttaggacatgagaggagagtctagaagatgaaaagttcaagataaggtcgtgccttggaagccacaggaagaatgtgtaggtcattttcatttagtgtcctggagatcagtgtggatgagaactgagaatttaatttgtcaagg

SEQ ID NO: 92551 - DNA, 1054 bp, Homo sapiens
gaggttttctgaaggcatactgcttgtttcaaatggtttcactgagaattgaagtgatgttggtatacatttctgaaaaactctggacactggcttacctggacgttgacaggctgggctgtgggttggtcggtggggagaacgggaagtagcctctggaggggagctgccccaggtcagtggtagaacctggggtagggcagaagcagccactgctgccggctgtagcttacgagcagctggggcaggtcccacacctggctacgtgatttacagtcactttgatacaaatgagtgggtgtaaaggaaaagcatttttttgttgttagcttttatgttttcttgagagggttttaaatataggctgttaccagagtcagatatttcttgacatgtgcatttgtatgacataaacacaggagtcaagctattaatctggcaaatgttcttatttgtgcccacaggatggtgaaacgccacttataaaggctaccaagatgagaaacattgaagtggtggagctgctgctagataaaggtgctaaagtgtctgctgtagataaggtaaaacatctgtgcggagagaacactgtatggaaagctgttggtcgactgacctctatatggagtggatttaatggggatctgattttaggttgtgtggggagagatgacttgctggggatgtctgtgtgggctttggatcccacacagtagtgtgctgaggagtgggtgggctcagtgtgctattaacgcagctgcttccgactttccttctacggctcacagcagctgtggggcactgccattgactaccacatcaggaggaggctctgccttcatcagggtagagcttgctgcagataaacaggaggaaagaatgcacaggggctggaggaggccgatgctcagagcagacggtgttaatgttcactgacaggagtcaatgtgtttgttctgccgcgtgtccttgctataatcctttcagaggaatttttatattttctataataagtttagctctaagtggcttcatacttcatatagatttgatt

SEQ ID NO: 92552 - DNA, 1039 bp, Homo sapiens
actttctcccttaattgaatgtggctgtagattcactgatagttttagctttatagctccgtttttttagaattcatggctttcgtcatatagcattattccaagatatttttactatatgattttaaaatgttcatttggttcattgacagccacaacgtcattgtatttaatttacatttgtaataggcggttaccttcaaagagaatagattattgttctgggtaactggtctttctaaactttgtttaggaatttcagagtcctcattttggggcataaagtcctctgtcccttactctgatatctgttaatatcagatattcatattagttaagtaacatttttctcttatttagaggtagactttttccaagaaatttttagaaaaaaatatgaaaacatgattaactgtaacttaaaaagagtgcttatttgttgtcaatttaccttgtttttgtttttattttctgtcttcttagagtggggatactgtgttgattggcgctgtcagaggtggtcatgttgaaattgttcgagcgcttctccaaaaatatgctgatatagacattagaggacaggtatgtgtgattacagtgcagttgctatcttagagtataattgcatgtaagtgttgactgatcataatgttattcttcccactttcctatggagataaacttgtaaaccctagtacatttaacagacgtatattattactaagtttcactgccattattgtaaaatttctatattaatgtcgagttaaatgtagatagaggtaaaccaaaaaagctcatgtttttagaatatactgtccttactaatgggtatatatagattcaatcctcagaactataatgagtagttagtgatactgagagagtcggtgacactttgaatatctggtacttatttattttttttagtgttttctccctgttttgtcttcttcctccatctgctgttcttctactgttgttgttttattttcttctcccttttccccactgtgcctgcctttcctaggaccacttg

SEQ ID NO: 92553 - DNA, 1194 bp, Homo sapiens
cagtatattacacttttcttgaaatagctcatggctattaattcattgtttactttagtgttttttatgggttttattataaagaattcttgaagtctgattcacctgactttggattatttaatttagaatgtgtttatatataaacacattctatataggtgttaaaatagtcaccctgccaactattttatccttcattactgagttagtttattgtaaatgagtccaatttcagattatcatttaaataactgaacttcataatagctctaatgactgaagatcattaatgtattttcaaaaacaaaagatacctcctagccatttttggtatgtttcttgctatttattttggcattttactattggaaatgacaataataggccacctatttgaaaacattagttttatgattatggcataaatcatatattttctagaatacattaatttcttgggcttgcgttttgttttgtttttgttgttgttgtttttagaattcaatgactgcacttattgtggcagtgaaaggaggttacacacagtcagtaaaagaaattttgaagaggaatccaaatgtaaacttaacagataaagatggaaatacagctttgatgattgcatcaaaggagggacatacggagattgtgcaggatctgctcgacgctggaacatatgtgaacatacctgacagggtaggtcatctatttcacatttgtctcctagtggtgaagtggatgaaaggtgaccttagtgtcttattacctttcaagattctcatgcatgacataaacttgttttaaaataagtttatttctgcctttgaaactagtaagttaaaaactgttcaatagttctgaaaaatgtcctttttaatttttgtcaaataatgttgttattgaaaatgtcacatgtgctattagtctgtgactgaccttgatgtgtcactgtaggtgtgctttcttgtgccctaacttctttgagctcacacttactgatccacctctacctgaacgctccacttgaatgtctaattggcctcttaaacttacaataaaacagatgccttgcttttttcaccccaaacctgctttccctcattctccatctcagcaagtggtaccatcattcagcctcttgttgaagccccaaatcctgtgcattagccttgatttctctcttttcctcat

SEQ ID NO: 92554 - DNA, 1070 bp, Homo sapiens
cagcacttggggaggctgaggtaggcagatcacttgaggtcaggagttcaagaccagcctggccaacatggcaaaacccgtctctactgaaaatacgaaaaaatgagccatttgtggtggtgcatacctgtaattccagctactcaggaggctgaggcaggagaattgcttgagccgggaggcagagattgcagtgagccaagattgcactactgcattccagcctgggtgacagagtgagactctgtctcaagaaaaggttaaataaggttggttaaaagacatttcatggactggttaatctactcaggagaaataaaatgggagaaataggatttatctaagattacaattacgataaatgtatacagttttatgagaatgataaaaagtaagatttttattaaaattcatgttaagagctagtttctttgagtatactttttataataattttaaatttattgtttgttttaatagtatggaaccacccctttagtttgggctgcacgaaagggtcatttggaatgtgtgaaacatttattggccatgggagctgatgtggatcaagaaggagctgtaagtatcttatattttaatgcttggcaatagaaacatgttttttattttaagagagagaatttatttctttagtgtatgcctagagaaatttccctctagttctaaaatgatagtaacaggaaaacaagcatttcctgttactctaagaatgttatattataaacatatatactataaatagatgcttttaaggatctgttgctaatgcacacacaactggggaggctaaaagtataaagaatagctttcagtgatcctagtgtgatatatagagagttatgtgtcgcttaatgacagggatacgttctaagaaatgtgtcatcggtgattttgccattgtgggaacatcatagagtgcacttacacacatctggctggtatagcctactccgttcctaggctctatggtatggcctgttgcttctaggcctgtgcagtgtgttaccgtactgaatactgcaggcagttgggagacaatggtatttctt

SEQ ID NO: 92555 - DNA, 1093 bp, Homo sapiens
atgcctgtaatcccagcactttgggaggccgaggcaggtggatcacctgaggtcaggagttcaaaaccaccctggccaacatggtaaaaccccatctctactaaaaatacaaaaattagctgggcatggtggtgggtgcctgtaatcccagctacttgggaggctaaagcgggagaatcacttgagcccaggaggtgtggagattgcagtgagctgagattgtgccactgcactccagtctgggcagcagagtgagactccctctcaaagaaaaaaacaaacaaacaaacaaaccaaaaaaagatacatagatctggagtttaggtaactatttgggtgacctctgaaatggtggttttgtaatgtttatagcagaaactagttttttaggggggtttggtaaggggttataaattatcttgaaaagcttaaaagaaagaacagtgattatcttcagagggtagcctgttggaaaaatttgttagaacaggagagacccacatgagaaggacctcattcagagacctattaggaagagggaataagaagaaaagactgatgatgtggcaggagattattgagtaagggcctgggtgaaagaggaccatagggtcaggaatacacataaagggattagattgagaagggatagagaccagaatttgagagatgagagacttattgaggtagttcagactgtggctgcagagctgttttgaagcagacagcatgcaaggtgagggaaggtcttgctggatgtcaggaattctttgtaatgttgaaagtgggactgtctccctaatgggagtgggtaaggactagccggctcatgtgctgaggcaggggaaggagcagaaatcatagcatataatcgtggatagttcagttgcatcagaagggcagaaatccaatacaatagatattcaaaggatgagaactcagttacaataagtatatttttaaaaggctttatgaagggtgattttctatgtgtattatgtttgaagatatctaagatattgatattgtaaagttaggaaaggcattttagccagagtaagtattatccgcaaaagaggaggctagaaaagag

SEQ ID NO: 92556 - DNA, 1927 bp, Homo sapiens
ggttctcctgcctcagcctcccgaatagttgggactacaggcacacgccaccatgcctggctaatttttgtattcttttagtagagatggggtttcaccatattggccaggctggtctcgaactcctgagctcatgatctgcctgccttggcctcccacagtgctgggattacaggcatgagccaccgcacccagcctgaagaaatatttttggacagccaaaataaatcttagaagtttggaagagttcataatgaatgttctctaattcaggtttcataatatattataaactttggactaaccatttgtggatgcaagagatttgacttatttcatgtactattgtatttggggagcctgggaatttagaactatataatactaccatcatgaaacaatgatttataaagatatttactaaagaaatttcattagtgacattttttatactcagagatgatttaaagtttgattcccttacccctacattttttgtttagggaggatggacagctcttatgtgggcatgttacaaaggccgtactgacgtagtagagttgcttctttctcatggtgccaatccaagtgtcactggtctggtaagcattaacaaaaaaatttgtttgtattataagtggtaagttttcttagggaatacttaaggttgattatatttggcttcgtggtgggtagaaatattctttatcttattaaacgtaacatagaatatgatttcaaaacacagtaatgataatttttttctaaagctaagtatttctcaattgttgtcagcaaaaaggcagctcttagagcttaaatgttaattataactatataacattgcaaaaggagattttgagatctttagtcatcttcctcttttctgtgtgtgaatccttaatctgaacttaaagaaaagaaacatttacaaaataatcatactgtttttctatacattctgttatatatatttacattcctcttattttgctttcttcttactagtattgcctgttggccagataaccacattttaatgtgttgaatttataaaaataaatgtgttcataatatatgtttacttaagatttattatatcttagttgccaattatgtattatgagtattttgtctatttttaaagtggagaatggtttgtaatctgatttaaaaaaaacattactttgtgttacttcctttgatgtttactttacttagcaaatgtgtgttgtaaatatctacctaaaagattttatttctccttccctccctccctccttcctttctttctttccttccttcctacttatctacctacctaccaaccaatctatcctagcagtacagtgtttacccaatcatttgggcagcagggagaggccatgcagatatagttcatcttttactgcaaaatggtgctaaagtcaactgctctgataaggtaggtcagcagcatcttttcaggttccagtccatgttatgtccactcagtgtctaagttataaacatttttatatgatttcatgaggcttctctaatgtattttatatttttgtatattaatgtattttatatagatatatatctcatagatggattccctgggtgtattatgtagtaagtatccttctgatgttttcttatgtcacattcatcattcccaagaaaactgaccgggataacagagtccctgtcttcattgtttgaagttttctattgtaactctccttcctacattcagtcctatctgctttctctgtattgttgtgtgagagatctttctgaaattgaagtttggttatgtttctcttgtgcttaaattcctgaagaccatctctggtatgatgggtgaagatgggccttgccttcctttttccccttctcttactgcttgtccgccatggttccttgcatgccagccact

SEQ ID NO: 92557 - DNA, 1076 bp, Homo sapiens
tgaatgatcatttgaattatattacagttaggaattaaaaaataaaagagaatagttctttatcacatggtttctaaacacatcatatgagatctctgtagtctgctaacctgtgaatgtgcttttaaatctgattacagtctctttaattccaatttatattacagtaatggtggctagccatgaggattagctttgaggttttgatgatcatcttttctcgtttttaaaaagcgcagtatatgattagaagttcagtgagtagactgaacaagcagttgtaaagccatgtttaccccattcttagtgatgcaagtggacagatagaatcttaagagagcttcagtatgactttagagtagtttagttagcatgggtcacaccatgtcaacttggtatgatcatttggtatgtaagttcaaatgtagttttccttactttgacgtgttatttttggtttgaaaatgataacttttaaaatatatgttcaaggataattggacagcacttatatctgcatcgaaagaagggcatgtgcacatcgtagaggaactactgaaatgtggggttaacttggagcaccgtgatatggtatggacatttttatatgttcttaattagctgaaatcttatttataatcatagatatgtgtgaaatattttatttttatgtgtgaaatgatattataataatgtttttagaatttgggattgggcattgaaatgaccctcaagaatgttttaaaacccaggtgttgtaatatacctcttagaatattcttagtcatcatttttcatttattttggagtttaaaattctgacatattgttacaaataactcattactctttaatatatcaatgttttggaacttctgagacagttgtttcctttaggtaggactttaggagggacagcgtatggttttaaaactattatcaggtgtttgaagttatacttttcagaataatatttttagatttatttttaaaaatgtgattattttcagacatgctatctgtgcatgacagaagtttaacaagatgtgatccttaattattacttagctcttact

SEQ ID NO: 92558 - DNA, 1456 bp, Homo sapiens
ttttgtatttttagtagagacagggtttcaccatgttggtcaggcttgtcttgaactcctggcctcatgtgatccgtccaccttggcctcccaaagtgctgggattacaggcttgagccactgcgctcggcctaacctggtatttgccgatctgtttcctgtcatggcacttacagaaaatgataacttttgtactgcacttgcagtagatgaggcttgctgttaggggtgacttgtctaggcacccagctgcctgagccctgccctcatctccagggctgagggagcatcgtctctgtactcctgtgactcattcttaacacaaaggctgggacactgatttcagcagtaggagctttatttagtttaatgaactaagtttctaagagaaggctttaaaaaactacatatgtgtattatacatagcacctggttgtttttatttattattttacttttcttcttctcgtcctatttcagacaaaacatatatataattaaaaacacattttagatcatattctacctgtattgttagagaatttggctaccataagtattctgaaattttatgtatatttcagtaattgcattccaaatcctagtgttattcatatttacttactttaaatgaatttgcagtgccaaaaacagattattaatactgtgggaagaaaaattatgttttattttttctttgacttttaaattattagtaaactgaaacttaaagttcaaagctgtttctaaattaaatatagtaaacacaactaaacaatgcttaacatacattcatgaaaatgtgtggtatatttaactgtgatgttttagtaaaagtgcagtaacttgataagttccctttgtcttttatattctctagtgtggccagactccactgatgatagctgccgaacaaggcaatctggaaatagtgaaggaattaattaagaatggagctaactgcaatctggaagatttggtatatattaaaataatttactcatcatttactcacttttttcttagctatttttttgtttttcagaagtgattcaaaagtagtaattaaaacttttacatatatttcaactttgcctagtgggctatatcagttttttttaaaaggagtaatacaggagagaaatttttactttcaatgaaggatctcagctctttggtttttttatatggatgagactggctgaatagagagcatgtgtacatatagttaaatatctacctagaagatatccacatacgagtcatgttaagtaactccccataatggtaacttattataaataatatcattacatgcgataatggccaggaatatatggtcccttctgatatcacttgtgaggggtaaatcaacattccacacggttacatttcctctgattctccctgtatttttggaattgcttttgagggtcacacagctacatctattttg

SEQ ID NO: 92559 - DNA, 1026 bp, Homo sapiens
acgactcagaattctaaacataacttttaaggccatctgcttaataactagcagtacgtgcatagcttttcagagtgatgattatcataaaagttataatcagcttgaatgttgagaagataaattttttcaccgagaaaatctatttatgtgtaatacgtcattccctaatgaccctggttggatgacatgtggctaccacgtataatttagcatccatccttacataggaatgtctatatttaacgtgaccgatacttgaactttaaaccagcgttcgtgtttaaatccttacttgtattattcttataatagcatctgttgtattttggtaatcattataactatttgcttatttggatgttgtgcctaatagatttttaaattctttgagactttgctcactcgtttactcagcaaatatttgggtacctgtgtggcagccactgtccctcacactgggtatatagttttaaacccataagcaaaacagacatgtttcccggcgtttaggggagacagacaataatcagttgttaatcacacaatgaaaatgtggttacaaacaaggattagtataggaaaagtaaattataggggatcagtaaggaggtgggaatgagcaggaggacacgttgaggccgggggtggcacagactgggtcgagggccaggcatgccctgctccgcgtcactcagggtttgtgtcagcttgggtaaggatgtcggttcttatccagaagaactatgggaaaacattgaagggtttgaagcagaggaataatgtcaggtgggcatttaaaagaatcatagattttccctccatactaatatacatgtagtaagtaggtgtttaagtgtttgcataattaaacttaatttttggtgtacatttttctcatatgccttagtgtgtcttagtacctttagtatcatcactctttaacctggtacttccttttttgaaaaattttaatttaaatttttttttgagacaagtcttgctctgtcacccaggctggagtgc

SEQ ID NO: 92560 - DNA, 1084 bp, Homo sapiens
tagtcagatgtgaaatgtattttacaggtagagccaaaagcatttgctaatagattgagtgtagggtgtaagaggaagaggtaagtcatgaacaatttcaatgcttttggccttggaagaatggacctggagctgccgtttactggcatggtgacagcaggaggagcaggggagcattttggagtggtgatgaggagggtttggggatggatgtggagtttggtgtttggataagttaagatggaggtgagtgtgaacctaagagacatcacggcagctttttgacacctgagctatggaagccgtgggaagtcgtatcttcacttctgccactggaggtgtccttgcatgaggttaatgttaagaaggatattgtatttaatagtaacttaattttttctaattataaattatgtgtattttgtctaatttaacaggtattcaaataaagttaattgcagctttctgtgaaaatgtcagttttgatatcacagagcgtcataaattatgtagaggaagaaaacattcctgctctgaaagctcttcttgaaaaatgcaaagatgtagatgagagaaatgaggtaagaccaagtttgcaaaattacattctttcacaaatatttgttgactgcctgctatgtataggatagaagtgtgtaagaaataggtagttctaacccttagtaatactgcactgtacttatgatagaatgtcttatagttaaaagtacttcaaatttcatgtttttggagtacattttaacttatataaatgactgttgaatttagatttattgttttttttcccctgatggaataattaatattcaggaagcttgattactgaaatcaagtacttctgtgaaactttacagatcatctggacctgatcttgattaaccagacaaaatcagggattgttgaaatactttcttttttatttttatttttattttttgagatggagtttcactcttgttgcccaggctggagtgcaatggcacgatctcagctcaccaaaacctccgcctcccaggttcaagtgattctcctgcctcagcctccctagtagctgggattatag

SEQ ID NO: 92561 - DNA, 1090 bp, Homo sapiens
atctgctccaacttagagttagggaatgggcatgggatatcagttatagacagtcctgttcaagggtggaggaaaaggaaggcaaagaggattcaccagtcccaaataatttcattttcataacagccaaagttttcaattttgacgaactctggtttatcagttttctttttttatgcaccatgcttttagtgttatatcaaatctttcttaatctaaggtcactgaagtcatctatattttcttctagaagttttgtactttcagacattatatttaggtcaattttgagttagcacctgtatgtggtacaaagtatggattgaggtttatttatttgcatttggatgtccagttgaatataataaaatttctactcttttagaacttatagttatggtagacagacaataagtgaacaatatgtcattttttggatggtggcaagtggtgtggagagcagtgaaagcaggacaaagggttgagagtgcagggtgacagtgaagcctgtgtggggtcggtaccctgacatcccacatccggtgagactttgtaaccaggtgacctgacggggtcagggggtaagccgtgtgcatgtcctgtggaagagaattttaggcagacagaaaagtagcacagaggcctggcgaggtgggacggtgctcagtgtggccatgcagccaggagggtgagagggggtggtaggagctacagtcacaggtgtcacacaggtgagaggcttgccactgaagagttatcttggccaaggtaaaaacatttgattttactttgagcaccccgagaagcccttagagggctttgaataaaagaggccatgctctgacttagtactgctcacattgtggttcttcctcagtgttgtcagtgtcacagggagctggataaagatgcagagtcaggggccccactcagacctgctgagtcagaatctctgacggtggggcccaggaatctgctttaaaagctcttcaggtgattctgatatatgttaaagttttaaaaaaagtaatgtaattttaattgacaaattatatatatttaggggtacaatgtgatgttttgatacatg

SEQ ID NO: 92562 - DNA, 1655 bp, Homo sapiens
ttagtttgtatattcatgaacaaatctggacatttatactttttttgtttccttatcaactgttcacaattattagttaattggtcttaacagttctacattataattgaaagaaaaattacttgagaaaataattgtttcagaatagtgcctactatatctgtgtcagctaaaaatttgtccagagttttagatataagctagtattttgtggagttttatccaggcgttaatagttcttcctggctgaaatttaatataggtgcagaatcctaaataacactgtgagatgtaatcttaactgccctcaataccttataaaactgctgcatttaacccagtgtgcatttaatgagtggctggtcgttgatacactcatcttagatgctgaaatttctgttttctccagcccttgtaaaagtgggtttcttgatgaacgcgtgctcccaatgctgaagcaaaagatttgcatttaaggagagaaatacaccctgaaatttgagtttgaaagattagaacatagagggtctctacagtgtttttctgcaacaccaagtagtcaaatctatttatagaaactctgattacaacagaaattttaaaatgaaattttccacatcggtattttgtaggaaagctcttataatcaatgcttaagctgctttttgaggcttttcttgtacagaggttgcagccaattacattttaattggtaggctgctgaataatgtttttgtatgttttaaaataatatttattttaataggttttttaacattatgcaaatcccaataaagaactgacacgttccataggccattgactgggaaattttgtgaaacacagcctaaatacacagtttttacaccaactaatttgtcttgcctttaaaactgattataactcttctttaagtacaacttttataaagaaaaaatacaacactaagactgtatgttctgtaaattatagtgtgatgacccatgcagaaccgctgtctgaagcttactcagcgattcatagccatctccagccatgttttatcaaatcacacactaaaaataaatggaaatgctacagtgaaaaaccaaaagttacagagcaacataagtaaaatgactaggcagtttcttagtaacatgtttgaaatgggaaaggtgactgactgcctttcaccagagtcttagctgtttcacgttcactattttaggttaattttcttgggaaatcaatttgaatattcccccctgtccttttgcattaaaggacgaaaatatatgttgagagtttgacagactttttaaatatgcctctttcccaattttatgtatttttggttctgcgcacacagatttatcaatgaagtacatttgcctctggctttatcacaaggaaaaaggaatcaaacattgaacacaaatgtgttccaaaccagtcttgtccatcttgtcacttttatgtgactgctcctctgaaccagaaggggcacgatagaaggccataggaatgaaagtaaatcattcaggtgaagtgagaaattcttccatatacagagtgaaaatgtgtgatttcattcctgccttcctttaaacgttgtcttgatctctgcctagtagtagttgagccctcagtcgcccaaacatgaggagagaccc

SEQ ID NO: 92563 - DNA, 1674 bp, Homo sapiens
cagaggactgtggtggccacaggagctgaaagcagaagagtgggatttgatgccaggcagtggagtggcctcagccccagattgtacctcctgccctgtaggaggggagggggcaaagccttctgacttcacctttgtttgacctatgtatggaacttacttttactttttgccttaaatttttaatgaaatgcaaattttctgtgatggggttctctctctctttttttcggggggtggagtcactaataaatttgcaaatgaagttaaagacaaggcaaccatctggcttatgctatataatacttcatttaaagaagaaaggaaaagcaaatgcacttgcagcttttgaggtctcagcaaaaatgggcatgtgtcttttttgaagtttagaaatatcctaatctatttttatttatctaaaagtaagtgttttccggctgataaggctaaccctacccaggaaaggattgataactaaataaatttcctctgttttcccatgcattgaaattatgttggctgagcatggtggctcacacctgtaatcctagcactttgggaggccgaggtgggcggatcacttgaggtcaggagttggagaccagcctggccaacgtggtgaatccccgtctctactgaaaacacaaaaattagacgggcatggtggcgcacacctgtaatcccagctacttgggaggctgaggcaggagaattgcttgaacctgggaggtggaggttgcagtgagctaaaattgtgccactgcactccagcctgggtgacagaggaagactccgtctcacaaaaaaaaaaaaagaaaaaagaaattatgccagctgtttaatgtgagagaatagaaagaatgttcatggaatgtacctgccctgtaaaatgtttgatcattttcattaatgttgcagagaatccgactgctattaagagaaagtgaacaaattaagaatttaaaagacaggttcaggcatgtcataagtgaaaacaagaaggcttaatacaaacttgttgggttttgttcgtgtgtgtgtgtgtgtgtgtgtgtgtgtttttttttggttcagcctatctagccacctacaaataatcacatttctgttacctgaatttatttctcagcctgtaaaccttagtcactgttacctgtttcttgctcagtgaatatgatcttggcactgtcatctagaaagcaagatatttgattggttttctggttccttcgaagataataattccatatccagtttgactgattttcatacccctgaatcaactagttattttcatgaaatggtttttggatatctctcctctagtttggagaagtaataatcacaaagattaatattttgcttctagtacttacagtagaagaattttaaactggtacgtctactcctgttaaatagaaaggggattcgttgtattatgtgcttgcttttttttaatcaatagaataagattcaatgcatatttatgttttatattttccactattcaggtatcatgaaatcactctagagatgatcaatcaacatcatatttatacttttggttaattatatactactcagggaaaaaatgaacaaaaataactactcatccttcaatttcattttcttgaaacagtaagagtataatttggtatgcctcagctgtca

SEQ ID NO: 92564 - DNA, 1146 bp, Homo sapiens
caagaaatagcctcgagacattcatcactaaagcagtgatcgggaaggctctgagggctgttttttttttttgatgttaacagaaaccaatcttagcaccttttcaaggggtttgagtttgttggaaaagcagttaactggggggaaatggacagttatagataaggaatttcctgtacaccagattggaaatggagtgaaacaagccctcccatgccatgtctccgtgggccacgccttatgtaagaatatttccatatttcagtgggcactcccaacctcagcacttgtccgtagggtcacacgcgtgccctgttgctgaatgtatgttgcgtatcccaaggcactgaagaggtggaaaaataatcgtgtcaatctggatgatagagagaaattaacttttccaaatgaatgtcttgccttaaaccctctatttcctaaaatattgttcctaaatggtattttcaagtgtaatattgtgagaacgctactgcagtagttgatgttgtgtgctgtaaaggattttaggaggaatttgaaacaggatatttaagagtgtggatatttttaaaatgcaataaacatctcagtatttgaagggttttcttaaagtatgtcaaatgactacaatccatagtgaaactgtaaacagtaatggacgccaaattataggtagctgattttgctggagagtttaattaccttgtgcagtcaaagagcgcttccagaaggaatctcttaaaacataatgagaggtttggtaatgtgatattttaagcttattctttttcttaaaagagagaggtgacgaaggaaggcaggaatgaagaagcactgcgtggcctccggtggaatgcacggggcacagccgcgactctgcaggcagcttcccccccatgccagggctctgcgccgtcatgtgagacttaaaaaaaaagttgaatgacttcgtgatactttggacttctaaattaaatttatcaggcataaattatgtagaattagaggctttgaaaataatactggtaggttgctcaaaggttttgaaagagaaatcgctaggtaggttactatctggctaatccatttcttatccttgacaatttaattcatatttgggaaacttttagggaaatgaaaaataaa

SEQ ID NO: 92565 - DNA, 2287 bp, Homo sapiens
ccacttgaactgttaaaaaggctgagtacatctctcttacaaggtagaccctctttccttggtcgtggtcagtattgtcctttccactagaagcgaggtgtgtactgcgtgcatgtttgctgagcgctcaccacgggctaggctccatgcccagttcctgtgaggagaaaacacgtttctatgtgcccggcaggtaggaggcactcacaaaatgttactttgtctttacagaattttctgaaggagagataaaaactgagttaaataaagatgatcagaatgggtaggtttattttagaaatgtttcctgaaagctgtaacctttgagtcctctctcagatgaagactaggctgtgcgaggccaagacagtggatgagccacactggaagaggacacagttctttagagtatttgcctagacagaacatagagtaatattttggggaaacaattgagaaattaggttggtgacatgaaagaaataaggagaaggataatttagggtaagcccttgaaaaccagttagaggaaagtgacgtgacaaaaaccatgtttgaacaagctggtaatggcacttacaggtaagagggcttcatttaacaaactagcagatatttactgtattccattttgaggaactttggggatatatgagggaaatttcaagaagtattaactaagggtagcttccagtagtttgtagtctaatttgggataaggtgtatatgtgtgtacataccttatgcatgtgtgtgtgtgcataagacagattctgtgggtgttataaatactaagtagcataggtgtttagagatggaagaagtctctttgggttgggttaattagagatggccccattaggaaggtgtttggatctggactttgagagatgaaagttatttcaatagtgagtgaagtataatggggaagaaaatgacattctaagcatcggaaggacattagcaaaacccataattcttagtggctaggctctgctatctcttgcctagctcaccaccatggcagtcacctgctcttgattccatcctgttcaccaatgacaaatccatttgtcctgaggtacgggcttttggcattccattcttgcgcttaaaaactgtacctaactccctcccatagcagacagaataggataggcttcttccctacctggtgttcaagttctaccactgccctcctcccttcccccatttacctctctagaattaccaggtatctatgcatacatgaattctctgcttccattagatttacttgtcattccccaaatacaccatgcacttgcatattagcaaagccaagtttgtctttcacaaatgcagaggttaaataagagttaaggatgaaggtaaaccaaactttatttatatactatattttaccaaatatgatttaaggatctctaggcagtgttgtcttaaacttttcttttttttttggaaacttttattttaatacagaatctaatctacagaaaagttgcaaagaacttctatatgccctttacccagactcaccagtcatttatgttttccctgttacttcctcatctcccctctctctgtcttttatacacagtgtgtacaatgtgtattcgcttttttagaacgaactttatccatagtagcagtgtacattcccactagcaacttaggagagtttcagttactctactccacatccttccaacagttgatatcaccagtgtaactgcataagtaatgttaatttaaagatacagcaaatgtttttgtttctttatttcagatgagaaataactttagacattatttcattgaaccttcccaactgaaattattttatgatgttataacatggatagtaactcaagtagcaataagttacacagttgtgccatttgtgcttctttctataaaaccatcactcacgttttacaggtaagtgttactcttaaaactttgtcagtgggaataactctattttcaaaagaaagtttcttgctattggatagaatagaaaaacagtaccatagccacatttcctgctgataaatgcattatcagttactttttaattctgaaccaagcaagtctcagcgtttctctgtggaatgactcatactgctcaaccctcagatgagtgatttagacagagaaatatcagccaggtaaccactgcctcaaacctctcctaaatttaacaaaaaacttgttagcttaattgtcctgaacttctttggggaaaaaaccagctaacctctcctaaatttaacaaaaaacttgt

SEQ ID NO: 92566 - DNA, 1469 bp, Homo sapiens
cttatttgaggcagaaattttttttgcagcttaagcatgtacataaagcaaaaataactaattgagcattgtggtgaaaaggattagaaaacaaattctgggtcgggtgcggtagctcttgcctgaaatgccagcacttagggaggccaaggtgggaagatggcctgaggccaggagttcgagaccaccttggcaacatagtgggacccccatctctacaaaaaaaaaaaaaaaaaaataggcatgatgatgtgcacctgcagtcccagctactcaggaggctgagacaggaggattgcttgagcccaagagttcaaggctgcagtgagctataatcctgccactccagcctgggcagtgacacagggagaccctgtctctattttttaaaaattctagagacatatacacagagtaggttctggtgaaccaagaaagaaaaaaaatggaaggaaaatattatgcctcacttatatattattgtttataggacacttcaaatatatgattaaaaagaacatggtgctcccagagcaaaaacatccccttagcaacttcttggcagctggttgagcgtactctgctgtgttccagtggcacagctaatgttggggagcgtttcctgttcgagtcttcaccttcacctattggtcctcagcagcttttaaactctacccgcccccaactcatgcatgatgtctcatgtattactgactaaccaaattgtcctagatatgttattttcattgtatgcgatgttgtttctgacttaaaaatcagaataaatctacttttactgtttaagaataaaagatataataacacataccttctgggagaatatggtaaattgttatggagattcttaatacttttttctaatgttgttttctatagctgatgccattaataatgctgcaggctttggtttcagagggtatgacgaaaatggagcagctcgctgggacttaatttccaatttgagaattcaacaaatagaggtgagtcaatctttaagaagttagttactatatactttaagtaccatagtttgctttcataagttatggtgtgatgtcctaggagtggtattgaaggttttttaatattaacactcattctttcatttaaccaatacatattggtcgtcaactatgtgccctgggcactggagacaaggaataagataggtgcaattcaggccctcatggagctttagtttcctagaggttacagaataaggtaaaacaggtggtgatcagagaggggtaaggcatgtgggtattcatgaaataggaatccaggttagttgaggtgtttgggggaagagagtcctaaagaaaatgatgcttaagctgagtcccaaagaagtaagagacaaccggacactccaagtagagggagcagcctgggagccgagagctgtgcagctcatgttgcttcatagtttagggagtcatgaaggatga

SEQ ID NO: 92567 - DNA, 1082 bp, Homo sapiens
cactgttacccataggtaccatgtatcatttggacagacctctaaggagtggaattgacttgactcccttttctcctccacctcacagccaatccctccgcagccttcaggctccactgccaggatacgtgcagagcatctgccccctcctccagccattgtcacctcctgcctggagaccgcaggagccccacacatgggctggagtgacgcattgagacagatcttttaaacccctgctgtgttttttcatttcagtcagaataaaatctgaagttcctgccatggcttgtaaggcaagccccatctgatctcacctcagctgtcttccctgctcccacctcttcccccgggtccactctgctccagccccacggctgccttgctgccagccgtgcccagctcaggggtcttcacgcatcattccctctgcctggaacccctgtcaccaacatccacacaactcctctcacttcttcctggtctctgctcaactgtcaccttaccagagaggccttctctgacttcttaatagaataaaagagttccttctttttgtaacacttagcacttctgaaaatatgttttataaattttattattgttttctgcaaccagtatgcaagctctgtggatgcaggattgtcctctcctttgtttactgccgtatccaggccctgcagcaggtggggcacacagtgcacagcacgtgtttgttagaagagcaaatgattgcctaggaggagacagcactttgcagatagtgcgtccatctttgatttgtctcatcgtgagaaatctaagttgaaaccttcatatttgctcataaggatctgtatagaaactcttattcagacatacttttgagcatgactatgttctgatccttaaaattcttattgtatgggtacaaatgaaaatgaaagcttgttttactttggaaatggagagcagtgaggtggatcgttattctatcagatgttctgaagcttatgctgcatctcactggttgcatgtcttttcattgcaggcgcatgccaagcttactggagtatttgagttacaactgtaacttcatgggg

SEQ ID NO: 92568 - DNA, 1843 bp, Homo sapiens
ttcccttctggccatcaccccattactgcatgttcctttagaggagcacttcttgaaggctttgtcgacattcagtgtctcccctcattctcccctcagccccctgcattcaggtttttgtgcccactcttggtctgaactcattctttcaagattgcccttaatcttggccgatttcactgtcagcctttttacatgatgctgaacctcgcagcattggccagttggccactcttctgaaataccttcttcacttccttccaggacactcccttctttcaatttttctcctccttcactggctctttctctctgtctcttctgctgcatcctctgcccctgcttctgccttaccactagcctggcctcagccctggacttcgttttctccaggtggtcacatccattggcttgaaaggccatcttcgtgtttgaaggctccttaatttatattcccgcccaatccactcccctcggctccagcctcatttatccaactgccatttcaaggtctttgtatggatagtgacaggcagctcgaacagaacatgttcaaaacagaacttctgatttgtctccctcctccttcctcctcccgcatctgttcctccaccattttcacccagttagctaatagcagtaccattatcactggtggcttggggggacttccattttcttacagcaaatccatttcaccagcaagtcaagttagcccttcctttaaaattaatctctaatctgactgattttcacctcttccacccgtcacatcccagtacaaaccctcattttctgcttggtctgctgtggtagctttccttcctggcttccctattttctcccatgccctgtgcagcctacttttcagctagcagccagggaagcttttaatgtgcattggattatattactcctgtcccctgatgaaaatcctccagtggcttcccctataatttagaatagaattacaaacccctgaccacagcattataaggcccaggaagagcccagagctcgaccacgcttcctcactcaattcattcttaactgtgcagctcactctatcaaaaatacccctcccttcctgccatcactttccgtccctttgctccgctttgttttcctcatagtaggtattactgtctgatgttatacaagacatttgttttaattgtccctctccctgcccctgtcactgaggacaggaactttgtctcatttattgtccccatcatccaaaccgtggtcattatttggagtgatttcgcctccaagagtcagctgacaatgtctagacacttttggttgttactgctgaggcgggtggtgctactggcgtccggtgggtagcgcctaggggtgctgctaaacaccctgcactgcacaggggaccccaccacagagaatcatgggcccaaagtgtcaataattctgtacacgagaagcccaagcttgagacaacacatagttgatatgaaatagcaatggaatgaatgaatgagtcttttgtttgatattatacattacaattagacttaagttctcattttataaataaatacagttacttacttcggtacctaaaatgacttgttgtttgatatgacagttgagccaaaaattacttaagccagtttcatggtttagaactatctcctgtccttgctaacggtgatacatagtttgacttggtgttaaaataattggtattgagaatggagctctgctgctagagtacaaggagttcttttgtaaccttgtgactgcagggtacttaccctggtctttgatacagtgagaaagcatgctgtttcatcattaaatagaaagaactgaaaga

SEQ ID NO: 92569 - DNA, 1022 bp, Homo sapiens
tatatcctcctctttgaagagaaacgtaaatagatggatgaagatgatgtatttgagtttggttttcatgcattggagtcatggaggagtaaggaaattgctctttgctttaggttgatcttctagtttatagtactcatgtgtagtcatttaagtcatcccataatagaaaaattgtaatgccccttttcgaaaagtcatagcatttacgattaaggataataacattataatttttaaagtgccagcatttgggaattctttaattataactccccttagagtggagtcagatacccaaccatgtgttattttatagagacttttcacatgatcgaggctgtgttgccatgagaaggaaaggaacagtcattatatcaaaattaggaatataatagcatgaatttcaaatgaggaaagtaatgaaagtgtgcatgggcaaaaatgccattttggggagaaatcttaattgatgagtacctatttttgtttctcagggatgtttcggaaggatgaagaactgacttcctcacagagggatttagctgtaaggtacgtgcctttgcatcctattctgccatgcttcctgcgcccctgcctaggacccacgttccttctgtggctgaggctgactagtccttctagaggtacttacttctgaaaatcaagcctcactctctccatgcacttccctcctgccaaagcctgctgggcaggcctgggcatcccttctagggctcctgtagcaccctgcctctgcgattgtacatttgcgcctcctatgggccacgaggttagctgctaaagttttcatccctatgagactctgagttccttgaagacaggaggatagtattgtcttcatgtctgccatgtagtaattactggtaataatagcagctaccatttacaggccaataacttgatggcaggtactgggctaagatataatacattaatatagcacatcgatgccatattttgaaataataaagaaccagtcagataattctcattattat

SEQ ID NO: 92570 - DNA, 1042 bp, Homo sapiens
accagtgagctaaactatgaaaagaattaggcagtgtgagaaaaatgattctctcccccagggaaatggaaattatagggcatttttatcattttcaagggcttgaagggtatctatcttgcaaagcagaaatagcaatcgggtgttccaagccacctgggggattaggttggttgaagcatgatttcctgaggagtgagtatgtaaatgtaagaactgactttttaagggaacctaagagaaatctcctcccttaagcacttccagtttaagaacatttgtcattgatgagaccttcccgttagttgaggagaatgagctgtagcttctcaagggcccaggtctgtgaatcaaatttccagtggtaggaatgtttaaagcaaacccttgctgccgtttgctgaccttgtgagaaagacacctctgtttgcgagaggcagcagttcgagcttctgcactgagcggtgtggactgctggaagagagcaggtcagaactagacccacgggggtctaagcctccctaggctggggtcctctcccctcctggcccctttccttggcagtgcatggggtgatgctgcgtgcgccacactgtcctcaggattccgtgaaacatgttctcctctgcatgtgtatagagcacagtctaccttgaggcaaaacacaattttctgggtttattatattattgtttcaaaaaattaaataacttctggtcaattgttcttcagtatagtttgtaagctaatgtaataaaggataaaagccttcctggtggttttatttattcttattttattttatttatttttatagagatggagtcttgctgtgttgaccagggtggtctcagactcctgggctcaagcgattctcccgcctcagcctcccaaagtgctgagattacaggcatgagccaccgtgcccagccttaactgttttttaatactgtctgtaagctaatgtcatctttaaaggttaagatgcatcctggtggttttcttatgtggatgtgttttttcctttctaagttattcattc

SEQ ID NO: 92571 - DNA, 1044 bp, Homo sapiens
agcacatggagaaacagaaagacagaagacaaaattatcatagggaactatgcaggagtatgttatggatgaaaataagaaaggattataggaaaagttcagtaagggatgagcagattaaagagagctcagaaatgcaaattggagggcaaaacagacatatgagtccaacgcagcaggtatatggctgggagacaagaaagactgatgggaaagggcatatctcacccttccgcagcaggaacgactgtgcaggaagcatttacaacaaaaacagtgcaatggtgcacagggaggtaactgcagtgggctttcttaacagcatattttgttcataaatctctggttcaggacaattagggtgattcacacaactatttcacttacatctttactgacattttaactattaaatatctgttgactttgtattaatggagcttcagtatctaaccacttcctgggccctaggaaagtctgggataccttgacacgaattggaaagaacctcctgtttccctaggatggaaatgggaagctgaagaaggtaggagaggcagaaggctttggaacttccagagtgaggtcagggcctcaggatggagcttccgtttccttctataggacaacattagtatatttaagtggtattaccgaaatttccttccagtgatactctgctaagaatgtgggaaaatatgaaatataactgtccaaagtaatacttcaactgatgtaacagtttcagctaatattaaaaaattcagctgaagtaaaaactccagactttctgaaataaaacaaaggatgaaaaagttaaaaaatatattcacacacttttttctctacaaagaacaagaatagtaggatttggttctattacacagtaaaactcaaatgtagttaaacattacaagataatgaatgctaaaaatgaacaattactttcatgattgttccattatctctgggagaccactaagcttaagggaagtctgtatattaatgctacaaatcaactaaaagcatctactaggtaacagc

SEQ ID NO: 92572 - DNA, 1002 bp, Homo sapiens
tgcacgatctgcacatgtatcccagaacttagagtattaaaaaaaaaaatgcagtgttttcctgaggctgagaagctggtgacaggcctgcagggcctccttgatgtgtgccctctcacctgttctttcttcttcagttctgctgcttatcccagtgtctctccttggaacatccttccagccatatctgcatgtccaaacttctgcagtcttaaaggcccaaactaaatgactcttgtttgaaatgcattccctcagctctctctgtgcagaccttcaaatagctcactgggcagtggatactttgttatgtagtttattcacatacctttcatttcctgttctcaagagaaagcttctccaggaacagcacttcccttttgattattaggtcccttcagcgccactggcttcttagcagttctggcagttactatgcaaaggtgtgaatgggagaagggacccagctcctattaaacatctgctgtgtctcagatactattgaatttaatccacacagtggcattattatcacttgtgttttataggtaaccgttttgagaaaagttaaataacttccttgttttccacagctgatgtggggtcaggattaagtgttctgactcttatgtccagctgcctatgtaccctgctgtctagggcctcttgtgccaagcgtgcctgaagctgcagtgctgttttcccttctcagtcagctttctcctcctagttagttaccctggtcaaaaaccttggtggttccaggtatgaaaccccacattggatacattatcgaatcccattgactttcctttcagaatagatctagaggtgacttcagacctcctgtgctgttaccctggtctgagccaccatctccccctgcccacctcccctgcctcctcccccaccccctccccctgcctcctcccccaccccctccccctgcctctggtgcccccacagtcttttttcaacctagagtcagaatatattctttta

SEQ ID NO: 92573 - DNA, 1072 bp, Homo sapiens
tttttttaatactctaagttctgggatacatgtgcagatcgtgcaggtttgttacataggtatacatgtgccatggtggtatgctgcacccatcaacccctcatctacattaggtatttctcctaatgctaaccctcccctagcccccacccgccgacagaacccgatacgtgatattcccctccctgtgtccacgtgttctcatggttcaactcccacttatgagtgagaacaacactgcatgtttctgacgaaccttgtaccacactgctttgtgaacacacatacattcagggagaaaggcttggttcggtagggtggggaacagacaaagcaaaccataaatagatccatctctgtttactcctggtaacttgaattacattagtggcagctaaacggaatgtttcctgtaatcaaacgtaggtcaagggctgggagacactcccacagaatgggccaggataaaggcccactacttgcaggcagttgaatgattcatatcgaccctatttacaacacagttgctgggcgccatgtgcggggaagataatgaagggccaaggggggccttccatgactcatttcagagaacacagaaacacatctacaattagactctgaacgtgaataatactttctaaaaaggagtgatggacatgacaagcacacctgtggctatcagattgtgtgcagaactggtgggttcttggtctcgctgacttcaagaatgaagccacagaccctcacggtgacagttcttaaagatggtgtgtccggagtttgttccttctgatgttcagacgtgtccagaatttcttccttctggtgggttcgtggtcttgctgacttcaggagtgaagctgcagaccttcacggtgagtgttacagctcttaaaggcggcacgtctggagttgttcgttcctcccagtgggttcgtggtctccccgacttcaggagtgaagctgcagaccttcgtggtgttacagttcataaaggcggcacgtccggagttgttcattcctcccagtgggttcgtggtcttgctgacttcaggagtaaagctgcaga

SEQ ID NO: 92574 - DNA, 1270 bp, Homo sapiens
ttccctgataatttgcattgcagccttcatcctattcaatgttaaatattctggagtctgtttctgggtttctgttctctcctgttgatatataagttctttttcccatgctatgtttttaattgtaactatattccaagcatcttaagtttatagaaatcagtaagtgttcatggctatgaaatgtgtgtaaatgccacccgactcatacttagaaggtatgcttttagactatcgaggacaggtttttttcaaaattctattaagaatttgttgaatgtataccttagccaaatatttttgtgctaacttttgtgtcctagaaaggaggaataaatggaacacatactaaccacaggtttatgcttgtgatcctgatttcaaatatgtaaagtggtgtgtgtatgtctctcagaaggaaatgaataaaatgaatttaccattgaaggtgatagtcaagtaaactgaagtggatactagaaaagagttttcataatttattaaagaagggtgtttgtagagtagatctagtaatatttaatttctgaaccatatcatttagctaataaattactttaaaatgtactctttaacaaaatgagtcttattttcattaatgtagcttatttttgttttgcagttactgctttgtgtttgctctgggatacctcacagtgtgccaagttactcgagtctatatctttgactatggacaatattctgctgatttttcagggtaagatgaaaactttgattcagtagcctgttttatccattccaacaaggtggttaaaggacaaaatatatttgcatttagtagttcaagtgaaaagctattattaaacattttagttgaaaatttctttctaaatttagaatttctctcttgtaagtagtctttttagtactatctaagtcagtaagagccttgttctgcttcttcctgcctaatggaacttcctttggttcttaggtccttgggctaggtcagtctgagtttcctagagaaggcgctcaagagtgcgttttacttctatgcatttcacctattttcagtgttctccattcaacaccagtattcagttgagtagtggaaataatttctggcatttgttccttcaaaggggatgtattttcttcctggtactagatgaatctttttgtcctgtaacaaaactgattatatgtctgttgtgaaataaatgcacaagctcttacgaagtaacttgctttccatctttataaagtgacatctgctaacactttggta

SEQ ID NO: 92575 - DNA, 1069 bp, Homo sapiens
ggtacatagtaaacagtcttggaaaatataaacagaggggaaggcagaatagagataaaaaagttagtattcaaatgtgcaagccttttatgcagttgggctacaaccaaagccgtctaagcctgagaaccttggagtaaaccgtttaatttgatttcatcgtgttaaaacaaacactcatttgttagtttttgttttcattcccatcaggattttgaaccttttggtgacatcacctgtttttccttttttgagaagaattcgtttttagttctcttcagcagttctagttcattaattcccatagttgctgctacatgggaattagcaatttccctgagcaatttccactctatatccaacacgtaagtgaacagatattttagatgtggtttcaccttttgaaatgaggcagcaattcaacagttcttatgcaatgaataagaaaatgttccgttctagaactctacagaagctgttgattttattttgatattagtaataatcatatctgaattcttttggctgtgaagagcagaaatcccaatttatagtagtatctgaatggtgtaaacagcagagaaagttacctctcgaagctggaagtcacgagacaaggcacctcattttcattaattcaacagctcagtgttgatgagggcgtcaaaacaccaagttctgttttttattttgccatctcagcatattgactttgtcctcaggctagctccttgtaagctaaagatggaccctgcacatgtagacgtgccaacagcaagtgtcacactaagagtaagaaaggcctttccaaaagctctgtgtcatgcttcatcaaccagacctaagttttctgcctcccataaaccagtcagttgcaaggagggtgagatgacagtgatggggataccatagccaggatccctggaatagtacgtccaccttttagaagtgagagaaccaggatgcagaaggatagtcactttctaaggtcacacaggtaggaataataaaaagtgattgggactgttatttaaatccagtccaggtcggtctggattttatttgcatg

SEQ ID NO: 92576 - DNA, 1052 bp, Homo sapiens
tggccaaagcatcagtgaacttaagggtatatcaaaggtattagccaatctgaagaaaaaaggtataaaaaatattgaagaaaaataaacagagcttcagagacctaagggataatatcccatgcatcaacaacgtttaacgcgagttccaaaagagaggggagagagaaagggacagaaaaagcttttgaggaagtgatggccattgatatcccaaatttgatgtaaaacattaatctgtggatccaagaagctcaacagacctcaagtaggataaacacaaacagatcttcactaagtcctactgctgaaagacaaagacgaggagaacatcttgaaagcagtgagagaaaaacaactcattatggagagagcaatgataaaattcttatcagaacagtggaggccagaaggaaatagagtgacatattcaaaatgctgaaggaaaaatttgcaactacaagttctagatccagcaaaattatccttcaagaatgaaggtttagtaaagacattcccagataaacaaagacttgctttataagaaattccaaaggaagtccttaaggtcgaaaggaagtccataggaaggaatgagaagctccagaaatggtaaataggtgggtaaatatggaagtctatatacatgtctcttttcttaatttttaaaggacctaagagtgtttaaagcaataattataatactgtattatttggtattgtaaaatatgtagatgccatatatatgatagtaatagctcaaaggatgacagagaaaatgaagctgaattggagcaagctggccaaattttatcagaattaagtcagtattaatctgaaatagattgtgatgaaatgagacacatagtaattcctagagcaatcactaaataaataaaaagtatacattgaaagaatcaacagaggaattaaaatagttcactaccaaatatttgtttaatacaaaagaaggcactaaaggaggaacaaaaaaggcctgagacatagctaaaacaaatagcaaaatggcaggttaaatctgaccgtataaa

SEQ ID NO: 92577 - DNA, 1020 bp, Homo sapiens
accgttattttatgtaccactaaaaaggtttacatgccatcagttatgaagaggattcttgatttcagagatgttaaaatgtgaaaacacacatgcatcatattcagtggagtggccacgtgtgaatgagccagtacacatttgcctttgcctcctgtactggacttcaaactcaggatggggactgtgagtcttgttcaatattgtgtcctcagaaccctgccagacaattttagatgattaacatgtatattctaacagaactgataacagactctgctcacatgctaaccgttttctcctgtctgcagtcaaagagcagactagagagtgtaccttttcttctagggcctcatttctaagaggctatgacagctcatcttttgctcaaccatggtggtgtcttcatccttttcccacttactggttcagttgtcttatgaaccaaaatatgggatgtaaagaactgtaacccacatagtcttgttgcccttgcttttaagtgcttttcagaattatttgaattactttttttcttttcctactttccacctaaaggttttttctcccaaagtcgaatagaagaatgatgagtgatcttgtgtgcaggcaggtggggagatctggacagtagcaccctttattaaaatatggcccctgaggaacagtcagtgataggttctaatcttggtgtaaaaaccaagatcttggcattggggtgtgagaggggtgatatgaagtcttttccaaacattttttttcaaagtcctggttttattagtgactagaataggctgaaatctggatgtgtttttgtggatgatcatctttctcagttgctccacgattctgccattacattggtagtttttcatgttattaaaaagctttgaatgtttttttatatgtacttattgagatactaggagagcttgaattggggactgttaatcaggtgatatgctgaaggtcttaaatcttcatgtaaactacaatattattcgttgtattttgaaagat

SEQ ID NO: 92578 - DNA, 1282 bp, Homo sapiens
ttggaagaaggagatgggggttgatggtctgcaggtgtccctgggcagagaatgttcctgccccgtgtctcgccctgctcatttctgctcccaccccagcatacctaacaccacactcatcttggcctcagatctcttccttgcttatgctttctctctctaaggtgcccaggtaactggaataaatcatcccttcttccttctcacctccacatctagccatcactaagacctgtctgtgctttggtttcctattgagttgttttgaggacttgagatttgtaaagcatttagagcagcccggggcatgtagtaagcactaagtgggtggtggtgaccttagctcttgttaccccccaacccatgtcaaatccactgttggtcttcagctctacccatttctgctgtttaccatctggtacctgcatctcacattactctgccagccagtccctctggcctctggtctgtgctgtgctttgctgcccagatgatttttacagtatctgtctgaccatgcctcttttctgcttcagactctgttagcttggcagcttcgcagcacccgttgtgactgcccctgccttcctttccactctcagttcacagcactcgctcctcgactgagccaggcccggccataatgaaccgtttgtagtagtgcacacatgctctactgtttaacacttggttcctttgtatttgcagggagccccctgcccccaacatgaattctggctggtctttcagagccttgttgacctgtgacctctgtggcgaggccttttcccccttttcttaataaatcagccttgtactctatgttgagttttctacctagagtcgtactttactttgtacatcttgtatacttcacatattgcactgtattacttatacttgtattcaggtggtttaacacttcaagtggtcagtgtgtggtgctgtgtgcctgtagtcccagctatgtagaaggctgaggtaggggaatcgcttgagcccaggaggtcaaggcttcagtgagccatgatcacaccactgtactccagcctgggtgacaagacagattgagactctgtctcaaatcagacaaaacaaaacaaacaaacaaacaaagaacaaaagaaacctgttgctaagacccagacttcagagccacactgccttctcacccttgctctcctgcccagtagctttgtcacattatccaagttacttaccctctctacactcctcttttgtaaattggagtaataacacttacttcgtaagattgtagtga

SEQ ID NO: 92579 - DNA, 2406 bp, Homo sapiens
gtgtgtgtgtgtgtgtgtgtgtgtgtgtgtgtcagtcaaacagatagactgacctattctgtacagtgggtcaaataagtttctcctacaggcctgccttggagactattactggtttataatatttctatggaaaaatgtgttcaaaattttgcataacttttccacattggaggtgcctgttattccataaagattaaaagttatttgaatcataggttaacacccttagtagtagtttaaactagatttagaggttcaagaaaaaaaataaagtactttaaattgtgcctgatgattcgaaaattttattttaaattgttcattcccccaaaggggaaagaaagtggagagagtgtgtgtgcatgcacggacatgcataaattagggatagttttgattgattttagtcacagacatcctaatcatgttttgcctgaattttgtgaaatgagtaaattatctaatttaatggtggatttcaagaatattggaatattagaaaataccatgtcatgggctggccacggtggctcatgcccgtagtcccagtactttgggaggctgaggtgggcagatcacgaggtcaggagttcaagaccagcctggccaacatagtgaaaccctgtctttaccaaaaatacaaaaaattagctgggtgtggtggtgggcacctgtaatcccagctactcgggaggctgaggcaggagaatcacttgaacctgggaggcagaggttgcagtgagctgagatcgcgccactgtactccagcccaggcaacagtgtgagactccacctcaaaaaaagaaaagactgtcatgttagccaggatgtttgtagatacgttacagcaaattaaaattaatgaatttgatttatataaggaagtttatttgacttgagccatcatgtattgagaagagtatacgcttttcttttgtaaattctaatatttagcactttttgttgttttgtcagtcatattgttaaaaaggtaaaggcagagtacaaagttggtactggagaaactagtttggggaaacaaccgatgttctgtcaggacgatcctgaaattcatattaattactttttaaaataattgtgccttgagttatgaagaaagctataatcctgagccatgtaatcccacacggcttccatgcagccaggagacatggagtgctgggcactgggcatggctttaggccttgttttttccccccagctcttctggagcctgtggtatgggactctctctttagggtgtccacaggattttaagctcctgaagtttcattccttatttttttttctgggaatactgtgttatgcataagtattttttagcttaattcacttcagcttgatgtttgtgacttggcatccctcttctaatagtgctcttactttttataggtatgccttacactttcttgtacaaagtggaatttcctactgtatcatgatcatcataggagtggagaacatgcacaagtaagtattcactttgttcacatgaaaatatatatttcacttgaatagaactgcatcaaaatagaattttatttattacattaaaagtaattatgaattgtgataattttttaaagaagaattgtcataaatacaaaaataaaatcattggtatgcatcattcttctttttacttaaagcaccgttgacattttgggatggatgattcattgacattcagtactaacctgtgccttctaggatgttaggcagcattcctggcttttaccacctagatgccagtagcaccccttgagctgtgacgaccataaatgtttccagatattttcacatgtctcttggagaagcgaaattgcctgctgtgaagaaccactggcttagtctgtaggtgatagcagtggagagatgcagtgaactgagtagactggagagagagttagaaggaccggtaggaaataaggtgtcaaggatgacttccgtgtttccagcttgaggagtagagtagatggaagcactgtcttctgaggtggggagtcctgaaagtggggagcatgtagaaggtggcataggcatttcaagtgggtatatattcagcccctaaacgtgtttggtatatagtaaacactcaatgaagttttgctgtgtaagtgaatgatgactttaagatatctgtaagacatataagaggagattggtaactaagacatgtagtaggagctgggtagctgggctagagatggaaatttgggaatacagatggataaaatgtacttgattgaaaacccaggggcagagtctattagcagatcctgctgggtgttctgcaatgtctgagctatgatgtatgacctaggtaccatatttctgaattctgaatcacatatgtctgcaagaactttgtataaagaatca

SEQ ID NO: 92580 - DNA, 1050 bp, Homo sapiens
gccgcagtagattcccctttactcctattgccatagactgtcctgcatcccaccagatcctccaggccctggtgcccttatagtctcagggaacttggggacattgacccctcccagagcttttgcgaagaaatttagtgctcctctttttcacgggttacagggttccctcagtcattaaaacacgtttctcttccctttaaccgataggtgccctgggctttttgtttctgtgtctgcagaccagtgtcaatcagatttttccaggtgtccttctacacctctccccacgtggccacacctgtctcctgccaggtctagcagagacagtattggtgggcattggcccatcacttggaacttgaggctcatccttgggatttccctcaatttttgtttttgttttgttaacttggaaggtcaatttttgtgtaaccttggtgtttttgtcctgagaatttcaatgtaacatgatatgaaaaattcaggtctgtgttgctaatacaaaattttaatttttctttacaggtcaactttgtagtgtgccaactctttgccttgctagcagccatttggtttcgaacttatctacattcaagcaaaactagctcttttataagacatgtagttgctacccttttgggcctttatcttgcacttttttgctttggatggtaagtaattattttgatccttttaaaatgaagactatttggatgtatttgagaattgagtgtgtggaaagatacattatgtagggttttgttcttatatttacttaaaaagttttttctccaggccaactttcatatttttatttttgaaacaaaaaataacgaatgggaaatgggcttgctctctctttagtcttagaggaaaatttactatttataatttgtggaaagacagatgaagaggatataaaggcatttgattctgtcatgagtagttctttacacctattttgcaaatcttttatactgacagaaaagccatttaaatgtgtttttgtttgcctgttttttctctgggcaagtagcttttaagagc

SEQ ID NO: 92581 - DNA, 1658 bp, Homo sapiens
ggtggccattgtccaattttctttaaagagctgccccaagttacagtcagattaacagtgtagagcaccagctttctcatgtccccagcagcactgagaggcggaagatagtgcctcactgatggtttatttcacacttcgttacttatggttgagagagaatatttttcagattttattggacattgatatttgtaaattgttcattccttttgcccagttttctattgagtggttcatagtttctcatgggtatccaagagttctggatatgtagaggtggagggtcaatctcatcacttccttgttttaaaaatcttccatggttttgtcatcactatgggctcaaacgccgtggtgtggcatacaaagccctcacttctgaaccaccctgcttccagcctcatctcccatgatccctggccacgcggtgcgtttgcgctttcatgtccaagtgcttccttcatgttgttttcttccttacaatgccctttcccttattgtccaacagagtgcttctcacaccttgaggatcataagaacctgtgtttccattttattttttatacatatttttgggcctatctccccaaagactttgattcagtgtccagtgtgaggcctgatctcattttctttatctgaacgatgacaatgttgaaaagagatgatttcaaagattctgtaaaatcctgtatgtgtgtggtccttgacatactctttcttggaaggaatcatactttgtcttgtaatgtatgaatagactgatatggaatgggggaagggaagctgccccctcctatggttgtggagatcagcgggattgggaaatgctgcccgccctgcttacccctcacatcctttgtggcaggcaccccttcaggcgtgctcttctgtggtgtcttgaaggatgttctatataaccattaaaaagactctgatgttgggttgacgttccttctgtatatgtttatgttttccattaggttctaaagtcatcctgagctaggactgggactcatgcatgtttagatttcccatgtttgcccatagtagatgctcagtaaatttttgttataataattaaattaggagctatctgaaaaagaaagaaataagagatacttgaaacaaagttttaaactgtaagaagccatgtagatgtgagtagttaatatgaagaacacaaatttttccattctattcactttttgcttaattaaaaaaaatgccattagaaccctttagaaggcaggaagtattagaaccttttggaaagacattttgcttttattgagtctgttttaaagaacaattgtttcttagacagtgtacaacaacgttctactgtttttctccttgatatgtgagaaagagaacatacttgtctgtgtctttaggcagagatatttctatgggtctatggaaatagctacatgtagatagtgtgatttgttcacaatttaggtgcctgaaacactgattgttttgttatgtattttttttgcaggttcctaatgtcaatggattttttcctttatttatagactttaaggcctattattcctaagattctatgagaatatgtttcataagggagaaatggagattttggccaggtgtgattgttcatgcctattatcccagcactttgggag

SEQ ID NO: 92582 - DNA, 1877 bp, Homo sapiens
cagggtatctgctttggacagttttgtgaacctctgtttcattagagccattacatattttttgtgtctatttattacagtacatagtgttactgttaataatacataaggtttaataaaaaactaaaagtcagtatctgtgtaaccaccctgggcaaaaagtagaaacattaccagcccacaaaatcccttgttgtctgtcactattataacccgttctctcccttcatacgtaaacacttcagtgacttcagtgattgtcattttcatgtcaattatgtaggcattcccagacagtatggtttattgcttgctttttggaactttttgtgaagtacatttatatgttgtatatatattcctctgaattgacttgagatgtatggattcttctagaaattatagtttcttcatcttcgttgttctgtgtgatttcccattgtacagataaaccagaatatatttagccattttgctgttaaaggttttatttttccttggcatttggctattatgaacaacattgtattgaacattcttgtacatgcctctcctagtccccatgttagacacatgggtattggagtgctctgtcatgggtaggactattttcaatcctgtaagaaaatactgaatttttttctaaagcacttgttgaccacgtatgagaaatcccattgctctacattgtagtctgcatttggtattgtgacactaaacttttggcaatctggtggatgtgtaatgatgtcgtatttggctttgttttatctcataaagatgtaaaaaatggttctttcctttgcctttgggccctatcatctttacttaactggctgcgaggttggttgatgaggactcttgttttccaaacgtagctgcacgtaagttttgcctgggaaattaaaaacaaaaaaaataattcaaggtctcatttcagactggggaataaaaagttacggagctagaatccaataatctgtttctaactagctgtcagatgatttttacacagctaaacttccacagataagattccagcacagggcgcttgaaactgaaggttgttctgtctgtctatactatgtcttcttagtctggtgagtatttggcagtcaagacacacctcaatttggaataaccacatataagtgctcatagccacatggggccagtgactattgcattgaacaatgcagatctgttcagaaaattgctcagcaataagtgtatagtttgttacgcattttgaactttgatatacactttgatctttcacatcaggttgtatacttcacgcctcctcactcccctttccatcaatgcagggtctcacaaagactggctgttcaccttgggagggactggttaagaatatgttatcaaaaatccgttaatgttatttttaaaaattagaacatattttgtattccatcagtagagatgtggatgtaacaattgattttttggggctgtttttattgatttgttgaagattgtaatcactttgcgctatattgaaatttaaggtttttttactccaaaattattataggttaatttttggcttagtgtagaatgcttaattctgatgtggagataattaacaagcttttgttgggcacgtgtggcagttgatgggcgtgtggctagtggctatcatatttgaacagtgcagatcttttcagaagattgctcaattacatataagtgtatggtttgatatgcattttaaataccctagaaactcctttctcgtgttctagtaagagggaggaaatttaaagcatataaagctggagaaaatatacatataaagctggagaaaatatacaatcttttgtggagacagaatgtaaatttgtggataacatttt

SEQ ID NO: 92583 - DNA, 1051 bp, Homo sapiens
taagcagttgtggatgcagttaatctagtaccttttaatttcataggagagtgtaaataaattccttctcagttcataggaattttttatagttggttaagacagagatcaaaatgagacaagcactcattattagcctggtaggtaggtgcctacctttaatctctgtggtgccttgattaaatcgctcgctttctgcttctgtttccatgcatttgggaaaactcactgctttttggtttgtatgatggtctgagaatatatttagggatttgtgagttaatcaacctttgggagtctggctgtttttaacaacatatggatgtctgggctgtagattggcagttctctgtgctgttgtctggggaggaagaggagaggatgttgtgtctgatgtacaggcttgtcctgcagaacagggcttcttgctggctgaacccagtgtatttggtgtaggtggaattagaatgggcagtggccatataattcaggagataagaaagagtcttaagagaggcatgccaaataaatctctctactttgtgttctcatgatgctatttctctgcctaacataagacttagtggccatcgtttttttttttttttttgtattgttcatttaattgtcctcttttactggcctgtaagttttgtgagtgcggggacaaccatggctgtggtgttcatccattgtacctatacaagaagtgtttacagaatgttgatagaatgtgtccttacgcttcatgtatttattttacatttgtggttataaagtttctagttgtagcaattaatgtttccctttaggaaagatggaagataaatatgagctgttgtattagtctgctccccttgattttaagcaaactcttgaggcatgattcttgcccccacgtgctcatccccattttcctttcagtgaatgaaaggcacagatagagccaggccttccactcagggattggtagtaatgcatagatgaataaaatttgttcccaagccatcagaagctcacaatcaaaaaggaaagtcagactcacaggcca

SEQ ID NO: 92584 - DNA, 1028 bp, Homo sapiens
gaagatagagctaaggaactgaagcatggattccttgtggagggcaggagatgagcagtcagaggttgattgcaaggttttggttgaagtgtgatggtgcagttactcacatgggtcaacttggaggagaagttggtggtgaggggaatcagcagttcccttgtggccacagtaaattttagatactcattagatagtcaagtgagatagtttaatggacagccgaataaatgtctgaagttcatcagagaggtcaagactaaaatgacagaggaaggtgtcagcaacatagagctcacttcagagccatataggactggatgaactccccattagggagtgggctctgcagtttacttccttaaactgagaaagttggacaggatggtctttaaggtcctcctttccaaaaattagatgttcatcgagttctaagagcctttgtaagaaacttgaagtgatgagaattttctctaaaatgctctagcttcttttaagccattgaaaggatgaatggggaagaaatacagacatttcagtattccacatctgtattcattccacaattgcttgtccacaaagtgtgatatgtaacttcaatgaaatacccttctgagagggaaagtaatctcaatcacattgcaaggttttcagttgaacccagtggtggtcaatgtgaacttatttttattaaaaaaaaatttaaacagctttattgaggtataagtgacaccaaagctgtacatagtaaaagtgtaaaatttggtgttttgacataggtatccacccataaggctgttaccagaataaagatgatagacatatctgacaccccaacagtttccttgtgcccttcagtaccgtctccctcctgcctctccctggcctccatccccaggcaaccactgataagctttttgtcactatagattagtttgggttttctagaaattcatctaaatagaatcatatagtaggcactcttctctctttctggcttcttggactccacataattattttgagat

SEQ ID NO: 92585 - DNA, 3320 bp, Homo sapiens
aacaatacatgttttagatactccagttttctttaacacttcccttttttcttcatatactttattttattgtgtatgattcattatggatattattatgcatgagtttaggattttttttctccttgcaatattgagatgtcagagctaattgttctccttttaattcattctcacaggatgtgtagaattcacaaatagagctttttcatgaaaaaggctgtttttcattatttgaatggaactaaataactcaaaatcaaatacagctcctaagggttattttgtttaatgttggcatactaaacaagcttacaaataatatattatgaaataatcgaatctcttaatgacttcttaaaaaatttggctcaaaggatataatgttctttcaaaagttgtcatataatgaatcctttctcaatactcacattaactcatttgtttccctagtctcagttatagtattgtatttttgtaataaaacatatttaaactgatacaatagtaatatataaatcatataaagtcatttattctttacaccccaaggtaactgtagagtgtttatacatatttgaaagttgatgttcatatagtaacaataaatatgaatgacatgcattgtttgtatttttgatgttactttgcttatcagaaatggtggtagtttaggctatcagatggtcactgacctccaccaatttaaggatgctacaaatgaccagcaagtagatattaggccaagacccaaaccaaagcaaaatagtggggatttgggcttaaccaaggacaaagccaaagttcagttcatctgtaccttaaaaagggaggtgaaatgaggtacttcataatgtttttgctgtttgagagctaattcttcttttatgacatgcaaatatgtttaacatttttgcatttctaatttcatttgtgttttcagtaatgtgttatatactctagtagggaactgaatttagtttgtatatttctcatctgattgagaaagtaatacatctttatcatatgaaacttataaaataaaaaagtataaatagaaaatttaaaaatcacccattacccttcagtccagagacaacttttgttaatatatttttattagagtgtgtgtgtatgttcaaacaaaattgggctcatactgaacataaaatttttgtaacgcagccaccacgttgtgaggaatcccagggcatataaagatgccttgtgtaggtgtttgaacctacaggtccagctaaagtccagatgacagccagcatccactgtctgacatgtgagtgagcaagcctttagataattccagtctctgatgccaaatagagaaacaatgaggtgtccatgctgaaccttgcccaaattccagattccagagcaaaagaaatgtgagtgttttcagctgccaaattcaagggtactttttaggtcatcagagttttcatttggcaatcatatatttttaaaaaattttaatcgaatgtaacttaaatatggtgaaatgcatagatcttaattgtgcagtttgaccaattttgacaaatgtgtacacttgtgtaactcataacctgtgtaacccttgtaaaggtgaacatagtaggccagagtgagcaaggtgtaagtgttagatgctgagtagaaaagactgggaggactttggtcataatataaatatgatgggaagccatgagatttttgaaaatatacttttaattttagaatagttttaaatttgtggaaagttgtgaagatagtacagctagtttccacataccccacatccggtttttcctcttgtttacatgtttcattagtatggtcatttgtcacagctggtgaagcagtattgataattattattgactaaactctatactttatttgatagatttctttagtttttacttaaggttaaggtctgtattagttagctgtcataacaaaaaccatagactgtgtggattaaacaacagaaatttattttctcgcagatccagaggctgtaagtctgagatccaggtgccagcatggttgggttctggtgagggctctcttcctgccttgcagacagccaccacttgggggtgtgctcgcgtggtcttttctagatgcgttcttggcgaaagagagagcaagccctctgtgtctctttttataagggcactaatccagtcaggccagggccctacctaccttcacaacctcatggaatccaaattaccttccaaaggccccatctccaaatgccatcacattggggtaagggcttcaacatatgaattttggggggaaacagacattcagtctatagagtccttttgtgttcctggatcttatgcaggctaccgtattacttttttttttttaaagacagaatctcgccctgtctcccccagcctagagtgcagtcatgtgatcacggctcactgcagacttgacctcttgggcttaagtgatcctcccacctcagtctcctgagtagctgggactacaggcatgcgccaccaggcacggctaattttgtattttttggagagaggggatttcactatgttgcccaggctggtctcgcaagtgatcagcctgcctcagcctcccaaagtgctgggattatagatatgagccaccatgcctggcccatattacatttagtcattgtgtctccttagcttcctccagactgaggcagtttcttagactttacttttttttttttttttttttggtgaccttgtctgctttgaggataactggtcatggattttgtagaatctctccagtgggatttattgaatgtttttctcatgagtctgtgcttatgggtgtttgagaggaagaccacaaagatgaagtgttgttttcatcacatcattccaagggtatgtactttgagtgtgactgatcactcttgatgttaatttgatcacctggctgaggcagtgtctgtcagatttctccactgtaaagtttctctttttactcccactttccatattgcattctttggaagaagccattctgagcagcctatgcataggggtaagctgtggatgctttgaatagaggaattagctactctggtttacctctgaagaagctctcattactgtgtggagggcaagagttgaatcagggaggggagttggcttgtggtcacagtagtctaggctcggtgatggtggtcatggcgggtgtggtgcagagtggcctcatttggcatatacttgaaggtagaactgatatgacttactggtggattgaatgtggttatgagaaaaagagaagactgaaggatgacgcttcct

SEQ ID NO: 92586 - DNA, 1843 bp, Homo sapiens
atccttaaattggctgaaagagtttcaaattttatctgactagttcttttcatttggagaagatcacatcttggaaataatcttgaaagttaataccccattacagtggaaggttggaatttcacactactatcattttattctttttgcagatccagtattactattattaattggtttacattgtcaaggctattttatggtatgtgacattaaaataaatgtctagctggaggggaataaagtaatacttggaaaggtcttgataagtccctgtcagtttttcgtttttctagaaagtgtatattgatttttggccaaaatgttttattttgtgataactctggagttatcagctttggagtttaggtttaatctgtagtgtgcttcactgtgagtgtcagcatgccttttctaatactaggactgacacagctgttcttattacctatatcccaagaatagcagtgacagagatttttggtttgcaagtagagccaagaagatgaaggtagaggacaggggagaggtttgttgaactagtacttagtatctttggagatagttaaggggtccttagtataagcttataattttgggtgctgtaattatagcccttgtgtatttcttgtacgatgagactagttatgtcttcaccttttgttcttggaaaatacttttaaagccacatagtaaaggaaaattttggtaaacttggcatcaaacattgagcctcagctgtctattagacctggatggaaattctgatatgttaatcaaaattaattctaagtattgttgcaatttttatgtgaattgaaggaattcatttctaaggattcaagtttctttttaaggtgtaagaaatataaattaatggagaaatattccaagaaggtttttggcatatactcagagttttactttataggattataaagtgatctattaaataatttttaaatgaatatttcattgggtaggaaatgcttcagtagattaaaaaattcttagaaattaatagtaaaatagtatattaaagataaaaggatgttagtaccatgtcagcaaagactataatgccagaggctggacttggattgctttcctttttgtattttattgaaagcaggaaccactagaaaataatataaaaatattaaactacttttcctattttgtctctatctccagatttgataaatgtgtgatattggagtttagcccttgtgaaatgaaggagaaagtataaattttctcagaatcctggagcaaaggtgcaacttctagttaaggaaactgcagtgtaaagaagggacagcctagctcattcagtatttattgattgccaggctttttcctaggcctcaaatttcagagagcagagggtcgagttggcagggtttgatgatatagcaaatgaaaaaacaaacgtgtttcatacatttagattatagtgactaagatcgtggattgaggagtcaacctgtgttccagttgtggttctgcaacgtagcatcccttacaagctgtgtgagtttatctgtgtgcacaagagtgtagtgtgtaatgagtactctataaatggcagccatggctgccattgcaccttttgtgcaaactgcttgtgtgaaataaagttttatcaggtgttggttatctggattgtatttgaacacttcttctggtgcagcgcttgttccctttgttagggcagccagtttcatttctagatagttgtagttgctagagagtttgtcatttacatgcttgcaaactttctggagtaacccagaagtggtctgaataagtccacttcttcgtggttacctttcagagaatt

SEQ ID NO: 92587 - DNA, 4207 bp, Homo sapiens
tttttctttaagccgtggtttccttatctgtaaaataaggataataataagtagtagtacctatttgtaggttattgtgaagattgaaaccataatctttgtaaaatgccaggcctctagtagatgtttgatgcacagttccttcctctttacaaattatcaaatttctggaatttatttatgtttttattttgagacgttaacatctgttcatatgtatttcatttttaatctttaggacttgctttttaggaagggaaatacaaggcttgggttcggtcgtatgcccacacagtgattaaactaggattaaaatctagttttgaatttggagtcaaaagtggtttttctgcttcctcactgcttcaagagctctttgtctccctgctttaaaaatgcttcctatgttgttactgcctctgtaggtacaaacagccttcatctccttcaactcggtttattgggtccatcagggccaactttccagggaaataaaaacaactcacactcagcttttggctccagttggtttaacaggtgggactctacaatgatagcacttggtaagattcctttaaaataaaagcagccataaatacgaccctcagcagagtggtcttttaatgatttttatgcgtgctatgggtgattgaagcaggcttttctcagtatgtagtgtgtggcaactggggcagctgatgggtggaaaggtaggctcaggattcaggagatcggaacaggcactggtgacgtgcctcttctaccatggcttcccaatcctaaccgtccttcctgtatccactgcaccttgcacacgaatctttttctgaatcccatctgatgtgactgcttccttatttgagccacgagagtattttggatttggcattgttctggcatttacattctgcttaatgttatacgtatcattcagggttctgctaagagatacagattgaagtaggtaactaaggcaaccaggtaacttaaagagctatttacaaagatgtgggcaggtcttgggaaatcagcaaggaatagcgaagttcccgagccagctgcactagatgtggagggtcaagagggaaggaaggagcagaaccccaagatagtggctgtggagcaggggctgcttcacagcaggggaggaagagctatggcctccagttgaaggacgcagccagcctacagcgaacctgagtgagggctgcggccgggagagcatgcccctgcctctcgcttctcccatcctctcatctcctgctggggtctacttcagaggacaagttggtgctttgggggcacagaatagagaggagagtggatctggaggggcatttaaatacaatccaggacgttagggttgcttcaatatgacttacttctctacccgatgaatacaaataaaaaacctgttgtcagactcctttatgcacattgttattttgtctctttcttctcagtcatacattttgaaagaatagttgatttcctaattccagttcacttttaaaaccactataatcaggcttccgtctctgatactcagaatgaaatccagtggcaaatgttgagacatgcagcactcatcagttacttccttgcttaaaactcttaacagcttccagctgccgagccattgcggtgcatttttaaagtgtggctctgagaccacctgtgtcaaagatcactttggattgttattaaaagtgtacattcccaggctctactcagggtatacccaatgagggccagggagtctgcattttcgacagggcccctgcttccccccacctcccaccaccatcacagataacagacttgggccaaagtttttaggctgttcatattattaaaagtttattaaaatggaatgtaggccgggcgcgatggctcacgcctgtaatcccagcactttgggaggccgaggcgggcggatcacaaggtcaggagatcgagaccattctggctaacacggtgaaaccccgtctctactaaaactacaaaaaattaggccgggcatggtggcgggtgcccgtggtcccagctacttgggaggctgaggcaggagaatggcgcgaacccgggaggcagagcttgcagtgagccaagatcgtgccactacactccagcctgggtgacagagcgagactccgtctcaaaaaaaaaaaaaaaaaatggaatgtatttttaaaaaatgtttatatttaacacattaacatgtactcgccaaaacgtaaggcagtgtaattgtgctattgacaatatagtcacaagggaaaaataaaattcactgtgtactctactctaggcaatttggccctgaaacaagacaatattaaagttggatggtgtacacatctcccttcagtcctgtcactgcatctctggtgactgtatgtataatctcatatgtagaaaatgttgaacgtctacatttggggtccttccggaatgggaggcctgagccaagtgtcccttttggcctactctgtgagagagcctgctccatgtgatttttttttctctcctttaaaaattgtattgattgattgattgagataggctggagtgcagtggctcaatctcggctcactgcaaccagtagtgagattgccggattatgtggcagttctgttcttactgtgagcttacctttgaaagtctctgtctgatggggtaggcttggaccctcagaaggatggcttattcaacccccgacccctgacaaactctcacactctttccacacatgccgagtaaattgcttagagcaacgtatgtggcgagctggaatttaaatcctggctttctgctgcttaaagtacttgcatactcaattacttaaaatgctcctcaatacattttctctcttttaactccttgcctttgattaagctgtttcctcttgaaatccctgctacactttttggcttggcagatccgtatttttcaatagtcagctaaagcctatgcctccttgatgaagcgttttaagatttgccccatcctttcctccctttttgggtatcttgcatgcatgatatgttcgtgcatgctacacctacatgccctaagtatttgtaattcttctgcctcaggctgcaggcattccaggtggacccatgacttgggacctcttcacacagctgtctcgcatcccatgcagcatttatgtcatgaggccagtgttctggagaaggaccgagagaagagaggcccctggtattcctgatctgcctctctcctttgctctggactaaccagcctgtcctgtttctgtacagcagaagcccagtgtcatccagttctttcttaggaaggagttaatggcaagatcccatgcggggtcctcgcccctctccactgccttcttgtcatatgtgagtacccctccaactccaggaagcagtgctgcgagagaatgcctgggctgccctgttggttagggccctccgaacagtcccatcatgccccgctttcactgtattctactctgataacacctggagcattgattttttttttgtttgctttacaagtctccctcccaaactaaattccttaagaataaggacctccacttactcatctttgtgtcccgtctgcctaggaccattcttggcacggagcatgtttagagtccgcagggctggtgtgatgaaagcatagactggctcagcttctgactgtcccttgttagctgtgtgctcttggcaaggtgctgatcttttatttgcttcagtttcctcatctataaagtagttcacgtagtgggtgtctccctacggagttgtggttagcactgaggagacaatgcacacggagtcagaacctggcgttttgggtgttactgactttaagtgcttttccaggggctggagagggcaccatgctgtttaaggctttactttcttcagagcctaggagagtgttctctgtcatccattttgcaaggagtgaagtgtctcatgtatgccaggtggtgaacaagacacagggtacagcggaggtactgcagttgaatgcagtgattttcagacataaaacaccgcagctccttggagcacttcctggtagagagggccaggtcctgctgaggaagttaggaaggccaggttctgagggatgcggtctagtgggtctagtggggtcatgctgggtgttcccaggggacttttcctgggaactgtgcacttttcctgtc

SEQ ID NO: 92588 - DNA, 1388 bp, Homo sapiens
catctctttcttgcctttttaaccattttctgtccttatttctcatgatgctgtaattactgctatgaaactagagtaaatttccctagtgatgtgatatccaggatggcatacttggcagaaggccagttagggatgaagctggcctgtataaagtcattgaacagccatgtttagggacaggggtcattcattgttttacagataatatgctgaattccgggcagggaaaggggcaagatggagactcaggatcttttgaaaggtttggacggggaaggggaaggaggaatggttatatgttactaatcctgcaaagtcagataataattataatgtctaacacttaatacagttttcaaagctgtttcacacagattatattatttaatcaaatcctcacaacacctggtgaagtcagataaagttcaagacctgaagtatttagcttcacgggtgtgtgtgtgcgtgcacgtatgtatttaccatttgaataaaaaaggtcaggtttagtttatggtcttaataatatgtggcaaatatttttggtagatcattgttttagatcatatttttggagggaaaggaggagagcaactgaaggtccctgaagtcgacactgaaggactaggggttgtggttgacacagagaaaatgatgatgtgtaagggagagaaagcattgtgggcttacgagatccttgtttcctttttggacagttcattgactgatcttttctatatattcccaacccccgccccccgctcttcccctgcaccgtgcagataaccagtgaagtgaagttgatgttatggaaaagggtagttgaaaacattcacttctttaatcttcctgcaggtctgtactatgatgaattccattttatagatgaagaaacaggtgaagttctcagtattgagccttcttaagagtatgacttttaggaagagaaggtgaatggcaacaaaacaagcagatcaaagatttattttcaacttgccatttgaatgctctaggtttagaacataaatatttaactcatttctctctcctgtctacttttacactcataatgagcattagtcttcatcatgagaacactgaaaacccggagagtctgctgtgaacgattccttttcatcaggaaggcatatgggactgagaatcttgaatctgtgttttagctcctgtcagttaacggttttagatatgttactatacatgaatgagtttcctcctctatgtgtgttgggcttagttttaaaattccatgattctctgtttgtcttattaactgataaagctgcccaaattctttttggaccaaattggagagaaaataaataaaaacttagaggaggaaagtgaactactaaattttgaagatg

SEQ ID NO: 92589 - DNA, 1119 bp, Homo sapiens
ccctcagcaacgccgtgcagctgcccatcgaccaggtaccccgaggcgccctggcgccgggcgtcgcgccctcgccgcccctccccgccgcggtgccacccgaccgggggcccgggaggagggtgggggctggggccgggcgcccggtgcccccctacccgccgctccctggaagggagggggcaacaagccggttattgtcccagagccccctccctcctgggtgcgcccccagcccgccatccccgggccgagcgggaggtgggccgggcgttgttgccggcgacagcccccggggagggtggtcgtatgggcgtgcgggtgtgcatgcggtccctgcccttcgcggcagcggcgctcggatccggtggtcgggtcccggagcagcccccggtgcgcatggaccgggttgtggaaagggtgcggaaggctgcgctttggggagcctggcgtggtgctgcctgccccgcgcgcgcctctgagcgacccccggagaggctgatgcatgggtctgggtgtgctgggtgccttagagacggcgtcgatgggtgctaggggcccggagaggcttaagcgctactgcactttggggacagtttgcgttggattgtggcttaagagagacagaggcaacagtttgtgggaaggcagacaggttatgaagaaaagtcggagttaatcccaggattcttgctgacaaagtggcaaccttgtagattgatgcagccactttacctccttgcccagccctcagaaaagctcttgacagtgtctagggaagggtggtatttaaatgaggccaatcgagtttgatggtttaaagggcctaacgattactgagaaataaacagcattgtgatgggaaaagcagcgccatttttactgagaaaagaaagtttggaagtattttgttgtgacagtgagatttagggaagttgttaatgaggcgggggctggggggcgggggtgtatagttaggtgattgctctagccccaggctaaaggtagttaactttggaaattttgcttacagttatttcaagtgtacttaacctggaagtgtttggacttcacacgggatactggttcactgtcttgaacttgaaggtgctgctgtca

SEQ ID NO: 92590 - DNA, 1047 bp, Homo sapiens
actgttgaagtccgccaggtttacataccctggcgggtcacgtgtatatataatccccccaacttcgtaaaagtaagccatttgagttcctttaaaatgcaaacgtcaacttctgttcagaagactttaaaagaggagaaatgccacagcagttatgaggacaaatcaagactcaaggatttggcagtttaactttggtagaaataactaatgtttactgagagtttaaccacagctttaatacttttggtatttaatcctcacaataaccgtgtgaaatagacacttttacacaccctccttcaaggaagttgagtcacagaagaggtaacttgcccaggggcacacagctggtaagtagattggaatccaagtaaatctacatttagagccgaccttatcactaggccttcatctctctcacacttaacacccattccagaaactcccgtcagctatcagttataccattgggttgatgactagcttagagtcttgaataagaaggcagcacagataaaaatacacctgccttagtaatcagtctgtgggcttacgtttgtctctctgaaaaggaggcagtggaactcatcagtgcaatcccgtcttgcctagaatcctttcactggtcgactcaatcctagtttggtggattctcagctgaaatggaatagaggataaaaggaagagtaaaaagaacaggaccttcattcccccaggggagtgttccagtgggatttgtaatcaattagagagctgcttattacagtatattaatccaaaaacccagacctattaatattatattagaaagaaaccatttttttttccttttcttcactttagaaaagtagaggaagcgcacaggtggctgagcatacaaactgaagaaaaaattgaaatgccattttaaaaacttgaaaggtgggtgttgggaacatattgcaacctaaagtaagcagcatggagatacaatctcagagctagaacaaataatgtctgcagaaaggagtttccttaagctaaatttttattttagtcagacat

SEQ ID NO: 92591 - DNA, 1018 bp, Homo sapiens
gacggatggatgggtggaaggatggatggatgatggatgggtaggtgggtggatgcgtgaatgggtgggtgggtggaggaatgggtgttttggtgtatgggtgggtggatgggtgaatgggtggatgggtggaggaatgggtgtttgggtgtatgggtgtgtagatgggtggcagagacttgcaaaagtgccacagtgccttagaggagtgatacagtatcaccacactctctacctattaggataatcgtaccttcctgagcacttctagaaatatataaagctccttccacttggcaaagataagatgtaccaggggaaattcttagctcaagatatcaaagcaagaagagttgaactagattttcctgcaaaggcatgatgggacagaaagaccctgttagttcagattacaccaaataaaaactgtatttcctttgcacatctcagttgtagcctgagtgggtactgaagctccacctgggcctcagtaccttggccttccttcccctgggagctgagaactaagtactggaagtttccatccagcagcccacatgccctgcagacttgaccctcctctatgtcttacagacccaggcaggatcaaagtgctcatgggaattcaaaggagagcacaatccgacagaaggagcgggtcccatatttcacagaggagctggctttgaaggatggtaagagcttccaggcagagagaaccacctgagtaagcgtctctggcagaaaggaaatgtgatgtttaggggaagtgaggggcctggcccaggtggggtgaatgaggttgtttggggctagactggcatgggaggggaggggctgacagtcaacatgaaacacactgacaagacagaaaaacgagtacaccgatttaaccaataaataactgaataatctggaagatttcagggatgtgagattagaagaacgaagacaagcgactacttctcactcatgaaatacaagcatcctttgagcctttggtgctgtctacgactgt

SEQ ID NO: 92592 - DNA, 1822 bp, Homo sapiens
aaacagattctaaggaatcgacaagaataaactgtgcctatagttttagataaagatgcaatgttgctcttttgtggttaaaagtggtagctttggcttcgtttattattttctcagccatcttattcctggaaagtcctcatccttcccgcacagccactaagccgatgattttacggacctgggctttctctctgggcacaatgtccacctggttacctggctattccagccagcagtcagatgacagctggccacatgatagcactgacctcaccttgaccagcacgtctctcctcctattcaagtgacttctcagggatccatctgtctggtcttgttctctgcaagctgagagggaccagtctcgttgccaacatggcaggaagaaacggttttggaaccaagtgattgaaagactcttccgtaggaaaccatggtctgtcttctctagggccgtttcctggttctcactgcaggtgttctcctatcctaaagtcatgtcacttcaagaacacttctggccgggcgcggtggctcacgcctgtaatcccagcactttgggaggccaaggcggacggatcacgaagtcaggagatcaagaccatcctggctaacatggtgaaacccatctctaccaaaaatacaaaaaaattagccaagcgtggtggcaggcgtctgtagtcccagctactcaggaggccgaggcaggagaatggcgtgaacccgggaggtggagcttgcagtaagcctagattgtgccactgcactccagcctgggagacagagtgagactccgtctcaaaacaaacaaacaaacaaacaaaccaaaaaacacttcctgggtcaggtgtggtggttcacgtctataatcccctataatcccagcactttgggaggccaaggtgggtggatcgcttgaggtcgagagttcaagaccagtctggccaacatagcaagacctcatctctactaaagaaaaaatttaaaaaattagctgggcatggtggtgcacacctgtagtcccagttactcaggaggctgaagcacaagaatcgcttgaacccgggaggtggaggtggcagttagccgagatcacaccactgcactctagcctgagtgacagagcaagactctgtctaaaaaaataaaaaaagaaagctgctttctgaagacagaggagcttccacaactgtctttttccagcatttaaaaatcttccactaaaccatctggtctctcttagcccacaccttctccagaccgaagcaaaactgttagcactttttataagaactatcaagcataagaggttatttaccttgaagggataatcatcaggatatagtcagtgatcgtttattcacatatcaaactaaattcaacagatagctatgaaatataggctgggcacggtgactcaggcctgtaaacccagcactttgggaggccgaggtgggcagatcacctgaggtcaagagttcaagaccagcctggacaacatggcaaaaccccatctctactaaaaaatacaaaaattagccaggcatgatggcattcatctgtaatcccagccactcaggaggctgaggcaggagaattgcttgaacccgggaggcggaggttgcagcaagccgagatcgcgccactgcactctagcctgggcaacggagtgagactccatctcaaaaaaaaaaaaaaaaaaaaaagaataaaatataaagcaatcttaggtgagaagtatttttgaaagtgtgataaatttgaattacaggccggatatgggggctcatgcctataatcccagtactttgagaggctg

SEQ ID NO: 92593 - DNA, 1029 bp, Homo sapiens
atatgggaagctacacgtggttcgacctgttccccaaaccgcagccagagagagattttgagaaggcgaatctgcctgaaatggttctgcggctctccactagcttgggtaaagtctagcttaggtgaagctctctctcccctttgactctgcacacactgtctctcaccaccaacttccagctcatagtcatcagggatcccttgttcatctggatcagagccctccctggactcaggcaaggcaatagcccccacgtgttcacccactgaacttgaacttaattgtaccttcttgttagagtctgctctcactctggattgctggctctaggggctcagggactgtggctctcttgctcatccctggattctcagagctagcacaggatctgatgcataacaggaattgagaatgaatgaatgaatgtgttaggcatgactgtatctgtgggtatattcgacatttgttgagaaattaggctgaaccgttaagcagtctggactgcaaagggccttatatagcacactgaggaattgggatttcattcacagactgcggggagccattgaaagatttttaagcgagtgccatactagatttgcatttttgaataatcactttttgaaagataattatggcacccacgtaaacaggatggattggagagttgtctaggctggagataagaagatttgttgtgccgctgtattcacaaaaaaagagtgagggcctgaattgatgagggatgaggggagaatcaagggcagggagcagctctgtgggtactatgtaagtagaatcatcaggacctggtgactgactagatttgcaggatgagggaggagaaggacttcaggatggtgccaaggtttctggttggacaactagatgaggaagaagagcaaattaaatcacagaagcatgctgcaaatgatcagttgactttgggttggcactcgctggggtctcaatcaaagaaaaccatgttttctacttcttctggttagcctttttgagcaaagaagc

SEQ ID NO: 92594 - DNA, 1035 bp, Homo sapiens
ggggcacaaagggggcattgatttgctggcaatcctgccatggaatcccttggtcacggcttttccatgccctgtctccagcatactcagactgatccagtgtgcccaaccagccgtttccacaggtctggcccggccagggaccttcttgccacattctgggctctgcccactggagagttcaggacaggacccgggtgcagaccggaggcccaggcgcagagttgttatgctcagggccatatggaaaatgtgaacagggcctgaacaaactgcacagctcacttcttggcatttgcaagtgggactcaccaagatgcaatgcagaggcggccagtgaggtcaactttggctgagaaccccgaacagactgggagagtccaggagagaaaggaagggacactggagcaaacataacggggtgtagccctgttttaaaaacaccaacagagaaagcaacctttggaggaaaagtgcatggctccaaatcccaggggggcccactcttgtcgggggtctgatatctgacccctgggctgcccagaagcattcactaaatgctgctctccaaccaagttaaaagaaaacaactcccaaactctttgcaaagagagtcacacacatggccttgcagactttgggaattccgcagaactgagaaaatgaagtctctgtttcgagccatgactaggtctcttatatgactaagggttattacttctgcttagaggcaggaaacatccacagctccaaatcctacaggccaaccaaccactctctgtgtggcggttaggcaagcactttcagagtgaatgttgggcacttacagatcccttgggaactttttgctctctgatcacaactctgcaagtggttccccagagatgtgaaagagcaagtgctctaagaaggcgcctgctcacttacaaacccactcacctctaagattcgccccacacattcacagacctggaaagaaattcaaagtccttttttttttttttttttttgagacagagtcttgctctgtcgccc

SEQ ID NO: 92595 - DNA, 1029 bp, Homo sapiens
ggaaaccactggacattctttagcccagggagaacatatccagataagacacaagtggacttctgcaccaactaagagggggccttgcaaaattaagaatgggtcttcgtggaggcggaagagactgagttgactcaagaagataaattattgcatgcactttaaaagctttagagaaacttatttacatacagagtgcttattaaactcttttttgctctttcattaaaacaaaccacaccctctgtcggtactgggttgtgttgttctgagtacttgaaaacaacacatggcattttcttaataactcaaagacaaatactttttattaacacaagttcctttgctcatatagtccaatttactgagattttatcctgtatgtgttttaagtccataagagtgactcagagctggaagttccaatgccctgactctggacaaggatgatacaattatactcagaagtgggctggtcaatgttcaacaatctactctctgaaaaggtgtatgtgtgaacataagtaaatacgtttattttaacttttactgatttaaaaaatgtgtagcacacaatttatgagtaattacaaattacacactactctttagtgtaaattccatatagttaattgattctcacagaatggtttcattgattttggccaaatgctttcattcatagccaatctgtgtctgcaattcaaccacaatttgacaaaataagactataaataaatgcttgattattgcccagctcagcaaagttgctcatgtcattaacaaatgagtgtaggccgggcgcggtggctcacgcctgtaatcccagcactttgggaggccgaggcgggtggatcacgaggtcaggagatcgagaccatcctggctaacaaggtgaaaccccgtctctactaaaaatacaaaaaattagccgggcgcggtggcggcgcctgtagtcccagctactcgggaggctgaggcaggagaatggcgtgaacccgggaagcggagcttgcagtgagccgagat

SEQ ID NO: 92596 - DNA, 8073 bp, Homo sapiens
cggctgtggtccccgcagggtgcccgccggcggagcgcatcctccggcagggggcgagctccgcaccccgctttcctcatgggccggcgcggcccgccgttcaagtggggagcccagaggtgctccgcgccgtgggcggggggcggttggcgcgcacaaggccggactccggcggggcgcacctccacacgcaccctcgcgggcagcgggtcggagtcggggcctcgggccggctgggggcggggcatgggcgcggcgcgcggggcccggaacgccgagacaatgcggcgcgcggcggccaggaacggctcggcgggccggggcgcgcgccgccttccttcctgcgggatccgcttcccggcggcgcggcagcggcgagcgcgccgattggcggcccggtcctcccgccgccccgccccacgcccggccggccgccgcccccggcccggacccgcccctctccgcgggaggcgtcggggcccgcggctgggtggcgggtagttcccgccggctgtgcgcgcccgcctcggggctcgctctgagaggacgcggcggcagcggactcggagccctcggcgcgcaggcgggcggaccggccgagctgcgcggggctgcgcgccgcccctgctccgccgccaggccccgcgcggctcccgcgcccggcgctcccctttgtccgcgggccggagcggcggcggcagcggcggtgtccgagcggcggtcggagcctgctgcggcagttgaggcggcggcgcccctgcggctgtgcgccagcgccctcgcgccgaggcgatgccggaccagatctccgtgtcggaattcgtggccgagacccatgaggactacaaggcgcccacggcctccagcttcaccacccgcacggcgcagtgccggaacactgtggcggccatcgaggaggtgaggcggcctgcgcggcggctccggccgcaggtatcccgcgccccagccccgcccgccgctcccgcatccgcatcccgagaaaactttctttgctccgaagccggacgcggccgggccaaccctgcccgagacagaagccctttgttcccgcctaggtggctcggaggagatgggtgatggccaccttgggcctctttaagacctcccctctctcggcctcgtggccctcgcggggttccgcggcctggtcttttccccgcagcgcggccaactttgtccagagtcggggtccgcggcgagcgggggatcccgctgcccgccgccgcccgccgccgcccggggtctttggtacccggtgcggaccttatcaacttgttcttgaagtggaccggcgggggcagctccgcgctccgagctccccgccgcagcccccgagcgccgcagggcccccaccctcgggtccgcgggtccggggcatcccgggctgcccgggaaggcgtgcccgcctcagccagggcggcctggctgcgctccacccgtgcccggagaaggaactgcgggcaaggtgtgtgagagtcggcgcttctgggtccaagaagcctccaggagccgctccccggttacctgggtctcacctgcttgaacccggaatgccgcccttccccctcaacctggaaaaggcctggttttagtaaagtgctctcaaggtgcaaagtcatcacgcctagctgctaagcagtacgctctccaggtcctggggagaggaacacgtaggaacgaagaagcttggttgaaaattaaagccgtggggaaaggggcagagtctgtgagtccaggggccaccgttggctgtggtttgaggcacatcctcacctgcagtcctccttttccttacccatcaaacgggattagtaatgcatcctttccaggatcagagactgtgtgaagtgcttagcactctgctcggctcagaataggtttacaagtcacacgtgtggcaatagtgaatctgtgattaaatgtctctgggccaggatgtcaggttacagttttaaaattgggtattgcaggtgttttagcagaagacgcctgggctagcaggagtgtgtgtgtgggtgggggggtgggtgtcaccaaagagctttaaatgaagcaatggcgttattttttttttctggtttttttttttttttcccatttgaacaaagcatctgctattaggaattgcttgaaaaaaaatccagaatgttttcccttaatggaaaaattttttctttgtagctgtaaacagtcaataaaagggagtcaaaagtaacattcagcattctgaatcctgttaatataacttgggtagccttccttctctccatttaatttggcggaagagagctgcatgtaaacctttcctatgaattcggtgattccccagatcacttaattctacttttagcagcaaggcttacagatgatgccttcaaatgaggcagatggggatgggtgaatgaaattttttcctaagtgccagttaaaaagcacggtgttttgagaatacaccattaataatgtttatggaatgattgcaaccaaaaaggtagctgaatatttcttaagggaaggaagcattgtgcatgatgtctttctttagaaagcttgattatgtttaaagttctgttgcttttccccactgcagtttgtcagttaaatattattaacactggcagatgttggaaagccaagcaaacaagaattgctattaaaattggcatacctttctctgattaattttagtttacagtgtataattccaaagctctttttgtatgctgtgcaggagattaccctagagctcagttactgagcagattacaaagagactggatttggtcatttcattaaattgcaagcttgcttcatgctgccgtctaagcccaagaattggttcaagtctcaaaatggaaaaattaaaatcatttcaggtttatttcactttaagcaaatctacatacatgctatgatgatggtatgtgtgagcttggttttataactaaatttgaaagttgttcactttctgaggtaaatcaatgtggatttctttaaataatgctctttcccaggtgtctaatgttcgtgtctattaccaaaacttgttctatgtatggtttaataacaattgatgtgtacagtattttggttttaaacaaaaatcttctcatactgagacgaaacatgagagggtatcatgacataaagttactcatttaacaaataaataaaatttgcaagctcttggtcttatgtttaaacaaatgaatcacggaactagcaaactaattttatatttatttatttatttgttacggagttttgctcttgttgcccaggctggagtgcaatggcacaatcttggctcactgcatcctctgcctcccaggttcaagcgattctcctgcctcagcctcccaagtagctgggattacaggcatgcgccaccatgcacagctaattttttgtatttagtagagatggggtttcaccatgttggtcaggctggtctcgaactcctgacctcaggtgatccacctgcctcagcctcccacagtgctgggattacaggcgtgagccaccacacccggccagcaaactaattttaaactgattaacctttttgaatctgttatttccaatgtaggttctatctgccaaagaatcattttacaattaaaatgtgctgttttgatttgcatacttgttgctggaatattattatagtaactgttgggcccttatcctgtactatgaaactcacaggtattgaattcagtccttatctctgctttataggcgaggaaattgaggctcagagaggttaagtaatttgccaaaggttatagagctctgaagtggactttgaacttggctcctgctgttttcagaaaccatgctgcttcctgttacttttcttaatgccgaattctctaaattactcctttgtcagattgacctgggttcaagttcaggctctacagcttgccagctgagtgaacttgagtgagatgcctaacattttcttattttcctcagctttaaagtctggttaataatacctatcaacttcagaggattgtggtgagggtttaggaagatagtacatagcacagaagctgccagacaattagttaccagattatatagttagtgagtccacaggccccagtgagggcttttggagtgaggatgggatttacatggggggaagtgtcagggaaatggatgaatggctgaatgggtgagtgaatgaaacactaccgtgtatctgttaacccatgtgtttttttttttgagatggagtctcgctctgtcgcccaggctggagtgcagtggctcgatccccactcactgcaagccccgcctcccaggttcatgccattctcctgcctcagcctcccgagtagctgggactacaggtgcccgccaccatgcccggctaattttctgtatttttagtagagatggggtttcaccgtgttagccaggatggtcgatggtctagatctcctgaccttgtgatccgcccgccttggcctcccaaagtgctgggattacaggtgacccatgtgtattttttaaaagtttgttgtcaggccaggtgcggtggctcacgcctgtaatcccagcagtttgggaggccaaggcgggcagatcacttggggtcaggagttcgaaaccagcctgaccaacatggagaaaccctgtctctactaaaaatacaaaattagctgggtgtggtggcgcatgcctgtaatcccagctacttgggaggctgaggcaggagaatcacttgaacccaagaggtagaggttgcggtgagtcgagatcgtgccattgcactccagcctgggcaacaagagtgaaactgcgtctcaaaaaaaaaaaaaaaagtttgttgtcctggcagctggtgagagcatacctgtattttataatttttcacttgaccaccttctctggttcaagtcatcattttgtacaattttagcaaacttagcaaagtctggtgctgcaaccagagtctgccctgtgcttttggaaataatggaaaaaataagcagttgtggcagaaatttgaaaagtaagggttttttgttccttttttttcttctttttttttcgtttcttcgagcctctgggcactttgaaatattctcaaaatagggaaaaattgtatacatatttggaatattcatgtttttagttagaccctcctttatagcaccatccattctgccttacgtatttggcattgatgtagttttaaaaataaatttgatgttgacttgtaagtattaaaatttaatctacttccttccggggccataattctctactttgttgtccttggttaccttggcaatcccattgctgtcataagcacagggttctaactgcaggggtggggtgagcatctgggcctgcaggctcccaggggccctgccgtccatgggaccagacccctcctagcagcaacagtgggaaccagggctacgtgctttttggcaagaatgtgattctgaatgttagccctttgtgacttgtttgaaaaacagttcctccaagtccccagaacagattattgctgtcttcagaaggacatcaccttcttgcccagagcattcatgtttttggaagtgagccttgatgggtcaaacagggccaccttttaaactgtgttctgaaatttgaatttcagaaaattttgaatcacttaaggaagcagccattttctcttcatatgtgagccttcctccctgccccctggtgaatgctgaattcagtttctttcttaggctcaagagtagaagtactgatgccactcctcacgggttccaggtcctgccatgcactcaggattcctgagtccttcagtgtgctgggctgtgtgtgaggtggcaggaatagaacaccaagaagaatatgtcctctctttggagggacctacagtccagcaagaggaacagaatcctgtaaacaaatcagtgcagtaaaatctgaggaccacatctgtaggaatgcttggagtcctgtggatgtgcaagggtgcaggtggtcccagggcgtggggctgtggtgagggagggccttatatgatgtcgtaccgttgagtcttgaagtccaggcagttacctgtgggttaccaaatgctaaggcactaagctggttcattctggtcttctgtacctgcctccctgccttaggtaaatattgatctactcctgaggtggtggccagctcggcgtctgcggtaggattttcacagtcacctggtctctagagggctgctcagaccaagaatttggggtgatcctcaattcttcccatgcaccccacgtttccaggcaccggtgccttcctttgtggagcatatacatgcattccaggcccgcactgtctgatgaggcagcctaagacaaatccagctctcagccgccacattgcaagtactcagtagccacacgtggctggtggctaccatattggctcagcaaccaccgggagagccatcacctggaaacttgctgaaatgcagagccccgggttccacccaggacaatttttacagcatctccacgtacaccacaggcacgtgagagcttgcgaagcactgttcgagacggaaccccggctgcacactggagttgcttgggcgtttgtgaagcagagctgcctggctccactccctaaaattctgacttaaattagtctgggtggggcttcgagccttggcattttttaaagcctcctcccaaatagggttgataatcactgataaacagacagttacgtaacaaccttaggcagttgatacgtgctgtaaaggaaagtcatgcataacatggggatagaaagtggttctggagatcaggaaaccgaaatcaggaaaagcctctctgcagaggtgacatttgagcaggctggaatgcagagaggaagccagccacagaagatgtgggaatagaacagcttgggaaaaggccctgaaatgccaatgggcgggatcatggaaggactgaaggaaggtcagggtgtgtggggaggagtgggcgaggaagagaaggatgagagacgggcagaggggtgggcagtgccaggtcacagagggccttgtccatcttggggaaggaatttggattttgttctagtgtgatgggaagctgttgaagggttttgagcagggaataacatggtccgatatccattttaaagacttcactgtggttctagggaaaacagactagcagggcatgaaaggaaagagggagaccagttgtggggtgaggggctattgcagtcatctaggcaagaggtcttggatgaggaggtagcagggggggtggtggtaagtggcctgattgaggtccattgtacaagaagaggggtccaaacctactgatggattgtcattattgtgtgctagtggcatagaggtagacccaatagaactcctgccccaaacagggcaacagccaagctcagttcatccaagccccctgaacagaccttccagcatccccatggtgaagctgttgctgtctagagctacttagtgtcagaatccaggccagctctgtgctgcttgatgtgactggttataggacttgtgttgggaccagttccagggtcaatcaaggaaagattgaagcatagctgcatagactggggcccagggaaagagagaagcatggctgcatagactgagactgagggatctgctcatgcgaccctctgctgtttctatgcagactacagcaggtgatacttatgggcattgtcagatgcctgggatgctatccccatttcagctccccaaacactcctctttctttccctactaaagagaggtgacgttccgtgatatgaacctacctcctttgcttacgccttttctgtgtaatgtggcctccaagtggattgctagggcccttccaggtactttttttcttttctttttcttttttattttgtttgaggtggagtcttgctcggttacccaggctggagtgcagtggtgcgatctcggttcactgcaacctctgcctctcgagttcaagggggattctcctgcctcagcctcctgagcagctgggattacaggtg

SEQ ID NO: 92597 - DNA, 1431 bp, Homo sapiens
ttatgtgtggtatttgtgtatctaaacatagaaaagacagtaaaaatccctcttataatcttatgagaggtcgtctgtgtggttcattgttgactgaaatgtcactatgtggagcacgactgtatattgaaattcagttaggagaatattttaaaaatttttaccatgctcataatgcttctttactaaagcatttaataacaagatttactggtgggtctaacaaataccttaattttgaggtattgatgaatataaacaatacgagatatttctaataaagataatgtaatgttcatatcttttattgcaagtattgataatattaccatgtgttgcttacatttgtaattgaaagatacgataaatttcagttagaccctaatgaaaatacagataattttttttttccaatccaagtttatggaccccctggattcagacagagaattccaggcttgatggtaagatttgtttagctagttttttttttttttttggagtgatggattctttaaccactctgtttgttaaatataattattatatttcataattattatactgtccttgccatgaattggttctaagagtctagctgagaagagttgcaccctaggccagtgttagaattatgaggcgctaaaggtgtttagaagcgctcttggcggggagccatccactgtggttttacatccgtggggtgccctctgttctttcagggttatggcttggcagcttctcatctgatcccacaggtcagttcatatacttgtgcatgcctcaagagttcagcagagctgcacattggaccttctgagtcctgtaattaggattctgagctgggtaggtcctacaacccagctctcctatttgtgcctttcttgtttgtgtcacacggcatgtactgcctttgactctgcagggcaagttccattgtgaagcaccagaagattcatgggcaccacctacccagaattttaagggagactttgcagtgtgtgttattttcagtgagggtatggatttgaaatgctgctgctgttgcaagagtgtgttggggatatccagagtgtgggtgaagtcaatgtcagttcatattttttttttttttttttttctgagacagggtctggctctgttgcccaggcttgagtgcagtggtgtgatcttggctcaccacagccttgacctcctgggctcaagcgatcctcctgcctcagcctcctgtgtagctgggactacaggtgtgccccaccatgcctgtttaatttttttttttttttttttttttttgagacggtgtctcactctgtcacccaggctggactgcagtggtgccatctcagctcactgcaatctctgcctcccaggttcaagtgattcttgtgcctcagcctcctgagtagctgggattacaggtgccaacca

SEQ ID NO: 92598 - DNA, 1294 bp, Homo sapiens
attccatagttctttgtattcatatatactggatgtgaaaagtccctggaataaattacaggaacaaaaatcagccaggaatggctagttgatagtcctgaaaagacaacatcattgctgaatcatatcttcaagttgaattatttatttttgaaaaaacctttctatagcatcctgagaaacttatttcttattgttgttgcttttttaaaaaaaaattgagatagaattcacataccatagaattcacttaccataaaattcaccattttaaagtgtccaactaagaggtttttagtgtactcacaaagttgtgtagccatcaccactatttaattccagatcattttcatcaccaaaaagaaaccccatacccattaggagtcattccctagtcacctgtacccgagtccttggcagtcactcatctactttctgtctctatggatttgcctattctggttgtttcatatatggaatcaaacaatatgtggccttttgtgtctggcttcctttatgtagcctaatgtttttaagattcatccaaatcataacatggatttgtactttatttctttttatggctgaataatattctatcaaatgtgtatgatacattttgtttattcattcatcagttgatggacatttgggttgcctccacttttaggctattatgaataatcctgtgaatattcttgtataaatttttgtgtagacatatgttttcacttctcttgggtatatacctaggagtggaattgctaagtcactttaactttttaaacttaaactttttaaagtcagtttaactttttgaggagctgccaaactgtttgccaaagaggctgcaccacttgacattcttaccagccatgtgtaagggttctgatttctccacatccttgacaacacttgttatgtttgtcttttttattacacccatcttagtgggtgtgaagtggtgggtttgatttgtgtttctctgatggatgactaatgattttgagtgttgttttatatgcccatggctgtgtgtatcttctttggagaactatctattcaaatcctttgccatgtttatattggattatttgtctttttattgttgagttgtaatctgaacattagacccagatcagatatataatttgcaagtaataatttccattttgtagattgttttttcactcatttgatggtgtccttcaaaggacaaattttttaattttgatgacatccagaatagtcatttttcctttggttgcataatacagtcacaaagatttacacc

SEQ ID NO: 92599 - DNA, 1993 bp, Homo sapiens
cctcagcctcccgagtagctgggactacaggtgcccgccaccacgcctggctaatttttttttttttgtatttttagcagagatggggtttcaccatggtcttgatctcctgatctcgtgatctgcccgcctcggcctcccaaagtgctgggattagaggcgtgagccaccgcgctggcctattgctttttcttatctgattgctggatcagttcttaatcatctttaaattcccaatgatttgcacagaataggtgctcagtaactttattgatgaacttcggtattaaaaatcagtttttatgtaagctgcagtttcttgtatttaatttgttttattctttatttggcctctgggcatgttgagaaaataggaagatttgcttgcttggtctttagttgcaaaggaagttagtggaaatgtttttgcatttgtaaatgggttttagatatttgccttgtctggccacggtgcttggtagtcactcaggaggcttagagccaggcctcgtgtgttctctgcaaccgcaaaccctttccaagctgctgtttctgctggtgagtgtggctggtgttttggttgctttctatcaacattgccttgatttggtccccacaggagactgctcacttcttgacaaaaggtaattattgagattcctggttttcttctcaccttgtaaattctcttgtttttgttttttggcaaataggaatgaggtgtgtttactactggagcatcgggctgtcagaacccgtagctttggtttgccttggtcgcagcctgccaggttgcatacttttgatttggaagaggtgccggtgggtgtgttcgctagcaggaatcacccacagtaaaaatcatgggtaggagaaatggccgttcaccttttcccatcttccttccttccattgtctacactcctggtcccaccttttccttggggactgggatgcttatgctggaacctaatcagtgtccaaagcttaaaattctcctctcctcctcacttttttcctctttgttttctcttgactttcattgccttggtctatttccagaccctccaaggcctgtgttttctctttaaaagatcctgttccatccagaggagactcaagagtcccactttaatttgggattttaggcagaggccttcctgcatctctcaagtcacacttgcaagcgactgctttggtgatgacatttaaagttggcctcctttcctaccactctgactcccctcaattttctagaactgggtttattgttctatattttaaaattgatttattatcttctatagcaatgttggaaggagcttaattttggaagtgcacagttctctttatggtcaaagcgaagtaaaggagatttgattgatcttatgacaaaattgctttagtcatagctgataggaaatctcttaagggccctgttttatttgctcttttaatttatgaaccttcttggatccttcaagcatctgtatactaagccagtaaggccttatctggaacatgcaggcttcatttttgcccctaatatgccatgaaatgctatagggttctgatgctttgttagattttggtgtaaattagggagtaacagtgtcagcaaatgtgtatttcagaaatttgttaatttttttttccaaaggaaaatgtactattagctggaataacctggcagccatagggcgtacattagacctggaagtaaacaaaatgacccccaatgaagtagaaagtaagctactataaattatagcccattttgtttccctgtaggtcagggccatgtcatcctcaggcttccagaaaagaccatgttgtgaaataggaacaacagagacccagtgccctacagctaaggccaatgggagggaggggaagagaggagttagaccagcttagaagggtgggggcccccttctactctggaatccttgcaggtctcactaagccacagcagagcatgtttattgatgtt

SEQ ID NO: 92600 - DNA, 1132 bp, Homo sapiens
acggggctgggcacacagagcactggagggaattggttgagtaagtgatggagtagttgatagcaaagggagactggagagagcattctgcagggggacaaagtgcctgagcctaagagggggagacaggctgtctggagaacatgaagcaagtgcctggccctggaggtgtgtgcccctcctgtcccctgtaaattgtgggtgggccaggctgttgggggcatttgtgggcctggagtgatgctgatttctgcagccctggcggttgtcagtgtgggctggggtagagatgtgtgtttgtgtatggagcaaggaaggtcctagccttgctcaagaggtaaagaagctgctggttgagaacagcttcatgaattctgcaagaagagatgatgatgtttgcttcttttacatactgcattaaaggtcccagacactggggcatttgctgatgtcagtaaagagggagtcctggatttctaggcactcacagtttcagaataaacacatatgtaaacagctgattaccatatggtgtgataaatgtgtcaggatacagaggcagttgctattggcaacaccaaatcagtcataaccttcaggagtgaacagggcttgtttgctcagggtctggccagggacccagaggaccagtgttggggacccagaggggctgcgtgggcctgctgccactgcgagcctgtgttacaagactgagcagtgcagccgtgactctggcaggcgagtttcccaagccgaggtttctggaagccacagcctgagcccagggcctggaacctgcaggcaaaaactgtgctgagactgattccccagtggtcagccccacagctggactgcaagctgctttccctgggcagactcagcctcctgcaggaggggtgtgggagggaaggagcagtatctgtgtgcagacctgggttcccccagaactgagatgctggatgaggtgcctgcatcccctgagctgcttggcgaggaggacggtccatgttttccatcacagctgggagtaagagcagatatgtgcaaggcaaggacgttgtttcaccttttgaaggaaggttgttaggaaaacgcctgcattttctaatcactggagaagcccttttaagca

SEQ ID NO: 92601 - DNA, 1960 bp, Homo sapiens
ctcctgcacagcagcgggcctgtctgtctgcctggcccttgggtgtccctggcatctgcatgctgtgttcccatggtccttctgctagttggagcccttgtgccatgccttcctttggagactctcctctctgtgccgtctcgcatgccatccttgaggttttagctctgtcacctggcagcctggcccttccctgcagcaggtgaggactgagagctgggctgtgcccctcccacccacttgacccagcggacactttgggaagtggcaaccataagtctgcctggcttgctccagttgcccatcttgtcctgtgagtgaagctcctgcttccatctctcttgatctggccccttctctccattcctccagctgcagtgggtgcccctgtcatttgtcagccagagcattcaacagcctctgctcccactgaggtcatggtgattgtcttaaagatttgctctttagcttctcagctgaagacacgttggtggcttccctgaccttttggaaagtaaccagactctgggtccttctcctttgttgacctggcccctgcctccctcccaccccatctcatccatgcctgtcctctgtgtcaacacgcctcactgccctgcgcccgatccttttacacaggtggtccctctgtttgtagagtcgccctgctcttcgtatctccctgcctgttctgtgaagttcagcccagtgccccttccttggaggccacattagagggccctcctctgctggctttgtgcccccgtacccctttcgcagctgactgtccacattatactgtctgtatctgttatttactgtctgtctttgacaaactatgatcttggaagtgcagagaacttgtctgatttgtttaaccacctcacttagcacataacttgtcatatttttaatttattttctatctccccttctccccattagatcataagcttcctgggggcagggatttttgactcttacttagtgatgcatcctcagcacccagaattgcactggacacatcatatatgtttaatatgtgtttgttgaatgaataaaactgacaggcaactacagcttagattgcagggagtgagacatgctgttgccggagctctggtgtcattggttcatagaaagcttgtttctctggccatggggacttgattcttagagggtaatggttcgaaagttgaattagtgagtgtaaatccttaaaaaagtaaaaatatgtttgtgcccttgtacagaggggctgccttgcccttctggaagaaggaattccacgttagacgtgttcccagctgcagttttgttctgtatctattgccagcaggaatccaaggatttcctttattatttccaaattgctgcctcttaggaatggagaatgctgccagtctgtgctctgtgttttttttgctcagtgggaccaaagtagttttgtggtagagagatacagagatacggctttgagacagtttgagtcatctaattactgtccaggagggctgggaggttaaccctggtggttgctttggtgatagtgatcgatgtctgtgtgacaattataatgaaggctggtattatgccgggactttgaagagtctatcagatagtgaaggaattgcgaagccgtactatgttgaggtctccagaataaacatcctcagaatggaaggtccagatgagaaggttaccttgatgagaggcctttatgctttttgtgctattttcctttatgggctctggtagttctttagtgttttataatctcttttcagagaaagctttttgtaaattcttcagattttactttttaagtaacacttacaaaagttgtatggtggcttgggaccaatacactttgcaggaaatgcagagatggataagaaatggttcattcccttcaggacctctcgttatagcttagcctatgtagtgattagagcatctg

SEQ ID NO: 92602 - DNA, 1552 bp, Homo sapiens
tgtttcttcttttgatttgcagagcagttgtcttgaggaaaaccagtgagatgatcccatctcttcccatgattttgagagtatgatctctgtcccaattcagaagagccctgaggtgaggtaaagatgttagaggtgagtggcattctgtgtctgacctgtggctccagtgtgtggatccgtgggctggcgtgtctcacatgtgtggactggggtttccctcttccacagggaggtggtcagtgtgtgggaggagccatggctctggcctccgactgctggggtttgaatttagggtgagcacttactaacactgttagctgacccgctacctactgatcttcacacggatgagcttattgatggtgcacacagatgacaggtttagattgtatgctggttccttgtatttgttctgtttttaaaacctcagctcctctagtctttggtagacactcttatgttatatcttgggcaacttagttcctctttctggagcctcagtttccccatctgtaacaccagagagctggacttaggggaaccgcttgatatttgacaatactccaggcttttgtaaacaaattgtccacagctttgctgagctacagccacatccgcttgaaaaagcattgtcttaccagcctgtgcagaatccagatcactttcatccaccttcccatgggggctgctccatcccttgtcttactggaaatgtctttctcaagggtcttttctggtgtacaggtctccctggagatggaaaaccatagcactggtttaagtacagtgttttgtttgcatggggaggagaggctgaggcaacagcctgtgagttcaggagtaataaggtgtttgtttccctttttggccagtttttttttggtggcataatttacatacaatgaaatttaccctaagagtacactttgatgaatcttacaaatgtacagttgtgtaatccccaccattatgacctaaaacaccccgaaagcttccctcttgctaacctgactgacttggtggttctggtggcttttttgtagattgcctggcatttctacatagatgattttgtcttctgtgaacgctgtttgcctccttccttcctgatctgtttgcctgctcctgctttctcttgctgtactgtgttccctgggcctcccgcagcctggaggggtagagaaagagtggcctcctgcccatccctcccagcccctctctgtcccgtggcgttagcagcaagcgctttgtagctgcctgttagtgggttgccttctgttcctagtttgctggtttttttgtcatgaatgggtgtttaatttcatcagatgctttttccgcactgactgagatgaccatatggtttcccttttttagcttgttagtgtggtgaattacatttttaacactgcaactactctttggtgtggaagccttatgtgtggggtaagcacagatttggtgtcatcatgttgggatttgaggattagctgttctgcacttcataaggatatagtacattcagttattgacagcagctaggctgtgt

SEQ ID NO: 92603 - DNA, 1053 bp, Homo sapiens
ttcagttccttgctgacactgtcaggagctcttccatcacctagccttgtgccagcacactggtggtgcttggtaaatgtttgttgaataagtgcactaaggtttcactgtaacctctagtgatctgcttctagaagccttttcttctggtagggtcacacctagaggaattggatgctacaaactgtgatagacccagtaccatactctagctgctgtgtctagcttgacagggatgggcacttgcggtgccctcagcctggcttgaagttgacatcttgtattgggcggtgtgtgggctctgttccctgagtcttcatcctgaaactgctggggctgatagctggtcgcgggatcacctttcaaaggaacgcagtccagaggcctttgcttcctcaggatggattcaaggagagaatcctcagctgatcatcattttatcccattttttctgtttcctttactgttccaacttttctttcttttctcacctcctttatggaggaaaattgccgtctggggaagcatgatgctggggaagtaggttttgattgtccgatgattgtcaggtgagactattacacgtgttcagaccattgggtgtaagacattggtgcacattagctcctgctttgatataactgaggcccagtaacaacaaatttttgctcaaaaaaagaggcataagcagcgttgtgtgctttctttattttggcctaccctgcatgatggctttaagtattatcgggagaagaagcatacggattaacaaagatgtgtacttcactttccaagaacaggaatgttttgccctagtgagccttgaagattttttgttttgttttgttttgtttttttgagacggagtcttgctctgtcgcccaggctggagtgcagtggcacaacctcagctcactgcaagctccgcctcccgggttcacgccattctcctgcctcagcctcccaagtagctgggactacaggcacccgccaccacgcccagctaattttttgtatttttagtagagatggggtttcactgtgttagccagg

SEQ ID NO: 92604 - DNA, 1435 bp, Homo sapiens
gcaccactacccccagctaatttttggattttttttttttttttttttttttttagtagagacggggttttaccatgttggtcaggctggtctcgaactcctgaccccaagtgatctacccacctcagcctcccaaagtgctgggattacaggtttgagccaccgtccccggcctataaactaaactttatcagaggtatgtgtgtatagaaaaaaaaaacccagtatatacaggatttggtactgtctggtttcaggcatccactgggagtcttggaatgtattccctgaagataagcggtactacttgttatcagttcaccaagtgatgggcatttgggttctttccagtttttggctattatggataaagcttctatgaacatttgactacaagtctttgtgtaggtagacacgttttatattttgacttcgggaaatacctgagagtgcaattgccgtgttgtgtgctaagtgtgtgtttaactttatcaaatgctgccatcccattttccaaagtggctgcatcatttttcatttccactaaccacgtatgagagttccagttccttcacttcctcatcggtgcttggcattatcagccattttactgggtgtgtaatggaatcttattgtggtttaatttatatttccctggtaactaatgaaaccagaatcttggccattgtgtatcttctttgatgttatgtgtctatacttgtaccatgtaagttggttctcagatcatacaatgcatcatgagagtagagattctaatgagtattgaatgtctcttacctgaagggctgttcaggagaaatggactatttaagtaacaataatctgaaacaagattctgaaagatgtgctctgtggaataatattgcacatattcctagaagctgggataaatcattcacacagaaaaaactggaaggatctagcaatttacttaaattctcctatggaattttaaaaagatggcctcatattgccttgttactatggaatggttgatttgatgtaaatgcacactgcagcttaatgaagtagcctctctggttctgtgtgtccttgccgtggattcggcagatggtgtcgtcagagattatggagttcaagccacctagctttacagaggtgaagggaggtgcctgagttgatgaagggagtcgggggcagagctggtgccagcaccatgtggtgctccagaggttcttcaggggtctgcttgacctgtattgcttttatctttaaaatttccaacagttgttaaaaagttttctgaaaagatttatactctgatgtttgcatcacatagcagggaggtgatctcaccagaacattttgaagtcttggtaaacattgggctggggggcacaagatcgtctgatttatttgtatgcgtattggtaggtagcatgctaggcattga

SEQ ID NO: 92605 - DNA, 1115 bp, Homo sapiens
ggggagcacagctctggaagctgccttccgtcctccctccattggctggagctctcccagcatttcatcggttcaaagccaaacacatgattttggacaagtcacttaaactctttgagtcagtttcttctcctttaagctggggaaagaggtggtgatttcacaagtggttgtaaatattgcagtaaagataatggaagtaaaagtgctctgtggagtgtaaattgctgtatggtagttggagttgggccctaggtgtgattttagagtacacacctactgctgccttggtaacttaaaagtatttatctcaaatgctagtgagctgagctgagtggcacagtaggcctttctttccctgggagcactttgggagctttggaggttgcccagtgctgcccccaacctttaacagtgtggccgagtgtaggagggagggggcagagttccttctggctggactgccacatgcaggggagaggccccgctggtggtgtcccaggtgggagaggggcagacctggggttacctcagtcagggtaggtgaggaggggatgggtggacaccccggtggccactcctactcacccctgcacttaagacctggggtttcatgccctgctcctttaaccctcagtgttcaagagagaggccagttggaccagagcgcctcaccccaccatttgccatgtgcccctccccgtggggagtcagaaacacctgagcacaccaggaaaagttttgaaaaacaatgtttttagagacagggtgttgctacgttgcccaggctggactcaaactcctgggctcaagcgatcctcctgcctcagcctcctcagtagctgggaatgataggcgcgtgccatcatgcctgtatgaagttttgaaaaatttaaatgttgatggaaaaaaaaatgtattagtggaaatgaaaggctggtataagctgtaaagtctttttgttcttagagatttttttctcattctaaacattatcagacctgaaaagtatttgtcgtaatgactgagacggtcctggggtaacagcgtcttcttaacggccactttaattggcgtagtttacacctagcctctccgagaactggaggacactg

SEQ ID NO: 92606 - DNA, 1071 bp, Homo sapiens
ggtgggtggatcacttgaggccgggagttcgagaccaacctgcctaacatggtgaaacccccgtctctactaaaaatacagaaattagctgggcgtagtagtgcacacctgtagttccagctactcagaaggctgaggcctgagaatcgcttgaacccaggaggcagaggttgtagtgagtcgagaatgcaccactgtactccagcctgagcaacagagcaagactctatctcaaaaaaaaaaaaaaaaaaaaaaaaagaatgattataaagcctggttttggccagcactccaagcgcgccccgcaggcctgtcccatcgtaacgccctcagaagcttcccctgccctgactgcagccctcagcttgcctcagtttgtagtttgccaacaaggtgtatatccctaaacataaacaatttagtttggcctgtttttgaactttttatactgcatgtattcttttgctcaacatttttgtcaagttcacttgtgttgtggggtaagtttgttctcttccgttgctgtgtagcattctgttgtacgaatgtccatcatcagtttattcattttaccatcgacatttcggtttatccagttgggggctgttttgaggagtgttaggacagcctgtccatgtcttctgttgtggatgtatatttactctgagtaattttaattttttaagataataccaaaacacgcccttctcatctgtccttaggcacacactttcctcagctgtgacttagctcagacgtctatttgatcttaattcttagcgacacctgctattcttcaggcctggctttattcccacaaggggggaggttcgttattgctctggctttaaacggagcccacaggtcacagtgcaagtctacgcttcccaaaaggcttctggaaatatttgacactgtcattaatgctctctgttactttctgaagagtcgaatgcgtggtgagacaaagctgccatctgaatgtctgtctgactcttcttggcaaagccaccctgggggcacggacctgggtgtgttttgttttttgttttgtctactgtctttcagaaa

SEQ ID NO: 92607 - DNA, 1065 bp, Homo sapiens
gccctcaggcggtacagtggggcccatgaacggaggaagagaagcatggggttggggacattcagaggccactgtgctgcctgggtggctgtagctcttgcagaaggtggcaaggcctgaggaactgaatttgaaatttgaatgaatctttatagaaacattcctctgtggctaccctgttggacagcacaggtgtggaaaatgagtgaacagctttgtggtggtctctcctgtggtggacttcccttacccacagtgtgcaccgtccccactgtccccacacactgtccccgtcccctgtcctggctccagctcagctgagcagcagagattggaagaggcccctcggtaacttgagaggaacctatagaagagtttgggaactccaaacagatgcttttaaagtggtttgaaacagtagttttcctcagaaatatttgggacacatccccctctctggtttttgtgataagttcactctgtaaaacttgtttgacaaactgaaggtcagcttccacctggcccctgagaattaatgaggtctggccaggcggcagctgcagtgcaggccctgctcctgtcttggggtctcttcggttcttgcctttgtttgtgttttttacacataagttcccgtgaaagttgcttttcccccgctctgagctggagtggagttttcgtttggggagcatggtagttgagagcctgggtctggttagaattctcagcctgatgggtagacatctttgcttcctcgagactcaagctttgttattttttgttgctctaagatttcagtatttttttttaaatttttgattattgtgggtacgtggtatatatttttatggggtacatgggatattttgatacaggcatgcagtgcataataatcacattagggtaaatggggcttccatcacctcaaagcatttagccttcttttgtgttacatctcaattatactctcttagttatttttaaatgtacaataaattattgttgacctttgtcaccctgtttctatcaaatactagatcttattcattctgtccacctatattt

SEQ ID NO: 92608 - DNA, 1196 bp, Homo sapiens
aaagacaaacactccatgttttcaattatttgtgggagctaaaaaaaaaaattaaaaccaccccagtcactgagccactgccgaggactcagcagcctcccccttgggccccgtcgcttccctactttccgtaccctctgcccgccgtcttccgcagaccatttccaccgagaaaaagaaattggatcgtatgtccactatccagaacctccactatttaaactcctttgctgatgcaagtaagggtgatgacctgcttcctgctggcactgaggattatatccatataagaattcaacagagaaacggcaggaaggcccttactactgtccaagggatcgctgatgattacaccaaaaagaaaccagtgaaggcgtttaagaagtttgcctgcaatggtactgtaattgagcatccagaatatggagaagtaattcagctacagggtgacaggtgcaagaacatatattatgccagttcctcgtagagcttggactggctaaggacgatcagctgaagattcatggggtttaaatgcttgtggctcactgtagtttaagtgaggatttccttgcaatgagtagaatttcccttctgtcccttgtcacaagtttaaaaacctcacagcttgtataatgtaaccatttggggtccgcttttaacttggactagtgtaactccttcatgaaataaactgaaaagagccataaaaaaaaatgaaaacagggccgggcgcggtggctcacgcctgtaatcccagcactttgggaggccgaggcaggtggatcacgaggtcacgagatcgagactatcctggctaacacggtgaaaccccgtctctactaaaaatacaaaaaaattagccgggcgtagtggcgggcacctgtagtcccagctactcgggaggctgaggcaggagaatggcgtgaacccgggaggcggggcttgcagtgagccgagatcgcgccactgcactccagcctgggcgacggagcgagactccgtctcaaaaaaaaaaaaaaaaaaaaaaaaatgaaaacaattgaactcatggagactgacagtagaaggatggttaccagaggctgggaagggtaggtggggtggaagtggggatggtaaatgggtacaaaaatataggtggacagaatgaataagatctagtatttgatagaaacagggtgacaaaggtcaac

SEQ ID NO: 92609 - DNA, 1053 bp, Homo sapiens
ccaggctggagtgcagtggcgcgatctcggctcactgcaagccccgcctcccgggttcacgccattctcctgcctcagcctcccgagtagctgggactacaggtgcccgccactacgcccggctaatttttttgtatttttagtagagacggggtttcaccgtgttagccaggatagtctcgatctcgtgacctcgtgatccacctgcctcggcctcccaaagtgctgggattacaggcgtgagccaccgcgcccggccctgttttcatttttttttatggctcttttcagtttatttcatgaaggagttacactagtccaagttaaaagcggaccccaaatggttacattatacaagctgtgaggtttttaaacttgtgacaagggacagaagggaaattctactcattgcaaggaaatcctcacttaaactacagtgagccacaagcatttaaaccccatgaatcttcagctgatcgtccttagccagtccaagctctacgaggaactggcataatatatgttcttgcacctgtcaccctgtagctgaattacttctccatattctggatgctcaattacagtaccattgcaggcaaacttcttaaacgccttcactggtttctttttggtgtaatcatcagcgatcccttggacagtagtaagggccttcctgccgtttctctgttgaattcttatatggatataatcctcagtgccagcaggaagcaggtcatcacccttacttgcatcagcaaaggagtttaaatagtggaggttctggatagtggacatacgatccaatttctttttctcggtggaaatggtctgcggaagacggcgggcagagggtacggaaagtagggaagcgacggggcccaagggggaggctgctgagtcctcggcagtggctcagtgactggggtggttttaatttttttttttagctcccacaaataattgaaaacatggagtgtttgtctttctgtacgtggcttatttcccttaacataataacctctatttccatccacatcattgcagctgacagga

SEQ ID NO: 92610 - DNA, 1380 bp, Homo sapiens
gctgctgaccaaaatgaaagaagacctaaatgagaaatatgtgatgcacaggggttagaagagtcaccactgttagtgtcaggcctccccaaactgatctgaagattcaccccaaccccagtcagaattacagcagcggaaattgacaggccttttctaaaactgatacagaaggtggccatccgtctctagcttttttacctggattaagtgtggggcagggagcaataatgatagttttgatttttttgaacacttactgtgtatcttgtgctttctgtacattgtgctaatcttgtcaacaactgattctccttatacaaatgagtaacctgcaaatcagagagttctgggtgttcccaagatgtctgtgcagctggagctcagaccctgatggtcttactgctgtgtcagggttgtgtgcagtgagtggcccactctgtttcaaagccaccatgccttcagtgtgtctgtcacacgggtgacatcttgaagacttcagtgagtcactaagaaatggtacgcccagtttcattgacaagcaccagatttcaaaaagtatcttggaagattttttttttttttactgcgttcacttggactttttgagtttataacttgagggatatttgatattctggtcagactcaaaaatgattttatagtcatatgttgaaaaggttgctcttatcagaaataaaaatgaaataatctgtgtcttatgcaaacactggctgtgtagctgctgctcgtctggaggagagacttgtgtgactcccaaggctggcccagtggctggcagtacagcttataaacagccctgcatttgaagggagaaggcgctagtgcttcggtgtcaggaagctggcctgcaggaatttaacagcacctctgtctaatttgccatgctgacctatattgctgagcgtgtaccacaaacctcattcctatttctaaccacccccaagcgtcgtttgctaaaatgcaaccccactggtgttacttctctgcctaaaactctatagcattttttcatcaccctctttgaagttcgtggaagtcagttccagagcatgggagagagaaggaaggcctctgtgggcttcagaattttagggcaattgggataaagatggttctcttaccacagatccatccaaagattttaatgtgctagtaatgtggattgtgagtggttatcgttcttaaccctttcccaattcatctgtcgatgaaactgtcactgcctcccctgatcaccccactgtgagcctcaggtgagtaaatactgcagagcaccagatgagttccgagctcttgtgcattgcctggactcaggccacctgtcccgaccctccccacctggactcctctgtgccc

SEQ ID NO: 92611 - DNA, 1072 bp, Homo sapiens
aaatggtctccactgtgcagagttgtgcacaacatcacaacattcgtgtcgtgacacacatttgagtagtaatcgtcatgtcatccgtctagggagagtctccaccaggctgctgccatagagaacatatgtctctccttaaacgctcccttcgccgagctgtctgcatggaaggttggaatgtggggtgtcagcaagtgcttttccctctgcctgattcccaagtggcctgtggtctggcctggagcaggggtttggagggtctttgttgggtcagcaaggaggctggggctgggtagccataaggctggtgcaccctgccttcgttctgttatgctggtgacagcacttggtgttcaggttaatggtacatgcacttgactggaaggttgtacattgtcgctgtcttcagctcttagctcttatctaggctaagagctgaagatagcgacaatgtcattagcaaatgaagaaacggtttttgctgtgggaggaagagcactggactcagagtcaggaaacccgagttcttgttccagctctgctgcaaactcactgtgtgaccttgagcaagtcatcaccctctctgagctttggtttccatgtttagactaggtcatctttcaggatccatggaatgaaaggactcagcagtgagtatagcagccctgaggaggtggggacaatgagacctgtgctgccctgtggcgattttgagagttgagagctggatgcagacaggggctttaaaacagagaaagtaggctgggcgtggtggctttgggaggctgaggagggtggatcatgagatcaggagttcaagaccagcctggccaatatggtgaaaccccatctctactaaaaatacaaaaattagccagaagtggtggtgtgcgcctgtagtctcagctactcgggaggctgaggcaggagaatcacttgaacccaggagttggaggttgcagtgagccgagattgcaccactgcactctagtctgggtgacagagtgagattctatctcaaaacaaaaacaaaaacaaaagaaaaacagagaaagtattaacagtggga

SEQ ID NO: 92612 - DNA, 1475 bp, Homo sapiens
ctgcacttgattcagaagaaaatagggataataatagccaactcttagtgctcaggttaaactgaacaaaagacttacaagccacctagtaggcgttgacctttatacgaagtcccttccctttgggtgttcacttagagcaacactgaggtccagtcctcctcttggtttgagggacaccacgaggctgcatagagtcttcagcttctctcctgctgggctttgcattcattgcccagcaccgtgaaggaggacaccacggcccagctcccctcctttgtcatctcttgaaagacccatggctcagaaagcagcgagcgagggagtaagcaggaccatggaggttgcgttcctgtttctgtcatgcagtagacagtgtgtagtgacagatgcctgcctgtggccaccagcccccttcctgaacccaatgaaactaaactgcccatgtcttgaccgctaattttgagatagtttaaaaatagtatgtggtttgaaaggacctatccttcactgttaaccacactctagaattataaatagagtaaaacagaaggaattattgatccatctgtgaaactggattttaaaaatctaaaaattagatacttttgtttgacaaggtaaactttttaacgatgaaaacaaacatcgtgtagtagagtaggagagtggactttggaatcagaaaatttgggtttgaatcccagctctgccactttctgtgtttccttggatgaattatttgatctctttgagccctaattgcctaatagtgttatgagaaataatacatgtcttacgaagtttagaaaaaatatatgtgaagtttgtgctttgaataagtgacgcctgttgctgctgttacttttgttagtgttattggttatgcgccaagtgtggtaaactgagtctctttacctgattctttcattcttcctctgaccttgagagcatctcccagcaggtttttatcctttatgtagctgacgccgcaggcccagcgtcactgtgacttaccaaggtcatacagatatttacaggtggacataggactggaacctagatcttctgagggctcctgaggagctgcgtttgcgggtgtgtgtgtgtgcacatgtatgtttctgtcagaatttgtttgctgaatctggtctcagaaattcatttaatttatctagaactctcaggctctttactggaatgttaaaaaagaaaaaggactcaaacagtgaagtgagttttcttttgtgtctgctagatccccattagaaccctctagtcccccaaatgccactggaggtcaaagacatggtgcttcccccataggatgggtgagcagaccattcataggtcatagggattggctcagggtccaggactgccctccaggaacaaatgttccctcgttttcccacattgtcaggcccagcctagccattggcgttagctgacagtggtctcatttccccgagaag

SEQ ID NO: 92613 - DNA, 1013 bp, Homo sapiens
ctaaggtgggaggatcgcctgagctcaagaagttgaggctgaagtgccctccaacctgggcgacacagtgagaccctgtttcaaaaaaaaagaaaaaaaaattagtacactgaatggtgtatagaaatcggatgccatattgctttaaaagtggtgccattttatcttcctatttaagataattatactaaaaataaaactttcctttgcttgatggtatgaatgaatacataaggtcccaagtccctcttctcgtccttctccttctctgggcctgtaatctagaagcccagagtgtcacagaagccacaggggcccagcagtgggaactggcccttgggttgattcaggggagtggtccaagcctgggaagtgcgaaagtgggtttcgagctcgttttccacttgagggagggaatcttttcaggctcagggctctgagtccgtacttgaaggctcttcctgactgaagtttcgcatcttgagttgactcgcatttgaactgctgtcacggagacttgcttgctcctcgtgtacctgttggttaggaggcttccattccacccaatttaatccatgcggacggtgtgtgtccccactctcctgccttcttgcttcagggagaagaatgggggcaccaaggctcttgcccttcctgttcccttttatctcctttgcctagcaacacccccccaacacacaccccctcacaatcacaccctcactctcacaccctcccacacaccccccgtcacaccctctcatgtccactctcatacactctcacaaccacactcacacaacatgcaatcattcccaatcactcacatccacactccacacaaccacacaaaatcacatccacacacacactcaaccacactcataccccacgcaatcacaaccacacaacacacatcccaatcacacccactcacatccacactctcaccacactcaacacacaccccacgcaatcacacccactcacatccacactcacacaatcacaca

SEQ ID NO: 92614 - DNA, 1063 bp, Homo sapiens
tcacattattttccttgtaagggaaatgtctcaggacgagagacatgatgccaagcatctcagctacaatacgttagcagttattgttcctaaagtaagggaccttgggcaggagtgtgtttgagatggttagaaatcccatttatttgaaccatccatagtcttccatgtagctagagtgaagatttctcctagcaggccaggatagactgtcttattattaggagtttttggcacttcaatatttaattatctgactgtcagataattcatatggccccaaaataaagaaacggttacggaatccaggcgatactaagtgtcgatcatgcactctacgcattgtaaaagatgccaaagaagtagaagaaatcatctcagtcctcagaagctccttttaaactcgtattctgcttacttccatgacatttccttttcattgttcaacagtatctgctgaaggtcaacgaaatcaagattaaaaagggagtagatttacttcagaatctgatcaaatactttcatgcccaatgcaagtaagttcttctctgttatgttatcttaaatgtttgttcatgtgtggcaacttctggtagatctatagatagctcataggaaataaacaccacttagaagtctatagtaaagggaatgaggtgctgactcatgcgacaacacgggtaaacattgagaacacgttcaatgaaggaagccagacacaagaggccatgtactgtatgatcccatttatttggaaggtcaggaataagtacatccacagagacagaaagcaggtgagtgattgccgcagcttggaggaagaaggaaatgggaaatggctgctaacgggtatagggtttctttgtgggatattgaaaatattccagaagtgagtgctaatgattgcacaactttgtgaatttactaaaaatcactttaaaaggatgaattttatggctttatggcttagggattatatcttaattaaaaataaaagcatatatacaacataaaaaatctgtagtaattgccagatatatttatttttggctctttttgtaga

SEQ ID NO: 92615 - DNA, 1732 bp, Homo sapiens
agagagagtgtgtacgctgcctgctcttcaaatcagtcaggcagctttgactttctcaattcacattctggagggtacaacgtggagctcgagcaactcagctgcagagtaagagctcgcagccgtgcgtgtttccacgtgtgggagcgcctctcattcccccaccacacacgcccagtttccgcttctcgcccccaagggcacagctttgcctgctgggtgctgtgccctgctgggtacacgcgggcctctgcacactgctgtgctccgccagggtgaagaggccactgtgtaaaccagattccagggctcaggtttggctgttgacccttggaactacgtagatatgcgttattttgctttttcttctcgctttaagtgttcttaaagaatacttcgtgttcttttatttttatttcatttaaggaaggaattttcatctctacctctttcctggaatatcttgaaaacttgtcttattagtctttgctcctgaacattgaagatcctgtactctagcggaatctagaagtagggcattataacattataaaataaagacagccatggtttggcaaggcatggtggctcatgcctgaaatcccagcactttgggaggccaaggggggcggatcacctgaggtcaggagttcaagaccagcctggccaacatggtgaaacctggtctctactaaaaatacaaaaattagccggatgcggtagtgcacacctgtagtcccggctactcgggagactgaggctggagaatcacttgaacccaagaggcggaggttgcagtgagctgagatcatgctgctgcaccccagcctgggcgacagagcgatttttttttttcaaaaaaaatacaaccatggtttgaaaggtggtgatgaatgttgaattgacttgttctttgagccaatacctgctggaaaccactgtgaccagctgttgctcagtgaacttggaatgcatggtcaagataaggctcagccccggatgctgcagaagcttgcagaggagggaggggcgggtgtcacagacagaccccatcagcagacaccgcattggaatgtggtggcgtgaaggctgcaggaggggccctggcacggtgtgtggggcccagagaagaaaggagctactctgcttggtgggtttgataattgcctctaagtgggtgtattttaaaggatagaaatacaccccttctagcctggtgaggcaggctagaaaatgtttaatagacaacaaaatttgattgggtaatgttgatggtaaaagttctgtgaagcttggaaaagtgttaatgggctcaacttaagaaaattttctggggctatgtagttaggactgtcatagggacagcagccagcggagaaggaatagtgttccttttcttgaagcttctcctgacgccagggctgactgcactttgaaggggcgtctgggtgccaagacacacctcaaggagggtacgggaaggtcagcactttgaaaaatcagagggaggagattttccaggtaggtggatggtgaagattggctgggctattacagagatgaaatctaaatctaaatccaaattcatattgttattccaagtacaccattcatcgtcatgctggaaacagcatcctgacgagaagtctctgagcacttgattccactacggggctcatgctcacgcgctctcactctcgctctctgtctgaccgtagggagaattgccagg

SEQ ID NO: 92616 - DNA, 1499 bp, Homo sapiens
gccccatgagcaccaacgtttcactgtacctcagtcttaattttctgattggttctgttgtgtgtgtgtgtttttaaagatcaaacaggcccaggatgaagaaagaaggcagttgatacagcttcgagatattttgaaatccgcattgcaggttgaacagaaagaggtgaggggatttaattttgaaagattgcagttttcaccccattcttggaggctttgggtctgaagaacatgaagttcatgtcttctaggagctcacagttcactcgggctgtgtcaggcaccagtaaaacatttaatgtattcttgcaatttagttctataaaaccatcttttaaaatatgtttatttcaggaggaagcatttactacatgcatggccttaatggcggtgtataaaccctgtgctctgtcagttgctagataaggagctctcagtggcttcgtcacagagaccatgtgtcatttgtgctatttatcctgtacctggccctgtgtcatttccctaccctgacatacgtggactctgcccctttaggcctaggcacgtagcaggggaccagctggggctctgccagccctgagattgtgttctataaaatatgaggcatgagcttttcttacagctgcctccatcatgacaggcagaaatccttagttctcttacttcccctctttctgtaatgacgtctctgtgtgctaacacgtcagcagggacagtttgtgttgtggggacttgtttttaaaaagccattaaaaagtaagttttaaagataattttactatattttcactacaatgtgggtatcataatgtgaatttagtataaatccatttccttgttaataaaaggaatgtatctaaacatatatctagtgattttagagaaattgctaaactacttgacagcataaagttccctgttggcagtttggtgagctctattttattgtaagttcttgtactataactgaatattgttgtttttctcccaaatgcgtttaccttttgtgaccgaagtctaggagagtaagtagttcagtattttaataaattgcagaattttgcatgttttattcgtgaacatacatatatatattccttttatatattaatggttagtagcattttttattttaacccctcacctttcattgttgtagactttattaaaggctgaagagtttgcataaatattagggaagtggacattttctgggtttacagtttacacttttgctgctgttcctttatgaagatgaagcaggtccctccctccctccctttctctcccctgagtggctgaattctacacatctctctagtccctctgaagccccacctctggagcgctgcctctgatcaccccagcccacagtgatctgagttcacagagcacatcctgtttgaatgccccatttgaatcacagcctattcctctttttgagtgttggttgtgccttaagtgcacagatggcttttcaccagctggacctc

SEQ ID NO: 92617 - DNA, 1019 bp, Homo sapiens
gagacgctgtacaggtgagcagtatttctccacattccttccacagcattgttctcagcaacgttgaaagctggatttgctctaaattttggtgccgatgttccgcccttctgagaaaatgtggaagctgggaccatcctcatcccatgaatgcgtgtgtgccctagtttatccagaggctcaagtgctgtgtgaactttctgtggaaatgagttcatttctcccctcctgggctctgcttgtttcagggttggttgtcagttcagtaatggagagtgcctccgcatgttactgattgctcacgtggagttttttggtttttcttttttggcagagtttaaaaagtcagtgctagacactcatgtgcatgggttggaagacttattgtgaagataacagtactcccctaattgatctacacattcagtgcagtccccatcagaaatcccagctgcctttgtgcagaaattgacaagctgatcctgaagttcatgtggaaacgcaaaggacccagaatcgtcaaaacaatcctgaaaaagaagaacaaagttggaggattcacatttcctgatttctgaacttaccacaaagctgtaataatcaagacagtgtggtactggcataaggagagacatatagaccaatgaaatagagctgagagtccagaaataaatccttacatttagagatgatttatttttaacaagggtgccaaggcaatggagaaggagtagtcttttcaacaaattgtgctggggcagctggatagccacaagcaaagaaggaacttggtcccttacctcacaccataatcacaattaattcaaaatgagtcaaagagctaaatgagagctgagactataaacctcttggaagagatttataagtataaatcttcatgaccttggattaggcaatagtttcttagatagcacccttacagtacaagtgacaaatgaaacagtaggtaaatgggacttcattaaaattaaaaagttttgtgcttcagaatctttttt

SEQ ID NO: 92618 - DNA, 1047 bp, Homo sapiens
agcccttacacgtgtgggaatgcagtcctctgtgaatctggccacacacaagctctgtggccaactgatatttaccaagatcctgccagtgtctttgctgcagcctgatgcattgaaacatcttcaggaaggacttgtagcctgtgatgcccagacaggtttgctgagcccagttgggggcagtgtcgtgagtttgctagagtccattgtcatctttgaaaagagctctcatccctcctccttccctgcttgtcttccagtgggtaaaatgaattccagtcctgcaaattcttcatcctcagtgagttttcaaaaggtgccttcctatgagtatctgtagtgaaaatggtttgtgcaggggtatgtgggtttgggttgaaaactggccagataccccagagagtcatcacaggaaacctggctgcagtataagccgtgatttgatgaacatcctgagaaggtgagggacatggggtcaagacctgattctggctgattgaggagcatctgtcttcacccctctcagattcctcctctacttcctcaccagcctcatgggatgagtatcaccaagatgcttttgaactctcaagatgcttttgaactgcctgggtgggccaggcagtggctcatgcctgtaatgcaagcactttgggaggccaaggtgggaggattgcttgaggtcaggagttcgagaccagactgggcaacatagcaagacctacaaaaaatttaaaaatagtgcagtatggtgacatgtgcctttggtcccagctactcagggagctgagatgggaggatcgcttgagttcaggaggttgaggttgcagtgagttgtgttcgtgccattgcactccagcttggacaacacagcaagactgtctaaaaaaaaaaaaagacatttgggcagttggggaagtcaagtggaggcacatgcattgaggcagtgagggtgatattttctgtgtgcatctgccaggcactccatggtcacccattcctcctcttcctcatctggtcagttcatcttggaatctgcccagagaa

SEQ ID NO: 92619 - DNA, 1066 bp, Homo sapiens
gccaccagcacctgagtgctccgatcgccccctctgtctcctcctgctcttctccctcacggctgaagctctggaagccgtccgcttatttgtagcatctttaaagagagtgtagtggaggggattcttgcttgaagtttttcctcagaggtttgcctcctgcttgtgcagtttttacacgtcagaatgcagaaattggccaggtgcggtggcccacgcctgtcatctcagtactttgggaggctgaggtgggaagatcgcttgagcctgggagattgaggctgcagcgagctgtgcactgcacgtttgcaccactccactccaacctgggcagcagagtgagactccgtctcaaaaaaaaaaaaaaaagaaaaagaaaaagatgccatggtgttgtagaaagtggtcgggccagaagtccaggaaccaagttctgctgctggctatgcttgttttttgcagcttagcctctctaggcttcagccctcacccagtcacttaccaagagttgttctaagaaccaacgtgctttcaggagtaaacaccactacagagaggtggcgtgtccactcacttttaggagcacagatgttcgttgtgtttccctaagaagagaattggtacttgtcatcattctgccatctgcaaaagctggattcccctgcccctgcttttctttattaaatataattttattttttgctttggttttagactgcttttagacagagaatatccatatatccctcccctagctttcccttctgttaacatcttaatacagttatccagtagtccgtggtacatgttatccaatcatatttatgtagttatcaaaaccaggaaacattggtttgatgctattaactaaaaatcttactcagattttaccagttttcccccaaatgtccttttttctgttccagaattctatccagaaccccatgttacatttagttgtgattttatcctggtctcttgcagtctgtatcggttctgtagtctcacttgtttttcatgatgccttcttaaagagtattgacctgttttttggtcagactcccct

SEQ ID NO: 92620 - DNA, 1047 bp, Homo sapiens
tggtgggactttgggctggactcagccgttgtttgtggaatttaacacagcgttgctcttgtttttctagatggatgtctgtgctgcaaaatagcaaagaagaagctttaaacaatgcatttaagggggatgacaatactggagaaaataacatcgtccaagaactgacaaaggagatcatctcagaagtgcagaggatgacgggcaatgacgtctgctgtgactgtggggcgccaggtgacccagggaccccacccgaccctgggctctaggacatttcaatcccattctgattcacagaatccgttcattgattttcactttcatttcaaacacgaaattaagtgcagctcagcctgagttcatcccattacacaaatgcttaatgaactgtgcagaccgcggcaggggagaggggcgggaagatgtttgcctgccgggccccagagcaggactgagtaaagagggtttgacagagctgcaaagtttgaaatgctttttgagaaatgaaaactgaagggtacagtgagagtgaactcaaggtcatgtgggctgagaggctgcatgtggatgggcttccttgcttggaatctgctctcttctccctttatcctactttgcagaacttctgaagtagctttaagccgctgtctggctctgtgaccctgggagagccacttgctttgttaaacatcgattttcctgtctgtaaagtgaagggacaggaccctttcagctgacacattctgtgaaataagattttatttttacattttgataaagcatattaggggctttatagtaggatgtgatttaaggaatttgcttattctaattgagacacaatggtggggagtgggggtcggggactacacaggtgcattttctgaacatttataaaatgaaaaagatggaggcttggctagaatggttaatccccttttcattcctctaattctatgacaatttttcttaaaaaaccaaacacaaccaaaataagagtggacagttgagaattacctttaggttcccatgaccctgaagact

SEQ ID NO: 92621 - DNA, 1140 bp, Homo sapiens
tagctggatgttgacagtaaacagtaagtagatagtgattggcattgattttaatgttgaatttaaaagtttacatgtagggaatttaacgtcaagagcaatagtcttgacagaaaatcaatagttgtggaccatgttcctctcaaggggccatcagtcttattgatgacttcgaatccagtgtgtctgaacttcgaatgcattttgaactctcttgtcaaacctttccagtctttctaggaattcctttatggtcttgaaagacagagttgggagaaactacagtggatcctggcagcctagttagtaacatccttagttacttacagtttaaaactaagctagactcacttaaaatgtaaaactaaggaactccaaacagtgccttcctggttacatacagcaattattgttcatgtaataatgcacgtaacctacagcttagagaggtgcacaggtgtacatgtggtatctcttggataactgatgatggcatagattggaggttgtcatggtacattttcaaagaagcacaaagtacttttcagtaaacactggtgaactatggcagttgtttcttttactgattttcttaaaacaatggaaagtgttaagtgattcaagatgatgtaataattgtttattttgtactatgtattttgcaggccactttatatatactaggctcatttgatctccagtaacaacctgatgaccttggtatattatccccattttacagaggaggaaactgaggcttagaatgtttcagtatgcctagggttatgaagcttttaaggtgacagatctggggtgtgggcctctttaatctgataccagacctcacacttaaacctttgacgagcctgggacacaaattggcattttagtgggttgtcttgctagatgataaacatttaaacatctctactgtccttccctatcaccgtccccaacaaatgtttaacagtcaactctggagaaaaaagaaccctggtttgcaacctgcctgttctcatggtgtaaatactcccacaatggccaatttcaagctacctaagtgaattactcaatgtgaagttggaaaaagatgttcattatatagtacattcactatgcaaacacagtggatgtaaataa

SEQ ID NO: 92622 - DNA, 1043 bp, Homo sapiens
ccattttactgatgaaaactctgccgctcagggaaactgacttgcctgtggtcacacagccggtaatggagctgtgatttgaacctgagtcttagctttcctggctcagtgccgcttcactctaccagaactacctcatagctggcataagtaaaggttgtttgaggatgtgaaatagattcactttggttgaggcacaggtcattgggaggagtgggtaaggatggaaattcacattggaccaagttactggttctccctgtctctgtctgtactctatccagagcgcgttttatgacaatgcgtctctgtaataggcatgccgcttcttatctttaattttatgggtacctttgggctttgggttttgtccatcttcattaaaggcaaaccactttattgctctatttcttagtggccattaaataaatcatcagatggggatgggtaatgtgtagcagtagaatgtattaataattgagtatcctgaaatagactttcatttttgcagctcgccaagaatattgggaatgcaggctttaatgagatcatggaatgttgcctaccagctgaggactcagtcaaacccaacccaggcagcgacatgtaagtatgggactggctattctcatttgctgagtaaaggtttgcctttgcccgagccccgggaggcaggggaataagaagttttgggtgcatccatcgttgcttctttagggaataaatcagcctatgttgggttttcttagtcactttaaccttttgggtgaccaaatagaaatttttttaggaagaagccaaaagcaggcaggtttcgcagatgctgtgcgtgtgtgcagcgggtatgtagagagcctcactcgccactggtgggtggaagaccctggacttttcacctgtgctgtctgttctgttgagtcacttccccgtcttggtctctctgcataatcctgagccaccgagatggctggttgtggtagatatgtgattatgtagcgtccttcttgccaacgtccttgcctccttgcaaatgtggaatgtgt

SEQ ID NO: 92623 - DNA, 1007 bp, Homo sapiens
cgtactgcgcaagcagtgtcctgagcagtagggaggtagcaggcaaggagggatccacacattagccatggtctgagccagagattagaaaccagagcactggattatgggtgttttgtttgggtcgagaagttgtttttatgctttgattagaaatggcctttagagatgtgcacaggcagtttaccacagatctgggagtccccgtggtttggggcatattgcttcagtcatgtgttacctgcctggcagctgaaggctggacttcaagacccctcaacgtgtattttgactccctgatcgtggtttgagccatgtgtgtactggaggaggaggaggtgctgttaaaagccacagaaattgctccaaaggaaatggaaaattccaaaatgcaaaagccatgggatagtttgcattttgtgtcctctgctttttcctcccatttctgagcagaggagtgaagaaatggccagaaagtaggggagtgtggggtggtcaaccccaagacctgcagcttcttcctgaggaggctgagttcactggactcgtggtggaagctgccctgatgccccatctctgagtgccagcccggctcctagaacgcagcaggggtttcgtaaacatttggttgatagctgcgtgatgcctctccctccatgcacattttcagggggcaggagagggaaggtcccagtttctttttttccagagtggaaggaggacaaaagtgggggagaattctgaaaatgaaacacaccccccgctccccatgcccacaatttggtgaaaaagaaactccttttttgatattgaaaatgtaattggtttccttctcatggaagcagcaggtgccacttcctgagatcgcctttctgtctccactttgtgcaggggcacaaagctcactgcccctcctcagaatgtgacagtggccatgtttgctaggattgagggcctgtcccatgtctgccaagcctgagcaccttttgtgggtgacctggtcttgt

SEQ ID NO: 92624 - DNA, 1055 bp, Homo sapiens
gccatcctgaagctcgagaaccagtcctctttgatttttatggaagcttcttggtgtcagcatctcttcccccagggtacagggtgagaccctctctggggagggccttaagacccacagtcagaaaagtgggggacgataagagtcctgccttggggcaggagaagttcagagagattctgtctcctgaggccttaacactccatgttataaccgaagactgtaacaagggatttgagagttacgagccgggaactgtggatgaaaactaatacagtttacaaagcctttgctgggacataccagctttgagtttcaaggttacgctgtgaagtaggcagaggggcgggggcttcacctgagacccagagatttccatgcatttgccttggactagaaggcaggcctcctgcctgcacacttcagtgggtccagatgcatggccgagtgtatgagcaacagcactgaccatccctctgttctctcagctgacccaagccttatctggaagatttaattctcacgttcacgttgaatatgaatggcgactactccacgaagacctggatgaaagtgatgacgacatggatgagaaattgcaggtctgtgccaggttgctaaccattaagagttttgatcagcttcatccagaacagtgtgggtcctaatctgtaattaaggcagaaagctgttttatagaaatgaaaatgtagcttactttatgctttcattgatctcagtaggctcttggttttacccttcccactaccatctcctgtctcccagctcctgcacccattaatttaaaggaatggctaattatgtacttataggcagccttttgctacaaaggaaaggtgtgtgtggcgggggggttgattccagtggatttagaggaaggtctcttgctatggagtcatgtcataaagagccagatttcccccagtctaggtgatcacattctcctggttgatcttataaaaacatcaactgaaatcatcagacgacctttagagctcactgggtccaaccccttcctttatcagtttgggata

SEQ ID NO: 92625 - DNA, 3080 bp, Homo sapiens
aggcggagcttgcagtgagctgggattgcgccactgcattccagcctgggcaacagagagagactctgtctcaaaaaaaaaaaaaaccatataaccttcaggggggagcaggggtggccaaactcttaaagggccagatagtaaatattttaagctctacgggcctaaagcgtcacagtccatgttaacaattactcagctctgccaggatggctcaaaagcagccttagacagtatctaaatgacaggacatggctatgttccaataaaactttactgacaaaaaacaggtggtagtccataggccactgtttgctaaccctaatttggaggaatctcaggagctcctgttcatatgggaggaaaacatcgatctctgctgaatgagccatatagctgttggagattgagtgcagcgggctggccagagctggccaccctgtggggtagcataagaaggcatgtttgggaaggggaacttcagggaaaatgctgacttaggttgagataacttcgactcataagataaatagcttatattttaaatccatcacagaatggagaattttaacctgtaattaacagattttttggtatgtgtgtgtttactagtcagttcttacactgctgtaaagaaatacctgagactgggtagtttataaaagaaagaggtctaattcactcacacctccacatggctgggaaacatacaatcatggcagaaggggaagcaggcacctcttcacagggtggcaggagagagagcaagcgagagcagggaaaactgccttataaaaccattaggtcttgtgagaactcactatcccaagaacagcagaggggaaccgctgccatgatccagtcacctccttccctcgacaagtgaagattacaattcgaggtgagatttgggtggggacacaaagccaaaccatatcagtgtgtgtttccttcacgagacacaaggaggagtgaattttcactcttgcagctctcacgcaacttgtagctctcaggcaacagttgagagctcaaatggtaccaggcccagcagagttggtgtcagtgaggttttcacccctgtgttgaatgttatcaccaggagcagttcatatttgtctcacacgcctctgccccaatgttctcctgcagcccagtcccaaccggcgggaagaccggcccatcagcttctaccagctgggctccaaccagcttcagtctaacgctgtatctttggccagagatgctgcaaaccttgccaaggagaagcagagggctttcatgcccagcatcttgcagaatgagacttacggagccctcctgagtggcagcccacctcccgcccagcctgcagcccccagcaccaccagcgcccccccgcttcctccacggaatgttggcaaaggtatgaagctgtccgtcatccctgtgaatatatagagggtcttgttttgtggtttgggaagtttgcagctgccctgcctccaactcagtgacctttgggctcttttgttttgtagttattttctgtttgcttcctaaagggattccatcattcttatcaggccagatggtggtagagtctcttgatttgactcttattctgggcagagttgtggcatctgcctggcttgggtaacatgggaactcccccagggcagcctgaggtggccaactgggctcccggggctgggccaaaagacacactccttcaggtctcccctctgcacccttctgtttacctttctccactccttcccaggccttcattcttcctttttatttctcttctgccttcatctggtccagctcatggcccctgcgattacttcttacccatgatccccataaaagatattggggaacgatgctcggcctaattgtaaaatacaaaaccagccctgtgggcctaccagtgtcttagggcaaaaagcatgcttttcttacctcagctgtaacctggaggttttgactcaacaggtgacactttctgtttttagaaatacgcaaaccaaagctctcagaagttaagtaatttgttcattcctgaagagcagctggctacggtgcttcttgaaggcaggtccggcgagtgacccactcagctctgggctgagctccagtcgtggccatggccttcagagggtttcccacatgaaggaggctgctgagactttgatgcggggcggggggcccaggaaggacaagagtctgcacagagcatgtatccaggcattgtggccgctgtgagccgctgatggagtggagcccacgtccccaaatacatcccaaactgtccttatgtggtagctgctagctgggcaggctgggtcggtgcgtgagggtggctgaggccgggagacctggcccagggctgagcagacggctgcagctttgtgctgcacgtacactcggctgtgctgctgggcccatcttccctgccgtcctgggtgtctcacagaccctcacacggctctgcccctgtcattcagggaggcccagagaagtgacagtgaacctgtcatgtgagtcactgagtcataccccgaagaacaaacctgctgagagcagaccttcccccaggcaggcccagaagccagctgcttgctgtccccacacagcccacatcccagaccgcgtccatccctggcttgatgaggacgtccctgagcacagaaggcagctacaagatgaagccacacagtcgcatctcctccctgtcaaacccccaggctggctggtcggggcccagggtgggtgcggctttctccccgcctctcccagatcctgcaggcaggcatcaattttctacggcccacaatcaagatgattttgatcatcctccttcccagcagtggcttttgctgactgtgtgtgtcacgggaggaaagattttattttgttccactgggtcatggaggggtaaactcttaatctcctggtttcccgaagtcttggaattcaagggttttgattttttttcctttttctttttgccgttcctgtccctagcatcatttcttcttccagtaatgtaggtcataccccttacctgccatctccaccattctctgtgtagc

SEQ ID NO: 92626 - DNA, 1025 bp, Homo sapiens
tgccatctcttgtgggtcacctgaacctgattggtgtcatctgtgtctgcttccagccagaaatatgtttgcgggagggagggagagagagcccctcctctagtgtctgatttgcactctgcccccaacctgtgccagctgggcacacggtgttcctcttcacatggtggtgactcccacagcccatgggaaggagtcggtgggagggtggagaggagcagaagttccagaagctccaagtgcagtgttcgcaagagaacattgtgactgtttatttccttcttcaaatgatactgatatttgataaataaactcaggaattttaaatttcatggattgagaaaacctgctgagaatagtccttggagcctcttcggtttcgcgagtatcagtgtctatcttccacatgccggagacaggagtaaaagcattgagggttctaggtagaagggtcatactgaccgtttcataagggggaggatcaataacgcagtgttctgtttctgtttttgttcgtgtgtgcacgtgtatgtgtgcgtgcatgcgtctgtgtgcatgcgtgtgggttcagttcagacagcctcctctgctaacaccctgtggaagacaaactctgtaagtgtggacggtggaagccggcagcgatcttcgtcagatccgccagctgtccatccaccgctgccccctcttcgcgtgacatctaccagtacgtttttttcctttttcctttcttgcccgtgggctttgtagatctggatggcggggggtgctctctggagccacacagctgccagcacagacacgtgccaagtgccccgtgttgtatggctccctgtggctcttgtgcagggctctcagctcccccagcctccttcgtcacagctgcaaacccctgcctgtccccacactgcaccaccaagtagcttcctcactcccttcctctgtcttccaaagcatttcagcaacatttcctcctttacacagtaccccagggtttctttttcctttggccatttggtgatttt

SEQ ID NO: 92627 - DNA, 1041 bp, Homo sapiens
gaggagccgttactaagttagtagctcccatctctcctcagatccaccctgcccagcagcccgatgaagtgggtagggcctcatccctttggccacaggtcagtcgatgtgcaaagcaggccctgcttccccgggcagagctgagggccccggcctcctgctgttgggtctttgagtggagagcaggaaactgctggctttcccccagggagttctagctgagaaaatactcactcacaggctgatagaaaaattgtcatcctaactttaggctcccagcttccttattagtttggaaaggactccctgcttcctccctgtgaatggttttctgaaaactggcaaggaaatagcagcaggtttttccttaggaaatagcaataaaaaactgaagcccttctcagaaaagcctccagtgaggaggcctgagtgggaagcctggcggctgaccctctgcacgtctctccctgtcctccgcagatcccctgacccccacgccgcccccacccgttgccaagacgcccagcgtaatggaagccttgagccagccgagcaagcctgccccgcctgggatctcacagatcaggcccccacctctgcccccacagccgcccagccgcctcccgcagaagaagcctgcgccggggtaagccacccccagccagctcggccatccgtgctcctgccctctgacctcacctgcccagggctctgcaggaatgtttgcaatccccagggctcctactccagcgtgggcgccacataactaattcatcggggctgaagggtcttaaaaataactggaggatttttagactgtaaaaatgtcttacaaatgtacattttaagtccacagaatgaattcagacaaagtgtcctcaacacacaaggcttctgggttctatttgctgctcaccccccaggtggtctctgtttctgttttctattttcccaaggttgttttgaacacatagaccctctgtggtgtgaggcgtggatttcccacaaacaaggacattgtcctacctcacacaataccac

SEQ ID NO: 92628 - DNA, 1100 bp, Homo sapiens
gtccaatgctatggtcctgcagccccctgcacccatgcctaggaagtcgcaggcagtaagtgacgagccccctttcctgcctctctgctctagccaggggggtgcaggtggtttcacaagggctcaggggaagcaagtcttcccctcttcccctggctggggcagggcggggctcttcttggtacctgactgcttggatctgggcagctggtgggtttggccctcctgccgcagctccacaatgggcccactcagagtaccctgccccggccgcttcgtttcccagcccttggccccttctctctgcttggtggggagctcttcccttttctctccctggctcctgagctgcactgacctgccccaccttggcatctgcaggcttctcaggcctaggtacgggactcctgagaccggggaaggcagggtgcttgagctctctgccctgagagctgaggcctgcagccacactaaccgttgttccctctcctgacccagaccaagttgaagcctaagcgggtgaaagcgctctataactgtgtggctgacaaccccgatgagctcaccttctccgagggggatgtgatcatcgtggacggggaggaggaccaggagtggtgggtgagtcaagggtgggcctgggaggttcctgggggctgagccacgtccctgcccacctggctggagagacgggcttgcaggtgaggttttctcagcctgagcagtccagatgtagttcctggtgcctccgccccttagcatcctcaggagctgcttcctccatggacacccccttctgagcaggcctgattattccccagggtggcttcctcccctgttagggtgcagtttccacagcactcatgagggcctgaaatgacactccttcattttgaggtcttgagtttctaggtcatcaccccccattgctggattagtggaatcgggtgtctggagagagctgacctagagcgcagagccccaggcctgagtctggtcctgaaacaagctgtggccgcccaggcgtccagcagggtgtgggagcaagatgagtgccggccacctaagaattcagacttggccactcaggggctggtggc

SEQ ID NO: 92629 - DNA, 1047 bp, Homo sapiens
gcccaccacacagtagacgcaagtggcacagctccgcaactgagctcagagcagacagttcagctgggaactcacaggatttaggggaacttctttgtcgagtgcgaggagtttggacactgtctttagtcactgtccctcccagaactcccactagtgtttaaactgcatgtcttcagcctccagaggcgctgtgagctctcagggccaggcagcactgccttcatttggcagagctgggttcaccggtctttcctgtggcctcgtttgcccttaatggattgaaagtgtctgtggcctgggcgcggtggctcacgcccataatcccagcactttgggaggccgaggcaggcggaacacttgaggtcaggagttcgagaccagcctggccaacatggttctctactaaaaatacaaaaaattagctaggtgtggtggcaggcacctgtaatcccagctactcgggaaccagccagctcccacagttgcccacaacccaccatccggaaggggcgccaacctgaccacaggcttagccatgtggaaaatacctgctcatttccaaaactggaaaatagaggcataaagaagaaaacagaagttgcccataaccacagcaccccccacccactccacaaaaagcccaccattcatattttggctgtttttagccttttatttgcctacatcatttacactcttgagatcatatttggatataatttatgtatctacccaagagggaacataagtggatagagtgaagccttccacaagtacttaactcattgaaatggggccaacttatacctttgccactttaggtgacgttgcagctcacaaacttgtgacactcagttcattcattcattcattcattgaaaaatggcaagtgggaagtagtggtcagacagctgacctgtgtgcctcccaagaacaggtgggggtggccatccccacgagcgaacatctgggacatggctgggaagagctccttacacgggagaggcctgcactatttgaaatgtggtgaggaaaaacggacaa

SEQ ID NO: 92630 - DNA, 1139 bp, Homo sapiens
ttcattctgttccaggttatataaaactgcatttcctgaatttggttaaaaactaaggatgatggattgcaaaacagttcttttaaattagtttatatgctttaggtgttttggaatttgccttcttgaacttcctgagtcacacagaaagcaactgtacacagtagaattctgtggcgcagaccatgctgtattaacacatcacttgctgtttcctactgagtgtaccactgccttcccttctagcccaggagaatgtttactcagtttagtgtcttgtatttctataatactccaacaggaatggtagtcacactgtcttgaaattgaatctgtccatctgtttataatcaagaacatatcagaaatatataggtcccaggtaatactcccaaacatcccactttttactgtttcaggccatcatatcattcttaagctacttggggtggtagtagaggattaggttgtctattataaaaccaaaactcattcgtttaatgaacttgactgtcatacctctatttagtaattgcgagggtaagattcatagtaggaatattggaaattttggcactctgagaataaataggcatatgatacccacttggacttttaacaaaagtaaaggaataaatttgcatataggcttggaaagtgaggcagcaatgctgttaactgcatttgttgtgatggtgcatttgattgaagcagcttgtctttattatgcaagactgtgtagagttttttttttttttggcattgtactttttgtttttgttataaaggaagacagaacaaactggaatgttttatgatgttgtatagcaatcgctttttacctttcaaagttccgggtaaaaatgtgttatatctgtagttttttgtttttgtttttttttaaagcactacatctgttttcactaattgttaatttctgtttgaacccttcatttaattttctcatagatttaagtaaacagatgtattttgcacagtgcacttatgtctattttaacaatcctcctgcatctgtattttatagtcagccttttgaccacctggtgccagctatataaggaataaagttgattcatatcaacattagaactccagtcccaaactaatctgtcaggttc

SEQ ID NO: 92631 - DNA, 1714 bp, Homo sapiens
agctcctccacccgcgccccgggagcgcggccccgcccggaaccaagcccgagcccaggcatccctcctccgcccgccccgcggccccacccatccttcctggccgtccgcgccgctctcgggaccgtgttcccgtcaggcctccgcgagctcggccccaagcgggacgagggctgggcgctcacctcgcagccgcgggcccatccccgggttgcggacttcggggtccgcgtgggagtgccgcggcctttggcgcccaggcagctactcccgttcccgctccagcgccggcttttccagccctcctgcccacgtccgccgggccgcgcctccaagactatgcgcaggcgcagtcctgacgtcctacccccggttccaagaccccaagtggtgggaagcctcgcgagcggcgtcccccgaccggaagtcgaggggaggagtctagtgccgcgggctccggagtgacggaagttgtgctcttggtgaatggggttcttccttttttatttaccggtggctgtgcttccaatttaggaagaccccggcgacctgttcctcacccccgcttcgccctcacactttcgggatgtctgcgattcctgctgaggagagcgaccagctgctgatccgacccctgtaagggaccagcgagagagggaatgaagccacgggctgtgaggggcgcgaggggtaaccggagactggcctcctccgtcgcccgcgctcccacctaccccggcagcctgcctttggtccgcgcttgcgggccaggcttctcaggctcgaggggttggaggaccgttgatcggaaggggcctgctatagagtgaacgggattttgctttttcatcagtttcaggggagggtatgttggagtcggaaaaaaaaaagttttacggggccaccgctcgctttcgtacacgctaagaagcgttttcacttagcacaagcacggatctctgcgcgtcagggcaagctgtgagggagccggtgaagcttatgaccgacaggatgagaggaggacctgaatgaggctacagccgtgcagggaagaattaagtctgtttcttaacaccagggcttcacatgtgccagaagttagaaaatattagggacttgccgtgagtttcgatcttctcagctcaggccctagtagaataaggaaggtgtaaagctggagaagagaaagtgcagaggtgttagggacaaaaactcagccctcgactgtccataaggagagtggcctttcagtggacacgatcctcatcagtcgggaatgctgctgaaggggagatgcaaatgtagagaacttgaattcctacagatgagcatttcgaacccacaacatgtttattgttagatactagttggcacaacatgaatatacgctttccaaaaggtagaaagtatctcctttacacaatcattcagtaaggcttcattgagcacctgcttgggacatagtccgtttccttctgcttagttcacacctgtcatgtcttcctgtgatgagcaaacactgagcaagtgtcaagcaccacacatggggatatagacgcaacagagggcccagttaattgctctcgctcttttggagagaattacagtgcacagtgggaaatattggagagatactttggaataataggagactattactttgaagtcagacctgaagtccattatctacttgaccaattagtaggacaacaat

SEQ ID NO: 92632 - DNA, 1023 bp, Homo sapiens
cgtgagccaccgcacccggccatttaaatttaagccatttggcaaatacacattatgatcttaaagaagatgacagtgttgaaatgcttatggctttctacttaagtgctaattctagaagtattattatataatctgcgtaactgctagtttacattttaaatacattataatttaatcctaaaattcagaaaattgaatttaaatcaagcccaaacctttgggcttcttggatctgtaccgccttctctcttaattttaagaactgcaagatccctggactcccaaggatcagttttcatctgttctcatgtggacactgttcttccctgtctttgtgattttgtagaactctcttacgtctcagaatttttcagtgaggtgctgtcatcagatggcatgtagtgtacattgtaaaaaagtgtaagtttattggacttggttttgattttttttaatccttctttttctccccttgaatatttacagtggagctgggcaagaagtaggaagatcatgtattattctcgagttcaaaggaagaaaaataatggtaattactatttttgtactcagtttaatagtatggctctgtctgtattgggtgttagtcttttctcatagactagttatctttttagctcccagaaaaatgttatagtacatgtaatctatgctgtatagtgttaatgagaaaaactaatacacacttctacttagtaatttagttgattaagaagatatattctatgactgtaaaattgtcagctagatctgttgaactgttacctcttcaaagtccctcttccactcctgaagggttgagccagcctaactgccccacccccagtggaagatcccaagggcccaagcactctgaacacactgagagctctagccgcctccagcatgtggggatcaagccttggcctagaagcttggatccccaggtcccactggggctgccggccttggccaagtcactttgcttctctaagcctgaaaggtagaggggttagagga

SEQ ID NO: 92633 - DNA, 1074 bp, Homo sapiens
gacagatttggaagaaagcatggacaaaattgaaactatcaactttcatgaagttaaggaagttgcgggaatcaagttttggtgttaccatgcaggtcacgtcctaggagccgccatgttcatgattgagatcgcaggcgtgaaggtaccctctggctgtggcgcttttctccccagagaaatcagtacagagctttgtgccaccaagtactattaaaaaaaaaaattccctaagacttgcaaagtgtcagaacacggaaacataagataaaaatacagttaacgcttgttccttttaaatattgcagttcctacctccattacaatactttctttatcaagactgaggaaaaaaaaatttttaaagactgagaaaagagtaaaataaacatctcaaaaagtgattccctgacaccataggattccgtttgctttagaaaactggttagggaagaggtgtctttgtggctgcattcgtttaaaattaaaacacaatttgatattcatgtccccctgatgtcttagaattcacaggtaagcccctaagcagggtggactgcaagagtgaaaggggttaattaggaaagatctttggggaagccttgaacttctgacaacgtgggtgggccgctggctttccagactccagagcagccgctctgaactcaggctgcaaataagactcacttagggagctgctgaaaataactgttgaatcaaaatctggaggcgcagcttggccttttccttttcgagtttgctaggtgattctaacgtcagccagagaaccaatgctctagtgtcacgtcctaaatttttcacagctgcttatacatttggaacttttagacattgaattgtaaagtatatcactaaatcacttattcttgcagtttgctccagggcacaaaaaataagtagcacaaatgcagatgtgaattctcttggaatttgatgcagaccctcttatgattttatctccggttttagaccatgtacctcagtgcactcctttccttgtctgcatgccctttttctctaagaagttcagagcacttctcaagtggattaatg

SEQ ID NO: 92634 - DNA, 1457 bp, Homo sapiens
tcctagctagttgggggactgaggcaggaggcttgcttgaacccaggaggtcgaggctgcagtgagctgagatcgcacactgcatttcagcctgggtgacaaagtgagaccctatttgaaaaaacaaagattttcagaatagaaatatatccacatatctaggaaatgactttggagagcacaagaatagttgggaatacaggtttgtctttctaagcataagagttatgattctcactgccagcactccagatagatgagttttagttaatttgtttacttttctcattaaatgtttgcttgattgagaacatgagtatttgatatttactgagtcagttatattagaatgattttgtgcgtaaggtcctaaatttaacatgaatttatgactgcatgaaaaaaatgaaaatgtacctttacgattataactgggtagtttgttttgttatttttctttattttccacagcacatcatgtctgaacctgaagaaatcactactatgtctggacagaagttaccactgaaaatgtctgttgattacatttctttctcagctcacacggattaccagcaaaccagtgaatttattcgtgctttgaaaccgcctcatgtggttagtctatgaatttcatttattgtattaaagggaaaaaaagtgcatacccaggaaactgtgcagcaggcagttcacaaagcaggcatcatcacctactaatgcgacaccccctgagcagagcctttcacatgcactcggatttggcctttacaactcccctttgatttcagcaagctgccccctttctccagaactgactgactcagacctaccaaccccaatcctaatgtttttctgttattttctgctgcctctccaataatttaagagccaggcttggagtatgactgctcatttggaatgccagctccatctcttacttactatgtaacccttggcaagttacttaacctctctgtacctcatttgtaaataggaataatagctcataaggttattgtaaggatgaagtgaaagaacatatctaaagcacttaatatggtgcctggcacatagtaaatgcttaatatatatattatatatatatatatatattttttttttttttgaggcggagtcttgctctgtcacccaggctgactgcaactccgcctcccgggttcaagcagctctctgcttcagcctcctgagtaactgggattacaggtgcccaccaccacacccggctaatttttgtatttttagtagagatggggtttcaccgtcttggccgggctggtcttgaactcctgacttcatgatacacccgcctcggcctcccaaagtgctgggattacaggcgcgagccactgcacccggccgacttacttatatttttaagtatcgtgtaacttattaaaaataagttagatattttgatggaattggaaaggagg

SEQ ID NO: 92635 - DNA, 1570 bp, Homo sapiens
ccactgtctattttcacagcttttcatcactccaagcagaaactctgtaccgttacacagtaactccccattcccttccgccaaccctggtaatctcaaatctactttctgtttctatgaatttgactattctaggtatttcatataagaggaatcataatgcctatgatgttttcaaggttcatcatgttgtggcatgtatcagcacttcatgccgaagtcatggtccgttatatgtagaccacatgttgtttatccattcacctgtgggtggacactcgggttgtgtcactttacagcaaatgtgaagtggtatctcgttgtggtttttattttcatttctctaatgactaatgatgttgagcaccttttcatgcagtcttttgttcgtttttgagttttttctagcatgataggcctcacaggtatttgccactggcccttaatgagcagattatttggtcaagaaaaatcactctcctgtctatagcatcacagtgtgtagggtttagtcacagagtaggctcctcccaggtgtttcttattgtctgtgtgcatgaacactcccccagatttccaagccagggaggaaaagccgaattgctcttttgtgtggtgtcaccacctcatcctcagccccatttcatcctgtcactctcctggttctacttctgctgacagtttaagttcctgggttgaacttcatgctcattttcttgtgataaccagctccagcaaaagtatagctgcaggataaaattgcaatactagtagtgttggtggtagtaatgaatactagctaacattgattatttaccatgtgccggacactgtatatgtgttttatatgaactgacttgcttaatcttcatgaccgacagctgttctgcagatgagacaactgaggtgtgaaatcacttggtcaaggttacacagcttaaataagcagcagcaccaggattctgttcaggcagccaggcccaggcccttccccagcaagcagtaagcccctgccacgtgctggtgctggctatgcccagccacaagccatctaccacatgtgagaggctaagaacaatctatcttggccgggctgcagtcccagcactttgggaggccgatgtgggtggatcacttgaggccaggagttcgagaccagcctggccaacatagtgaaaccccatctctactaaaagtataaaaattaggcagggcacggtggctcatgcctgtaatcccagcattttgggaggccaaggcgagcagatcacgaggtcaggagatggagaccatcctggctaacacggtgaaaccccgtctctactaaaaatacaaaaaaattagacgggtgtggtggcaggtgcctgtagtcccagctactcgggaggccgaggcaggagaatggcgtgaacctgggaggcggagcttgcagtgagccgagatcacgccactagactctagcctgggcgacggagcgagactcggtctcaaaaaaaaaaaaaaaaaaaagtataaaaattaggtaggcatggtggttcacacctgtatcccagctacttggaggctgagg

SEQ ID NO: 92636 - DNA, 1048 bp, Homo sapiens
ttggaaccttgcactaggataatctgtcataacatagaaggttaataaaatatgtctgaactgtccttgattaagaggatgctagaaagaccagaaaagtctcttcaacaatagaattccgctgtagaatgttgacgcttacgaagacagaaggtagatgaaactagctggcaacaattgacaaattttatgttatatgttaagatgctagtggaaggctaaatctcttgtatacaaaagatagatgtttgagcatcacttaagtttgccactgataaaatgtttgatgtccagggtaaatgctatctagttgaatgtttgcaatacatgttcagacctttccgttgctgtactttgctgtttaaaaattgactatacaaatgagttactaactttttaattgtgtagctgctttattttagctgtctctataaacaaacgaatggtctctggaagattatcagaaaagtatatacatcttatagttatgtctttctttcaggtgatgtggaagaattagaaattcaagaaaaacctgctctgaaagtgttcaaaaatattactgtaatacaagaaccaggcatggtggtattagaagtaagaaaagatcatttacctaaacaatgaggggaaaaaagttttaaaaagagttcatgaacaattgtagagaaaattagtttcttcccaattagaaaaagaatattgttggaaagtatatgtgtgtgtgtgtgtgtgtgtgtgtgtgtgtgtgtgtgtgtgtggttttaaggatcagcattaagtataattaagtagctgagcattttctatgtagtcacaaaaaaacctaataataaattaagggttcttatttagtatgtgtgataaatatagtcctttcctataagtcttacctgattttgtggtactccaggatgtctttagttatatcagaaggttttacaattcttaaggtaaaaatttaattctgttaaattaaaacaaacttaggtaccactcgttaaaagagcagaattttgaagattcaaataaacaacaataaagtgac

SEQ ID NO: 92637 - DNA, 1036 bp, Homo sapiens
attaaccggtttaagttgaaacacaacgaatgtatttactaaaactatttaatcaaaaccagaaatctcaaatattctatagactgtttaaatataaaccaaactaaactatttaagttccaggatattagtgactttttacctgagatacttgctcagattatctatctgttgtgaactccattttaaaagcacctcactataccatgcttgaagtcaggtagtctgtagacttcatcacagcccctttatatataattacttctctcacggaggagtatggtgtatttacctgtatctttgaatggcttaagattagcatgcttcagctatgttcttgctcctatcaaagtgaaacctgggggtggctcagagacacgtgacgggtttagaatcccagagagcacaccctcactaaaggccggttactgcgaccataaacacttcttgcccacaattcatctttttaaaatttttcgtttcagaaaatgtgatgttctgaatcgtggattttcaggttacaataccaggtgggccaaaattatccttccaagattaatcaggaaaggaaacagtttggacatcccagtagcagttacaattttctttggggccaatgacagtgcactaaaaggtaaaagcatttttgatgttcttctagctcacttttaatcatttttatgttacagcaaacttgcatttaatatacttttttcaactgtttactttctcccaatagatacagttttgccaaacttatgttgtttatatgtattcctggctttaacactggtggattttattcttgactcagtttctacataccttggttgctggcagtcctaatcttgcaaacagttaaatattttctagagtctgttagtgctatgctaagtttgtaatgtgttctctttagttgatgcatttggcagcagaaagcttaaggataccttgtggcttgcatcacactgatggcagctggtggcgtgtcttagggagggatatgtcagggcagcagccaccctgacctcagtta

SEQ ID NO: 92638 - DNA, 1047 bp, Homo sapiens
gtccagctgttacatgtaagaagccagcggtgtcagcgcagcgttcagcttccatggcctggcatttcctactagtgcagcccttaccagcccccagcccagctcctgcagccggcactctccaagcagcccagccctcctgggcctttcctgcctctctgcctctgttcaaggtgtcctctagaacatcctccctggcgcctcagaagattccggttaccactgaaggctccttcttcccactgcaccttgtcctctgctgggtagagcagcacaccagtaacctgcaaggctcatcaacatataccctaaaccccggggctggcccaagtggggtcaatatttaatggcattttgaaactgtctagatgagtggagcagaacttacacaagggccagcacttgggtttaccaactgccacctctatttcttctcttcaataggttgcaaactaaatcgcctgaactctgttgttggtgaatatgccaatgcgtgtttacaagtggcccaagactgtgggactgacgtacttgacctgtggaccctgatgcaggacagccaggtacggtggcttgctcggtcctctcggggtaaataggatcacacagaagtaaaccaggtgtgtgtgcagcagctttccctagaaaggccctgcttagctaagacagtcatccctttagccaatgaaaacaaacaggcttgggggaggggaggaatggaggttccaggatggctcacaagcccagcagcttaattcagccaggctccttggctaggagttagtgcgcagtgacatcaatgagcaacacatggctcatatttatgaacgtccaggccaagttcttctttcatacagagaatggcagaaagctaaaacttgttaataggtaaaacaatgaatttaaatacagtattggctaataaaactgtttgagatatgtagttctaattaagttactttgttttaaagcctgaaagcacaaatataaaaggtaaaaagcaggtcccatggaatggtgcactgactcaggagacagctggtttct

SEQ ID NO: 92639 - DNA, 2078 bp, Homo sapiens
gtgctaatttagttctcagctcttctgacttaagtgtgcaaaatatttttatagatttgacctacaaatcaatcacagcttgtattttgtgaagactgggaagtgacttagcagatgctggtcatgtgtttgaacttcctgcaggtaaacagttcttgtgtggtttggcccttctccttttgaaaaggtaaggtgaaggtgaatctagcttattttgaggctttcaggttttagtttttaaaatatcttttgacctgtggtgcaaaagcagaaaatacagctggattgggttatgaatatttacgtttttgtaaattaatcttttatattgataacagcactgactagggaaatgatcagtttttttttatacactgtaatgaaccgctgaatatgaggcatttggcatttatttgtgatgacaactggaatagttttttttttttttttttttttttgccttcaactaaaaacaaaggagataaatctagtatacattgtctctaaattgtgggtctatttctagttattacccagagtttttatgtagcagggaaaatatatatctaaatttagaaatcatttgggttaatatggctcttcataattctaagactaatgctctctagaaacctaaccacctaccttacagtgagggctatacatggtagccagttgaatttatggaatctaccaactgtttagggccctgatttgctgggcagtttttctgtattttataagtatcttcatgtatccctgttactgatagggatacatgctcttagaaaattcactattggctgggagtggtggctcatgcctgtaatcccagcacttggagaggctgaggttgcgccactacactccagcctgggtgacagagtgagactctgcctcaaaaaaaaaaaaaaaaaaaaaaaattcactatctacaaacctagaatatttaaaatacaaagattgcctgttttcaaacactattgaataagagggtgagatatttcttaacaacaacaacaacaaaaaaaacaggttgttttgaatgtgatgagccagccaggagatagaatactacctgcccttagggttgggggctgtccccacaagacttgatacttcagaaaccctttttattgacccacaagcagatatttgaattacttcttactttattgctccaggattctggatgggctgcatttactgtgtgaaggataaaaatcattagcctggattctgatttctataaattgccattaaaagctttttttcccctaagaactgaaatgtgctcaccagccaaaacattttaacttgtaaattttgagggcagttaaccaaacctgtgactaatcatatctcctcctaccccccatttccaaggacatttgttactcagatacttgttatactaatacttgaacttgtaccttatggtatttgctatcttttaactagtcatgatattcttatactttagttacacttttggaatttgatacaaggttgagtggggtgtgtgggtgtatgtatgagtgaaacagttctcaaaagaatgtaagaaaaaccatttttataaaattgtgactttttaaaaacatagtctttgtcatttatagaattaacaagctgctcagggtatattttatagctgtagcactgatatctgcattaataaatactgtcgaaacacaatggacctaagtataaaacttccctgaaaaatcatctaatacttttattattaatatcagtggcaaaggtttaagcctgaggaaaaaagcgtacctctacgtattgacaactttgagttctgtagataacaagcagatttgggtctcctgtgattggctaatggtctccatctcccagcagacttaattcaggttttgcttctgctacatcccgccagtaaggaagcagcaaaggtagagaagagacctttttctctatcaaaggccagagatgcgagaacaaaaattcattcccctttggagacaaatgtagtccatctgataaataagatgagaagtcctagaagggagagaaatcggttaaaggtgggtaactggcca

SEQ ID NO: 92640 - DNA, 1011 bp, Homo sapiens
ttattcccctgcccacagagggataaatttctcagaaaacatagcacttaaaccttgcctctttctgtacttaacgccaaaatgtatttcctttgagtgcaaaggaaacacttctagactggtggcataactaaagcttgggtgagaaatggattgtcatctgttgagcctgctatcactttctacaactcaggttctaagttcttcagttagtgttaggaatagcctgtgatgaaatagtactcactaactgaattgtatttgtagggaatgaccttcttgctgtttctttctaggataagaaattggataaacagtatgaatctctgtctctgtttcaccccagtgtaagtataccatatgaaagaaacataatcttcgcctggtctgaggccctgttaggcaaagaccttcacctgacccagcaagagctttcactggctgatggaaggtcatgttgcagcaggaagggtctaggttggaatgtttacccttctgacaacagtgatggtgaacttcgattagttgcatggatggacatttaaagagctgtgctgtccccttcccaagccataaggagtgatttagccattcaacacttagttaatattttgagttcaatttctctcttgggatcttaccttgagaggtttgaatcctcttttgggtcttcaaatggtaagtaagttttcaggatgcttgaaagctagtaattactgtttttgccattaaaagtaatggcattaattacttttgcaccaacctagtattttttagtcacttaggttgagtgagcctcacctagcacttttttcttagcatcacagtgccaacagaataagaggctgtttgatgggtaagggtggagctgtgaggacctccgattcatcttttattcctatcaatcaattgaacccatgtctttgcagaacgtcgaaatgctgagcagcatggattctgcatcggttcgcattatcaaaccctttcctgcgccccagactccaggccgcc

SEQ ID NO: 92641 - DNA, 2226 bp, Homo sapiens
gcaagaaggtcattccctacaaatacaattcagttagtgagtactatttcatcacaggctattcctaacactaactgaagaacttagaacctgagttgtagaaagtgatagcaggctcaacagatgacaatccatttctcacccaagctttagttatgccaccagtctagaagtgtttcctttgcactcaaaggaaatacattttggcgttaagtacagaaagaggcaaggtttaagtgctatgttttctgagaaatttatccctctgtgggcaggggaataataaaggcatcttcctgtgcatgaaatgacaaatgtcccagatgctgggtacaccaggaccgcactgactggaagggcaactggtaggaagacccaggtggctgggcctgcagcattcttcgcactgccccggcccatggcctcactctcttagctgtctccacagtttctgtggaccatgctctgctggaggaactgggcctcaatccctacatcctacttctgcagaaggctaaccacatggccatctgctgccccatccctgcctgtggctgaagcataataggtgacagagggcaaggaccaagaatccaggactaggcttcctgtctgggtgccatcaatgcattctatgaccaaaaacaagccatggccctccctcctatcggaggctttgctctgaaatcaagggtcgtgccttgtccacatgtgcaacttccctgtaaacaaaataggttccatcctccaatagaagcaatcgtgatggatggcactgtcatccagagacatctgtcaaagcttcaagcacgtcaccttcagctttcttcagcacaagtgctccctagagatcttcctatacccatcatgctcaccaccctgaggaagagctgctctgtgagatggcccctaggcaggagaagccagcaggaaaggaaaggaaggaggcagtaggaaaaactcctttgtcatcagagttgtgctggaatttttaaatgctcataggaaggccactatgaaagagtttgggaaaacaagtctggaagcctgggtgtgactttctcatctctacagcagacaaatccccattccccacagatgcaagtgaatggattcgtaagaacatttatgaaaaagggcctcaaatttataaaggaccaggagttccttagtcaaagcccaattcaacttgtagctgttactgattctgaatgagaacagaaaagactgcttactcttattttttggggaagatgtaaatactctatatgacagctgggccccagtccctacatcctatttgtgcagaaggctgaagacatagccatctgctgccaataatctacatgatatatggggaacatctgaaatgccgatgtttgatatttgctctattgcaacgaagtcagcctgaaaatgctcttcaataagggctttactcatcaaaggacctggacaaatccagttaaacagtctcctatgcttaaaagtataaaattcctaagaaatttatatattaaaacaccaacacacaaaaatagtattttttttaaaagaccattagttaagctttctacaagacatgttcccctaggaataacaacaaaaaaagctattggaaatatcaggccaaactttgctaagaacaagttttaccttttccagagattacatggttggagttgatcaaaatttaaataaaacatttaattacttaaaagttgatgacttaccacacaatggacaagaatgctgaaaggaatccaaaatatcaaggagaaaaccaggacagacccaacgatgttgtctgctaaaaactttcctgtgaacaattccaaacagttaatgtcttgaccaagtacttcacaaatctaaagtgaaatgctcttaggatattaccattgtgtcaaatgccagagctgctggctagacatactaccgagagcagaatgtctgtgctgcctgtattacaccacaccatctctccataccaagtgcttttaaagaaatagccctcatatactggctgacaggaagagattgcagaatattcaacatgttacctggagtagctgtgtcaacagattaatatggaatgctactactagtaaatgcttaagaagacaaagtttttgttacctggatattatttttgtgattaaattatggactcgtgacaacatgatataccctgcttctgcaaaatatgaggctcacttttacatc

SEQ ID NO: 92642 - DNA, 1085 bp, Homo sapiens
atacttttaagcataggagactgtttaactggatttgtccaggtcctttgatgagtaaagcccttattgaagagcattttcaggctgacttcgttgcaatagagcaaatatcaaacatcggcatttcagatgttccccatatatcatgtagattattggcagcagatggctatgtcttcagccttctgcacaaataggatgtagggactggggcccagctgtcatatagagtatttacatcttccccaaaaaataagagtaagcagtcttttctgttctcattcagaatcagtaacagctacaagttgaattgggctttgactaaggaactcctggtcctttataaatttgaggccctttttcataaatgttcttacgaatccattcacttgcatctgtggggaatggggatttgtctgctgtagagatgagaaagtcacacccaggcttccagacttgttttcccaaactctttcatagtggccttcctatgagcatttaaaaattccagcacaactctgatgacaaaggagtttttcctactgcctccttcctttcctttcctgctggcttctcctgcctaggggccatctcacagagcagctcttcctcagggtggtgagcatgatgggtataggaagatctctagggagcacttgtgctgaagaaagctgaaggtgacgtgcttgaagctttgacagatgtctctggatgacagtgccatccatcacgattgcttctattggaggatggaacctattttgtttacagggaagttgcacatgtggacaaggcacgacccttgatttcagagcaaagcctccgataggagggagggccatggcttgtttttggtcatagaatgcattgatggcacccagacaggaagcctagtcctggattcttggtccttgccctctgtcacctattatgcttcagccacaggcagggatggggcagcagatggccatgtggttagccttctgcagaagtaggatgtagggattgaggcccagttcctccagcagagcatggtccacagaaactgtggagacagctaagagagtgaggccatgggccggggc

SEQ ID NO: 92643 - DNA, 1917 bp, Homo sapiens
gggtcactgagctccccacccaagggtggacagttgtgtcccagctgctctcgctttcagggagccagtgtgggccctgaggggcacactttagactgaaaaaccaaggattgaagtcagcagggtgacaagaaagttgggacaaagggaagcatttagaagagcattgtgaggggcttgaaggggagagaatagttagactttgaagagaggtcttgaatctagaatggatttttctctgcatttttttttaaaccttgtggcctctgtcactgaaggctgaggagtgtgacctcagaaactactccttggtgggggctatggatagtattagctatttaaataaaaaataaatgtgatttcttacctctttgggagcatggtcagggaggaaagaggaggcaggaggagaggcaggtctcagaacaatccagctgtcaatgcgtgttctctgttccagaaactgacaactcctgcaaggtgtgctgcagggacctttctggccgctgtgtgccctatgtcgatgctgaacaaaagaacttatttttgaggaaaggaaagccctgtacagtaggattttgtgacatgaatgtgagtatttatgtacagctttttctgtaacagccagataggaagtttttattttgtaagtacttgattttgcagatgaaaacaaatcaaaacacaagtggggctacatccttctggcccattgttatctacgggtattacttaggaggagaagacggagtgctttcaggtccctgcctgtagtttccttctgtggtgggaggctttgagcccagagactgagaaggactggggtggggactttatggtaaagttggttggtttcaggcagtgggtcctaattatgttttcctagattacttacagaactgactaagattgcaaaattattcagggtgtgattttgaaacaggtgctgaatgagtaggaaagacctagaaggctgcttgacttacttaagccagacccttttgttctctagagaagcataatttttctcatgcagaatgatgggagagggttttaagatttacgaggcttcacagggagtctggctgtgttgttcactgtccactgtgtatgtgtagagtccttactggaatgcctcatctttagcaaactggtttccttgatttttgtctcctggtaattctaaatcacttgtaaaaatggagtaattatgaaagtgttaatgacagatgttctactttcttgggtactcattacgcggaagttattgccttgtgtcaaagatgggaaaacgtttgattttaatgaagccctttacatgtcagttatttttataaagctacattgcttctgaatacattgtgtttgggaatgatgctgtatgtatgttttttcttcatagggcaaatgtgagaaacgagtacaggatgtaattgaacgattttgggatttcattgaccagctgagcatcaatacttttggtaggtgatttccccagattacttactgagagctgagtcaatttctgtgatgacattagaaaagtgtgctttcagagtgatgtgctttaattctgcagtagaaggtggaactattcacagctttagttatgaaacaactttgttggctagaataaaatgaactcatagatagtctgtccccgtggagcttggatgcacagattttctgacaagggaaataaagtcaaaatactggcttccttctttacccaaaaatatccatgtgattagcataagcatagtttaatgctatagactgaatcctgattgatgtaagagtgtttatttgactgaatgctatatactgaatcctgcttgatgtaaaagtgagcctcatattttgcagaagcagggtatatcatgttgtcacgagtccataatttaatcacaaaaataa

SEQ ID NO: 92644 - DNA, 1050 bp, Homo sapiens
atgttttatttatttattattatttattatgattttttgagtggagtctcactctgtcgcccaggctggagtgcagtggtgtgatctctgctcactgcaacctccacctcccaggttcaagcgattctcctgccttagcctcctgagtagctggggttacaggtgcatgccaccacacctggccaatttttgtagttttagtaggatggggtttcaccatgttggccaggttggtcaactgactggtcaacaaactcctgacctcaggtgatccacctgcctcgacctctcaaagtgctgggattacaggcatgagctgctgtgcccagcctatgttttaaatgaattccttaataaaaatatttttaactgatgaaaagggcttacaggacaaaaataaagtagttccttgacctagaaagacagaacccatcaccctctactaggcaagcctatgaagagcagtttgccacaggtggacttctctgtggacagatgacattagtgaaaaggaatgtaggacctttgagattgtaacttcttaggaaggtttgctgaacggaagaggaagtcttatgacaaggatgcaaacagaagctgccagatcttcagggatgtgtaggcagaaagccagagttgcgggttggtccttttatcgttagtgctctccagctgcttgggagttgtaactctgacaaatcagtgaagaggtcttcttatctgttcactgtgaattttaactccattttaacctgataaaatggaacccagagatacatgatgttgatgaataaacccaccaaaatgacaactgcctgaggccccgattagaataaccagaccccttagacatctgtactgtaacgacagatttgggccgggcgcggtggctcacgcctgtaatcccagcactttggagaccgaggtgggcagatcatgaggtcaagagatcgagaccatcctggtcaacatggtgaaaccctgtttctacaaaaaatacaaaaattagctgggcgtggtggcatgcacctgtagtcctagctactcagg

SEQ ID NO: 92645 - DNA, 1175 bp, Homo sapiens
agtgctgcccaatagaactttctgctgcggggcgggggatgttttgtgtctgctctgcccagtatagtagccactagcccagtggagcaattgaaatgtggctagaaactgaggaactgaattgtaaattctattttatttaaatttttaataatgtttgcctgtgatgggagacgggaatgggcattaactgtaaaaggacatgagtgagattactggaaggatggaaatgtcctaaaattgacttatagcaatggtttcaacacttggtaaagttattagaaatcactgagttatatacttgaaatggatcaattttgtgatatgtgaaatatgtcttaataaagttgttaataagccaacaaacaaaaacagcagtgtgggagcagaggaaaagtagcgcggatgtagaggagctgtgaagtcataagttgattattgttgaagctggtgaggggcacgggggcattcatgataccatcctgtctacttcatagatgcttgaatatttctgtaatagaaactgtaaaatatgtgactaggaacaaaatttaagtagccacatatggttggtggctaccatattgcatactgtttctctaagtaataggtcatatgcttcttggttatgaggatagtgtcagaacttgggagcaaaatgttttactttgcagactgcctgggtggacatgcatgctgctgactcttcctgctgccagttctggggctcttcaaaacagccctgtaagaacttgccagtgaggcatggtggctcacacctgtaatcccagcactttgagaggccgaggtgggcagatcacttgagcctaggagttcaggatcagcctggacaacatgtgaaactccatctctacagaaaatacaaaaattagctgggcatagaagcacatgcttgtagtcccagctactcaggaggctaaggtaggaggaacccggggagttcaaggcggcagtgagccaaggttgtgctactacactccagcctggatgacagagtgagactttatctcaaaaaaaggaaaaagaaaaaaaagaacttgctaatgagaatggggcctgggaagaactttttttttctggagctgccagtctgtatcaatgaagaacaatttatttattttgtcctgagcacatcatatttagtctgtgttttt

SEQ ID NO: 92646 - DNA, 1043 bp, Homo sapiens
ctcacctgtgcaggtggagaagcactttagggaaagagcaaagcactgcacgaggttgtgattgctggtgctgagctgcatgccatcatagttctgttctggaatgtttagttgatttagattacatcttttagtctgatgtaattgttaatctaagaatgcttttttttttttttttttttttggtctttcaaagcaatttagctttgatatagctgaggaagcatctaaagtttgcttggcacaccttttcacataccaagattttgatatgggaactcttggattagcttatgttggctctcccagagcaaacagccatggaggtgtttgtccaaagggtaagtttttccatttcttgtgtgaatatgctgctgggattattaagatgattggattatattataattctgtatttaataagcaatttatctctgtttccttttgactttagcttattatagcccagttgggaagaaaaatatctatttgaatagtggtttgacgagcacaaagaattatggtaaaaccatccttacaaaggtatgttcttttatttctaaaagaatagtgttagagtttattgtagtagaacctcagttatatatttatgtaggtatttttttaaaaaatgtaatatatactgttttttaaatttctgcctaaataaaatttatgtatttttgtgggatatatgaaaattaaagcataaagaagaaaataaaaatggcctgtcagccttcttttgaaacatgtgaggaccactgcttttctcgaaccctctgtcctggacccctctgacctgcagcaactcttagagctccctgtctcctagtcctgcagtgcagctgtcattcaaggcatcccacaccctcttattttcagaaccccatggtctccctctttctcagtgccatcattttggtgtagtgtatcttgcaggagcttcctaagaaaacgtagatgacctgcatattgttgggatttcatatatctgaaaatgtctttattccactcttaagcctgattgataattttggctg

SEQ ID NO: 92647 - DNA, 1125 bp, Homo sapiens
agcaagaagaagctggtgcagtaaagatgtctttctcattgccttgcttttcccatgctgtccattttattcataccctcccaacttctttcccttccctttcatgtcaagtggatttttttttttttttttcaacacagagtctcactgtgtcgcccaggctggagtgcagtggcacaatctcagctcactgcaacccccacctcctgggttcaagcaattctcctgcctcagcatcacaagtagctggaattacaggcgtgaaccacagcactcggccccatatcaagtgaatttattatgaggctagtaagagtcactgtgattcttgttcctaaataagagagatttttactttaaaaagcttctctcttaatctgggttttatattaaggggctcctcttattttacttctttgttcattgcactataaatatgaatataatgagagatctagtcttaaaaattgtatttttttacaacttcttaggcataacttgtttcacagttgctagaacaaacctcatcaacccagtttttgaacagtagaatattctctttgagaaaaagataggtaattagcattttgttctttctcatgtcattttccttggaaactatactgccttccttctccagttttcccaaatcagagaacaaaagaaggagggttgctgaaatgaaccttgttctttctggctgtcttcttacccattcctcagtgctgaactttttggggtgagagtgggggaatagggttggcagttgtctgccacggccccttacttgtttctggggaagacattcgaggtactcaccaagagatagagtgaagatggaattctttttagaagggaatacagttgacccaggaacagtgcgggggtgtggttagaagcactgaccttcttccctctgcagtcgaaaatcctcacgtgactttttttttttaaggctctgtcgcccaggccggagtgcagtggtgaaatcatagcttgctgcagcctctattgcccgggccaaagcaatcttcccacctcagcctcctctagctgggacaacaggtgttcacccttcctggctaagttttttgatttttagtagagatggagaatttcccagga

SEQ ID NO: 92648 - DNA, 1098 bp, Homo sapiens
ctcactgcaacctccgcaccctgggttgaagtgattctcctgcctcagccttacaagtagctgggattacaggcgggtgccaccatatctggctaatttttgtatttttaatagagatggggtttcatcatgttggccaggctggtctcgaactcccgtcctcaggtgattcacccaccttggcctcgcaaagtgctgggattacaggcctgagccaacatgcccggccttactctgttgagcactttttaaagtttctgtattggaaaaattaaagaggcacttgtccttggttttgaattctacagtgttttaactttatgttacttttcacttttctgtcttcctccaaattattttttgttgttgttcagaatcctttagtgatattaagctcacataatgtttgtttcaaaaatatgttagatttaaagtgttaccataaaactccttgttttggtgaattttgatttaatagtgcatacaaattcatattagagcttgttcatcgagtgaaaagaagagctgacccagatcccatgaagaacacgtgtaaattattggtggtagcagatcatcgcttctacagatacatgggcagaggggaagagagtacaactacaaattacttagtaagtatttgatattgcatcgagtaattgaaaaaaaaatttgggtgggtacattccatgaaacttaatgcaaccagatctgttccagatactctgttatttccctaaaatatttgagggatattctctgaggtttttatgttactgtatggaaattatagtttcaaatttgtgacaacccattttacccttgaactaatattttctgcatgttagaatttatgcatatagggtttgggagaggttataatgtagtccttcctccttgatataagtgagttctttaaaaacatcactgctatcatggtagtgaacctgtggtgtcacatgtgaatgtaaaaatatgtatttgcatgaacccatgtttttcttttgcttatatgtatatttcagagaggaaggcgagttttgtttgtcatgttaaagacctaatcattggacttcacttgaaataggtgggactttc

SEQ ID NO: 92649 - DNA, 1035 bp, Homo sapiens
ggatcacttgaggtcaggatttcgagaccagcctggccaacatggtgaaaccccgtttctactagaaatacaaaagttagctgggcatggtggcgtgcacctgtaatcccagctgcttgggaggctgaggcaggagaattgcctgaacctgggaggcggaggttgcagtgagccgagatcgtgccactgcactccagcctgggtaacagagcgagactccatctcaaaaaaaaaagagaaagaaaaccagcctagaagtcaaagatctggcttccatggtcattcacatacttgttaaatatattgagcgcttgttatgagtcagggactgaagtaggtaccagaactttaaacttcactactttatagctatggctttaatctcactgagtttctgttttaccttttacagataaaaggtggacaatctatctagcctgcaagccaatgtgtgaaagtatttccaagtgtaaagggctgtggaatgtatgtagtggaacactcaagtgggaaggaagttagcaggatagcctaattttggaactagaaagttctaataaagtgaaaccagtcttgtggataagaaaatcaacaacactgagcagacctattgccctagattttcaagggcatagtcacaaaaagaaaatgacggtgtaacttgggaatgcgaagttaaaaaaaaaaaaagacaattaagctgtggttttgcttctaattagcactctctgatggaatacaatgggaaaggtcattctgttgaaataagtaaagaaaaatcaggacccagagaacaagtgctaaaaggaaatgcctttgaccaaaaactcagtcacttaccagcagttaagtcttgactaaggagttttgattcagtaagtctgaggtagggccccatagagcatttgtatttttaacaaattgatgctgatgctgctgatcaggacctggtactttgagaaccactgctttaaggaagcctcaataatgaaggccaaagtaaagatcgggtgagtttcacagcagagtagtaaa

SEQ ID NO: 92650 - DNA, 2134 bp, Homo sapiens
gtagagtgcctttttaaaaaagtttctcttttttttttttttttttgagaaaggatctcaccctgttgcctaggctggagtgcagtgtcataatcatggatcactccagcctcaacctcctggattcaagcagtcctcctgcctcagcctcctgagtagttaggactgtaggcacacaccaccccgtacctggccaattttgtttttgaaattttttgtagacgtgggatcttgctatgttgtccaggctgttgaactcctggcctcatgcgatcttctcatcttggcctccctacgtgctgagattacaggcgtgagccactgtgcctggccaaatgctttttaaataaaaaggaagctataaaaccatgctccagtggtatatgtatgtatgtatgtatgtcattttgtaagtgcatagtgaaaggtctgcaaggatgtactttgggaaggtgatggtctttggggttttgagagagaacttcagtcttagtcaagatctccattgtttgaggaatttactactcttgtagttaattttgatataacaatactacttagtgtaattgcctaatctagaaatagtaacttaatatgattcttctttttctagctttggacatcagacagtgcaggagaagaatgtgatgcggcagaaggggctgaaaactaaatccatacagggtgtcatccttctttccttcaagaaacctttttacacatctccattccttattccacttggatttcctatagcaaagaaacccattcatgtgtatggaatcaactgtttatagtcttttcacactgcagctttgggaaaacttcattccttgatttgtgtttgtcttggccttcctggtgtgcagtactgctgtagaaaagtattaatagcttcatttcatataaacataagtaactcccaaacacttatgtagaggactaaaaatgtatctggtatttaagtaatctgaaccagttctgcaagtgactgtgttttgtattactgtgaaaataagaaaatgtagttaattacaatttaaagagtattccacataacttcttaatttctacattccctcccttactcttcgggggtttcctttcagtaagcaacttttccatgctcttaatgtattcctttttagtaggaatccggaagtattagattgaatggaaaagcacttgccatctctgtctaggggtcacaaattgaaatggctcctgtatcacatacggaggtcttgtgtatctgtggcaacagggagtttccttattcactctttatttgctgctgtttaagttgccaacctcccctcccaataaaaattcacttacacctcctgcctttgtagttctggtattcactttactatgtgatagaagtagcatgttgctgccagaatacaagcattgcttttggcaaattaaagtgcatgtcatttcttaatacactagaaaggggaaataaattaaagtacacaagtccaagtctaaaactttagtacttttccatgcagatttgtgcacatgtgagagggtgtccagtttgtctagtgattgttatttagagagttggaccactattgtgtgttgctaatcattgactgtagtcccaaaaaagccttgtgaaaatgttatgccctatgtaacagcagagtaacataaaataaaagtacattttataaaccatttactatggctttgtaacaattgcatacccatattttaagggacaggtgaatttactactttctaaagtttattgatacttcccttttatgtaaaatgtagtagtgatacctatatttccacattgtgcattgtgacacacttgtctagggatgcctggaagtgtataaaattggactgcatttcttagagtgttttactatagatcagtctcatgggccatctcttcctcagatgtaaatgatatctggttaagtgttatatggaataaagtggacattttaaaactagcaaagttaattatgtgattgtgagtgccttggctgttattagaattgtgcttcagtggatattcaaaaggaatgtaagagttcagacacagatactcctcaacttaaaatggggctacaccctgataaacccattgcaagttgaaaatacg

SEQ ID NO: 92651 - DNA, 1155 bp, Homo sapiens
gtattttcaacttgcaatgggtttatcagggtgtagccccattttaagttgaggagtatctgtgtctgaactcttacattccttttgaatatccactgaagcacaattctaataacagccaaggcactcacaatcacataattaactttgctagttttaaaatgtccactttattccatataacacttaaccagatatcatttacatctgaggaagagatggcccatgagactgatctatagtaaaacactctaagaaatgcagtccaattttatacacttccaggcatccctagacaagtgtgtcacaatgcacaatgtggaaatataggtatcactactacattttacataaaagggaagtatcaataaactttagaaagtagtaaattcacctgtcccttaaaatatgggtatgcaattgttacaaagccatagtaaatggtttataaaatgtacttttattttatgttactctgctgttacatagggcataacattttcacaaggcttttttgggactacagtcaatgattagcaacacacaatagtggtccaactctctaaataacaatcactagacaaactggacaccctctcacatgtgcacaaatctgcatggaaaagtactaaagttttagacttggacttgtgtactttaatttatttcccctttctagtgtattaagaaatgacatgcactttaatttgccaaaagcaatgcttgtattctggcagcaacatgctacttctatcacatagtaaagtgaataccagaactacaaaggcaggaggtgtaagtgaatttttattgggaggggaggttggcaacttaaacagcagcaaataaagagtgaataaggaaactccctgttgccacagatacacaagacctccgtatgtgatacaggagccatttcaatttgtgacccctagacagagatggcaagtgcttttccattcaatctaatacttccggattcctactaaaaaggaatacattaagagcatggaaaagttgcttactgaaaggaaacccccgaagagtaagggagggaatgtagaaattaagaagttatgtggaatactctttaaattgtaattaactacattttcttattttcacagtaatacaaaacacagtcacttgcagaac

SEQ ID NO: 92652 - DNA, 1067 bp, Homo sapiens
tcctgatctcaagtgatccacccacctcggcctcccaaagtgctgggattataggcgtgagccaccgcgcctggccacgataatgttttttgttagctaccatgattttaaaagacccatacagagaaaaaatcttggttctaccaagagctagtagcatatgttcaagttgttaatgtactgtgtactggatggttatttttaatattgcacttcttatttttcgctcttcacagaaacgatagataattcccaaggagcttaccaagaggcatttgatataagcaagaaagagatgcaacccacacacccaatccgcctggggcttgctcttaacttttctgtattttactatgagattcttaataacccagagcttgcctgcacgctggctaaaacggtaagatgtgtgtccaggaaatacgtactttagctacagttatttgagataccaggtatgttaatttataggtattttacttggatacccagggatgatttctactatatttattttgaaatctcctctttttcttcccatcatgattacctactcctacccctgacaccttactctaccctatgattataagcagtgatgtgcctacagagcatactgagcagagtaatcaaagaaggataaatgatgttaagaaggaaacataaaagattagaaagtcatgcctgccaggtttggttactagaatagctgtgcatcagccacattcctcaaagtggctcaaaacgagagaataaagaggaccctgtagagataagtactacttaactggaaagaagtctgttaagcattgctgctgttccgttgtcctgtgaaagaaccaagacatgcttgtttactaagtgtatagttttataaaattccagtcatactcataagttcttaaactgggagtgtgagagaatggttctgttgagtttgttgatggtagaacataaggtgggtgttcacttattttgtaaaaatggtttgtaattgtagaataaccagttttcgtcaatgcacatattttaccatggatattaatatttatcaggcttttgatgag

SEQ ID NO: 92653 - DNA, 1507 bp, Homo sapiens
tgtcacccgggctgcagtgcagtagcatgatctcggctcactgcaacctccacctcccaggttcaagcaattctcctgcctcagcctcctgagtagctgggattacaggtgcccaccatcacgcttggctaattttttgtatttttagtagagacggggtttcattatgttggccaggctggtctcgaactcctgaccttgttatctgcccgccttggcatcctaaagtgctgggattacagccgtgagccaccgcgcccggccctaaaaaggtttttaaatggatgacctagcatcaagaaaaatggaatctaagaagatttctatcatatttgtcttttgtgactttttatactccaaggcatagcataccatgtactagaagtgaaaatttctttgtatgaaattagggacaaaagacatactcaagaacttttttaaaaaaataattagatttcgtagacctaaaattattcttttaaattgctgtgcaagtttctaaacctcttactctcgattcctgtatttacctcattttagatggatacttgaatgcaaagggcactgagtagcactattctccctcgtacttgatgttttaaacattttgtttcccgtccctaaaatgagtgcacatccctgttttctgtttggtgcatttctacttttccttcttcatgcctcaaatactctttccctgggaagcctgtcttaactggaggccatctccagcagagctactccatctgtgtgcttccttagcaccgtattcacatctttcttagttcttggtatgtagttggtgtacttacagacggtgagcttcttgagggcaggggcctgattttaagtcttctctatatccgttatagcacctagcaggtatgagtaaatgttgaatgaatggatgagtgaacagataggctgtttcaaattacaatgtttggtgtaatctagaatctagccttaccattagaaactataggctacatcatttaaagcctcccagggcaactagtggcaacaacctaacccctgctctaagaacatgcttcaagtccaggctggtatggtatagtattactgtagtagtaaatgattgaaatgcccgctaggcagaagttttatcatttaatgataatgcacagtaggcagaagtttagtgcctaatgttctgtcttatttatttcaggaattgttggataaatatttaatagccaatgcaactaatccagagagtaaggtcttctatctgaaaatgaagggtgattacttccggtaccttgctgaagttgcgtgtggtgatgatcgaaaacgtaagtttatttgttatatgggcaaaagtagaatataaaaaaaagaaatggggataaatgggacactatgacagtatacgtagtcttcaggctctttgtgacttaataattgaatgtatgtcaagaaaattagtattaccttatgttctcaaaaatgaaaattggattataaatttacatcacatgctctt

SEQ ID NO: 92654 - DNA, 1734 bp, Homo sapiens
tgataagaataacgtacagaagaaatcagtgggggaacatctaactatactcccgtctggtgactttttttttttttttttttttgagatggaattttgctcttgttgcccaggctggagtgcaatatctcagctcactggaacttctgcctcctgggttcaagcagttctcctgtgtcagcctcccaaatagctgggattacaggcatgtgtcaccatacccggctaattttgtatttttagtagaaatggggtttcaccgtggtggtcaggctggtcttgaactcctgacctcaagtgatccacccatctcggcctcccaaagtgctgggataacaggcatgagtcacggcacctggccctcgctcctgacttctgggaaagactttcagggagttatgtgtcagtttggggtttttggtctctgatccgtgttttttacaataattttaaaatattatacatttataggctatattctatctggcattaataatatttggtattgataatacagatacagacttgattatttgggaaagacatgaagcagactccattatgtcttttagttgagctaaagtatacatctttactactgatagtatatggaaagacggaactattctgtacctgttgtttccttcacagagagctagtggcatctgacaaagaaccatgatacctggctgaaactccaggatggaagtaatgcccaagtcactttgtaaaagcccaacactgtaaatcatacgtaatggttatatgcaaactagtagtcaaagttaataattttagaaagaagaggttagctcataagtggctgtgttgtaatgaatgcagtagctgtttggcagctttctgaatccttggaaggccctttgtccacagtccttgagaacacccacacatctagcatgagtgactcaggagagactagtgctagaatggaaatttctctcttccctactcctcaccctaagccattgttctagtcagacttttctcagcccctgctcttacaaatctaccacagttaacagagcactaggtcttaaaggtactgagtagctttttttgtgaccataaataatatcttcaccagagctggcatctttttggagatcctgtggaatttcattgtaactgactgactcacttggaggaacaagaaaagtgagaggcatcttactttacattagagttccttggtgtgggtacaggcagaggtggtatttctctcggtataaatactatgtttgccttctttgatactacttctcagaatccactcatttaaagataccaatgactgagtcagtttgagatctagaactttttttgtgactatctcactattgcctcctaccctcctccttccaccacaaccctaaattcagttcataaaaatagtttttaaattgaaagtcatccataatacatgaaaatggtaatagaggaaaaagttaaagtaatataattttttaagattcgagtgtctcagtttattaaaaaactattaaaattatattggtgatgttgagcacaataaattctgaaaaactgatttgtctgttgtttttacagttaagagtgtagtgatactggagcagcacttgtcacagttgcctttaatttgggtgtggccctaatgacctcttttgccacactcctggctcagcaactttccaacttgagccacaattttgatactcatgacttctataatgcata

SEQ ID NO: 92655 - DNA, 1229 bp, Homo sapiens
atagagctaacgatagtataaaagttccacaaattacaatctaatttctaaaactcatatattctgacacataacacagagttactctgtcccttttttgttttactgattaaatctctaagctgggcaccgtggctcaggcctgtaatcctagcactttgggagactgaagagggcggatcccttgaggtcaggagttcgagaccagccatggtgaaaccctatcccagttacttggggaggctgaggccaaagaatcgcttgaaccgggaggcgaaggatgcaggtgagctgagattgagccactgcgcttcagtctgggttggcagagtgagactcggtctcaagggggaaaaaaaaaatctctagcttagatttggctttatctttcttagaaatgctccattttagggtctattaatatgctggttaactgataatatagaaataatgactgatatgtgtatcctaaagttagagattcagcatgttaatagtgtgtttgctaatgaacctcagtaaactattaggaaaatgaaacttcttagaacatttttttgcttcctgttattttgcgtgtattttaaggcttttcataacagttacctactctttcttcaatagagtagcttatttactctgtaaaatggaaatcgcttataaatgaatttagaattaaaagattaatttgttgagtgttacagaattttgccactgaaaccaaataaattattttgaaaaagtggttgaagtgacggtaggattgttttatacaatagttaactcttgaagatcgtatgggggttttgttgttcttctggaagcctttttttcctaagatatgggggtgggggaaaggaggaatagttactgttctaaatttgcattaatattatttctcaacagtttcatttcttatattattctttatagcttttgtgttatagtctattgttcccatcctatttttctaagattaaacttattctgagttcctttagcatttcctaaagcaacctctataataacttacattctttcctttcactttccttgtttctttggtctagagtgttccaaattactagttcatcttttattgtgggtagtacattgacctcttagttttcaaattctcaaaaaggaacacactaccatccacattttaccctcagtcaagtaacactgtcagcaccagagggaccttcagtcttagcccaccaaaactc

SEQ ID NO: 92656 - DNA, 1028 bp, Homo sapiens
gtgatcaagctcatgcgactggtgcataaaaccaggaaagttagcttattcatttacagtgagccataactagcacaaagattgcagtactgtgttgacatgactagtatgttctctttcaggaggcagatagactcacgtaggaatcaagacataatcattaaattgtttagtaagtgtggtatgacagagaagagttggatgctgctcaaatgttgaatgaccatcgtctccacagtagggggtagatttgttagtgcactgattgtggttcacacttttttagactgtacattggatccttcagtgtccttatgtatcaaacccggacaagaaaatatcttttctttcagtggctctaaagagaagggaaatatatgttctcaaagtatactatgcttacttgtctgagaaaagtttccaaatcagtcttgacttcctggagaaaactacttccaggggcttgggtgactaaatatagaaggcagggagaatgagtccaaagaaagagtagggtgactcctaggtttctgcctagggctactgagtacttttcctaagacagaaaatcgagtaggggagcagaatcaatagtagatcgtgtcaggaaggtaaatttaatttttaaaaaatgagtaggcagggtgcggtggctcatgcctgtaaccccagcactttccgaggccgaggcagacggatcacctcaggttgggagttcgagaccagcctgaccaacatggagaaaccccgtctctattaaagatacaaaattagccgggcatggtggcgcatgcctgtaatcccagctacttggaaagctgaggcaggagaatcgtttgaacccaggaggtggaggttgcagtgagccgagattgcgccgttgcactccagcctgggcaagaagaatgaaactctgtctcaaaaaaaagagtaaagtttaaagttccagtggtccatccagatgttaatatatgtcggaggcacttggtatggtatgtaagagaaagatttgtgtcatgctgtatgac

SEQ ID NO: 92657 - DNA, 2013 bp, Homo sapiens
gtttttttggggtgaacgttgagggaagaggctggcggaggtgtcagtattaaaggaatatccggggtagggcttgttcggggaacagtgtgtcggtgtggctggagcagagttcatgtgcagagttgctgcaggagacaagcctggaaaggaaggcagccatcatcatttatagaagattggagtaaggggggtttcttcatttggttcatgggaaactggtttttttaaagttttatttatttattgtagagatgggatcttgttacacccaggctggtcttgaacttctggcctcaagcagtcctcatgacttggcctcccagagtcctgggattacagatgtcagcaccactgtacatgtagcagcatctagaattcgtggtttgagggctgactaaccagtctgtgatctgaactgacagataaggaagttataagacaagtgataattgatgagttagtaatttaataaggagtctaggaaagtagagtaacacctaaagtttttgaacatgcgtgctaacatagggttttctttttttcctttggtgaacaggaagaaagatttggtgtggaggaggtgagactaacttggtaattatagaagactagttaaagtaacatgaaggatagctaaatttttggtagaaaagagcagatattctcagcctcctccctttcatagagtaggttggggcagaattacttaaaccatgtattcaaaataactgtgtgaacaactctcaacccttttgataatcacggtattgaaagaggttactgaaccgtggaagcacaaaaaaatgttaaaatccaagagtaaagaactataagtgaaccaaactctctaagatgaggggagttaagatttcatccagttagagctgtctctcagtgtcattgtaaaaccgaagactttgggcttaactttctaagtctcttcgagttctcatggtttggggctgtagagtaatgcaggtcctagccattctgctctgctctgacatccttccacctcttaaatgagtagtttttaaagtccagattgaagaatacatgacaggttgaaaactggtgactttagggaaatggcttcagaaagaagtgaggcagaagtcattggtgatcttactgagtgttggcaagagcaaaatttagacacaaaaaaactgggctttggctggatgtggtggctcatgcctgtaatcccagcacattgggaggccaaggctggtggatcacctgaggtcaggagttggagactagcctggccaacatggtgaaaccccgtctctactaaaaatacaaaaaaattagccaggcgtggtggcacatgcctgtagttccagctactcgggaggccgaggcaggagaatcacctgaatctgggaggcgaaggttgcagtgagccgagatgtgccactgcactccagcctgggccacagagcgagactctgaaaacaaaaacaaaaccctgggcttaaatattacaggtaagatgtttaggagtcattaagaagaacttggatgtgagggaagggcaaatggaaaaagttagaggggttcacaaagctcttctgggacttgggaacaaaatctgtcatttacaaagtcagtgaccttggaataagaaccaggcagtttgagtgtatacaagataatttctatcttagacatcatattatcctctcctgtacatcagttctagtagaatttcagtaaattacttcagcataatgcataaacaatttcagaaactaaagtgcatatcgcaatttttaaaaatgagagttaaaatagtatgtagggaatctctggaagttgtctgtcttagtgtaaaagctttgtaaccttaattgagtagtatgcttgaatttagttgtgtttaaatttaatctcaataaaaaatgtcttacgctgctcattattttttagtaagactgatatgtttttcttcatagttaatgaatctgaatgtgattttattgacacagtggaaaaagtatgggc

SEQ ID NO: 92658 - DNA, 3374 bp, Homo sapiens
gaggtcgtgcgcgcctctgggtctcgtgccgcacccagaagtgccggggtggcggggaggctgaggggagttggtaacggcatcgccatggcaacagtgacgtccttttaccctggatctaattggaggaaaccccgtggccgaagccgcagcctgccggccaaccgaacttccccgtaccgacccaccctcctagcctccgcgttccctcccgctccgcccccctcgcccccttccgcgcgctcggtcctcattggccagcggcgcgctgggggcgggactctcgggagaagctcggcgcatcattgggcggtggaccgcccctcggccccggggtaggctgacacgggagggtcctcagctaaagccaaaagcagatcaaagtggtgggactcgcgtcgcggccgcggagacgtgaaggtgagcgcctgggtcggcccgcgggcttcctccggccgcgctcggattgagggccgggcggaggtgccgcccttgagagcagccggttgtcgatgccgctcccctcagggacggctccgggcgggaaggtgcggggccaacggtcgcttccatcttgggccggccgggcgggggtggcgggagcggccgcggctcgggctccctgcgcgcggggcctccgcgccgcccccgcctcctccagccgcgggccgcggcctccccgggtgcccagcgggggagggggcgggggagagggaaattcaagcggccgcgtgtgcgggagacaaaagcgggcggcgggccgcattgtctgacggcgctccctctctgctttttgttctcgcctcgccgccccgcccctccgcagctctcgaggctcctcccgctgcgggtcggcgctcgccctcgctctcctcgccctccgccccggccccggccccgcgcccgccatggagaagactgagctgatccagaaggccaagctggccgagcaggccgagcgctacgacgacatggccacctgcatgaaggcagtgaccgagcagggcgccgagctgtccaacgaggagcgcaacctgctctccgtggcctacaagaacgtggtcgggggccgcaggtccgcctggagggtcatctctagcatcgagcagaagaccgacacctccgacaagaagttgcagctgattaaggactatcgggagaaagtggagtccgagctgagatccatctgcaccacggtgctggtgagtcctcggcgcggggagcaggggaggccttttgtgagatgcttttcattgagagtttcgcgggcacggaaacaaacgtgagccggggcttgccggactgtctgctggggtggagggttttaggtgagccctgacttccctactgtgtccctccggttgttgagactcaagaagccgcttttccaaggataagtccttttttttcgccccagatgctgggtagctaccaaacgatggaacttggaaacatccaagtaggtctctgcgagactgaaaggcgtttttaagtttcttgtgcggggagactgcgtcctgagatctgtgagccctttaaatgtattcagtcggttcacaagcttcaggcagttgaaagaaggcgcaggcacctttttgttacagacaatgtagtagggattttttcccaaacccagtaatggaaatttacttagaaaatctgaacagatactttatttttcaagtaagagtatctgttgtgctcccccccaccccccataaacaggagaggaggggagttcgggaaatgtgaaaaggacacagctgtatctgaagaacacaatgtcctggtaaatttcaacatttaataacatttccttgctgttgcacacctgtgcttaaacactagtgttgaagtgaattcgtttccagtgtggagcagacaaggaaagctttccaggttttgaactgtccagtcttagcaaggacgattgttgggtggagtaggtggctgctgtgattcacccttattagtgagagagaacatttttagctttgtcattccatggatcttttgatccgtaggataagtttttaaaactgaaataccagcattatatccaggagtgtttttaaatgtttcagtgctgccaagagtcatttctatgaataaaatgggaaataatctcatatggtttgccttttaagtgtcacttttacaagaggcctacttatttttgatgtgtttgtgcacatcatattttaggtgggctttgatagacaagcatactagactggggatttttcaaaagggaatggaagaaataatttctccctggcctcctcccccacccccaccccccaagccgcctttcttcatctcatcagaatggtggggcagggaatatgttccccaccccttgtttaaaaaaaaaaaatccacgaaacttttttaacctatctatttttctaatacgatgacaggcgatccggacaaaatcatggctgatggaaataactggtaaagaggcaaagaaagtaatgcagacagtgtgtactaaagtggagaaaacttaagattatttactttatgaagtcaaaacttcgttgtattcttccgtgtgctcttagcttccagtccctgcttggcattgaagaagcacttgtaaaagctttttggactgaattgctcgtattaaaaaattttgccaacttgaaagtagtggtagacttcaacttgagtaacatatggtaatggctgttaacagcattatctgttaccaagggaagactcataagaattccatatgttaaggttttctatgtatgtattttggatactcttacagcatatttcatttctgttcagtttattgcttttcaattagttaccttgaagcaattcagaatcaccgcgtgatttttcttgttctcgagcaaggtgactctgagccaaaggaatattcgttttattttgtggctcttataaattctgctttttatgatggcgtaagtcggggaagagttttgcttagttgatacgtagcttgagagagagaccaggtgttattagaatagaactttcatacagaccatttcaatggggacaacccctgaatttaggacagtctcttttatatactgagaagacatagaatagtttagtttgatgaatccgagacaccaaggcataaatgaaatattcataaaatggcttaagaggctaactggggcttggtggccaacctataaaaaatatcttgggaaagcacttcttcaagttggcaactgtattgagagctttctgtgtgccaggcactgtgctctgagcaatatggggaggaacaaaacagaaccgtggattttgccctctgatgatttataatttagagagcatgtgagagatacacaaacataaataccacaatattccca

SEQ ID NO: 92659 - DNA, 1328 bp, Homo sapiens
atgatactcgataattagatcaatgctaacaacaagtcaaactccaaagagttggggatcagagaattaggcctgtatatacaggagcagtacggtcttatagtagaggcttaaaaaatgtttactgatgatggttggctaacttctgtaaatgctaggctgatgaaatgaataattgtaactcaccattagctagcgtatacccagactagggatcatgtctggtctgttttgctcaccattgaatccccagcacctagtaaaaagcctggtacacacatagttgataccccttatgctgccgagtgaataaatcgaaacttgaaaccattacaaatctagttcctctgtggtatgcgcttttagtgtcctggaggagttccaaattgtatttgcattttttaaaagtcttctctatacttgtttgtcatcttctcacagtattttcaaggagctttgtttactcatctttggttccagtttacccctactacctccttttctttttttttcctgtcacactgcatatttcaataaattttctccagtagtttaattcggtttcataccgcgcctctccttgtttgcggataatctctctgacatattttttattgtctatgattttttattaataaagttgccaggaacccattaaatagaactgcaaggtttaggtacgatgtattgaatgtggcttgatgggaacaccttttctgtcctcttctcccataggaagagtttaaagaacgctgtactcagtgtgctgctgtctcatggggtcttactgatgaaggcaaatattattgcacttcttgccacaatgttacagaggtaagtaacaaatatcatttatgaatttgcttatgttttaaaaattgccatttcagcctgatatgtagtctaagtcccaaagaattgggttgatttttgtcactcatgcaatgccaacattccaaggatgcatgtggtcttaggtacttacacataggttaagggatttgtgaattagattgaggatgagtttttgaaattatgttgggccacatttataaatgatttcttattcagagtatgtggttgagggaaataattaaaattgtacttagaagatgatgcatttctttttatcagttagtacttatttacatttttttaaatgtgtcatggtggcttagaggtttggaagatggaatgttagaaaacttgaggactgggccgggcgcagtggcttacgcctgtaatcccagcactttgggaggctaaggcaggtggatcacctgaggtcgggagtttgagaccagtctgtccaacaatgggaaactccg

SEQ ID NO: 92660 - DNA, 1037 bp, Homo sapiens
cagaagaaaaggactcaactcggtgattttaatgtctttctctatctaaaattaagaaggattttttcagcatttctcatgtacctgacactatgatgatattataattctttttaaggaaaggcaggtaagaatacatttagatggaagacttaaccagccctccaggtgattctgatgcacacttaagcctgagaactactggttcaacatactaatccctagtgtgcattttgtggaactcaatgttctgatagatgctacatacagaccccagagattttgttctcaacttgtgaataccacataaaacatttactggaaatttatatgtaagttaatatttaaagtacaagagagctgtggtgtagatgtgcctgtacatttgttgtcataacctgaatcacccaccactcatttcccttccaccttagaacgatgttttacataatttttggaagcgctaccttcagaagagcaagcaggcatattgtaagaacccagtttataccactggaaggaaacctacggtaagtcacaagtctgaaaagttggattaaaaaacatgtctgttgagatgtagagatgaagatgggttcatgaccagtttgagtatctgagattatgatgcttgtcagaggattttcagttaagaggcttctgttacagtctagaggacggggtcactgatttaaacgttggaataaagttttttcttcacttttttcctgcagtatggaattaattttgacatcttatcagactagttgaaacataaaggaatttgtggttgattttctagatagaagatagtttctatcactgtactattaaaataatttttaatttaataatgtatttattctgtttgcttggaatacctacttactttatgtggcatttcaagattcagctcagttatcatatcttctcagaagcctttatgtgaagaaaaataaaatctgggtattctcccatatccaccagctgtttttagcagtttctttgtaactgctttataaatgtgccatgtaaca

SEQ ID NO: 92661 - DNA, 2658 bp, Homo sapiens
gaaaaagaggtttaatggactcacagttccacatggctgggagtgcctcacaatcacggtagaaggtgaaggagaagcaaaggcacgtcttacatggcagcaggcaagatgagcgtgtgcaggggaactaccctttataaaactatcagatctcgtgagatgtattcactctcatgagaacagcatggaaaaaacccgcccccatgattcaattactttccccaggtccctcccatgacacgtgggaattatgagaactacagttcaagatgagatttgggtgaggacacagccaaaccatgtcaatatttaaaatgcctgtttagattttttgctgtttttcttttgttatccaaatagttcactggatttttaaaaatctccatttatctcctaagaaacgtctgtctgctctggatctctggatggagttgaatactcacaacgaaaggagaagggaatcgtgaagatgaccatgccacagacacttgccttctgttatctgtccttactttggcagagagaagcaataacactttcagatcttttgaggttagctagacctcttgtatgataatatttttgctggttactacatgaactaagtagacaaacttcggatattttgatttttataagaaggcttaacttgaggaaggaactggaaaggttgagtagcctgaattctaattctgaaatgtaatcccccctgggctagtaattcatcttcttgattttcttatttatgtagtagaaattatagtacttaccacacatgggctattggaaaattaattatctaatataatcttttgaagagaaaagtgacatttaagtacctgagtaatattagtaaatatttttcatttctaagaaaagataaacaggtgatctttacattagcaaaatggttatttgtagttacacaaaagcatatattggtgttaagagctaaaatataggttgtctatgtttgtaaggaaaagttgaagacaaaactgttgaaaggatgtgttatccagatagtaagcgtttatatttttcaggataatctacagagtgttttggttaatgaataaattacagttttatgtgtaagaatttctcacttaatagacgtgccaaaattcttatgtgctgatttttttctccttgctttatatgtgttctgaatagtaacatttgggtttaatcaatatgtagggtgcttttaacagcacaaattaggaaccaaactgctgggtttgaatcctggctttgccacttatttattatatgaccttgagtaagtcatttaatttgtctctgcttttgtttcttcgttggtaaaatggggctaataataactacctcatagggttgtaactactttcaataattagcgctacatggaaagcacgtagagcagtgtctggcacataataagacctcagtgctagtcattactgtttttgttttcatcatcaccaccatcatcgtcattattggctcagcccctttgattaaatgtaatgcctccagtaaatgatgatagtgcctttgaatttggccacatcaaccaaataaaaacgctttcctcaggtctgattaactctacaagcagatagcccatgattcagtgaattttactattaatttaaaaacctgatcttgttttgtatgcccccattgggtgatctcatcttttcccaacgctttaattaccactatactgatgactctcaaatttatatctctagcccagacttgtctactgagggccagacccatagattcatatatacagctgtctgctggacacagctacttagatgtctttatggtatctcagaatcagcatgactagaggttcatcatctgtctccttgatccagctccttttccagtgttctctttcttagtaaatgccatccaccctgttgcatcctatccagaagcctaggaatcatccttgactctttcccctctacgtacactgttggtcaattgtccactcagttatatgtccaaaaactcacagaaccattcttctctgcattccctctctctctctgtcctctctaccctcatttggattgcttaacagtctcccagatgagctctgtgtctgtaatcttgtgtcatttctatccattttcctcctgataaccagaaggatcttacaaaaacataaacctaatcatgtcattagagctggataaaggggctagccatcctacccaggacgatctataaggggctaacagaactctcctagaaatctaacaaggtggagaaagtcgtatttacctggaattcttctcagggagaatattatatgtggttggaataataggggtaagatactacccacccctcttctctccctccctcttttctcctctctctctctttccctctcctcccccaccaaggggaattctaaaatgccttcaaggagattaaatctagttagctagggggcttttgttttgctctgtggaatacacaagtttgggaacagagcttagttgcttggggctataggagaagagactgtcaccattgatattcttcctttgcttttctcccagaaagagctctaagtcataagttctcaaaatgtggcctcctgacttacagcttcagtatcacttgggaactggttcgaaatgtgaa

SEQ ID NO: 92662 - DNA, 1090 bp, Homo sapiens
caaacttctggcctcaagcaagcctcctaccttggcctcctgccttggcctcccaaaatgttgggattatgtcatgagccaccatgcctggcccagaggattcttatggatggcaaagtttgagaaccactgccaaactttgaaaaaatatgtaaagaacacagttttaagggagtatgttattagcctggccaaagtacccacataccttaacactgtgcatgtcactccctttttaagtcctctagcagcatccatagtccttaggataaattcattaccctgcaaatagcctgtaagggaccctgcctacctagcaataatggcattaatgaataaaaatagccagcccttattcattctgtaaatttgtattgaatatctactatatgcaggtgttgttctggcatctagacccttgcgatgcagttgtgaatcatataggtcaagtccttgctctcacaaatttcaagaccagaggaggaaaaaacaaacacatacatatggttggtgcaaaggtcattgcagttaatggcaaaaaccacaattacttttgcactaacctgataaataagaaaaggatcagacagggaaaggctattcagaagattgaaataggatggtatgatagaaaatgactagatggctactctagattggttattcgggaaggcctcaccaagagggtggcatttactctgcaccttaaatgaaaatagagccagtgtgaatatcaggagtacaatagacctcacttaccacagaagatatgttccaagacattggatgcctgagaatgtagatagcacggaaccctatatacactatgttttttcctatgtgtacattcctatgataaagtttaatttataagttaggcatagtaagagattaacaacaatacctaataataaaatagaataattattacagtgtactggtactactactcttgagctttgaggctgttattaagtaaaatataaggggtacttgaatgcaagcactgcaacactctgacagtagatctgagaatgagccaatgaactacaagtaactcatggctgggtggcgctacagcttggctgtg

SEQ ID NO: 92663 - DNA, 1712 bp, Homo sapiens
gtccattgtatattttcagaccacaggtagctgaaaccatgcaacacaaaaaagaggatgagtggggactgctgtactggcattccgggtagaaggaggttgctagtgccaagccctaaagcaagagctgtgtgatgaaggagcagaggagagttcgtgtgactggagtcagagaattctagggcggagtaggaggatgagagtgaacagatcatcagaggcagatatctgtctttgtaaaccaagttaggaatttggatttttaaaaattgaggtataatttatatataataaaatgcaccctttaaaaatatacaattcagtggttttcaatatgttttcaaagtttgcaaagctgtgcagtctctattttcaggacatatcactctggaaggaaacctcatacccaggggaactgcgggtttccagtgtgagagtaagcccctggaagattgcagcaggagagatacgatctgattgatgtttttaaaagatcattcaggcagctgtggaaaatgagttctgggaagggtggaagcacggagaccaggtggtcttttgctatcctccaggcaagagatggtggcttggattatggcagtggtaatggtgactgggttcaggatctgtttttacaggtagacacgacttaattctaatgcagtggtttttttcagtgatctgagacaaaggatgagtttactaaatttctaacccatcatagattgaaactttggaaaattacataattataagtagagacagtgtttccaggggacatggctaaactctgttggtcaggagaggcatatgagatgcttttagtctacaccagtttttctgtcaacttcctggattgatctagagaactagctgataatacctaggaagggaaatagattgttcagaactttgagtaagcagctttttttttttttttttttttttttggaaaaacaaatacttttctaaaaggagattcaaagaactatttataaatggtgaaaaactgttagaactccagatgccgaagacctgctctttgcggacatttctgcttcccctagtcaggtctctcatttcttcctctgctcctacagaactgactgtgcctctgttgtgctgcttgagacagtgtctctactgactcatgtgcaggctgtttgtctgacctattagggtgggagtgtggaagacccttcatctcttacttatctctgcagactcctaacactccacatagtgctggcatgtattatcacataggagtgaagactacataaataatgagcacattaacatagtggaatactaggcagcttaaaaagtgacaggtatacattacatcttgtatataaaataatattaaaccaaaaatataatttcacaataatacaaatactgattactgcacataaatactatcatataaacgaaatatactaataaaaacttagctggggaacctttaacaccatttttatgtaaatatttctcaactttcagtagagtaaaaattaaaacacatttttaattgaaattaaatttgaggctgggcctggtggctcacttctgtaattccagcactgtgggaggctaaggcaggcagatcacttgaggtcaggagtttaagaacagcctggccaacatggtgaaaacctgtctctactaaaaatacaaaaattagccaggcatggtggtgggtgcctgta

SEQ ID NO: 92664 - DNA, 1062 bp, Homo sapiens
gtaaaaaagcagagagacttcttagagattttggtggaagatataagcatagaaaataatatgaaattacatcttggtagcaaccactgcactttgctttttttcacttacatcttggagagcacttaaaaaaattattttggaataattttagatttatagaaaagttgcaaaactaagagtagtacaaagaatgcccatatatcctgtatccagagttaactgttgttagcattttatgccattgtttgatcatttgtgccatttttcctatctgtctacctacctacttgtgtatctgtgtaattttatttctgcgtcattgattataagttatatccatcctgacccattactcctgagtactttaaaagactaaaacaaggtagctaggtaatgaaaaaataagccaaacaaaaccagaaacaatctaaatgtctatcaacaggaaaatggaaaaaatgtgatatagtcatataatggtacagtaaaccactatgaaaattcatgaactgcagctgcaagcaacgtgaatgaacctaagaaacattatatagagtgtgaaaggcaaagctcaggctagacgtggtggctcgccctgtagtctcagctactagggaggctgaagtgggaagattgcttgagccttgggaggtcgaggctgcagtgagctatgctcatgccactgcactccagcctggacgacagagcaagaccctgtctcaaataataatcataactttaaaaaaaaggcaaagctcagaaaactacatactatggtataatactgtctttttaaaaggcaagttaacaatgagcaaaattcagtaaactagttacctctggaggcagagacagagggatgggatagggaggaagtatactagtagatacaaccatattggcaatgttttagttcttaagttgggtagtggattcataggcatttattattaccaggcttcatagcttacagatatagtatatgtattcttttgcatttttcagaattttaaaggcagctaaaggatgttgtctaaatagaatttataaaagagagga

SEQ ID NO: 92665 - DNA, 1056 bp, Homo sapiens
cccagtgtcagaaattgattcagttaagtatagtgtgggctctaagaagatgtttttcgtaagcatcttgcaagtgattctgatggagattacgctttgagcagtgcattatataagccttatctctatgtctgtcttttgttattccaccttgttccacagaagatttgaggtagaattagcagataaccaaagggtcagtataaaacaaaatgctgttataccttattaagtatgtgttgttttaaacaggattctgtttaaaactgtttgggaactatatctattgagaaactggtctgtgagtttaacatatatgaaaacagtgaaaatcaaggctgaaaagatagaagtatccttcctctctctgtaagtcattgacagagtacagtgtatctaatggagaagattctggcaggcttcttattctgggaaatgtagacacatatcttggtgttacatttttaataattatagtttaataactccgtatttcccccaaaagtgtatttataagaggtttcgtgtaagataaaagtagatattagcaagtggtatagattttgaatgtctgtagatttcatatatgctgaattttttaaatttccagctttattacacttctaattatgacctctttaacatgtgttttttttttcctttagacagacattacttacattccttttttctttttttttttctcctgccaccttgtctgagaacttaggttccattttatactttttttggtggcaaaatatacataaaagttaccattttagccatttgtaagtgtgcagctcagtggtattaagtgtatttatatttttgtgcatccatcaccaccatccatctctagaattttttcatcttcccacgttgaaactcatacccattaaacaccaacttcccattccccacttgttccagcctctggtaaacaccattctactttctgtctctaggaatttgacttctttaggtatctcatacgtgtggaatcatacaacatttgactttttgtgtctggcgtctggcttacttcacttagca

SEQ ID NO: 92666 - DNA, 1008 bp, Homo sapiens
aaagtactttgcacaattccttgcatagaataggctctaaactaaattttattttattttattttatttgagacggagtctggctctgtcgcccaggctggagtgcagtggcgcagtctcggctcactgtaagctccgcctcctgggttcacgccattctcctgcctcagcctcccaagtagctgggactacaggcgcccgccaccatgcccggttaattttttgtatttttagtagagagggggtttcaccgtgttagccaggatggtctcaatctcctgacctcatgatccgcccggctcggcctcccaaagtgctgggattacaggtgtgggccaccgtaccctggccactctaaactaaattttttatgtgaatagatgagtaagtgaaaaactacatgcagtattaatattaggaatgtttataaattgcaaaaatacaaatggtatatgcaaaaaacttcgagttcttaaagtaagtgctagacagaatatattaatatttgttcatagcttttctgaactttgtaagagaatcttatatatttttatatgtgcgagtttagtataaagttgaattgtggatttttaactactagacttaaaacctggtgttactcccatgtggaaagcacgtgaatattatgtaacagtgagccgcatttgttagctatgaatttgaagagtaatgagagagtgcaggtgggaaaggtgagagggaggttgtgtatcagagcagtcatgacaacattataactctgattgggttgtagctttcatcctttctccagattcttctaaggcaagaagtagtgattttaccatatcatgggaaaacccagtaagagttttaagagccaaatagaattttagtggcttttaacatttagtatttatgacttaaaattgctgagttaaaatattaaggatttatgggggttttctcccttcatgcttttctccaaattccaaattttattcagtaagtgcatattagttttatctg

SEQ ID NO: 92667 - DNA, 2080 bp, Homo sapiens
caggaggctgtggtatcatgtctgttcttagaggaggtcactggtataaccaagttctctaagatgagtgagcttcagccaggcagagcctgagatgaggaatgggggaaagaaactggctttctaggcaaaggggcaaaagtagctgtgcaaagcagagaggcaagtgagaatatggcttgtttgggggaactatggagattaggctgggagctaaaagctttagtgagttcatgagagcaggggaatacgatgattgggccacaggagagtaagactagagaaagggagagcagttataagggtggcctaaggagcaacagtgacgggaagaaaggggatggattggaaagcagtcagcactgatccaagtgccttaggtatattcattaatttagtcttcacaacagctatgaagcaggtactattcttattcctattttagatagattgtttaaaaactgaggcacagaaaggttgtataacatgtccacggtcacagagctagtaagtgatggagcagggactctagtccaggcagtttggttccatagtctattctcaaccatggtactatatgccacattgagagaatggaattaacaggacatggtgactgaatgcatgtagaagattcagttcagttccatgcaagctcattatctcttataaaaaatggctgtcatacttgaaattgtgtggtcacagcttacatacttagattgggaagtacagaaattttttgtttagttttcaaagtctattcacttgaacataacctcaatttattctcattataacccattttacaagtgaagaaactgaggctaagtgactctgatccaagagtcacaaagctagtgattggaaagcttaaatataggtcctaggttttctggttccaagtcccacattattcagtcttgagtaataggtgtagtctatgctgaacatataatttctttaggaaagcaatatatctagttaaacagttgttgagggcttccagtgtgctagccaggatgccagccagtgcacatacattgctagagaagcttttggtctcataagggagttagttttaggtgagcaaacactgctatagaaacacagacaagagatgtggatgaaacaactggtatgtggctgccagatgccaggatgtgtcctagaaatagtagatgttttaggaagtcggaatagggaatgatacgccgttttaagattctaccattcatttttctatatggatgccatgttttgatgttttattcacaaaatgtgggtctctgagttcttgcatagtgtcgtgttttaagataaaggttattttatggatatatacattggggatggtctagttggcaaataatttacattttactgttttgttcttcagatgaaatgcatagcttaacttgccacgtggtaaaaatgactggaatgggagaagtggattttctgacatttgatcctatagctaaaatggcaaaaactgttaagtacgatgtacaagctgtagctatcattgtggtggtattgaaactgctctttctattggatgacagtttcgagtggtaagtgtacgtcaattttatgacaagtaacattttatggtgctgatcttagttttttaagaaagctttaaatgtcatgaagacactttaaaaaaagagctaaagaaaaaatttgtactgtatttacctaattatatgttatctcaaaaaatggagactctcaattgttacagaacattgactagtagtcacaattatttcttacacagtactttgactcagctggttgtcagttgtttgatcatgttttatacctgttattctttaggtagcaatgttcctcattgctccactgatttcctagttttaaagtatcttcataaatctctatctatatccctttaggctcctggcaatatgtgttctcaaagattattttagaaagtaaaggaatcttaatatgtcacccctcccagatgccaacaaagagtgacagtatttatagtgtctcctcctctgtttcagtgattgcttctccattaaaacatggtatcaatttcaaa

SEQ ID NO: 92668 - DNA, 1095 bp, Homo sapiens
cttcgccagagaataatggagaataatccctgtatggagtgaaagagtgaggagtgagtttttatactttactgcattcagttctgttgtctctctaatgtctacatcttgatcacacactcacaccaactgcccagtgcagtcaattaatgaaaactcagatgaacaatgtatattattatagtgtggtttatttggttaataatcttggattttatttctttcagataagccatggtttgatttcagaaagtggtaccaaattatgaagaaagcttttgatgagaaaaaacaaaaatgggaagaagcaagggccaagtatgttctccttcctggtttagatgcacctgccttacttctgtgtctgttactttacatttgaaagctgaagcttcatcagtatacacttatctacattgtgacttttttttctggaaatattagccctacactctaattaacttttctcttttttacattactattaatcaaagtttagatttgatgtggatttcaccagtgtttttattaatgtcctctttctgttccatgatccaatgcaggataccacagtatactttttataatttaactttttataatttgcatgagacttgcctatatttctaatactcctccctcttcccctttctcaaatttagtcatttctcatctatgcttcccaatattaaaaagattacaaatgttaccttgcaacatatgtaattggaatgttcccccaaaataaagatccctgtgaaaattaaaacaaaggaaagcagatagcaagtccatttgattcagccagtgtcactgcctttctttgaactgtcattctgatgtgggctcattgtggtagggtagaagagagcataagcagcgctaggtttgaatcctgtctgcattacaagctagctgtgtgcccatgggccagttacttaaccttttgctgagtctgagtctctttgaggctttgaagaaaaaggtaacatctctgtatttaatgtaaatttacagtaatactaattcgactcagtaattttatatcctttgagaaaaatcaaggttccccatattagttgaaatgagaatttg

SEQ ID NO: 92669 - DNA, 1031 bp, Homo sapiens
ttagtcctgacggatcctaaggactgggtgcctaggggccattcctccctggggtctcagtggtgacagggctttccttaccccaagccagacaccaacctacactttaaacatagctcttggaggcccagttcattattgcagtgttatgtcagttgcacatttaagacttaccggcttttagctactttagggaataatttattggccaaagaaagtaagtctggttataaaatggcactttccagggaggtaccgggccccaaggtggaggctgtcgaggggacccgtttccaaggtccttcttcctagagtatgtgctgagggctgacacacacgtgcagtgtgagtcactgctgagtaatatgcgaagcactaccaactgctgctcaggcccagagctcagtgcgtggtggccacctgtcggtttcacccttccccacccccatgttgacatacatgtctaatttttctctttgtttctctgaatattatcatccatgttgtcagatgaaaattattaaaacattttctatatctgagcatgggttcctatgcatgagattatgaaaaacactaataaacaatagttgaaaacctaaaacagcgtaagaggctactttgatgacttctagctgttatagaagatgttgagaagaacatggagaaaaattaagcctgtgcagaaaatctctatgccctaattggtgtatagtgatatctcattatggttttaatttgagttcactgctaatttttgccttcccttttgggttaggcagaaatttcttagatgtgacaccaaaagcatgatctataaaagaaaaaaaattggtaaattggacttcatcagaagtaagaacctctgctccacaaaagaacttaaacgaataagaagctacagacgaggagaaattaaatgcaaatcacatatccgtttaaagatttgtatctagagtatataaagaatttttaggcaataagaaaaaaactccatttttttaaatgggcaaaatatttgaaaagacgtt

SEQ ID NO: 92670 - DNA, 1052 bp, Homo sapiens
cctcaggtgatcctcccacctcagcctcccaaagtgctgggattacaggcatgagccactgcgcccgactcctttctgttcttaacatttaatatcattgcagaaattcaaaataaaaagtcaacatctgttttatgtatagtcatgattttactgacttgatcaagtattttttaaaattcttgaaaaaatcagttcttaaatcggttaaaatgattatttgctaaatgatattactaaaatattgttaaaaatgtgtgcttttatatacgtattacttcctagtattaaaaataaatggtgagaaattattatagatgctacagatttttaaaatatttgtatttctggcttcctatttttaatctgtttttctggaaagttcacagatatttcttgagtatctactagccaggcactttgtcaagtactaataataattctaattattgtataggatttaaagaaccaatacatacagcatcttattcttcagaataaccctgtgaaagtagaggataagtttagagatgctaaattcatttctttgttcatttattcacccaattattcttcaacaaatgtttaaatgagttcctactctctaccactccctgacaacactaggggcataaggatggctgagacagtctctgcctttaagaacctccataatttgtcattcaaggtcatgccactagaaaatggtggagccggccgggcgcggtggctcacgcctgtaatcccagcactttgggaggccgaggcgggcggatcacgaggtcaggagattgagaccatcccggctaaaacggtgaaaccccgtctctactaaaaatacaaaaaattagccgggcgtagtggcgggcgcctgtagtcccagctacttgggaggctgaggcaggagaatggcgtgaacccgggaggcggagcttgcagtgagccgagatcccaccactgcactccagcctgggcgacagagcgagactccgtctcaaaaaaaaaaaaagaaaatggtggagccaggtcttctgattcagtactctttcttg

SEQ ID NO: 92671 - DNA, 1005 bp, Homo sapiens
aggcggagcttgcagtgagccgagattgcgccactgcactgcagcctgggtgacagtgcaagactctgtctcaaaaaaaaaaaaaagaaaagaaaaattagttttctgaaggccaagccaaaaaacatcataggatactcgacctcacttatactcaagaaatacaaattgaaatgaatactgtttcccacatactggattggcaaagattataaagatgtgtaaaacctggtatggacattggaaaatcaggcattcttgttctgagttcatttatgcatgcaacagatagcaactcctgtgttcaggcatgttctaagcactggggatacagcactgaacaagacccccacctttaaagatcataggttccaactaggtgaaagctgatagtaaaaatatatattatttttgagggaattaagtacaatgaagaaaaagcaagaaaagataaatgataaggtaggccattttttaaagggcggctgagggaggatcctctggggcagtggcattagagcagagaccaacttgcctggaacacagtagcacgagcagccatgcagccatccagggggagatcagcccaggcagaggaaagatgtgcagaggttctgagcaggggcatgctggatgcagtcaaggactggcagggtgtccagagtggctggagcactgtggataaaggggagagggagagcagatgggcaggtgggatggtagaggttgctctgaggtcacggtaaggatgaccttaccacggttggcttttttctcaaatgtcacaggaagccactggaaatttttaaacaaaagaatgatgtgatccaacgtatatcataaaagtatcactgactactctgatgagtacaccgtagtggggatgtgagcagtggttagagagttcattttgaattgaatgtattttgttactctctacctgtttcacttattgtaaggttttcttttttcttttctttttttttttttttttttttttttttt

SEQ ID NO: 92672 - DNA, 1850 bp, Homo sapiens
tctgagcccttagtatttcgaatgaaattttacttaataggtttggattttatttgaccgataaccagaaagcctttttccctttatctagtaatgggtagttttgatgttttctgtttattctgtcaagtgttattgcacaggacccaacagcccaatgccattaggaaaataaaaattgtcaaagaactacatcagcatcgcgtttgaaagcagttttcttttcttaaagaaacagcataccaattgtgacagagcagcccctcatctctgctggagaaaacagagtgcaagtactgaaaaatgtgccatttaacattgtccttccccatggcaaccagctgggcattgataagagaggccatctgacagctccagatacgacagtcactgtctccatagcaacgatgcctacccactccatcaagacagaaacccagccacatggcttcgctgtgggaatccccccagcagtgtatcatcctgagcccactgagcgggtggtggttttcgatcggaatctcaatactgaccagttcagctctggtgctcaagccccaaatgctcaaaggcgaactccagactcgaccttctcagagaccttcaaggaaggcgttcaggaggtaaggaaacaaaaacatcttcctaagacgcctgcgtgtttgtataagtattgggttccaccttttccttgttatgtaagcatgaaactcagcctgaaatgaatggattaggaataaaagattttttttttaagagaaaaggcccatgggtataatttgtaaactaaacctatacaaccagaagttattatcaaggatgcaaggctaatcttaccagcagctgagttaacaattatgatttcagctaagggatttgctggagaaagagaaccccatacataatcttctgttgaccacaggtagattctcctagtctgttttcagcacttctcccagtgccaaacaagctccctggagctcatataaaatgagttattatatctttgcttggtgtttcttggttggtaatgtagtcagggagagcacaaatgcattgtgtgaggtttacaaattaattccaaatagttctgggggttttatggtgatgaatacctcactcagctaaaagttagggactaaaggtgttagaaaccatacttagtgacttggtggggtaaagagcatccatctctgcgtatggagttaggggcagaatgttagcctttcctgagaaaatgcaccacatctcttcagctgtggtgtgaacttgatgctgtgtcttaacttggtataatgatagggtgacttttaaaagtcatgaaattttggttgcaggtcctagtgtttgaacagagttgggatgtgtgtgaaagacagaaaagggggtcgtgagtcagaagcacttagtgggagtacctacacagcttgttgtaatttacttgagtggcatataaaagtggatattttctctgttttaattttttaagtatttgtagaatcaaaatttttactcaaaaataaatatggaaaggatagtgggttgctgtaagccacatacttttatgcggtaccagagcttggtctttagtaagcatgataaccagttaaatagttgtggcttatcacattgatatttcaggttttcttcccctcggatctcagtctgcggatgcctggcatgaattcagaggactatgtttttgacagtgtttctgggtaatagatgtcttttaatttgatttttaatttgcagcttttataacttattcctttcttgttaacttgataaatcaaaggtggctttagcaggctttccccttatcttactacttttactgtggtacagtc

SEQ ID NO: 92673 - DNA, 1044 bp, Homo sapiens
acgtggtggctttccacaggacactagggccagaagccatgtagctggctaacctgagaatgtccccactgttcagtctgcaattgctttaaggggtaatatcttctttaaaagattctgattattatttggagatgatggaggtagagaaaaaaacaagtaaaagaaagatattgctgctgtgcagttgcctaacagtcttccctagtcacgtgctaaaccgtgtaactaacctctctgtgggctgtagtggcaaacctgtgcaaatctgtatttactgaagtagcgttacacagacctctgttcttgccatgtatgtaattttcatgtaaaaccattgtctgtatcacagatggctgtttaatattagtgttactttttttctttaccttttgtaatgctcttgtttccttttcaggagaatgagaactcagttctaatcttggttctacagagtagttttgtgaccttgggactgttatttaaactttttagacttaaatttcctaattgtgacataatgagattgaattaaatatgtctaagcttgcctctattacaaaaactctgtgattctttttcttcgtattttgaacttcttctaatcgaacaaaatgttaatttaaattgtccagaggtgataatgctaaaaactagatcttattttgaactgctgggatcccatgttgaaactaagactcatgagttttcattttctcttccaccgcttcctgtagctgactataaagaaagcttcaacactatcagtaacatcgaggagattgcgtataacgccatttccttcacatgggacatcaacgatgaagcaaaggtgggtggtgaggtctgggcgccttatgtccagccatttgagaaatgggaggagtttaatgatttgacaactgatttttttttttttcacagttttatgtgtttcattctcaggtgttatgaaactatcctcttccctttttattctcccctcctccaaaacagatcatttttgttgccatcctttgcacagagtccagtgtgtgaaacatt

SEQ ID NO: 92674 - DNA, 1034 bp, Homo sapiens
tcaggtggctgcatagtccggagtttgttgcttggctaagcaataaatagagaaactttccattttatataattgttgttacagttgttttgaaattaaatatcataataggactcagtccactggctactacgaacagcctatgaaaagtattggccttgtgccccaggatgcttttattcttaaagcaaactggagtgttacttgctgtttgccattggggcctcactgagaaattgtggaggaggcgataaagagcccataagtcctgagttcccttttccaacttatccatgaccttgggttagtccctcagttcactagctcagtcctttccccttgatcccccaggagagtcacgaggttagagtggccagctcttcttcgttgggtgtggtcaggattaataagcgcttgtcataggcttggagatcttggccgaaaggcccagcgcatgggcagggcgctttgtttgtttgatgtgtcactctttggggtgggagtaatgaaagccaagatgacgggtagggataatggcttgttttattctgaaggcctgcagcatatttgtattagaaatattgttggaggagtggcttaagtagccttaatagcattgctaattgatgtaggtaaactcagtttcatttcccctttcagacccccagcactgacgtgattttaagcctttgcctgccgccagaagggtgttgtgccatttcttaatgaggctgctgtctttttgaagctgatatcaggcagcaacttcaagcatgtgttctaattaagtatcgaggttttttgctttccctggccaacttgatgttttctgtttttattcttaaagtaattaatgcctcagggcagcaagagtgaacaagtgtacatgcagaatcctgtatagttggtttttttttttactgttttctgaaaatatctactttctttgcccactttcttgttctcatttaggatgcatttgttgatttctttttttaattgtaagatttatacttggcacataataattgtac

SEQ ID NO: 92675 - DNA, 1746 bp, Homo sapiens
atggggaaggagaggtgcggattcttctctacagccacagggaggcaagaagaaaaagtgcagggcccagagggatctctgcatgacctgttttccctggtgtggctctttttttatctggagaagagaggcttacttttgcccagtgcagagccaggggctgagctggattcaatgcagggagagtctggaaggtgcgtcgagtcttgaggggaaagtttgtgctggctcgaaactggggagcaaccgtggatgagtggacattccattgaactaagacagcaagatcttgagtttttcctactcaaaaatattggacctatttttggcaggggacgggggcagttcttttcatcctattaagggagcttgtcttttattgagatttttagaggggctaggtaactggaagtatgtttgctgtcagaggcctggtctgtcaccctggcttttgcatcaggtacacaaagcacagtggctgagcacagtgaatgagcctgaggccttttttggattttttggatgatgtttactctttgtgtggcattttggtgattttcaccttcctgggtgctcgacatttttgtattattgtgaatctccttgaattttgtcctgaaatctggttaagttgctcggaaaccatctgctcgttaagatcttatgtctatgatttgctaggcggatctggagctgtgctcagtgtaaggctaatcatcccgcgctcctgagcaggatttttctgaatattctaccaagtgccctgctcattacaagttttctcacattacttccttgtaataatcctcatgacagggatttccagtccatcccatatggtgggaacaggtactgtttctggctctgtgtgagtttcgggcactgtttctctaatcttttcggatgtcagttcccaaccctgacccccagccttgggcagcttcctggtacctgtgtacctgttggtacccggccacgtactggagtggggctcactgaagatctcggagctctttcctctttggtactttgtcctgctgccttggtctctgtggacttccagctctgtctcctcaaacctgggcacctggactgagaatacatgagaattcccatgccatggcctgggaactctgaaggcagcagccagcatggtttgaggacttgccgcgggttcctgtctcccagggatcactgttctttagttgcctgctggtcagggccttctcgttcttgtttctgcatttcgtctggtttttgttgttgtttcagggtggagggtaaatctgatctgtgttactccatgttatgtagaaacagaaataccttattctttatagatacacagataaataaggagggacagtcctattttgtaataggactgcaccctccaccttttggaggagggtggtgtttatcatcagaatgaagttatggttagacttgttagaagggacagagagacccagaccaacttcatacaataatggctaggagattggggatatttacctgtttttctgtgtcagggagggactgttgtgtcaatgttacatagcaatttttataagcaggttgtatatttactatgttagtatgctaccaccttctagaaaaggcagaaggtggttttatattctgtttttaaaatgtggtccttattatataataatgctaataagatcagtgggatttttattgcctctttttgctctcagcaaatttatttaacagaaaaataag

SEQ ID NO: 92676 - DNA, 1051 bp, Homo sapiens
ttattattattattattgtagagatcctggtctcaggcaatcctcccgcctcagcctccctctttctgttatctgccctcagaaaggtgcatcctgatggagagagccaagatttccatgggaagttcattcctcagcatccctcttccctcatcttccatccattcccagggcttaaaccgtcatactggggacattcatgccccacacgttacccatcgtgcctctctttgaaggcgaggcctgcactgcccctttgattcttagtgtttcaggcttgagtcctgccggcactttcactagacggctgctgtgtgttaggaactgaggtggcagagtctcggaggctcagcccctgctcctgaagtggccattctgctccaaatccagcactccctcccttcactttcagttatctacctcttctcttgcttgccgtgacaccacctgctggaccctccatgccaggtgcccctggtagccaggcgttcgttcgatctgagtttttctctcctcagactctccttggtctgttctcaccttttggcttccatgataccaccatattttaaacctgtggaatcctgtgctcggattataccagcctccttcccctggtttttctgcttgaaggtcctggggtcccctccagtcttgaccacacactttgggtaccaacacactttgggtaccacactcagtctcacagacctttcaactattccctcttctctgccatgtaaaatttaattccttagagctgaatgatcaggacattcacggtagagtcggcttcccgaaatttctagatatggcttcctgtgggccattctgtttgagccaggctggccctgcattttcctgctcacacttcctcagtgttttgaaacatcatctcctttgtcactgcctgtacaaggttatctcagatcctgcctcctccatagagtgtttcctgaaaagaagcaccagacagccaggcgtggtggatcatgcctataattccagcactttgggaggccaaggtaggaagatcgcttgagcccaggaa

SEQ ID NO: 92677 - DNA, 1007 bp, Homo sapiens
ggagccgggcggggcggcggccgcgacgggcgcgcccgggtcggcgggggcgaggagggggcgtgttccccgcgcagctttgtcttgcgcttcctgggcggccccgccccgctggccccgcggctatttccagccatgacgtcaccccggtcctgtgagccggacggccgttgggcgggggagcggctggcgggaacgcggcacgcggccttgggggcggggcaagagctgctggcgggaacgcggcacggttttgggggcggggcacgcggccgtcgggcgggttaagagcggctagcggtagtgccgctcgggcctgggggcgggcaaggtctaggggccggggcaacgacgggaggcgggagcgccgcactgccttggaggcggggcaacgcttggaggcgggaacgcggcacgcgagcgttgggggccctaagcgtcgcgacctgggggcttcggggaggtagccgtggacgtgggcagagcgcgggcctcgtggtgtgcgggcactgtgggccgggcgagccccttcccgcccgtgtggtgagtcggcctcggcgcccggttctgtgacatcacagggggtttagtggcgcagcctgcgggacagaggccggggatttgaggtggcctcgtcttgtttgatctcggggaacctcggcagacggaaagctttgatgctttggtgcatggcagatagagaggaaacgtgtatcttcgtacatttaaagtttcctttccttttttttttttttgatagggagtctcgctctatcgcccaggccggagtgcagtgggcgcgcgatctcggcccactgtaacctccctgggagggaggggtattactcttctcagagtaatatcaccctctcgcccccggcttagttttcttttggaagagatcagctcattccagcctcttccctcctcccctccagattaaagagacggtgagggtctggtgcggtggctcacgtctgtaatcccagcactctgggagaccgagg

SEQ ID NO: 92678 - DNA, 1037 bp, Homo sapiens
tcagagttccctgcactgggctcttgtgtaggtttgggagaggtaaacacgttgggaataagctgagaaagcagagtgcctcatgcagccttgaaacccactgggatgttgaaaacagggttaactgagtgtctagatgattctgtgtaaaggtattgggagcattgtgatgaattaaatcccttttaaaatttaaagcaaccttttaacatggtacttttttttttagtgcataactcctcctcagagccctgatctcgtggagccatcgacaaggacacctgtttctccccaagtaacagattccaaagcatgtacagccacggatgttctccagtcctctgccgtagtggccagagctctgagcgggggcgcggagaggggcttgctgggtttggagccagtgcccagctctccctgcagggccaaggggactagcgtgatccgacacactggggagagccctgctgcctgctttcccaccatccagactccagattgccggctttctgacagcagagaaggagaagagcagcttctgggacactttgaaactttgcaggacacacacctcacggacagtttactcagcactaacttggtgtcctgtcagccctgcttgcacaagtctggtggcctgctgctcactgacaaaggccagcaggcagggtggcctggtgcagttcagacttgctcaccaaagaattatgaaaatgacctgcccaggaaaaccacccctctgatttctgtctctgtccctgctccccctgtcctttgccagatgatccctgtgactggacaaagtagcatgttaccagcttttttgaagccccctccccagttgtctgtggggactgtgagacccatcctagctcaggctgctccagcgcctcaacctgtgttcgtgggacctgctgtgcctcagggagctgtgatgttggtcctgccccagggagccctccctccgcctgccccctgtgcagccaatgtcatggctgccgggaataccaagttgttgccccttgcccctgctccag

SEQ ID NO: 92679 - DNA, 1899 bp, Homo sapiens
accactttcttctgagtttgatgaacacgattttaaaatgacatgaattaaccccttgaataaggtgcttagcgtttcctttctctttaatatgtattttctcacctcacaggggagaagcctttcaactgcagctgggatggctgtgataaaaagtttgctcgttcggatgagctgtcacgccaccgcagaactcacacaggggagaagaagtttgtgtgcccggtgtgtgaccgacgtttcatgcgcagtgaccacctgacgaagcatgcccggcgccacatgacgaccaagaagatcccaggctggcaggcagaggttggcaagctgaacagaatcgcctctgcagagagcccggggagcccactggtgagcatgccagcctctgcctgaaaggtccattaggacatcactcatgggatttttaaaaagcctctttccaggaatggaactgatggattcctctcccactgcctcacccaaaaaaaacggtcttggcggcctaggggaagatcggggagctggttttgatgaaagtatgttaacttttcttttccacttgggaccctgttcagtatcttttgtagtttcagaagtttttttgttttggttttttttttaaagaaatggtagaaaatttgataatctgaatcaccagcattcaaacaaatatttcggcaataaagtttacaaaatctggatttttacaaccttttctattgatgttttgtagaaataagacagggtactaatttttatactggtttttagaaaaatatttatattgttggtgctcaaatcaccaatttctagctagatcattttgcagccttcttttcagtgtttaataacaaagtttttcctaatggcccttcttttagtaaactggacatgttattccactacaaaaaccacaagttatctggccttttagatctttttggaatcggacctggttgagtaaggacctcttaaaagggaaaaataaattttgccgtcagcttcttcataacgttttcaaggaaattctaggcaatcattcctgtcaccaaagaactaaaattttggttgactggaactagtgagctgtgtccatggtgtgtcatgaaggatgtaccccagagagtaacatgagccactgggcagatcccagggaccagtacttgctgcaggatctagtctgtaatagtcttggccatggctctgctgaaagcaagccattcagtttcttgtttgtacctaaaacaccaaaaaagaaacactcaaatccagctgctttgtcaattgtcagttctgactccttttgctgtggccttatccgtactatattgtgggtagagtaacttctcagaaaaaaaggaaatgtctgtattggttggatgaaactccaccagagcacagcttagctggggcgagatgcatgtgaaggcaggcagtgccaagattccgcttcctttgtttgccaaatactagaaacacaaggaaatgcaagttacgctaaatggcagtaatactacccaactgcctttctgttcattttgtttgaaggaaattgttttgaccaaacagaaaattacttggaatggtgtgttttacagtctacctagaaaatagatggacaatatttttcaactgtatgagcacgtagataaccgagagaatgtggccacctgtgttcaagaagccactgatactggtttttgttaaacattggaagttcaggcaatggaataaatgtaggaacatacagaatgttgcactaatttggtagcctgggaattttttttattgtgcagtatgtatttaaattttgtctatgttaattaccagcatttacctttatttaaatgatggtaaggtggaatattgaataaaattaggttttgtgttttgttcttt

SEQ ID NO: 92680 - DNA, 1101 bp, Homo sapiens
agtatttggttgcttgtcacaacattctccaagcagtgatatttctaaagaggagatacatgttgaaaacggttttaatttacacttccatttcctgattacatttggaaatactttgtgtaaaccatcccccttccacctccatttgtctgttgaaagattttaagttggaaacagttcctgtctgaaaactcttctgagaaccacaaaccttgtgtatggattcggcatggagccctcagctggcggctctgggtgctgacggccgctggagaggtgggctcccctcgtgcactttattgcctgggcagttttgcttgatcttttgtgactttgagccttttaagtagtttgaatgataagacttaaaatgtttcataattatgttttatgtaacagactttgacattatttaaacgagcatgtgtaatgtaacttttctctttgaatcatataaaacttgattttacattggatgtgtgtcctgtgtcatttaactgtacctggtggcctaagtatacctagagactttttggaagaatctataaaattcattgtgtattggctcaaactaaactctcctctttgttttctggagttttattctgtttctttgggttctttggagggttctttctgaaaaaaaatgtgtgaagcgagctgagtatggtggctcacacctctaatcccagcactttggggagttgaggcaggaggattccttgagcccaggaattcgaggcggctgtgagctatgatcataccactgcaccctagcctgggcaacagagcaagacgctgtctcaaaaagccaacatgtgaagtggccactctggcagtgggtctggtccagacagacccagtagtgtgccgggtgaccctgtggccgtcagtgctcgtgcccttcctgtgccagggggtggctgcaaagaggtagaattgaaagtggttttccagctactctggaagaagtgcttggaagtcttccattatttccttccacccctggcccaggattgcaaagtacatcatggagccacaggcttcactgttccttcttttccttcccaactcttaaaactaaaggctgccatatgtcct

SEQ ID NO: 92681 - DNA, 3074 bp, Homo sapiens
tgggaggaggtgctttcgggaggcggggccgcggcccggggatcctctcgcgcccgcgggctccaatcgctgctcctcacgcaatcctaaacggttcccgggcgaaccggggcccgcgcgcgccaaggccgccgagaccctcaggggctgcggccctggtcccgcgggacctgtgggggcctgggcggcggcgcccccgacccagccagcggacgggccggggggggaaccgggaggtcccggggggcgtccacgggggtgtccccgggggtctccggaaggcgccggcggaggctcccgcgctgcgcttgaaaatcgcgcgcggccccgcggccagcctgggtaggggcaaggcgcagccaatgggaagggtcggaggcatggcacagccaatgggaagggccggggcaccaaagccaatgggaagggccgggagcgcgcggcgcgggagatttaaaggctgctggagtgaggggtcgcccgtgcaccctgtcccagccgtcctgtcctggctgctcgctctgcttcgctgcgcctccactatgctctccctccgtgtcccgctcgcgcccatcacggacccgcagcagctgcagctctcgccgctgaaggggctcagcttggtcgacaaggagaacacggtgagcccgcggggagggcgctgcgggcaggggagggaggcagggaaagcgaagccgctcctcactcacacgcgtctccccgcagccgccggccctgagcgggacccgcgtcctggccagcaagaccgcgaggaggatcttccaggagcccacggagccggtgagtggcgggcgtggggcagaggggccagggacggccttgggcgtcttggcgccaaagccgcattgtttcctcagctgttcacactcccgccccggctcctttcccgcctaggcggcccctccccagggctgcctcccgcgcccctcggcccatttcccggttcgggcgtgcgctcctctgctgcgacccacggagtgcgacgggacagccacgttttcacatcgggccccgtgaaattgccgccaatggaaaggacttggtccagaaaaacgttagtttcatatggttcgcccggtacttaaatgttttattttctcccccaacagaaaactaaagcagctgcccccggcgtggaggatgagccgctgctgagagaaaacccccgccgctttgtcatcttccccatcgagtaccatgatatctggcagatgtataagaaggcagaggcttccttttggaccgccgaggaggtaatcggaggaccccagaagacccctgcaggggtgaccgtcacgcctcagacataaatgcacttggaggttcccgttggcaaggggggctaactgtggggcatagtaagtggtgccagcatacttaaagtttgagtgctcagtgtgagtcctgtaggctttactctcttccttttatgctaaaattgtgacttccgaacctcaggtggacctctccaaggacattcagcactgggaatccctgaaacccgaggagagatattttatatcccatgttctggctttctttgcagcaagcgatggcatagtaaatgaaaacttggtgagtttccaaaacatctttcattcatttgacgttgacgatctgaggtcgaactagttcgctttcctcgtcttgtatgtttttccatgctgagtgcatctgtgtgtgtaagctgggttttatattacatggcatttcctgttttgtaacactttgcagttctttcttatggtattttcccgactctagagaagctgagacaatattaagtggtagcaatgtgatgactctttgtggccaccacatctgccccctctttttttttttttttttgagacagagtctcactctggcccaggctggagtgcagtggtgtgatcttggctcactgcaacctccgcctcctgggttcaagcgattccccaacctcagcctcatgagtacctgggattacagacgtgcgccaccatgcctagctaatatctgtatttttagtagagacagggttttaccatgttggccaggctggtctcgaactgctgacctcaggtgatccacccaccttggcctcccaaagtgttgggattacaggcgtgagccaccacgcccggctctgctccctcctttttgtggctttgctgttttaataataatttggttgtatctcttattgcgaatggatctttcttgacataaattaattaggaaatcgagcgctcacaaatcctattttatatgtatctatttcctgatatgtaagttgagcatatgacataaaatatcaaagaattgtgacaaattggatgaaatatatatagaaataaaccttataatggtacaaagagtgcgatgctgccagtatccgttgacagttgctgctgttggttttttctcaagcttaactttgatgtgttttgccactaggtggagcgatttagccaagaagttcagattacagaagcccgctgtttctatggcttccaaattgccatggaaaacatacattctgaaatgtatagtcttcttattgacacttacataaaagatcccaaagaaaggtgagtattcaagtggtatgccaagatttttaggactcactaattgttgatttattacacatttttagttcacctagggataaaaatgactccagaatgactaagacagtcataggcattcccagcacccgtggtcatgtctgctcttagcaaggggcctaaatgcactttattattcacttagagttgtgaaggtactccttttaaagttggatgtctaccaatgtaaaaccttcttttgaaaaaattcctagatgttgggtaagacaaactaaaacctatgtctgaccatctttgctcatttggtaaagttgttgagaagctagaatgtggggctgcagtgggatggacggggaggacttgcctcctaagaagcctgcagtatagtataggcaaataagacttagtaggagttacataaggcagaggcagcagtgaaccctgagactgatttaggcatgcaggagtttggctgaataa

SEQ ID NO: 92682 - DNA, 1085 bp, Homo sapiens
tcctagtaggaagcaatcttagtttattggtttaattattttatgatataggtgtggcaactgaggccaaataatgcacctaatcatagtctgataatagcacagcagttaggattttatggttcttcaaatttaaattctatgattcttcaaattgaacaatgatctggacttgaaataattttaaaggcaacaaatgtccctgctgtactggactatgttttactgtctgtagaccctgaagctcaatatgaactacagaatacccaaacttgtattaatgtaaatcaagtgttgaggtttttaaaagaacactggagggaaaaactgaccagtaaaaataaaacatttcggtgtgagttcttcctttaggaagaggattggcaaatacttgaatttggcctttgtcccagagctcttatctagcagttggtaatcggaggtcttttactgtaatgcttcaattgctgataccgtatgtgcctactagggaatttctcttcaatgccattgaaacgatgccttgtgtcaagaagaaggcagactgggccttgcgctggattggggacaaagaggctacctatggtaaggagacccttgcccctacttaaacctgagcttcattttccaagtaatgttactggatttttggcccttgaataccaactcactagaatcatgttggtgttaactcctaaataggtgaacgtgttgtagcctttgctgcagtggaaggcattttcttttccggttcttttgcgtcgatattctggctcaagaaacgaggactgatgcctggcctcacattttctaatgaacttattagcagagatgaggtgagtctaagtcaaataatagggtgacctaaaccccaaacacaactcgggcatgctcttgtgttcactgacggggacctgagatgctagatggcatatatccacatttaatgtgtgagttcaaccatacacatacttgacaaaagaaggaaatactttcatttactgaaactgttttacttgcattctcaatatattgtaatacatttgtacatatgtattcccctataggctttgaatgcataaaac

SEQ ID NO: 92683 - DNA, 1117 bp, Homo sapiens
tttttctagggtttacactgtgattttgcttgcctgatgttcaaacacctggtacacaaaccatcggaggagagagtaagagaaataattatcaatgctgttcggatagaacaggtaaagtgggtgatgaaatgggtcactcaagcttgctagaaaatgcctgtgctttagttgtattcagaagctgtattttggttcctaggagttcctcactgaggccttgcctgtgaagctcattgggatgaattgcactctaatgaagcaatacattgagtttgtggcagacagacttatgctggaactgggttttagcaaggtaaagtattgtttacatagccttttgcttgttttgaagctggtgctctgtatttatatcttgatgtgaaccttttcaggttttcagagtagagaacccatttgactttatggagaatatttcactggaaggaaagactaacttctttgagaagagagtaggcgagtatcagaggatgggagtgatgtcaagtccaacagagaattcttttaccttggatgctgacttctaaatgaactgaagatgtgcccttacttggctgattttttttttccatctcataagaaaaatcagctgaagtgttaccaactagccacaccatgaattgtccgtaatgttcattaacagcatctttaaaactgtgtagctacctcacaaccagtcctgtctgtttatagtgctggtagtatcaccttttgccagaaggcctggctggctgtgacttaccatagcagtgacaatggcagtcttggctttaaagtgaggggtgaccctttagtgagcttagcacagcgggattaaacagtcctttaaccagcacagccagttaaaagatgcagcctcactgcttcaacgcagattttaatgtttacttaaatataaacctggcactttacaaacaaataaacattgtttgtactcacaaggcgataatagcttgatttatttggtttctacaccaaatacattctcctgaccactaatgggagccaattcacaattcactaagtgactaaagtaagttaaacttgtgtagactaagcatgtaatttttaagttttattttaatgaattaaaata

SEQ ID NO: 92684 - DNA, 2215 bp, Homo sapiens
cgggcgtgtgcacccggcgtgtgcaccggcgagcgctgcgatccggctctttgcgtgtgtgttgtgcgcgcgtgtgtgtgtccgggagtgcccgcgtttctctgcgcggtggagttgtgggtgactgcggacggtggtgtgtctttcgaatggcgtgtactcgtgggcatccatgtgtgccttaggtgtgcacattttggactgcgtttgtggaattgtgtgtcggggcgcagttgctggtggggagcggtgcctggcgggtgtcgtgtgtgagcagctgtgcgcagagcggggtggcggggtgggtgtgggtggtccagccccacgcccagagccccctgtccctgctggtcggcgcagtgcgtagcttaggagcctcgaggacagctgggacccgacgggcaagggcgggcctcgcgggcaggctgggcagccctcagggaacaggtccgtgcggcccacgtgggtcgcctgtgagcttctgccaagggtgggggcccacgcggaggcgatccgctcgttcctcccagggccatggggcgacgaggagagccctggcctccccgcgacccgcactgcgacctgggccagacgcgccaccttccccggtcgcggtttgcttctctttaaaatgaggacagctcctcccttgggggctgtggtgacaggtgaaatgagaacgcactgaagacagctcttggtccaaagccccgcacacagtaggtactgtgttaattggattagcgtctcctgtttaaaatcctttttttttcccctttatcgtgggtggggccttacattttccccgggcgtgttttgtgcctctccctggccctaacttaaccgcgaagcactgagattcgagaaagtttagctgccagctgcgctgcctcctgcagcacctcccgggcggcgccgcctccgcgagtgcccgagagcgccgcgctgggcgccggccctgccccagcccccaggctcccgcgcaagcgtgggggtccctctcctggccgggaggcagcgactgcggagttgagaaccctttggttcaacaagttcctagtccgggaggatgcagctcagctcgtggagtccgagagtcacggcgtaaaattggcgcttcccgcacatgcagatctcgggctcccggggtgtcccggccgccaaaggccacccctttcctcctggctgaccccaattccaccagaggaggatgtttgccagggacgccgagtccagctgctggcctcggcattagacaacccccagccccagcccctgccatccctgctcccttgcagccagcctcatgccgggggtgccacatgggacacctcctcctagtcccacaccttaatttaaaacatttacttttgaaacctactagtcgtaaaattgaaccgcagtgaacgagcacccagctcttaccacgactcactctctggagagttctggcgcctcggcgctggctcggacgcagcaaggccagctctaggggtcgggtggctctcggccagagcgaaggatattctttcccttcatcgccttggtgtctttctctgggggaaaaaaatcgcctttaaccaagggagccaagatctcaccagtgcaggaggctctcaaaatggagcgccggcatggggttgggctgcggaggggacagcatgggcggccttttggtatggatgcgcttcccaactgtcaggggctacgtgatggtgttcccagagaggcgggctgctttgcgggcttttaggagccagggatagaaacctggtccggttcctttggtttccctcggccgagactgaagccctgcaatcctagccatggcaggccagggggatgcgatgaactcattttctcatttttcatcctgacttagtgacaggggcacacttagaatgcaccctgttttctgtttcatcaaatgattttatgtcctacaagaaaaaagggcttttggtgtgaatcctactctttcctcataatcaggttccataataatattaaaaaaaaaatcagtctggctttctcagctcagaagacagacccaaacccaggtttgtgttttgttttgtttttgtttttttctagttaaagccagccctttgtctcaagcaagccagtgttttggccttagatctatttctgtttcacttttgaaagtgcctgtaattactgagctcttgaggttttattggataatgtggcaaag

SEQ ID NO: 92685 - DNA, 2266 bp, Homo sapiens
ctaaatgaaaaaactgaggaggcccagagcaaataagtagcccaagggcatcagcagaaagtagaaggatcaagaattaaacgaggtcactttctcttccgcccttgttttggtagtaatgatatgcccttttatggccttgcctgggctggtgttcagattttcctgtacgagtcttgtcatcccttcctaagccatggaagctccttctagggcatgagtgctgtgtgacacatgttcacacagtgttgccccagtacctacctagtccacaactgaacaggtagagatggttcaagcaatgtgtgtgtgtagagaggtctcctggtaaatagaaggggctgggggagggcgttgaatgcagtggtgctgtggccttgggtggcttggtgcatttctgatgcatttctcaccttggatcattttcactctttgaggaagagagcagaggatgagatgccatttgacagatgcacaaaccaagacacagaaattgtatacccattgtacgccaggtagatcacaaatgaccgttctctcccatggttgtagagaactctcatggtggacagaaaccatgaaagaaatcatggtggaaagaaccaagacattcttgaatcggagtattagaacctcatttgcaaaataccttggaaagatcagggacactggggtttgaattgtagtctttgctctgttgtttattggctggtgatggtctctgaatctgtttgctcaggtgcagaaaggggttttaggctgagctcagatattgacaggaactacaattcaaacccaggtctgcagatgtggcagactgggtttgaactgtagtctttgctctgtttactggctggtgatgttctctgagtctgtttggtcatgtgcagaaaggggttctaggcgcagctcagacgtagatggggacgcagatgtgagtacctaggtgagtctggctggtcacgtgtggaataagtggtggtggctgccattactctttaagcattcttggatctagtgcctcctctgccactgagtacagaattccttttcaaattcgggcttatgaggcatgttttgatccaggctgtcgtagcaagggatttgatgctggagtctgtgactgctgtgcgtgtggaggcttccggaaggcagccagtgctggttactgcttggagtttggggagctgccattttggattgtcctagcctcatgccttctgagaagcatctgtcagggtccctgatgcacctacagagaccctgagcttggtggtgggggttgcacagagagagctgcaggttgttcctcaggcataacgaggcccggagctggtggtcccctccctctgtgagtgtgtgcagagcatggatcgggtctgggagtgttcgtgctggcaggccggaggaggactgctgggcacacttgcagaattgcggttctgtacagcagtgtgtatcgactgcagcgctctttttctctagcagcaaaatgctcagctctctgccttctttctgtgcatttaacagacgtttccagaaagcagaattgatgacagccccaactcctccctttcactcccatcttttctatttgctgccctgtaatcaatttttggagagaagtgagaacctctcgaaatcgatcacctatgttgaaaaaaaatcatttttaacatcatgcagttttccgtatttactgtgtgtggctggagacactcctggcagaatgagtgtgggatgtaggaggtccagaaaagcccccagcttcaggggctgagatagggccatgggtggcagaactggttgtccccccgccccccaatccctcagcagtggttgaggtgtgctttattagaaactcttcagtcatgcagtttggagcccgtgctggtgatgcagcctggatgcctggcaggggcttagcctccaggggtgggacatgagatgtggctgccgtggcttctctgtgtctttcttcccagcgagtaaaggtagacgcagggctctggcaggtgctaaggccctgcttgccttcatgctggaatgctggcaggtacaatttattcttatttcttaggaggtgctttcccctcttctttctgaagacatccagggataaagaattgctgcttttatgagcacatgttcttggtgatatgctgttaccttatctaaaaacaatacggcctggctgattattctcagagctcattgtaaggtgaaaggttatgcatttgagaattattttcacagtgtggatggg

SEQ ID NO: 92686 - DNA, 1041 bp, Homo sapiens
ttatcatcattgtcaccatcgtcaccatcaccgtcatcatcaccattcatcatcactgtcatcactgtcattatcaccatcatcatcaccaccaccaccatcaccatcactatcatcgtcatcatcatcactgtcaccaccatcaccatcactgtcaccaacatcatggtgcttctcaacctttgggctgctttgggtcgtgcttgacatggcacattcctggtgagttagctgttctttgggggttttctactgttggtgtggtgattagggtagtcaggacaggatgagtataggcatagagaacccaagtggatgatggtggagtgtgattcttctgaaagggtcttcatgagaaccactgatctagaagattctgggagaatctcacgtattctttcaggcccaggagtaagccagtgttacctgctctgtggagctctcctttgtccctccagggaggacaaattctggctggagcctgaccttactgcttgtccatctctcccagggtggtaggccactttaggtaggaccctgtggatttctccttggtgacccccgcattctgggcacagagcctggaacacaatgtctgcccagatgtgtgactgaaccaccccccaattccttaactgtaggatggcggctgccttcattagaatcttaacaccttgcctgagggctggctttgcaggtctgagtggctaggtcagggcactgctagtgttttctatgtttgtagtcaattggtgagagtttgttttacgcatttgttaaaactgtgggacagtggtctggaagccaacaaggctttagggttggcagagtgactcccatcccatcattgatgtctggctttgacttggcatgggagacattgcctctccagatctcagttctctcgtttgacaaatggggcttagggttgaacagcctctaagtcctctgtcagctctgcaattcaggaaagatgtttaaaaatgcatacttgcattgtaggtacatccaacatagagcaaagagagaattttcctagct

SEQ ID NO: 92687 - DNA, 1592 bp, Homo sapiens
gtcaggagatcgagaccatcctggccaacacggtgaaaccccgtctctactaaaaatacaaaaaaaattagccgggcgtggtggcgggtgcctgtagtcccagctacacgggaggctgaggcaggagaatagggtgaacccaggaggtggagcttgcagtgagccgagatcgcgccactgcactccagcctgggcaacagagcgagactccgtctcaaaaaaaaaaaaaagaattatgcagacagtttcatttcatttatgtttggacggggaagaaagtcagaaaatagatgggaaggaaacatatctaaatgttaacggtggttgtattccatgggatcatgggtctttcttgatttttcatgttttgccacattctaaattttcaccagtgggcatttattatttttgcaattagacaggaaagagcctccaggaggaactccaaatacccatcctttatttaccctcttaatttgcttaccaaactttcttgttatggttagactggctggcatccataatttccatacttgtgattatttaaattaatggaaatttatcataatcccttattaaaatttcttcgctgcactgaaattcaacactgagcaaatctgttacctaggacataaagaaaaacattcagtccacgtgcggtggctcatgcctgtaatcccagcactttgggaggctgaggcaggcggatcacttgaggtcaggaggtcgagaccagcctggccaacatggtgaaaccccatctctactaaaaatacaaatattagctgggcatggtggctcacgcctgtagtgccagctactcgggaggctgacacatgagaatttcttgaacccaggaggtggaggttgcactgacccgagatcaggccactgcactccagcctgggcaacagagtgagacttgctctcaaaaaaaaacaacatccagagtcttccaggaaatttaccgtttcagtgtggcatagtgtagagtttgtttattatctagaatatggtttttcttttttgtgttcttgaacttgggcgttcacttcgtttgttgacctggaaggagccatctcggcgcctgctgtttgaaccttgggtattttaatgaagtggtttgatgtcctgataccaccagcccctgctgttgcttttcacggccctggcttttccaggaataatctccttactgtttgtcattctaatatgtttcagctccctttttgaaaataactttttctgctccccttccctgcccattcttcatgacccccagagaatgggcctgctggtctctagcccctgtgaattggaagactcctggcgatgatccttctttttctctctgtgactcaggcggttgatgttgggttgaccgtatttctttgctggctggtaagcagggccacctcagcccttgtgagggccatgcctgactttcaatggcttccctccaaaggcttcttaggccgttcctccccatcgtttttcagaggtttaatctgtttgagtccaggatattgagtcagcagtggaaagttatgaagatgaggccagccatcagaaaaattggctaatatgaaaga

SEQ ID NO: 92688 - DNA, 2036 bp, Homo sapiens
gcaggcacgtcacatggagaaagcagaagcaagagagagaaaaatgcaaggtgccacacacttttaaacaaccagatcttgtgagaactcactatctcgaggacagaaccaaggggatggtgagaaaccattcatgagaaatccacccacatgatccagtcgtctcccaccaggcctcatccccaactctggggattacaattcaacatgagatttggttgagacatccaagccgtatcagtgagagatgcagtttttttttttcaggggaaagtgttgttgttgttgttgttttaataagatataatttacataccatataccatgaaagtcgccatttaaaaatgtacaattcagttgcttttagtatactggcaaagttgagcaccagtagctactaatttcagaacattttcatcaccccagaaaaaaatctcatagccattagcagtcactcctcaatctcctcgtgccctaggccctggaaaccaataatttactttaggtgtctctggatttgccacttctggacattttatatcaaggaaatcatgcaatatgaggccttttgcatctggcttcctttaccaagcacagtgttttcatgcaccgccaatgctgcgtgtgtatctgtactgcatgcctgtagatggcggaataatattccaatgtatggatagaccacattttgtttatccattcatctgttgatgaacatttgggctgttttcacttttggctattctgaacaatgctgcgaggaacaagttttttttgtacaagcgtgcaagttttttgtggatgtatgttttcatttctcttaggcaaatagagagacacaattttactttttatttattttattttttatttttttagagacaaggtcttgctctgttgcccaggctgaagtgcagtggcgccatcatagctcactgtagcctgcaactctatggattacatgttcctcctgcctcagcctcttgagttgctgggactacaggcataccccatcattcctggataatttttaaatgtttagtagagatgagttctcactagattgcccaaattcgtcttgaactcctgggcttaagtgatcctcccaagttagccttataaagtgctgggattagaggcatgaaccactgcacccagccacagttttaaatagggtggtcagagaaggtctcatgagaaggtgacatctgagcaaagacttgaagaaaataagggcagaagccacacgaaaaccccagcaggacagcaggtgcaagggaacagcaagtgcaaggatgcttccaccaaggggctggaaaatgaaaggcttgacttcaccagctgcctcccaaccagggggcccagtgagtttaggcctcactggccctttctggctgaggggcagcctgctgcgaggggtttccctttctgaataaagagtcaaagtcccaagacagatgatttttgacccatgcatcttcttcctgcctggaaagcagatgtgattcctggagatggggcagctgttctgtggccatgaggttgaaatccatgtgctaaagacagtagagcagaagaagactgggaccttgatggcattcttgagctaccgcctgaaccttggatctcctgcacctgaactttgctctgtgacacaaagaagaccctttcttatctaagccactcttatctaagccaccgcttgtcacgttttatgttgtttgcagccaaatgcattcctcattgatggaatgtccaacattgtccccaagtcccccagatagatccctgggggctcttgacagacagacagcaggcaagcctgggacacacgctgcccccttctgctttcctgtccctccatcgtgttaagctggtctctcaggtgggcatcaggattcagctatcccaggctgaccctgaggtccaccatgactgtgctgcagccaccaccactggccgcttcatggcatgtttccagcacaactctctgacctggctcccccggttccccagacgcgttccccacggagtcc

SEQ ID NO: 92689 - DNA, 1069 bp, Homo sapiens
ccattcattccacaaatatttatggagtgcctactgtatgccagggattcttccaggcactggggagacatttaaaaaacaataacaacaacaacaaaaatctgcgtcttgtcggaacttccatatacacttccactggctacttcatggaaacatctggaacatctgatttttctagtcttcccattactaaatgtggcacaagaacgtagtctaaaggatgtacttcaccatgcaaaagctcttgtcatttcagaaaaggaaggagaattaagtaaaatgtacttcaagaaagtcagttaagaatttttccagttaatgaaaatttaaaatgattggctttcatcttgctgttttccagggtcccactattaagaactcactcatcctgttgttattaagggtgaaacccagacatttccttatgtaaaagccaattaaaataaattaaatgcaaatactgtttcattgtcatgtcagttttgagaaccggatcaatcagaggttgtggaaatgccaaagttgttaaggctgtggttaccatgacaacagctctattgtgtaagtggtctgttatttgggaattcttccttaggtcaggctaacagtgatgtcatttctcagggaaggggacggagttctctggagtcaggtctggggccaggagacctggtgagcaaaaactggggttcagccagaactaccagttttgtgaccatgggagacagtcccttccccttttgcctcagtttcctcgctttggggatagccattgcacagctgtgagtatattgtggccattcagcacttctcaaaagttgctgctctgctaaaaaattttggggattcctgatttgccggctggttttcagcctatgttttggggaaatgcaaatgataggaaaccacccctggtcctgccttaccggttctagcagacctttggtgaaactgggagttcttgggtcctcttggctagtggctagtgaatacctgctgggggagggggtgtttgctttgctttgtgttgggggtggggttgttattggtttttacattttgtttgcaa

SEQ ID NO: 92690 - DNA, 1164 bp, Homo sapiens
tagctcagctgtgggaatggcctggccctatgtgatgcggaaagacagccaagggggacagtggcacatgcctgtggcacttggttctgtgtgtggtctcctttgtatccccaggaactctctgcaataggaaggtgatggccaggatctcattttacagaggaggacactgaggcccagagaggttaagtgacttgtctgagggttaacagctcctgggtggcaggatttacattggcgctcagatgcatctgaaccccaacctggagtggtgccagcacagagcaggtgttcagtaatgtttgctgacctatgtgatggttaatatcatgcgtcagcctgactgagccaagggatgcccaggtagctggtaaagcataatttcaagttgtgtctgggagggagtttctggaagagactggcacactgagtaaggatctgccctcaccagtgtgggtggatatcatccaatcattgagaacccagctagaacaaaaatgtagagaaagagtgaatgtgctctctctgcttgagctgggacacccaccttctgctgctcttggacatggagctcccggttctcaggcctctgggcttgagctggagtgactccaccggctctcctgagtctccagcttgcagacagtaggtcttgcgactcttcagcctccataataacatgaaccaattcctcataatacatttctgtctgtttatttctatatatttattggctctgtttctctgaagaaccctgactaatacttccccatctgaactttctctgccccttttgttcgacatgtggggggttgctggggaagctaattagaatacaggttcctgctgacaccccacccccactcccttccttcatcaagatcactagtggtgagcctttaaatgcctgtaagctgtccgaggggttcttcctaaattaaattaaatttttaattttaattacttaatttttttgagatgggatcttgccgtgttgcccaggctagtctccaactcctgggttcaagtgtcctcctgcctcggcctcccaaagtgctaggattacagatgtgagccgccactgttggtctctaggggttcttatgcacctagaatttagagactcattgctccaagcttcattgaatctttcctgaacagtct

SEQ ID NO: 92691 - DNA, 1039 bp, Homo sapiens
gatcagcccaactcctaatacagcaaggaagggacagagctgggaagtggagtgggctgggtgagtggaaagtagctgcgagaagacatcacaggtagggggattcttgccaaaggcagggggggactttgatgtcaaaggtggggatgaggactgattggatctcaagggtggtcagatgtgaagggcgtgagaggctcactaaactgactaagcaggattcttgctgagactgggccaggcaggctgaagacaggaggcagaaagagggctcagaggagcctgagtgaagtttgatcttggggtgaggggtgcaggggggaggggcagggtgggtctttgttggggctctgtgggagatttcagggctcactggatgtgtggggcacagtgggccctgcctgagccccatgacgcctggacgctgccaccaggggcctgacctgctgacgatctctgcactgggtctttaatcagcctcttgggcattgtaaatgctagacaaagattcttctctttttaaagtttactaatttccctacgataaaactaatgcattttcacaggagagactcgggaaattaccaaggagcgtgaatcaggtggtcacagtgaattgtggatgtttgtgtctgtcttggggaactggtgtaacgtttctccatctgacccctgctgtctgttggaggtcaaggagccagcctggcctcacaacttcctcctttcagcaaagtcaggaggccattccctccagggatgggtgggctgcagcctcttggcacctctcgggatcctgctggcagatgtatcaccgtagcccaagccagcctaagccagcctcctgtggcccagcaccttctcttcccacgtgggcagctgtgttcccaggcaaaccttcctggaattgctctgtgctctcagagctggtgtgctttggtgttcagctgtggccattttggctttgagtttgatttgatttttgaagaaagtttttatttctttacccaaatattctatgtctctttggtaagactggaaa

SEQ ID NO: 92692 - DNA, 1059 bp, Homo sapiens
ggctggggcaggtgtcacggagcgggacctgtgattgttcagccacctactctgtgcccagtgctgtgttggtgaccaggtatgtatgaagtcagtaagccacagtcctgagttatggtgcagaccccacatgcacccagagtcagcttggcaagaccccttgacaccacgtgcgtggagggtgcaggtcggagagctcacctccatggattccgtagagctttgaggcgtatccacaaagtgtccaggagaggtggcgtcgcctccacttgatagaggaaaaagcagagatggaggcagccagaagcatggtgcagtggtggggtttggtcattaatttgataatcacatggaatacaagctaatgtttattgagtacttactgcctgcctgctactgtaactaagtgctttactcctgttatctcatttaattctcaaagcagccctgtggcactgaggtggctggagatggagggatgtgtggctgccatgtgtttgccaggaagcagcaggatgggagtgagggcacagacagacacacatgccaggacttgtttgcacgaagctgaggaatgggtgcccatcattcattatactcatctctctgttttatgtatatttgaaaaaaaaattttttttgagatagggtctcgctgtgtcacccagactggagggcagtggcatgatctcggctcactgcaacctccacctcccgggttcaagtgattctcctgcctcagcctctggagtagctgggattacaggtgggcgccaccatgcccacctaatttttttttttttttgagacctgtcacccaggctggagtgcagtggtgcgatctcggctcactgcaacctccgcctcccgggtttaagcaattctctgcctcagcctccccagtagctgggattacaggcacatgccaccatgcccggctaatttttgtatttttagtagagacgggatttcatgcctgattaatttttttgtatttttagtagagacagagtttcactatgttggccaggctggtcttcaactcctgacctcaagtca

SEQ ID NO: 92693 - DNA, 1101 bp, Homo sapiens
caggcttgtgggcctcctggggttcctgtgcgttgaggcctgagcccctgcgtgcgcccagcggagccagcactctccctgtggtcctactgggcatcacaggtgtgtatgtgaggggtatggggaggggattcttggttagtctgggcttcatgacattgggatgagttctttcacttggttttgttgatctggtaaaatctgtggtcctgtgatatcaccttgcttctcatagtatgagccttcaacatttggcctcagtggtggggtgtgcctgcaccgccttcccccatccctgcctcggctcctccccacaacaaagcggaaggaagacatagacccaagggtgcacttcagcccctcaaccagctgtgtggctttggagaagcggcttaacatctctgatcccagttacctttcttgaacgggaaagatatcaatgcttccttcactgattactggagcttcttggtgtgcagtgtctaggctgctttctaaccatgtaaggtgtagccacagtattgtaggacctgttgctaagaactgtgccactatcttgataaacatgttttccagggactggtggtggaatgttctagttattaatgtgcctttaacgttggatgactcagaatatccctcagatagtaggaataggtagctttgagaggtcatctgtaggagggcgcaggaacatcccaggagggggtgtcatacctgttggcaccatggggatgcaggctcagaggggactgaactttccagggccacgcagtctgtaagcggcagagctgggacgcaaccccaagcttgctgctctcaaagctttgctttcaaactctcacttcagacatcagggcttcctttcagactgagtcttatccctaagcactgttggagaagaaagtctccaggctgcagggccccgcagttcccccatatccctgcccttccagccagcccacgcctggggcctgtcctcccctgttcctgaatccctgtcctgttactgccctccgggtaagacagcactcttataatcatgcttcatgccgagttcatgaaattaactctcaaactcctcttctctgggttaaatta

SEQ ID NO: 92694 - DNA, 1157 bp, Homo sapiens
gttgaggctacagtgagctctgattgtgccgctgtgctccagcctggtgacagagtggaccttgtctgtaaaaataataataataataataaagctttgctccccgtttcatttagatggagcgtttgtgggatttaagacagatttttccttgctgagtggttatcattaacctgttgaataagcaacaggccgaggtggggaccctgcctcgcccgcctccaggggcacactgcattctttgtggaagtgtccctggaatgccacagccctgcttctgtgcgaggccagtcagtctgggtcctgggatatagccacatgtgcagtccgtgcctccagcgcgcagcctgaaagggaggcgtgcagaaacaacgtagctccaaggaggactgatcagcccagcctgggggagggtgggaggggactcccagggagcggggcttgtgctggactttgcaggatgccagacttttggcaggggaggaaattgaggtgaaagcattccaggcctagggaacagcatgtgcagaggtgctggctggaggaaccccgtgtgtttgcactgtgctctgagctccctctcatgactctcattctttctcgttgagttttgttttgtcacccagccggactcctgggcaaagagaggcacaatctgttcccggttgggccagctgccctccagtagctacgcaggatgctctggccggcctctgaggattctcttcttctgtccatctcatggctgaagaccaaggctatggcctgtgggtggcagttggtacctctccccgctgccttcccccggcccctttttggacaggatgttgctccctggggcctggctttggagatggccagtgctggtttgaagcttctgtcttctgtgtgggatatcagtgccctgccagctgttgcaagttttaaactcaatgtgcctctggatgtgtgtgtagagtaggggtccttccccagctccaggccctgtgtgtttccaagtgggcccgcagctctgatgtgcagtgggtatgcactggcaagccgtgcactgtcacaatattaaaataacttccatggtagttggtaaatagccccatcacccctctcctgggaccctggacctctagcacaccatggaggcctgccccgtccccata

SEQ ID NO: 92695 - DNA, 1035 bp, Homo sapiens
ggcgttggcatcatcaaacagaatgaagtgtactgtgttttcaccatgatagtacaaaaacgagactgtgagagcttctcacttctctccccttcctccccttccttctccatgtctttgtgctcctccactgctccctccccagcacagacaggccctggctccctccccccaccctcttccttctctctccttctaactggggtcaggaccaccctggaggatgttagattttaaacatttgttcctcttgtcatccccaccaccccacccacccacccagattagtttctaagggatttatatttgtttgcagagtggtgcgaactgttttcatcctcagaggagcagagtgctcatagatgagtttgacattactgggattcactttcagaagtctctagagagccccgcaccgcccccgccccccgcaggtgctggagttcagcctgacacacaggccggcctcagtgagagggagtgtctgcctccctggcatccgtgacccatacggtgggcgcctgttctttagaacaacttgctccttccgtcgttggcttggtcacccagcccccggcccacccttttctgagcctgtcatccacaccaggcagagccctgtctcagagtctcatggggagcagggccttcagggaaggcccatgtgctgggactgacttggctcacaggaatttcctgatggtataaaatgtgccccccagcgcctgataatggtcacttcgcctaagttccagccccagatgtggaccacggtggggcaaaggtgggcgtggggaggaggaaagaggtttaaaatggccacacccactacttctcctttggaagtgcctcctgccaccctggggtcccaggagctgatctgtgggtgtctgtcctcagcacccaccctgcttttccttcaggccccgctctggctgtctgggcctttctggtgctgttcctcacaggtttaaacactccagcagcagcctttcccatggcactgtgtctgcggggcggggttgggcattttct

SEQ ID NO: 92696 - DNA, 1018 bp, Homo sapiens
tggagtgcagtggcacgatctctgttcactgtaacctctgccttacgggttcaagcgattctcatgcctcagcctccccagtagccaggattccaggcacccgccaccacacctggcaaaatttttgtatttttagtagagacaggatttcaccattctggccaggctggtctgaaactcctgacctcgggtgatccgcccacctgggcctcccaaagtgctggcttgagccaccatgccgcccggccttacctgaatcttatcacacattcctttggaaaatgaatctcctgtgatgggaaaccagccattttcctggtgaggcctcagccctgtagccattccagcatagttaacctgggactctcttctcctctcttgtctctcctcttcctcctatctggcctgcttgctccatcctcccctgctttctgtctctctcctcaccacgtgcctttggatgttctgaatatgcttttgtttgcctgtccagcagtattctctccacggtctcctcctgggtgtctggcgtgtgccttgcgtgtgctgcgggctgggatctgtgggaatgacatagtcggacatggtcctgagcctgttggcctggggactccttttctgtcatactagatgagacaggcgagactgccctggaaagcccggcgtgtctggcctccccagtgctggacggtggccagtgtggttttccaggcgagtccgtgggctcctgggtgggtggtcgggctcgtggggagatcccaagcaatggttgtagagggatgggagggaatgggtggatcccagagagagagagagagagagagcaggctggttccactgtggcctcgttgtctaatgaggagagtgtacagataagtcatgctttgttttgctctgtctctggaattttaatcagttgccctaattgccttcaaattattggaagggaaaaacgccagcagagggtcctgacagatcccagctgtctagctgaggacttatcttctcattgttcttg

SEQ ID NO: 92697 - DNA, 1677 bp, Homo sapiens
gccatggcgaggaagctgggtggtgccctgtgctgtgtggctaaggtgggggacgagggttgtcggtgggggaagccccatgggggccccactggagtcataggagcgaatggagcacccactccatgccttctgtcaattacaaagcacctattatgtcccggatactgtgtccaacacagtggacacattgatgggtaaggcataatccccccccaggagctcccagttggattgaggaggcagacaggcgagcgtatggctgtgacacacccagcaactcccagttggatcggggaggcggacaggcgagcgtatggctgtgacacaggggggcaagtggcgtcaccaaggcagaacccagcagccggggcctgaagccccctcacccagctgcagccttcccgaaacagctgagatcagcctggagagctcttcctccctgcctgcccggagggtggcgtgggtcccatcgctctccgtcagccacggccagagcacacctgtgctgctcctcagaagggcatcacctgtggagacggtgacagctgttcctgttccctgccccaaggacaggatctggagcctgtgggtgtgtaaggagccaactccctgaccccaaaactgtggccagttctggagaaggtggccaggctctgggtcccgggactgtggcccccctcctgcctctaaagcccctcttctggcctccatgacttcagcccctcctgcccccagaaggagggatcagccctacaagggacccaagagagggagcctcacacacaggcgctgcctgactctcctccaagctggcctgagccctgggcagtgttctgaggctcagccacacggctgtgcagggcaggtgagagcggcagcctgagagctgcgagccggggccggggttttcctggagcagcaggagggatgagttgggtttctgtaactacaagggccaagaagagggagaggatgatctgggaaggagagtggctttgggccagcatttgggccagcaggactcagaggcgagggaggtggtaagatcccttgcttgggatgagaggcagatggggaaactgaggcttggagcagagggaggggcagggcctgggcccccagcaggtcccagttcatgatggcatgctgcttctgcatgagtgagacatgagggggtcacagacgcccggaagcatcggcatcatcagatcatccgactcgataatagaaaaattaaaatttaaagtcactgaaagtgacgagtgacagaaatgttcctagaaactggagattgggtgctcagcggatctcaggatagatgatatcagacacaatgtcccctgggctgaggtttttttttgttttttgtttttttatgtttcagaattctaaggcaaggatgaaagtcttctctattcttgaggtgctggggttcctcagcctccaccgtccagcctcgagcagctgccccctctcacctgctcctcagccttctggaacagacaggccccccacagcagcccagcccaggccaccagcaccacccccagaggtttatgccatcttcatgcagtgggaggctcagcccccacactgggacctgtccactttagccccaaggatcttaccaaggtcaaatctttggaactcagggtctttgggaacttctgggcc

SEQ ID NO: 92698 - DNA, 1029 bp, Homo sapiens
aacgggctgcataaaacacttattttaattataagagtgatgtaagaacatatcagaaaattggcaaaatacagggcaaaaaaaaaaaatcactggtggtcgccttctcacacagtcacacacagtggtgtgcagccttctggcttttggttgctttgttgcagtattggcacctgcgttacaagattttgtgttgaccattcttgttcttgctgtggtctttaaggtttacagcgacagctgttcctcttcaggatgcaaggagaccgagcctgcctgccctcagggagctgacggtccagcaggaggcatcctgtctgcagggcccatgcgggggacagggcaagaggtgcggtggaaccagaccttgccctccagaaatgcagggagacagacacgggcgtatttaattcaactatagcatgtggttctgagaaggcttcttggaaagggcctggggttgagctgggcaccagcagggaggtctcagagtggaggcggcagttccaccctacggcgtagaggaggcgccctgatcactgcctttcagccgtggccctgcctgtaatcttatcctttttgttgattgttgttggctgatgttggctgttgctgtgtcctccaccagagtggagaactccctggggctggaccccttgtccttattcacccagagaataggtgccttaaaatactgactggacagaaggaggaagagatgggttggggggccgtgtcatggaagaattccttgggccagccgcagaggagtaggccttggcagagagctgggagcctggaggggagctgaagacctctcccatagtcagctgcctttagggaagaaatactagaaagtcacagaagagaaaagaggcggggaaggggaggaaagcatttccacccacagtcctgtcgggagaggtaacattttggagtacagtgtgccctgccccagcaggccctggctggatgcatattcctatagatataattctataagtgagatcattccatatctactatttt

SEQ ID NO: 92699 - DNA, 1035 bp, Homo sapiens
agaattcaccaggcaggacagggctgatgagggagcccctcccacctggacactcagtggcccctcccaggactcggggctttcctgggggcctcagctgcggagcaacagctccctgtgcatcagagccgtgggggaggggggccagggggcataggtacgaccaccactcccatttcgtgtcctttaggaagcttgaagaaaagtggttagccaagaacacaaattacggtgatgttgtttgcagtgtggcgtgttgggttaacataaactctgaagtcagaattgacatcaatttgagcccagatcatcctgttagcagctgtgtgacctgggacagggtgcttaccttccagactttagttccctcactgtacaacagggacagggatcatacctttctctgagagttgaaggaagaagtgaaaccaaacacagccccatgacagccccttatgcatggtaggcactcagcaggtgctggctcccttacggcccgaaggaatcgattgacaaactctcaaattaatgacataattcaagagagtagctgcggagacaataaataattatagtagctgatgtggtttggatgcgtgtcccctccaagtccatgttgaaatgtgatccccagcattgcaggaggggtctggtgggagttgattggatcaggggggcagattcctcatgaatggcttgggccatccccctggtgatgagtgagcaatttggtcgattaaaagagtgtgtcacctccctattcttttgttcccactcttgccatgtgacacattggctccccatcgcctcccaccatgatcgtaagctacaccagaagcagatgctggcaccacgcttcctgtacaggctgcagaactgtgagccaattaagacacttttctttataaattccccagtctcaggtactcctttgtaataatgcaaacagactaacacattagccatagccatttattaacataattttaaaagatttcagtcttgtgctgaaattgttatgttgatggttacaca

SEQ ID NO: 92700 - DNA, 1188 bp, Homo sapiens
tgcagctttccaaaaacccgtgcctccctctttctgcttgtaaatgtccctcacaactggtttcccagaaaaattgtgaggatgagcgaggtgttgcttgtggaagttactttggagggaaagtgtttgtgacaccccatgggtgtggcccatggggctcctgagggtggatggatgtgggagtggacaggcctggctccttttcttggtgggctgggctgggctatgagcaggagctatggccgtggctgacccttctgcaatgggagctgagcagtggtacagttagatagctgcgcagatggtccgatggcccggcctccaaggccttgagtgatgggatgaccatgaccactggatgtctctcaataggctttgccttaaccatgccagcagttcccccatctgctttatcagccctggtatgtacatcagattggctaagggtgcaaaactggaatgctattaaattccagaggctctggtcgcttgaaaagatgagctgaaaataagataaaatttcacagggttaaaggcaggctttgcactctggtttaagtatagagtcgtccattcatgagagtataggtttgggagacaatagcattgaagaggcttgagcgcacactcagaaccagtggctctttcttagtctgtccatgctggctatactgcagcccccctcaactggaatcagatgtggcccaaccatgaatactttggacaaagctcccccaagtcaggcatgccctcttgttagggaaggtggattcctgacctgagtccatctggaggtccaggcaggaattagaaccacttcagaaaagctctgcacagatttaattgcacgagtacctgcgtctcagagctgcagactgagtgtgttgtgcaattgttgggcggcttttcccttggccacagtagattcgcaattaagaaaaacaaatgcagctctcagtcagaagtgtgcaaggtttgcttggtctggagacagcagcttctgtgctctggggtagtgaggaagtgtgtgggcaggttggcaaataagccacatgtatgtcccctgggctcagcccccatcttagtgggcacaccagggcccacgagatctggggactatttatgtagggtctgctggggcaggggtgtgggtgggtgtgcgctgcttgtgttgttgaattgggattt

SEQ ID NO: 92701 - DNA, 1028 bp, Homo sapiens
ataggatttgccgagccttttggatgtttgtggcgcgacggctgctgtgggaacccagaggctgctcatttgcagggaatgaataatttatttctgttttcagatgacttattccttcatctgcagccgagcccccacatgttctgtaggctcctgattaagtgatttcagcaggagaatttggcttaatcccccactgccctggacgcctggttccaggctgctgatttgtcggcctcgtgtcggggggtgtccggagcctctcctctctgggggcttttcttcctgctctgcctgtttgggaagcctctggccactgagcatgtgctggccttgggttttacggctgtctggcaattagaatattaatgtcgataacacagcaggacttgcgtgtgacaagctgagccacataacgtcacagtcgctcttgaacatctcggactttcacatgggccagccacaccccagcctaggttgctccctcacctcctcagggcctccctgatgtcggtttagacatgtgccttccatcttgcctgggccaccatgttgatcctctgggtccattgctcaagagcccaccatggctccctgttgccaaatgcagcctgaattcagtattcaaagccctccgtgaatgggcttggtccttcctccctggcctctcttgcgtggctccatgctctgagctgcctactcgctgactcattcatttaatgtttattctttggttgttgtttcagcactgagtgggtctgtggaatcatttacatgtttattgagagtccccctggctgcagatgctgggcaggggctttgatgtggggagaaagacccccccccaggttacaggtaagccctcccaagtggcccagggccctgggagggggtgaggttgtgtgagatggcagtgtgggagagtctcaaatttttggcatctttaatctgcccactgggtgagattgaggactcaggtgggtgtcaggggctttgaatgccaaaccacaaaggtctgcaggctgggg

SEQ ID NO: 92702 - DNA, 2740 bp, Homo sapiens
ggctcctttccgtggcaatcatctgacgacctggaaattaccacccttttcctagaaatttctgcataatccaccccctaatttgcatgtaattaaaagtgggaataaatctgattgcagtgccgcctctgagctgctgctctgggcacactgcctgtggggtagccctgccccgcaaggaacagtccctctgctgccgctgggcacagctgcttcagtaaaattgctaataccaccggctcacccttgaattctttcctgagtgaagccaagaaccctcctgggctaagtcccagtttgggggctcacctgccctgcaagatcaggagccatctgtacaccaggaagacagccctccccagaactcaactgtgctggcaccttgatcttggacttccagcccccagaactgtaagaggtaaatgtttgttattgaagccacccagtctatggtaatttgttagagtggcctggaggaagacacagtattaagtaaggcttcgtgtctgacttcactgaacactgcggttgtgagacgcatctgttgtgtggggcactgaggttcattctgattgctttatgggactctgttgtgactgtactccagtttctctgcccgtggaatgtacatggatgtttggatagtttccagggtggggctgggacaaattgtgcagctctgagtgttcctgcacatgctttgtcttggacatgtgtccttctttctgttggacatacatgaaggaggtcagctgctgcttcacggggcatgtgtgtggtcatctttagtaaatatgccagtttttcaaagtggtcatagacagtagattccttttattatgtgacaagagctcaaatgccctggtagtgggagtggcagcaggagctacagtaagacattgcacattctctggaagtcagggatccctgccagtcagttcccagtgccccaggaaccaggggtttggtgctgggcactagtcatgaccactcgcggctcaggtgttgggtggtctttccagaccttcacctgtgtgaagcttgcaacctggatggtctcatgtggacatcttggcttccaccctgtgctctgtgtctggtctcagaccacagcccaccctggtggtctcctcaggacacataggctcctctgtaactcagtttcttgaattgaacaatggaagaaaatgcctctatgaagagaggtcattgtgcaaaacgtctgtgtgacagtattcttggagcaactgtgcttatcacccggaggccacagtggaattagtcatttgaaaaccagtcacctccaaaatagtcataatccaaaaccatccatctttgacttcagactccattataattttttctccctaagggactttgctttgtaattatgttggatttcctaatatattaaaataatttgtcatctcttgagcacacatctgcctgctatgagcaagcaggagaggccacttccggttttctgcaggtcccagtgagcatgtgaagcctgcgcctgggcaagaggttggatactgggaggaagaagcttttccagtaccctttcccaaagaccagccagtgagggaaatgggcaccgaatgcaccccaccccccggcctgggactgggccaagaaggaggaactgaccccagaaatggccccggaaccataacctgcttacactgtgacctgcagtgcccatggtggcagcctgggctgtttctggagttgagcggagagttcctccagtctaaactccttagagaacatgaatattcctgagggcctggggtccggcaccaccttcagtggactggatcaccttcttgaaggcagagagatcttaagagcttatgtctgactgcctacccgatgcccagcactaatctgcatgcaccccactgggccatgggcttctcaaaggtggggacgctgtccctgtacctaacacacatggtgggcactcggcctaggtttgcagggcctgctggggagttctccaaggcagttttatagctcagctccagcaccttcctgggggcccagtcctggatttgaggctgccaggggggtttgcagtcagctaagttggtacccatccatcccttcccctctgtaaggggtgacaagcactaagacctgttatgtcccctggaagctctacactctgtccccttgctcttgtgactctgctctttgctctcctgtccactggcatataggagtaggaggatattgacttagattcctttttattatttttgtttaaatcagctttgtggaaatgtaattcacataccctaccatttacccatttaaagtatacaatgtaaagtatacaattcagtgatttttagcatattcacttgtatgtgcaattatcaccatggtcaattttagagtgctttcatcactccaaaaggaaacccgtaccctttacctgctagcccctctttccccatccgctcttctgccagccccaagaaactacgaatctactttctgtctctgttctggacattttatatagatggaatcataccacatttgtccttttgtgtctggcatctttcattatatttttggggtcttgttgctgtttttgtgacagagtctcgctctgttgcccaggctggagtgcagtggcacgatctcagcttactgcaacctctgcccctccaggtttaagcagttctctgcctcagcctccggagtagctgggattacaggcgcgtgc

SEQ ID NO: 92703 - DNA, 1069 bp, Homo sapiens
gagatctcatctctactaaaaatgaaaaaaaaaaaaaaaaagattggggtgcacctgtagtcccagttacttgggaggctgaggctggaggattgcttgagcctgggaggttgaggctgcagtgagctttgattgtgccactgcgctccagcctgggtgacagagcgagatcctgtctcctgaaaaacaaacaaacaaaaaaaaaaccttgtaactaaccagagcagctgaaaagaacagagcatgggtttggggatttgtgttttgggcgccccacaccccatttagccgagtgtcacctgagctggtgtcccggagtctctttccttctccataaacagttgagaatgagctctctgccaggccggtaggaaggggatgatgaaatgaggacctggtacattctgctgctggttccattgctgggtttctcctcgtggagagcccttgaccctgtccaggtcttgatttctcggagtgtcaaagcagtgcgcacggagctgtgagataaattggctgagatcatcgatttgaaaacgccgtgagaaaatatggggcaaggcagagagcacagaggggctttagggcagcgagcccgcgctatgtgatgctgtaatggtgggtgcgcatcggtacacgtttgtcaaagcccacggagtggcccacgccaagagggaaccctaacgtgagctgcggacctggggggtgatgatggtcagtgcaggtccctcagttgtaacaaatggcctgctctggcaggggatgtggatcgtggggaaggctgtggccgggagtggtgtaaggggtgtgtgggaactttctgctcaattttgttgggaagacctaaaaaataaaatcttttattttattttatttttttgagacaacatttcactgtcacccaggctggagtgcagtggtgtgatctcggctcactgcaacctcagccttctgggcccaggtgatcttcccacctcagcctcccaggtagctgggactacaggcacgcaccaccacgcatggctaattttttgtatttttagtagagatggcatttcatcatgttgcc

SEQ ID NO: 92704 - DNA, 1023 bp, Homo sapiens
ctgcccgtcccctgccccgcccttagatctgcatcccgtgggtggggtgggttttcctgccttcctcttcctgagggaggcgatttctccttccgctttctccttgccacagtagctgctgggttgggaggagacatccaggctggggcctcagcctcagggtgccagttagcgtgtggttagctgagaaaaaagtatttttctcagcagaaaatagacacaactgcatgtgaaggggccacttccactccttcattctccatccaccagccttactggagctagagagtgggggaacatctgggtccgtgttacctggatgtcacctgcatacaaatgtcctggcccgaggccactgtcagcacgggtgcacaggggaggcgcctggcccggcaggtcgtgctgaggctgatacccgtgtcaagaagctggagcaggcgaagagatcagaagagggtagaggaggtggtccgaggtgtccattcccatccccagacccctggggcatttcagtgcacgcacagcaaataatatcactgcaccaccaccaccaccaccaccaccaccaccatcaccaccaccaccaccaccatcaccaccaccaccaccatcaccaccaccaccaccatcaccaccaccaccaccaccaccaccatcaccaccaccaccaccaccaccaccatcaccaccactaccatcatcaccaccaccaccaccaccaccaccatcaccaccaccaccaccaccaccaccatcaccaccaccaccaccatcaccatcaccaccaccaccaccatcaccatcatcaccaccatcaccgccaccatcaccatcaccaccaccgccgccaccaccgccactgccaccgccaccatcaccgccaccactaccgccaccgccaccaccaccgccaccgccaccgccaccaccaccaccacgagttgagggactctgggatcagaaggcactttccagcacattcacaccattggccgtggatgttgtgggtcaggtgatgggcac

SEQ ID NO: 92705 - DNA, 1040 bp, Homo sapiens
gtgtccccgccagcccttctccagccatgcccttttgcctcccagcacactgaggattcctcctggaatgcccctcaccccgtctttgctgggtgagtgtttccccagccccgctgagctcaggtatcagccccagcgctctgggtaagtctgggaccatctcctacattgtctgcaaaatcctgcagaaagcctggcctgtgctggtcagcaggatgctgcgtttccttttaaacagacccaaagcagtcagcagccacagactccccagagacggagatgagaggagggacctcatgccctgaggcagccccagcctcactcccatgccctgcaggcgctgagcagcccccagatcccgggctcctttgctgccccagggtcgggcagttcttgcatcttggaccgagtgggctctgccctgctgtggcatgactgggcttcttctgtcctttttctttattttctctttgaagaacaggagttggaatttcactcaccctgccccagctggatgtgtctaggccaccgtggtcccaggctctctgcccagctgggcctcaggaccaggttttaatgccgctgcttgggtgtgccgagcgagaagggctcgccaggcagtgcagagattccaccgagcccaggccgcagcccccacctcccgccgggctgtgctcagtgtcaggaatcggctcccaagatggccgcctttcttgtaaagctgtgccaataccccaggcatctgactggtgctttccagctggcactccttttacagattccatttccctttatcctcacaactgctcagtagaacctgcaggcagggacccttattcccattttacagtcaaggaaaataaggcccagagaagttgagacagccaggaccatatggctggagacggggcaggctgggcagagcccccagcagggcccctgggtctgcgggctgctcccagcagcacccctcatatacacaccctcatcctgactgcaggcccctgaagctggcattctggttcaattttacagaggag

SEQ ID NO: 92706 - DNA, 2255 bp, Homo sapiens
gaagtcccccatcctgtcccccaccccactggctgaggaccatatagctgggatgtgttcacctgggaaggagattggcaccagtttgataaatggacacccccaagtctggcatggccccaaaactctactctgctgcagctgtttccatgccagaaaacagagatttccagaataccgagtctgaatgtgccttcttggagcagcttcaaatctgagcaggagagcacttgaccatcctaacccctgaccttcctccagcaattcctaaaactggaagagtcacagaatgttagaataagagggatcctagaaaaagaaccactcactcattgctttgttcatttgctcaggcactgtgctaggcgcttggaatacacaaccattcattcaaacatatttattgactgaattgtgtgccaggccctgttttgggccctgtgggggtacagtggtgaacaaaaggaggcagacagtcaagagattttgtaaatatagtgccaggtggcaggaaatgctgagaaaggggtcagggtgagggaccagagggtgagggtggatgctctttgaggtgggtccttggaggaggtttccccacgactgttgagcaagaacatgaacttggagggagtgagccttgcagacactgaggggaaggaagagcagacaggtggagggaactgcaggtgcgaaggccctgaggctggaacacgctgagcagcttctctgactgggacaaatgaaggattctccttcccccaggagctcccagtctaatgaaggaaaaagacaaagaagtgacgcgttcaaagctgagttcatactagaaaaacgctgttagaattcaaagggaagagcagttgtaggggctgggaaaggcaagcctgaggagtgacctttgcattgggctttggtggatgagtaggggttggcagggtggctgaggcgagcgtgccacacgggtgaactcatatctgcagaggcacaaggtgtgcagggacagccacccacacattcctcttcctgtcgcagtagcagcttctgcaagagaaagtacagctcttggggatttcccttttcctttctccacctcttccttctcaccagcttcatttagggcatttcagccttgagagggtggaaaagaaggagagattggtagaggaaggggatttctgtgccctgctgggtctctctctctctctcttctcatatgttatgtttttcttgtaaggttttggggagttgtggggagtttaagaggctggggatgggtaagaagtcaagaaggtttcggttggatttctcaacaacaggtcattggcctggagcccctccagtgggtaaaatgccgtgatgcaacagctttcaggaaggcctccagaaatgagctctaggtcagtgggttgggtttaggtgcaggcacgccctggaactgtcactctagaggtgttactaacctcctctttccccggatctgactcagcagggttggctgttccagctccaaagagaaggaggaaccttttccttctgcagcccctccccaccagcctcattccttagctggggtcagacctggggtcctcactgcagctggcctctggcagcgttctcaggctagccctccctgctgaaaagagaaccgtgtgggactcacaggtaattatgaaatacaaacgccatgatctttcactcaagggcactaaggagtgaataaataaaggataccacagggtgctaatgagcttgaagagtccctgtttggtagccccagatccagggtccctggtatcacccactgaatgctacttctacccagcactgcccacgggaaataaagtgggagacacatacctatgtgattgtaactttttctatagccgcattgaaaagtaaaaaagatgaaatttaaaacttgtttgatttaaaccgttagatcccaaatggtatcatttaccatttcacatgtaatcaagaaagagaaagtattaatgagatattttatgttgttttttttcatatgaagtcgtcaaaatccggcgtgtattttacactaagggcacatatatgagttcagactggcgacggtttatgtgctcagtagccacgtgtggctggttgtgaccatagtggacaaagcagccctagcttataggtggagacacggaggcacctgagaggggcggggtctcagctcaggccctgggagcctgttcaacagctccctctagcgtcggcccagccacacttca

SEQ ID NO: 92707 - DNA, 1034 bp, Homo sapiens
ggaagaacaagctctcatctcaaatggcctgagccctctgattccttgaagttcaaattcacaacaaacgcctctccagcctcttcctgagcctcagtcttttttttttttttttttttttttttttttgagacagagtctcgctctgttgcccaggctggagtgcagtggcaccacctcagctcactgcaacctccaccctccgggttcaagcaattctcccgtctcaacctcccgagtagctgggactaccaggtgcgtgccaccgcacccagctaattttttatatttttagtagggacggtttcaccatgttgctcaggctggtcttgaactcctgagctcagacaatccactgccttggcctcctgaagtgctgggatgacaggtgtgagccacggcgccccggccagcctgggtctctcataagcatttggtgtttcccacctctctggtcgccttccctcaaagcatctcagagtctggttggcctggcaagcttcggggatctgactgatgaaagcattttggagcaatgggatgagatgccaaccaatgccgtcagccggcactgaggtgggattaacaggacaatcaagccctcggttcccaggagcctcactgagcagctgctagaactgtgccactaaacaggctttaatttacaggcaataccgactctgggttaactatttctcacagggctccccagctgcatgtttacatttctttccttgttcctctttttcttcttcttctttttttttttttttttttttttttacaattcagcagattaagaacaatagcagggtaactgagaaccacagaggtggctgtaagtgactcattaactccctctcccatgtttccatcaccgtgaattacaacgtcatctctgatgccctcagacagctgttactagtttgatccgagccttgcttgaatatgaatctttttaagccgagcaggagatggttctgctctcaaatagactgccctcccctgggcctcccatttcttaccccaccatc

SEQ ID NO: 92708 - DNA, 2214 bp, Homo sapiens
attcactttttatgccccttcctgggcatgcctacaccataactcaagccccccagggagctggtgactggggaccggcatcccagtgctcagcctgggattcggcactcagagggcccgacagcctggaatacactgagcaccccgctggcaccaggccccaaggacaggctgatgtttccacttccctggagaaagatcctccagtcccctgctcggaggctgatcccggctggctgcccgcttgctcagggcaaggaggtaggctggagagggcagacttccctcaactcacccatcttctgtgggttcctcaccagccttcctctgggcctgttgttctcctgtccagtgtctttccagagaagattcctcccccaagctttggagatggggctggggtgggggtggttacctgaccgctgagtcgcagtacagggttccatgttggtcaggggtggctaattgctgtaagaagcaagtgccaacctttgcttggcccagtgaagtggtgtttcctgatgtgttgcagtgggatgtcaccgcaggagacgaaggctctattccacgcagtcacgcaaggacttaagtttcttctttttagaaggtctttcgtctcacagcctttctcagccggggttccaggagggaatcaaggactcacagcaaaggcatcatggtgtgcagggaacgactttcctcctgcatacctggaatgaaaccagttacacaccatccttaggtacatgactggttggggaaatgggcacaccagtcattgactgcaggctgtggttcagatgagaaagcctggttgagaaatgctttagggtctatgccctctggggcctccaagtcctcccctggatagtctgcttccaggtgcccagcaagaaagggcaggaaagggcgtgtgcagcaagggctgccctgacagttatggaggctcaggccagaagtgtggtcatcactctggccacatcccattggccagagtgtagtcacatggtaccacctagctgcaagggaggctgggaaatgtagtccggctgtgtgccctggaagaaaaggcaatagagtaagaagagcacatggtctcggcacaggctctattcttgcacattccttcagactctgcctcccacacctcctgaggctctggggataccctatccctgagccttctggaattttggggccccagttgccctgtttctccttcctggcccccctccctgttcagctgtttgccatctccctgcccacttcccactgatatgtgttggggcttgtggatgtgatcaaggtcataggcacagtctttcttttctttttcttgttctccttgttggggtggggattttttcaaaaggaagcggcaaaggtattgtactatttttgggtccctacactcttctgcctccacattcttctgttgtgtttatgctgctagacctggaaccttaggatgagcaggtcttggcatcagactttgtttgcatcagcagaatcctttctttgaaagagaacagatgcagaaacagatcagagggttgctgctctggtctgtgctgggcctggaggcccagagtccttcctcctcccctgcccatcctgtggacccccaaagccttaggaaggtccctggggctcctgggacacagctcagaggctcctggctggtgtcactcctctctgtgaggcttgaattctctcccttgcattccgaaagtgggtcacactggaataccagctttgtccaaacctccctgcctctggagttagccaaaccttaaagcaggttcttgtgcatgtgtgtatacacagcaactgcaaccacagcaagagtgtccattcacccaacacagacacccaccttgtgccaggcccagctgggtcacctgggagagggtgaagggtaggaagcccttccagaggaggtgctgagtgaggcaggaggccgcaggcgcacacgtctgccctctggcacacgcaggaaggtgctgggaatgcagggagcttctccccagcagaccatgatgcactccgcctgttaccttctagcggtgtgctcactgggtttggcactgcccctaatctggtacctccctttctatacgcatctgtgatttcaggcagataagtgttatgagtttggcattccaatgggatcggtaagaacataaatcaccgatccatcctgggataaatttc

SEQ ID NO: 92709 - DNA, 1156 bp, Homo sapiens
atcttcgcctctcgtacaacccctggtgggcaccggatgatgccctgttccactgattttaagttgcattttcccccccgcatttccacattctccaagtgagaacgtgtcccgcagtgtgagggtgagctgtcgtgatataattagagtctcttggccttcttggtggtccataagatagcggcatgccttccgatgggggacccgggagttgctgagtcgcagcgcttgcacagcgatgggcttatttggtctctccggcacatggctcagccctgctccgtggccgtgggtggcgtccccggctgaccccctgtcttgcaggtgtagtcgccgccgccagccgccatgggcaaacagaacagcaagctgcggcccgaggtgctgcaggacctgcgggagaacacggagttcaccgaccacgagctgcaggagtggtacaagggcttcctcaaggactgccccaccggccacctgaccgtggacgagttcaagaagatctacgccaacttcttcccctacggcgacgcttccaagttcgccgagcacgtcttccgcaccttcgacaccaacggcgacggcaccatcgacttccgggagttcatcattgcgctgagcgtgacctcgcggggcaagctggagcagaagctcaagtgggccttcagcatgtacgacctggacggcaacggctacatcagccgcagcgagatgctggagatcgtgcaggtaccggcgcccgaggccccgggtctcaccgcgggcccaggtcccctcccagctcccagcccccagcccagggcttttttttttttttttttttttaagacaggaatcttgctctagtgactggagtgcagtggcactatctcagctcactgcaacctctgcctcctgggctcaggtgatttttccgcttcagcctcttgagcacctccatgccctgttaatttttttggtatttttgatggtagagagagggttttgccacattatccaggctggtcttgaactcctaggctcaagcgatctgcccgcctcagcctcccagagtgctagaatgacaggtgtgagccaccgtgcctggcctccctgtgttctttatgttcactcgacattgggtctttcttggccaggttgctacctggtgcactttgga

SEQ ID NO: 92710 - DNA, 1006 bp, Homo sapiens
ggatacagcacgggtgtccctgactgcatcccgctcttccctgggcatggcaggcgccaggcaggtggcgggcgggggtggccctcaggagaccaagaagctgcagaggggagggggtgccccaaaccacatggttttgcccctaccgtggcgtacacatgcagccccgcccccaccccgcactaccgtcattgttggtgtccatctgcctgaagatcttgtctgtgcgcttctccggggtggactcatcctccggcatcttcatcacagacgacaccatcttgtagatggcctgcggatgggggcaatgacactgtgctcagaggcccgggggcttgggcgggtgcagcaagggtgggcttccgcccagcccacaacaaggctcggagaggtcaggggctcccggtggccttcgggacccttccccagtggggagaatgttccctagtgaacctcacgggtgtctatgtgaagttcaagagcagagctggcagaagggttctactgggagggtggtgagggtgctggtatctctgcctgggggtgggtagtgccaggaaggtgcctaagtgtccctgtcgggggctgggaatgctgagggagagtggtggtcacagatgtgtgaaattccccacactgcctgctgagctgtgtgcattttactccatggctgttacccctcagtttaaaagagactgagtccctgaaactcacagggcaagccccatcaccagccccgacaggacaggaagcagcagcactggggtctccatggcctgtttagggcactgtcagccgagggctcagtctagccactggtctctctgcgtgtctctgcctgagtggcccagcctggggcatgtgactctgtgctgctggtgggtgtacagaggagacggtgatgggactggtgagtggccactgagcagagtgacatgcgtggggagtggtggcactgctgtgggattttctgagcactccacgtgaaggtggcttgatattctca

SEQ ID NO: 92711 - DNA, 1057 bp, Homo sapiens
tgagggcggctgtgcggccctcccattctgctcttcttgccggctttgtcaagagcagccacagcaccaggtttgctttgcttttgagcaataaagaaacacgaccttaagaagagaaaatacaggctgggcgcagtggctcacgcctgtaatcccagcactttgggaggccgaggtgggcagatcacgaggtcaggagatcgagaccatcctggctaacacggtgaaaccccgtctctgctaaaaatacaaaaaaattagccaggcgtggtggcgggcgcctgtagtcccagctactcgggaggctgaggcaggagaatggtgtgaacccgggaggcagagcttgcagtgagccgagatcgcaccactgcactccagcctgggcgatagagtgagactccatctcaaaaaaataaagaggaaatactccctgggttgtgctggggattaaacgataagctaatgcccaagaagctgctctgcgaagtctggagtgcagccctcgggtgagttaagcatggccccagcgggagacgggatgtgggggagctgtaagcagcaaagagcattccaggcagccaggtcacagtttcaaaacacacacacacagaaaacaaggctgcctggtgcctggcgttgcctttgggctgatgggaaatgtgtgttccaccctccagcctagcagggcacctgctgccgctctcctgaggctgtccgctcctcgtggggatggtgaatccggtcccatggggttgtgaggtttcagcgagatgatgccttaaagcttttagcagggcttgcactccacaaataatggctgttgttcccaacttcacagtgtccctggggaagccacccatggtcactcgctgcccgaatctgcctcctggcttggccctgcccacctcttcagagggcatcttctaggttggttgggaatttggatggcatggtcgttgctaatgtgcctgctgggatggagcacttcctcctgtgagcccaggggacccgcctgtccctggagcttggggcaaggagggaagagtgataccaggaa

SEQ ID NO: 92712 - DNA, 1817 bp, Homo sapiens
aggatggggcttccgtctcacctgtcctcctacctgtgtgtgggtggacccactcattgttctctgagaatcagagcgagctatacgggattcgtgaactgtctggaatgaacacaccataaaaacgtcccaatgcctaattatttcaagatactttattttaaaaacaggtcacaacactaagcttttggcccattctgccattgtacaagctacaaatgcttgttcagcagctgaggggcactcttgagtagcgtgtctgaagagtgaataaaaatccatataaaacaaatattcaaatagtttccataggaacacagataagtgtgacccatatcctagtcttccatatggctgcatcatggcgaccctactcttacaaagacatttcaaaactagcagtaattaagttacatggtccccccaaatcccttaattcaagctaaacttgcagttaacagctaccagagtgctatctacacattaatactagccgaagcacaggctgctctgtggcgtttcatcccactctcccaggcacaagacacaggcagggtgctggcatcctgttcctctacttcgggtgggaagtcggggttctggaattgctgcatgagttgcctgagaaagaaaaagtggcatattaaaaaccctgactcactcctaactgggcatgagagtatttacttcccatcaggaaacaattcaatgtattttttttttttctgagacagggtctttctctgttactcaggctggaatacaatggtgctatcatagctcaccgcagcctcaacctcccaggctcaagcaaacctctcaccttagccaagcagctgggactacaggcgcccactaccatggccaactaattttttaattttttgtagagacagggtctcactatgttgcccaggctcgaactcctgggctcaagtgatccttctgccttggcctcccaatgtgttgtgatttcaggtgtgagccagcacacctggccaattcaatgtatttctaaagcaagcgtttcttcagtcaccgttttggtaataaggaaaccacaagacacatggcatgaacttaaatatattccaattacatagaaatacactcatcagtcttttctaaaacttttcttaggaaaaatatccatatatatttaatcttaggcaagacaatttcttattcgtctagacaagaagcacacatccaagaaggtgcctattcttggcagcaccatcaacatgcatggcttacttaccacgcaggccctgacatcacatagtagatcgtcggcctctggaagccattgaacgtagaggcagcagcaacagtgtaagcgcccatgttttcaaagagcatccaatcacccacatgcatttcaggcaggtcacagcgctcaacaatccgatcgaggccatcacatgttggtccccatatgctggatgaataatacttctcatctggtttaggtctctatataaagagacggagagaggaagtactacttaattacacgtgttgtgaccagtcctcttaattgttttatacagtatgctcagaaattaccttttgcagaaggggctttacatgtgcgtggtcatagagtatgcaattaaatgatccatagacgccatcattcacataatacataaaggtctgctcactcgactcatcttcgtctagaaaggcagatcaacaatcttaatgactttttgcatcagctttcagttatacatgaagtgattcgtcctttatacataccatcagagcccgtctgttcctttaatacaattttcttggcaatgatattaact

SEQ ID NO: 92713 - DNA, 1857 bp, Homo sapiens
catctctacaaaaaaaattttaaaattagcctggtgtggtggcgggcacctgtaatcccagctacttggaaggctgaggtgggaggatcacttgagcccaggaggttgaggctgcagtgagccatgatcatgccactgcactcagcctgggctacagagtgagaccctgtctcaaaaaaaaaaaagaaaaagcatgttgctgtgggcttcctagagaatatgctgactgtagcacatcatcaccccaaatgtgctttgctagacctatgcttcctctccttaaaatacttgaaatgtttagtcacttaggaagttaagccattatattggtgcttgaatttataaaatatatccacatggtttgttaaaatcatgacgtaggcagaataggatttttatcctgttggcatgtatttgttaaaatgttttgacatcttgatgccttcctaggtagtagttagttgcgtactgttctttgataaaaatcatacccataacatcctaaaggagatagggtgcctggaggggaatgaaaacgagccacctgggatatgtagcctggttttcagggagatgttgatgtttttttgcttttgttactttaatgataaacctgtctgttgatgcctggtctcatgatgtcatgtcacaaggccctgtgatgttactcccccatgtgaatttcccacaatgaaggctgctctttcttttctgtttcactctcttagatcaccggcgtaatcaacccagcgttggacaaatactttccgtcagactctggagtgagaatcatagctgagcccggcagatactatgttgcatcagctttcacgcttgcagttaatatcattgccaagaaaattgtattaaaggaacagacgggctctgatggtatgtataaaggacgaatcacttcatgtataactgaaagctgatgcaaaaagtcattaagattgttgatctgcctttctagacgaagatgagtcgagtgagcagacctttatgtattatgtgaatgatggcgtctatggatcatttaattgcatactctatgaccacgcacatgtaaagccccttctgcaaaaggtaatttctgagcatactgtataaaacaattaagaggactggtcacaacacgtgtaattaagtagtacttcctctctccgtctctttatatagagacctaaaccagatgagaagtattattcatccagcatatggggaccaacatgtgatggcctcgatcggattgttgagcgctgtgacctgcctgaaatgcatgtgggtgattggatgctctttgaaaacatgggcgcttacactgttgctgctgcctctacgttcaatggcttccagaggccgacgatctactatgtgatgtcagggcctgcgtggtaagtaagccatgcatgttgatggtgctgccaagaataggcaccttcttggatgtgtgcttcttgtctagacgaataagaaattgtcttgcctaagattaaatatatatggatatttttcctaagaaaagttttagaaaagactgatgagtgtatttctatgtaattggaatatatttaagttcatgccatgtgtcttgtggtttccttattaccaaaacggtgactgaagaaacgcttgctttagaaatacattgaattggccaggtgtgctggctcacacctgaaatcacaacacattgggaggccaaggcagaaggatcacttgagcccaggagttcgagcctgggcaacatagtgagaccctgtctctacaaaaaattaaaaaattagttggccatggtagtgggcgcctgtagtcccagctgcttggctaaggtgagaggtttgcttgagcctggga

SEQ ID NO: 92714 - DNA, 2672 bp, Homo sapiens
tgcagtgagccaagattgcaccgctgcactccagcctgggtgacagcgtgagactctgtctcaaaaaaaataaaaaagtctataatgctattttaagtttctaaggaactgaaactgctctgaaataaatcagaccattataagacttttttccatatcagtgagctaagtgcagataagcttctgaaacttgcatgctagatttttttggtacaaatatttgaaatgcttagtgtgctgccttggaaaaacctggtattttttgttgtgtccttatactgccaaggtttatggaatcatgtaccttatgcctagtaataattaggatgaccaggccagtgagtggttcatatccggggcatgattagctctgcgtgtgctcagccagtgccccatcttcaactcgatgtgttcctaaggtagacagcaaattccctattttatttctcagattgtcactgctgttccaagggcacacgcagagggatttggaattcctggagagttgcctttgtgagaagctggaaatatttctttcaattccatctcttagttttccatgtaagtattcagtttacatttatgttgcaggttaatcttaagaattgtattgctaaggcttctaagtgaatttctccactctatttgcattttgttgcatttcagaggaacatcaagaaatcatgaacaactttggtaatgaagagtttgactgccacttcctcgatgaaggttttactgccaaggacattctggaccagaaaattaatgaagtttcttcttctgtaagtatatgaggcccatgctggcagtgcagctgagagtgccaggcaagtggaaaactttggcaaggtctaaggaagagcaatgaggcttacatgtcttgttatggaatgtagaaattaattcactggtggtaaattaatagtgataatggtgatactcatatcagtggctagactcaaaagagcaggattcattgtgactgatgggaatgaaggtcgctggctattggtgtggtgtgtggtgaggctgctagtgagtcacctgtgaccactcttgtttcaggatgataaggatgccttctatgtggcagacctgggagacattctaaagaaacatctgaggtggttaaaagctctccctcgtgtcacccccttttatgcagtcaaatgtaatgatagcaaagccatcgtgaagacccttgctgctaccgggacaggatttgactgtgctagcaaggtaagcgatagcagcaggcctcaaaagcgttgtataaaatgggcctggtattccccacgaggcagatacaagttgtgttttttgggcaataaatgctcactaaaggcaaatggggcgggggggtacatgacaacttcccatgcttttctgtttattccacgtgttaagccacatatggatagcatgacaccactcttctttttcagactgaaatacagttggtgcagagtctgggggtgcctccagagaggattatctatgcaaatccttgtaaacaagtatctcaaattaagtatgctgctaataatggagtccagatgatgacttttgatagtgaagttgagttgatgaaagttgccagagcacatcccaaagcaaagtgagttattcccccatctgagggcaagatcgggagcataagatatgtggattcttatcaaacaaacttaaatttctgattattatatttctatactttagtagaaagtagttgaaacccccattgagtcatgaagcctgggactcaaactacagaatatatcagcgacagtatttagaacaggattgtttttattttaattgtggctataagtgaacatctatcatgagacatttgctgcactttccttgcttgtaggttggttttgcggattgccactgatgattccaaagcagtctgtcgtctcagtgtgaaattcggtgccacgctcagaaccagcaggctccttttggaacgggcgaaagagctaaatatcgatgttgttggtgtcaggtgagattttggtgggatagctagaggtcaagacattgaacagtttgagttttacaggctttctcctagtgtttgctattattttaagaaatactaagacacagtgtctcgtctctttattttaccccagcttccatgtaggaagcggctgtaccgatcctgagaccttcgtgcaggcaatctctgatgcccgctgtgtttttgacatgggggtgagtatacgtgaccctgttagggaagggcgggacacaactgacaataactagtcttaattctagagttaactttttatggcagttggttctgtattacatgggtttcagcctatctgctgcatacatttttgttattagctgtggatctggctgacttattttcttgattctaggctgaggttggtttcagcatgtatctgcttgatattggcggtggctttcctggatctgaggatgtgaaacttaaatttgaagaggtaatttagaacaaaactgtaatactcagtagccgttctaataaattcctttttggaatatttcaaaatttaagtgtcttaactaataccacaatgggctgaagtgtcttggtgtgatattttgagtgatttctttgtgctgtctgacattacacttgataccatttggttttctaaagtgtgaat

SEQ ID NO: 92715 - DNA, 1901 bp, Homo sapiens
gactccccggccgcggaggaagggagggagcgagggcgggagccggggcgggctgcgggccccgggccccgggcacgtgtgcggcgcgcctcgccggcctgcggagacacgtggtcgccgagcgggccacgaccttgaggcgccgcttcctcccggcccggggttctcccgcggctggataagggtgatccgggcgcctcgttctgcccccgtcttcacagctcggggctggaggggcctaggggagacccacccggagaccctgcggccccgcgccggcctctttcccaacccttcggcggccgcgcgctggccggggagccgttggggaggccctggcggccgcgcagcaggtgcaggggcgcagagcccgggctcgccttggtacagacgagcgggccccggccttggcgccttcagtttccttccagtttttattttcgctgtgtctacagagcagatgacaccaatttggaaacccgcgagagtgggtagagctaagatagtcttgctgtagtagctgtgatattagatgctcggccatgacttagaggtgtttatttaaggactgtgaatgactcggtgatttcggaaaagcttggcttagatgaacggacatacacaggggagacagccctaaggtttgcagaaaaggctgattgtgctgtttgcgaagtcgaaataattggtgaaagtgtagaaggcagaacctctcaggaatgtctggggaggacaaagaatgtgttggctgactttgtttaaacataaaattgggcagactttaattgatttgtgaaatttttttcaaagtttgtttgaattagcccctatctcttctaacattatcctcttgtgctaattgattgaccattttaaataacttagctgttacagaaagaccgaaaggtgttcttcagtaaaatatattcaagtaagttacttaagtaacgccttaaaagatacagaaaagcaaaaaagtattggcgtattaaaaagaaatcaaaactttccaagtttaggcctgaacattgccttaaaaatatttaataaggcctcaaatgacccagtccgagactgcatgagcctatttattattaaattgtaaatattcttcatataaacaaaaatatataaccatgtctgtaacaaaaatggttttgctagcgttgttactctcttcccttctccgaggggtgatttaggcaacttcggaggttgacaatgccaagcagtcacaatagatagagctttaaagcaaattctatgcatgggtttggatttatgacaggcccgtcaccctgggcctgtcatagtaccccatgccagagcaaactgtgtccccgaaccattgcctggcctctgtgcccgtaggctgctggcactgaagtgggttgcacagtggaaaagaagaaagctctacctggcagaaatttttaaaggttaaaataaataattttaagaaagctggttcacaaggtgccacatttgatgaaagcaaaatacagtggcttttattgttactagagtgatgttcttgcttgtttttcttttttggtgaagttagccccaaattattctcatagctaagcaaatacgagagtgactgtaaggacagttggcattcccggaattgctaaacttggtaggcaacgctggtttaagaatactgagttctagccgggcgtggtggctcacgcctgtaatcccaacactttgggaggctgaggcaggcggatcacctgaggtcgggagttggagaccagcctgactaacatggagaaacgccatctccactaaaaatataaaattagccaggccccgggtgtggtggcacatgccggtaatcccagctactcgggagactgaggcaggagaatcgcttgaacccaggaggcggaggt

SEQ ID NO: 92716 - DNA, 1015 bp, Homo sapiens
ttggaggaatgggttttccatcatttgtccatccctcctatgttatatataataaacagaaggaggttaaaaatgcgctggtacctccaccatcattctgtttatggtaccaacagacctagatcaggccagaaggagtgggcctcacagagcccattattgcacttatacttgctttgctcatcccctgcaagagctcagagctccatgttccaggattggatgagtaatatcagccccttggacacaccattgggtcaccctgccagtaagagacagatttgtgatagccactcagttcgaacatttttttcacttttatttttattttttgtccttggcatttgttgagcttctttaatgtatggattgacatcttttggttcattccaaaaaattatcagacattatctctttaaataataattttgcccccatctcccttgcttctccttctggaataccccctaaatgtatttagaccttctcactctatcctcctctttttcatgattttcatctttctgttgttctgtgctatcatttggataattttttctgacccatcttccagttcactaattctctctttgcctatatctaatttcctattaaatccacctattaaatttaaagtttcagttattatatttttcatttttataagaaagatctatttgattttcgaaaaacctgccaaatcagttttttcatagttctctgtttcctgcaaatatctttaagcttgtattgttttttcaacataacaattgtataatttctttcctattatttcattatatgaaatatttgggagtagtttagctgtttgttttttctgcttattcatgctcatgttgccttatttccttgtgtgcttccttatttttcactaagtgctgcttgctttcttttcttttttcttttttttgagatggagtctcactctatcaccaggctgaagtgcagtggcgcaatcttgactcactgaaacctccgcctcctgggttcaagc

SEQ ID NO: 92717 - DNA, 1086 bp, Homo sapiens
gaagccaggtagtcacgaaggtcaattatagggcagggacaaggccacggggccgtctaataatgaaaggatatatgagattgtctttctttctttccacacgcagcttactcctgtagctgctgtgctgagctccatatgaaaaggttactgaccacagagctttgggttagttcctggtgagaactccagggtagggtgggtaggggaagcgtgccttccgccgtgggacagtgtctcggtgcctgactgtattagggttctccagagaagcagaaccaacaggatgtatagagagcagtagaaagagatttattatgagggactggcgtgtgattacataggccacgatgtcctaagatctgctgtctgcactgcactggggattcaggaaagctgatgatggaggtcccaggctgagtccaaaggccctagaaccaggagctctgacgtcggagggcaggagaaatgcatgttccagctcaggagaaaagagagacaatgggcctttcctctgccgctttgttctatgaagccttcctcgatgggttggatgaggcccacccgcagggaagagagcggatcttctttactgggtcccctgatggaaatgccaatcgctttcaaaaactatgccccccaccccgccccccgcactgacacacccaggaataatgttttgctgcttatctgagcatcccttaacctagtcaagatgactcataaaattcaccaccgcgctaaccccaggtgtgctacataccttgaagtgctaaatactggatgagatactttactgctgggatctaacagcttctcatccaaccctagaaagcccctaggatcttcctcctcatgagtgaatagattaaggctgaccaaggtctcccagcccctgagtggcccagctggaatttgagttcgtgactatcagtcttcaaatctgagtcgtgcctactccaggctgatgcagccctgagcggctgaatgagctggcaggcgcaggatgtgtctactgagttaaatcgaatgtactggaagggaggggacttaggacacattatattattcatgcatttttgcact

SEQ ID NO: 92718 - DNA, 1086 bp, Homo sapiens
atcccaggctgggcctggcccactgctcaacaagcatcacactgtcacctggggcatctgcagaacttttcatcagacaaggagaaatggcctgtcccttgcatggggagaattcctctgctattttaaccattttcttttcttttttttttttttaagacggagtttcgcttttgttgcccaggctggagtgcaatggcgtgatctcagctcaccataacctccgcctcccaggttcaagcaattctcctgcctcagcctcctgagtagctgcgattacaggcatgcaccaccacgccaggctaattttgtatttttaatagagatggggtttcttcatgttggtcaggctggtcttgaactcccgacctcaggtgattcacccgcctcggcctcccaaagtgctgggattacaggcgtgagccaccgcacccggccttattttaaccattttcaaacatgcagctcagtggcaggaatccattcattgttgtgcagccatcaccaacatccacccccagaacttgttcattatcccctgctgaaactttgcacccacaaaacactctctatttcctcctcctcccagcccctggtaaccgccactggacttttctctctatgaatttgcctcttccgggtgcctcatatcagtggagtcatgtccctttgtgtctggttttttcacttagcgtagtgttgtcgaggagtcatgtccctttgtgtctggttttttcacttaatgtagtgttgtcgaggagtctgtccctttgtgtctggttttttcacttagcgtagtgttgtcgaggagtctgtccctttgtgtctggttttttcacttaacgtggtgttgtcgaggagtctgtccctttgtgtctggttttttcacttaacgtggtgttgtcgaggagtctgtccctttgtgtctggttttttcacttaacgtggtgttttcgaggagtttgtccctttgtgtctggttttttcacttaacgtggtgttgtcgaggagtctgtccctttgtgtctggttttttcacttaacgtggtgttttcgaggagtttgtccctttgtgtctggtttttt

SEQ ID NO: 92719 - DNA, 1179 bp, Homo sapiens
atgctttaataacgtacttttagtacatttaagtattttttgtttttaaaaacagtgggaataaactaatggctctagtttgtaaacaaagatctctaaaaggaagtggacactctaagtgatatcatcttcttaaggtggctcttgtgtaggctcttttaaaacatcccagtggttgtgtgagtgtgttggttgaaaaaccagtctcctactttgtaggaggctggtctgtcagggcccttctcttgcctggggttcagaatttctgcttttgcattgatggtaaaagttggccttggtcctgctgtttctgccagggtagcatttgtcagagcagagtccaggcagccccaccatgtcccctggagcctgtgggcagcatttctcctggcagcagttctgagattggtggtggtactgttggcagcctgacggttaccagaaaagaggtatagaattttctctctttccctctactcatttcattttctcttttagtctgaacagcagaagaagcaacaggaggctgagaaactgcatcgacaagaaaggaaaagactccgtcgttcggccggacacctgaagtcaagacacaaaagaggacggtcgtttcattgatttgggaagtggtcctacctgtgattagggaggggtacgtctcccccaaactgatcatcgttagggtgttaaacacagacgaggaaacacacgtttttaaagttcatgtacgttcttgtacacagaggtaaagatttgaaaacctgtgccttgtgggttggactttgaagctggccccgccgacggccaccgcacagccccaggggtgtgcttgcgagtcgttgctccctggaaacattgtcctttccccacggcgttaatcatgaaaaccaggctggggtttttttaatattgtgaaatgtacaccatgaaatgaaaggtttatcctgtgccagaaaccaaggtttatcatgctctaggaacttttttcttacactgcctaccgccattcatgattaaaccatccagaaataccatccctgttttacctggtgtctgtgtattgcctgtgtttgtgtttataagtttatgctgataggtttgttcggcttgtttatgtattagtttgggatttgtttttaaataatttataccaagagagtataatctaatggtgcaggt

SEQ ID NO: 92720 - DNA, 1049 bp, Homo sapiens
gaggacttaatttgtgctcattcctttgtaaaaggtggacgagtggccaaattactcacatacctaatttgtgtattgtttaaatatatcattatatcataaatgccattgaccattatgatcaattacaggcttcaggagtagattgctctttgcatttggtcttcagaaatatgattgattttagtaagaaaagtagcaggcattgaagtgtttggtcctgccacttaagatattaaattagtgggtgtttttgccagccattgttttacagtctatctctggaatatgaataatgactatttgaatgcacctaattctttccatttattgtgttaaatgaatgatattttctgtttacatgtgtaaacatttttcttcgctatcaattctaatcaaaacttgtttcaaatggtaaattaaaacataattttgattaatgtggcattcttttgaatttcccatagcaaaacccttgaagatcgtttgaaaattgaagcaaaaaatgggacattgagtgtatccgacaccaccgttggcagcaaacaattgacattcacgttaaagagggtgagttgtcttttattgttattttttaattcacaaaagaaaaatagcctttcaatagtgtttgtgtgtgtgtcctcagagcagccttctcaatgcttttcccctattgaggaagctgtgttccctgttctaacattttccttgcaaccagagcccctggtgggccaagagcacagtgtgtgactgcagcagagccaggaatgtcactggtgttccaagggagacagggagttagtggccctggagttagctctgttggagatgaaccagccgtcttggtttctggattgctctgtagcctcaggtgcggcttataaagcaaaagtcccatcctgaccctctaaagatgtagggctactacatcctgaccctctgaggatgtagggctacctcgcatgtatatggactttgaagaagaccgggaattggcgagttctgataacttgtgacagtcacacccagcttgcccagatactatc

SEQ ID NO: 92721 - DNA, 1023 bp, Homo sapiens
catatggctttagataaacacgtgtgtctgttgacacatatttttatgccttacagtgggctaactttgtttgtgagtctgttcatccacttatcagcctctccaccacccattcattcatcaagcatttatcaactgctcagtgcgagcataccagcattctagacccaggggatgggaagaacgacatggcctgcgtacctgaagcgctcatgggaaaggagcataagaaggaaggagctgaatttggggagccttgaaatcatatggaaactggttgtggaaagatgcagagtggagcattcagggctggtgggaaagatagcattcctggcagaggcacggtgcagccacaggcaggccatgcgaagggttgggggtgccttcctacagccagagcatggggtgcctgaaggggtagccgagcaagcactggaaagccacgatcttacagcttagatgaatgggatccaatctattccaacccctcccctagtgttgtaaatacttttgtaataaaagcagtgcatgtttgttgtagcaaataaaaacataggcataaaaagtccctattcccagaaacccattagcagaatatctccattttagaaagacaatgtgcggagaacctggacacccagagaccagctctcaaaccattagaatcatcccagttagaagggccacaggcctgaacgatggggtggagaggagcagacagaccagaagactaagagtgagaaagaaaaaggagcacaaactccaccatcagttcctaataatatcaaaggagaagggaatagtcagggatgacgtagagatgtctagtaatgttgccattgaggtaaaaaatacagaatgcaaaataggtttaaggctaaaagtaatgagctgggttttgtgcacattaaataaaggagcccatgcgtcttctgtgtcacattcagtaaaccaatggcagtgtccatcgggcccaggaagaggaggctggagatgtcagtttgagagataccagcgtttatt

SEQ ID NO: 92722 - DNA, 1134 bp, Homo sapiens
gcatgtagcatttacattgtattaggtattataagtaatctacagataatttaacatataggagagggtgtgcacaggttatatggaaataaccacaccattttatacaacttgagcatccatggattttagtatccaagggaggtcctggaaccaattccccagcggataccaagggacaactccactccatttgtttttattaccaagtaatattccagtgtatgtatagaccagtttatatcccttcgtcagttaatggacatctgggtagtttccactttttggctattatgaataatgctgctatgaacattggtttatacagttttacatgtgttttgcatatgttttcatctatgtgcaagaattggaagaaattgctggtcatatagtaactctatgtttagccttttcagaaaccggcaaacttgtccacaggctgtgccattttacattctccagcagcgtgtgcagcctcactttttatacagctgttatgtgtaggtgttttactgggagtcctgcttggtttgtgctgttctggttctgtggagtaagtttatttgttgagtatatgctgtttttgtcttgctctatttactgctttatctctggctcttgaataagtacttagaatagagtgggcacttgagaaatacttgctgaaactgtgaatcttttttgccatgacaacacatcaggcaactcagaagttactccttcaagatctgctgagaaaggactccttttccccatagccattgaccaggaaaatctgggagcagttgttttgagtgtaaccacagcaacaggaggctgtgatttgggggtaggcggtctgactaatctctctaacattcttccttttgcctgggggctgtagtaggatatggaggtataaaacaaagaggataaaaatttgtatctaagaataacccatagcgaggtgaataaactgcagttaaacattctaagttaaatatcaccaagttaaacattcttactaagttaaatataaccaagttaaacattcttactaagttaaatatcaccaagttaaacattcttactaagttaaatatcactaagttaaacatcctttttgagaactatataagtgataatatttac

SEQ ID NO: 92723 - DNA, 1017 bp, Homo sapiens
aagactcttagagcaacaagaacttcgtgaaaaagtaatgtactccttatcagttagaatttgctactgtttctttaatgtaatgttttctttgtaagttagaagagtctttgattatacttgagatgtaattaattccatattaagtgtttgacattgggcttaggagtattatcttatttatttaaaggcatttctcctgatgcatgcagtagagcagctgttaggcactcattaatgggccagtgctgcttcagagaaaccaaggggtctgtgtttgactgggggaaaggagttgctgcttactatttttattctcaggaagaggaggaagagccggaaggaaaaccaagtgatgcagaaagttcggagagttcagatgatgaaaaagcctgggttgaagaggtcaggaagcaacgcagactcctccagcaggaggaaaaagtgaagcggcaggaacgactcaaggaggaccagcagacagtcctaaagccccagttttatgagatcaaagcaggagaagaatttagaagcttcaaagattctgccacaaagcagaaactgatgaagtgagtagcactgcctgagcgcacagttgacatgtaaccaagcccttgcttttcctctctggcacattgccctaaagatgacatttctgtctttggatgatggaggtgcagagggtggaggggacgagggaagcaggggaggtaaggccgtgcaggaggtgatgtgagggaagcacccaggaggcctgaggggagcgtcgctattgaagtacattggtctctaggggatttacttatttgtcacaactttttgaggtatagtttacatgcagtaaaatacagggtagagagagccttatgagtatcagtggaacacttttaagctgcagaagccacacactttccttgtccttgttttttccccatggggttccctcacctacaaatacttactctgtgccctacagatcagtggtttgaagccttttggacagtggttgctaggaga

SEQ ID NO: 92724 - DNA, 1634 bp, Homo sapiens
tagaagatactagtgttcaagccaccatctttactcagaagtctgtaccagcctaacttcataggtatcatagcattgaaagaactaatttgattggccggggtgcagtggctcacgcctgtaatcccagcactttggaaggccgaggcaggcgaatcaccaggtcagaagtttgagaccagcctgaccaactggtgaaaccccgtctctactaaaaacacaaaaattagccggccgtggtggcgcgtgcctgtaatcccagctactccaggaggctgaggcaggagaatcgcttgaacccgggaggcagaggttgcagtgagccgagatcacaccactgcactccagcctgcgtgacagagcaagaccccatctcaaaagaaaaaaaagaaaaaaaaaaaaactaatttgtttcaaatggcaatcattcttcatatatgttactatgttggaacaaaataataataggcgtcccactcaggtagacagataccattcttccaggtaggactgtggtatgaatagtactttaatgttttctatattttaatggtaaagttgagcatgtgtagacgggtatttataggacggatcactagccagacacttgtaagctcctatagaacattaatagctataccttatcctacttttttccttaagacagctgtgaaaacaaacagactaggaaaaaaccctgagggaaatatttttacaagctgggtcagaagaggttttattttatagttgttcatccaaagcatacttgtctttaggcaatgcaattgatttgttttaaattaagaaaaaaatcttaataccagcaacatatgtagtctttgtaacattttctctatttattaaatatgattattactttaataaatatagtaagatgaaaagtaaatatttgcccttgggtttttttaacctgaaaatgtgtaataggcacatagttattcatttgaaattatctttcacactatcatctatccgatatctacagataactccaaaatttacatcatagccccctcccttctcctgagacatggcgcatcgttcccagacacctagtggtgtccgtctgaatcctggtgctcttctccctgtgccacaggcataggcagccctaaatggagcgtgatttcttcccctttactccacccctgcgttttttcctaatgctctccagtgatggattctaactcagtgtcgccagctttctggttgcttaagctacatgtttgagagaagtttctaaccctgtttttaattcttaaccctcccatctccatagctggatctgtcaattctaatttagaactgtatctcgtaattattctttcttaaaaactgtctgttcccattgccctaattcaggccctgtctctcttgccagtttcttaaaatggcttcttagtcttctcatgatgctaacttcttactcagcagtccgtcagacatcaggctgctgcagacttttgaagcacaattttgggttggtttgtttgtttgtttgtttgtttgtttgtgacaaggtctctctgttacgcaggctggagtacatggtgtgatctcaactcactgcagccctgacttcccaggctcaagcgatcctcctacctcagcct

SEQ ID NO: 92725 - DNA, 1071 bp, Homo sapiens
tattgctgccactgagaacacaaaaatcgaataagatgtttactgtatggttgatattgaacctaaaatgggaagtggcccaccacataatgtcaatcagtattatatggacattatccaaactcagaaattttggttgcattaattctagttaacaattaaggccgagtgcagtggctcacgcctgtattcccaatactttgggtggctgaggcaggaagattacttgagcccaggagttggagtctgcagtgagccatgatcacaccactgtactgcagcctgggctacagggcaagacagcatctctttaaaaaaaaaaatgaatgaatgtatttattctttcaacaaatatgtattgaatttccagtatgcacaaacagctttgagaggcatgggcatctgtgatctgtttgatttgtgagggtttgagttttggttagagctatttttcctataggtatcattttttgtatgttagtcttttttgtcagtttcttgctgtggccttaaagtctctgatgaatgtacttttctttcattctgcagcagctcaggcaggactgtgcatgagatctctaggccaggggtctccaacccctaggccatggtactggtctggggccttttaggaatcaggccgcacaccaggaggtgaacctcaagcttcatctgtatttacagccactccccattgctcacattactgcctgagccccacctcctgtcaggtcagtggccacattagattctcataggagcatgaaccctattgtgaactgcgcatgcgagggatctaggttgcgagctccttatgagaatctaatgcctgatgatctgtcactgtctctcattagcccccgatgggactttctagttgcaggaaaacaagctcaaggctcccgctgattttatattatggcgagttgtataattatttcattgttattacagtgtaataataatagaaataaagtgcacaataaatgtaatgcgcttgaatcatcccaaaactccctcgcgcccgccccccgccccccaccaccatctgtggaaaacttgtcttccgaa

SEQ ID NO: 92726 - DNA, 1040 bp, Homo sapiens
gttctttttttttttaagcttattctttctctgtcctctggtttttaaccaggtacgtgcatctaagatgggtgagctccttttgtcttcatttctgttcatgcttttcaatacccagggactgcaactgaagggtcttgttcctagctcttggcacactgcttatgtaatcttgggcgattgctcgtcttcatggggtcacagttttttcatctgtaacatgcaaggaccggatatgggcattcttagagctgtgctttccaaatggattcagactcaagactcccccttgctgtcttctgcttccttagtctttccctgcatcccctcatcctcgtttattacattcttttagtatattgtttaaattttaatttctggaagcctctcaagtaaatagaggacttttaggtttccattttcatgacatgaatagtatgccaatgttgaaataattcctcaaacttattaatatttgaatttatgtctgtgtgtaatggctctgcaccttcctaagttacaccaatgtgtataaatgaatatatatatctttaagtgtttagaatacaagtctttgctgctgtgttgactctctcctcagagtattcacactgatcttcttgttagctaagcctaagcatgattagggaggtaacttttctgctttgtaatgtcattttacagtaaaagctaaatggaagtgatctttggatgtacatgccatgccctaaggcttcagtagatagagagtagagctaacttagactgtagatgtttgcattcctatctgtgttttatgccagagtctttatcatctgatagaggcaagaatacttaagttacaatttaattttgctactttgtgcagcatgctataccagagcctgtttataaggccctgtgattatctagatgcagaagtgcccttcccttccccccatttctttgtagacctttgctgaggttgagggcagccagagaagatttagaataccccatagtgcaggatggtggaaatgacctcacaagttgaacacatg

SEQ ID NO: 92727 - DNA, 1782 bp, Homo sapiens
gaaactagtgtgaactgcacatgcgagggatctaggttgtgggctccttgtgagaatctaatgcctgatgatctgaggtggaatagtttcgtcctgaaactgtccctccctgcatccgtggaaaaattgtcttctacaaaaccagtccctggtgccaaaaaggttggggaccactgacatatatcgtaaatgttctgcatgtgagtacatcacatgtggacttattttgaagatctcagtctttttctgtgtcaatatttggaattaataaataattcctgtgacatagagcattcttatgtgaccaccagcaccacaaattctaagtgtaacctattaaaactgggaaactctgtgaaagtattgtttgaggcagggttctcaaatgctgactggcagtggacttttcattagtccctgatgaggagtgcatatgtgatatgagtattaatatgcatgtatgtatgtttatatatggtggtaggaatttgtcagctgttctttcttggaagacggttctttctacgttgtttttgtgagtgtcctttgtctttgcaaatggtcgatgacaatgtttctcctctctcccttctcctcatttcaatttggcaacttactgttgatccccagtattattttctaaattgaacttgtttgtggaaataaaaaatctgaggaccactcagagggtataagggaaccctctttgtcttagttcataaggactttctcatcatttttgtgtgtagtattattacatttaaaataaggatgatattgctgaagtagattaaatgttctctatagatatcaaagaagattagtaattctaatccttaaatttttagtctgaagtgaaatcttactataatcaaattgttgcccaagaaaaactgttgaatgttaatgaagattgcataaggacctgctgtcttctgtttgacctttcccagggctcacccacctcattggatctcctttcctccgggcatatatgcatgggtttttcatggatataagactctatcacaaggtaaacagaaaactacagttattatgtttcaggtaactaatgcgcagtctgtggccatttcctcactactcgcactttcataaatcatacataggatttgtaggggatctgcctgttctttggcataactgtcgtggtgtatatgaaaatgatattaccaaataccattcttttattttaaaaacttttttcattttgaaaaggtgaaactgatggtaaatccatttgcttatgaagaatataggaaagataaaatacgacagaaaatagaagaaacacgtgcacagagagtccagttaaaggtaaatattatacttaccattgaatttatcagagaagagtacttaatttccattttgtgtattattccaaagaaatctgccattcttttcttgattttccatctttaatttgcatcttttactgatatttttggtatagtttgtttgtcatcagtgtgtcatgtttgtcatgagggtgcaaaactctttacaattttcgcattatgacctctgcggtaattgtactgtgggacataatgctagaatgattgatattgtcacctccactagaaacctgatagcatttttaaatgggttttccatttttggagtatccgggctttgctaatccctattccttactgacctttggccgtatcttaggctctgtttggatcatgggaaatggtcgacagtcgtaaactgcactctctgtctgagtacatagaatttaatgtaaagaatgat

SEQ ID NO: 92728 - DNA, 1090 bp, Homo sapiens
agcatttagttgttgacttcaagctactgtcctaaaattgcttaaaaccatagcagttcttttaaaaagtgttctatatggaattttttaaaaatgccttgcatttcttgaaggtttgtcttttatggttggagtcaaaccacttagtatataaaaacctttacttctatttttaaaaattgtagattgcactaatatgaagtttctgtggaagactatatatgctcgagtttttttcatgtttatgagtaccatagctgtgttgaggtgaagagaatcactctttctaatccggcaaaataatgtcactaaattattatggccatatctaacatttacttttctttttatttgaagagggtgttaacaggggctgtttttctttgttataattctcttccttctgcctttccttcttcagaaagtttaagctagatttaataatttccattatgatttctgggtttttttccagtatgcttgattgctactgaaataaacaggttaagtcgtcactggaagttccattttgcccgagtccagtgttctctcattacctctagcttaagggaggatttcgctagcatatcttctctgttgactgagccaaggtttcctttggcatacattgacctcagcgggtgtggcattttgttgggaaagatttgtatcaatagcaaaaatgtacaaagtgatcatagtattttatgaaagtaggtggattatattttttcatagttggattacaaacttaatgattcatattttattagttggttataattctgttcagccttttgttcctcagcctttcattgggataactcgtggagcctggtcacccatttagttttgaagacttatttatacagaaatttaaaaaatcaactaattatttttaaatggcaagtaaaaattacatgtatttgttgtgtaccgcatgatattttgaaacatgtatatgttgtggaatggctaaattgagctaattaacatttgcatcacctcacgtagtacttaccattttttgtaatgagatcatttaaaatctactctcttagcgattttcaagaatacaatatattgccat

SEQ ID NO: 92729 - DNA, 1018 bp, Homo sapiens
ttttcaccaagcttgcatgttctgaatcctgcttaagttcaaagtttataaacctccgttaggtacgtgaatttagttttcagcaaattattcctttggtttcccagaagcttccttcacattccagctcctcaagtaaatgttaaaagtttaacaaggaaaaggagtgaattgattttgtatatatttttgtttggtgaaatagcagagtgtaggcatagtcttttcagataagtttgctaaaaagtagtttcctgtcacctccctttgaaaagaactgaggtgtgccccatcctcaaacctaccatctttccaatttatttgtttattggggtagtaggtgggaataaatgtttcttagatttttctggcctcccttcctaagccagggtagctcctggcaaatagtccccagacaaaccttaactgggccgccttcctggaacctcattttatacccaaaatacaaaaaaataaaaatacaaaaataggaaaacacatgaagataaagtgctgcaaacacacgactttgcaaatattaatcatacagagccaatcgcttatggtatagaaatagtctgaagtattcttttggcacagcattgcctgtgtgattctcgccagaaaggtttaactggatctgattatgagcagtgatcagcagaggactgtggggaacccctgcaaatcagggctctttctaagagctctggcctgagccttgagcagatgtccacatcctgaaagtcagtgaaggtgggggctcctacattaaaggaaactaaggagacataataacctccttaattcatttttttttaaaaaaacagctttttaaagacataatacacataccatgaagtttatccttttaaagtgtatagtcctaagccaggctctgtggtacccacccataatcccagctattcgggaggctgaggtgagaggatcgcttgagcccaggagtttgtgaccagcctgggtaacatagtgagaccccatctcaaataaaaaagaa

SEQ ID NO: 92730 - DNA, 1080 bp, Homo sapiens
acattttattccactgagttcagattgagttcctttatgtcctttgctgtgtcagtatcatgctttctttccttcagctttatttgggggaacatatgggaaatcttattttgtatgaatttaaaatacgttcttcaggatttcctagttccgtgcatgaccgcctccccaagataatcggtaactgctaaatggtgttaatatattttttcaccttcctagaatagcactgttaaggtatagaaccttgaataaaagtgtacatataatttttttaaagttttgctcttcctttttttctgccgagtttccccccctgggtatttttacatatatcggtacccttagtttttacatagatttcaaaattaagaattagaaagcaataagaatatgcagaaaagttattaataaacacttttgcctgcaaggaagtcgagtagaaccaggaaactactgatgtgctaaggataacacaccaaaccatctgtgttactaactcttggcaggaataaaatgacaaaacaagatcttgggagatgctcattaccaggtgcatgatcaaaaagataaatacattctcatgtaaaaaaattggcgtagtgcctttagcatccttggggcatgtgtgcgtgtgcatgtgggcaagtttagcatttggtgtagttaggaaattgggagaggaaaagggtagaagtagaggactttaacattgcttagagtcattgttattgcaaagtctggaagtgaactctaggaaactgcactggaattcaagtgtaatatgatgataaacatcaaatgactgtttgtagccgaggtgcaaggccaggctcttcaggaaagaatgaataggagaccttaaaataaacatctgtttttttattcagctaacagtggactttgaagaagattggggccatgttcagattttctttttcttccttgagaattgaagaaaaatgtcagctgaggatttttttatgctatttaacatgtcatttgtagtgtttcatgaaaagcagacagatatgtaaagctttttattccacttcaaattagaataataagttagatcca

SEQ ID NO: 92731 - DNA, 2085 bp, Homo sapiens
tcaaagttaatttcagttctgattgggtaaaaatgtatgtaattttcatggagatatttgatacacatatgacatatattgtgttagtgtatcagatgatgtttgtttttgcttaaatagtcttacatctggcatgtccattttcttgaaaataaatgacaacttcctattcagatgctagtttgacttcaatgttgaccaaaggccttgtctcctggttccggcatttcctccatcttggtgcttaccaagtcgatctcgttgccattcttattttggatgagatatagtcggacttaaacctagtatttcagtgtcctggttgtgtagtcacttaggtggcgatgtctttagttaacatggccattatctcttctttttttttggttttgttttgttttttccttaaaaaagaaggtagcttatacaagtaagccagaaatttagactacattcttttaaaaggcccaccttatacagaaaataataagaaagttctaggacttacaccatctctactttgattcagtgttctcaaatcccaacgtaagtttctcttctgatgcccacttaggatgtaagctccacaaggcgggaactttgtatgttgtgctttttgctgtgtccttggttcttagaacagtgtcttatacttcataggctttcattgactccatgcatgctggtttaaagtaatgaatattgacccttttaaaatttgttttatttattattattttttgagacagggtctcactctgtctcccaggctggagtgcagtggtgtgatcatggctcactgcagcctccaaactcctgggctcaagtaatcctcctacctcagccccatgcagctgggactacaggcacataccaccatgcctggctaattaaaaaaaaattttttttttcatagagacagggtttcactctgttgcccaggctgatcttgaactcctgagctaaagggatcctcccatcttggcctcccagagtactgtgatcataggcatgagccaccacacctgacctgacacatttttttaatgtattatgaaaaaaatgtattttgtctctcattggttagaggagaaaaaatttcaaatagacataaaagtagagagaaatgtaacaaacccgtcttctacccatccttttgctcccatgtcatcagcttttcccccaggctttttttttgtgggggtggggtggaggtaaagttggcttatactgtattactagcaccgtaaattgctctagaaagtagttattacagattgttaaatgggaacgaatattagatcttgacatgggcacaaatcctcatttggattatatgtttaccttcttgaggaacagaacattattcttggttggaaaacaagtaatatgtaaatgatagtagtgggacattgaaagaaaggttagatctgcctgtccatgtttcttgcatgtctgtacatggttatgtcattcactcattcagtggtctttattttttagagcagtttttggctcacggcaaaattgagtggaaagtacagagttcttatgtccctcccccacacgctccctcaccatcagcactttacaacagagtggtccatttgctgcagccagtgaacagacattgacacatcaccacctgaagttcatagtttacattagagtccactcttggtggtgtacattctgtgggttttgacaaatgtataatgacatgtatacacggtcataatatcacatagaatagtctccctaccctaaaagtcctctgttccacctgttcatcccttcctccaccccacaaaccccgagcaatcactggtatttttactgtctctagttttgcttttttccaaaatgtcatatagctgaaatcatacagtatgtaggcttttcagattggcttctttcacttaatcctatgcttttgagattcctccatgtctgtttgtggcatgatagctcattttcctttatcgctgaataacattctcttgtctggatgtactgcagcttgtctgtccattcacctattgaaaggcctcttggttgtttccagttttggcagttaggaataaa

SEQ ID NO: 92732 - DNA, 1051 bp, Homo sapiens
attctaacaccagatggaaattctgacgggcctttcaagtttaggtttgcttatattccatttagtcttatctgcttgactttagaacctgatctttatataagagattaaaccaatgaaattaaacttcagaaatatttaatgcaatggatagagtaggagaaggggaacaattttaaaaatacagttagcggaatgggtgagatggtgcctagcagcagcagcatctataacaaaaagagctctgttggtttcagtcaactgtaaatcaaaggaataaaggttaagtagaatgttggcagtgactccacttgtgaatgggggtcgagaatgtcaggatagcacagtgaaggggctgtcttggggctcttcatgtgcagagtgtacctgtgtgtgttatttctgctagtggtggtaagttggagaaagctcagaaaagaattcaagaattgtgtttccaggcatcatctagatagagaaggcatgattttaggatctaggaaaagagtaagatcatgcaagaaagctaccttgtatgaggtacagaaaatgataggacattggcctgaagacgaaagttttcattgtttgagggtgtgggaagagctgtcagacaatgggaggcagtgaagcactcgcctttcacagcttctaaaaggaggaaaaagacaaatttgaatgaaaaatatgatttactttaaattgagttcaaatttgaattcagatgtatatttttaattttttattatttttattttttaaaattttaactttttttagattcagggggtacatgtataggtttgttacatgggtattttgtgtgatgttgaggtttaggatgcgattcaaccagtcaccctggaagtgagcatagtatccaaagttgtccctccctccctctctccctccctccctctctctccaaaagatgtgttttttgttgttgttgtttgtttttttttgtttgtttgtttgtttgttttttttgagacggagtcttacgctgtcacccaggctagagtgcagtggcgcagtctcagctcactgc

SEQ ID NO: 92733 - DNA, 1081 bp, Homo sapiens
cttttgtttttctctccatgcttttaactggagttgctgggagtgctgtacacgtcattccctaagatttgggtttgaatcaggaccacgattggtccagctgatgtatttcagttcaaagccaacaatgtaggatcatttatgtttactaaattgatattctggagaagtccccagtaagagatctctttgccccattagtatatgttgaaatggccctgaatctgttagtgtccgtgtagaatcctaaaaatgatagatcacactttcatctaaagtgcacatttaagcagagccctattagacatactgacagatgtaattttgccagaaattgctcttttatagtaccagtagcaacatattctctttgtttgggaaggtagtgtcagatgaaaagaaaactcttccctagggaatttatcagcatacaaacgatgttccagacagaatgtaaacgggaaagtcgttgctcaaatcttgtccacactaaaggattcatcagtgtgctttaaaggaaaggggaagctttggagcatagaccatcagagctagaagggatctccaaggtcatctagtccagcccttaatttgtagctgaggaagcaagtttttgggtttttttttgttttgtttttcctgagacagtgtcttgctctttcgcccaggctggagggcagtggcacgatctcagctcactgcaagcttcacctcccaggttcacaccattctcctgcctcagcctcccaagtagctgggactacaggcacctgccaccaccatgcccgactaattttttgtatttttggtagagacggggtttcactgtgttagccaagatagtctcaatctcctgacctcatgatccgcccgcctcagcctcccaaagtgctgggattataggtgtgagccatcgcgcccagctgcaagttattgtttaaggtcaaatggcaagttggtgacagctggatctaaaaagcatttcttccttccacattgcatagtagaaataacttagactttggaattggttggacccgagtttgaataccagcattgccatttataaatgtgaccttga

SEQ ID NO: 92734 - DNA, 1041 bp, Homo sapiens
agagagccctctcctaggtgagctgcatatggggacagtgtgagcagaagttgcttttgctaagcgaagcattatgctgaaacttggacttcagtgttcctttctgacctacctttctgccctgctccctcccacagtactgagtgatattttatagcaccacttgtctttacttggaaactgctctttgtaaactccttcaaagcaaagggagagcccaggggtctgaaagcctgccatttttcataagattttatcaaacgtaccaagttgacgtttggcaggaaggttcatttgaggcctatagaaccaaagaaatgtgtgtttaatgtatgatccatgccaagtttaggaagcctggactgtgatttgtattaacatcttataaatcaggtttgaaaactttttccctccctctttggggcatactgaagatgaaggcaacttagtgttcttttagcttgttaatttttgcctatctgatatcatctttcttgagtaattgaaatctttataaactaatgcagttcctgatacaccaccttctggcacttagatatctctgtagccagcttgtcctttgagaccaaatgggttgtctgcagcccctgtcccattttctcagttctttccttattttttatttttatttttatttttttaattctctcagagaccaggttctattgttttgtttgtttgttttctccagggtctaattcgtctgcagcttcagagactaatgccaagaataatttttcaagcttgctttttcctctgaaacataatttaatcttaggttagttctttataattaacatccttggcaactatgtagacttcagagggaatccaagtcccctatggcacccaacccaaaacctttctgcttaatggtgtttctgttggaaatgctcctgaattccgagcccctagcatatcagggcactcctgcagccactcattgcttggtggtggtggttggggtgtgagtgattgcttgctgcttggtaatgtggatgtgtaaacttgaggaaaaat

SEQ ID NO: 92735 - DNA, 1484 bp, Homo sapiens
agaagagagtagagtgaggggtactgaagatcagaatctgagggaggtgaactctctgtaaccactatcatcttgcaggtatgaaaattattcctgtctatgatagtccttttaaaattgctcagttatgtattttcacacataaaaaaagcatgctgcttgctgttgactctgtggtttcgggatactgacgtgttgttgaaagcacttagagatatttcgtttggttggtagtgaaatgaaggccgttcaaacaggaagcattttggttttcctaagttaccatttgttccttttcccctggactcttgcagatactgcattcatattcctgtcaacttatccatctttccttgtattcacttgttaataaatattatggactacatcaactgtgtgttgggaacgatgctgtatgctggcagtattacagcatccagggtgctgcccttctctttgaggagttactgttgggaatccaacaagaaagtaggcagttgccattcagtgtgaggagtgctaccagggtactgtggtgggagcacgtaggagagaccctgtacccactgagggcccaggagctgatgagaagtgtggttggcactcagggaatacttcccagagggagagactttgaaggagggaccgaaggatagctgcgtcgactgggtgaaggggtggggtggagtgaggtgcccagtgggagaagggtttttttttccttttcagtcgactttcccaggttggacagtagatcggatcttgacagtagagtgggtgcagagctgcgggagcaagtacctcccatggctgagcattcgagcctgtgggggcaggtagaaagccaggttaggaggggtcttgtgagccggctgtggggatgtagggcagggagtcctgacaagagttgtaagcggggggataggatcagacctgtgttctgaaaagattacttttgctgccgcaggggaatgcattaaacaggctctaatctggacgcaacaagcacaggctgtggcagcccacaggagagatgatggcacctgcattacctgtgccaggctccctttctagtagttgtggctctttggggttctgggataatgtgagagaagtctaatctggtaggcagtacttgcagacgattcatccttgaattgcctggtggcatgtctcagaggtgttcattgatagagagctgtatagatcacaagaatgctgccctcagaccagcgttacgtagttttctcccagtttgtgcccctttggggaacattgtcaggagaggcagaataaatcagcttgcccctaaccttttcatcatgagaaaggtctctttcatcttcctcttagaagtgcttattgtattttgatcactacagcaacatggacagcaagtgcctgtccatgccttggatcttagatcccttctgcatgtcaaaagtagatagaatcaactagtgggcaggtgaaaagcactctca

SEQ ID NO: 92736 - DNA, 1214 bp, Homo sapiens
ctactcgggaggctgaggcaggagaatgacgtgaacccaggaggtggagcttgcagtgagccgagaccacgccactgcactccagcctgggcaacagagcaagactcttgtctcaaaaaaaaaaaaaaaaaagatagtattgagttcctgcttgagtggtaattgactctattcactcagcatctcatttctgtaatagagtcaaatatcatcacttttacaaacttttgtgttaataaaaggaaaggcagcaaaaaatatttttaaaaacagaatctaatcattgcccttaacatttggtatattcatttatcattatgtgatctgataatctaaatgtcttctctctgtggattcctcttgtatcttacaaatagatttttaaaatgaattcttatttagctgatctgtagaagtctttatttaaaagcaggcgctcttgagtttgactttagctttaacattctctcacgactggggcatcagtccctctgagctttattttctgatcagtaaaatagggctgatgatacatcttctttgagagggttgttgtatgttcactaagatagtatatgtgaaagtgcctagatgattatgaaggactggtcaaaggcttgctggtttcagttttatttaaagtgcagtggtccagagcaggggatctgaggagttttgatgtttgcatattgccatgttggagctgcttcagaacacttgtggggaaggagtatgttgcaaaaatggcagagaaaagggaacaaaaccgagatatttgaatactttgatactaagtagtttagtaccaaataataatgtacttataggttgctcctggggttatagagaatcctttattgaatgccggaaagttatctctttcttcagttttgctttcttatatgctgatcccaaggagactcaattattaaccaccctgttggttcagtctgttataattccctgtgagggagtgactgtgctgtagtcagggctgttagagtccctctaggactttctggtgtagatgataacaaaatgtagacattttgttttgcagtcagttttgtaaaagttaggaatttgctttgcaaaagcaaagcaaatttgttctggaaaattcgaatttgttttgtaaaagttaggaatttgctgtgacattttgtgggaaatactatactttggttcactgactaacagaagttcctcaggca

SEQ ID NO: 92737 - DNA, 1068 bp, Homo sapiens
tcatctgaggttctaaatagggcaggagcgcccctgccagtcccctttggcacagttctgcgtgcacagcctgtctcctctgagctgttcaaggtggtgactgatgccatatgtttttgcgcagcacttcccaacacgtgtggtgaaggaccaggattttggttttttgttttgtttcgaattttctaatccactgcacgttgatacgtctgtaaaagacaatacaaatgaattactaggaaaatgatcacacatttggttgtcactgcagtgttgaattgcaggtttctaaatgcttcttttcaatttctgcacttatttcctggcctggtaacagtttgcagtctgtcactggggacacactttgagcagctgtagagcactgtgtttgtgttgtgaacttcagtgagtcctttagtccccagagcacatgcagatgagtactgatttgtgcatgtttctggggagggcactattttgtcaaattctcttttattgtattattacagcgtactatacactatagtgtactgggtcatattggaaatgtgttcttttgactccaggtgctgatatcttttccttcctttaaaaatgtatagttttattgtggataaactacattaaaataaatttaaaggaaaaaagtcctcaatgccataatctctttacacgtactgtcacgtactattactgtcttcatgggtgaaaccatattaattctgtgttcatatgttttaagttgtcctcacactgtacttacggttatcttttgcttttcagtttgatgttatattaaacacatctttcacgttgccatgtggtattcatactgacttttttaaaatggtttcttacttgatcatgcaggaggtcttttaattttaccttagttgatgaagtgtcagagtcccatgttatgagccttggaattggtagactgtcagtggctctacttactagctatgtggtggccctgagcaagggaggtaacttgctgagaatgtgacttgcctggcgcgatgctcatgctcttctcttctcctgccttgatcatcttaatttctg

SEQ ID NO: 92738 - DNA, 1017 bp, Homo sapiens
gccagtggtctcagaatatccttcatcctcgatttatgtgatttttttttctcgtgatgttgtttaacttgatcctctaccgtgtattttttctaaaatagaagttaagtctaaagacttaattaagtttagattaaatttggggcaagagtaatgtgcaggctgctgaggtctccaggtcgttgcagtattggagaggggtaaggttgatcccattgttaagtgatgtcgtcattacaaagtacagtttcttgcaaaccagcaactttaagcatgatgttttggacaaaggaatgactgttactatctaataactcgtaagaggttaatcaagagtagaaaagctagccaaataatttatttcataagagagcaggcagaacaagacccgtaggcgccccttctttgtggcttggatctgagtgtggcggatgattgcactccgcttttccttgctttcccacaccttttcctcccgttcaactctttgtgtctggtgcttaatcattgtgggcttaatcatagtttagaaaagctgaaactgtctttcttttttcttttcacttactcattttggagtaattgaagcataatcatgattatggttttgtaatatttttcttataccaaggctgctcagtatattgggaaatggttctgccttcctgccttgttcagggccctgctcctatggctcatcagccacctgtacagtgagcagctgctccatgccggtcagggcacttgaagagacagcacggctctatgacttgggtgtgcatcagattcatgacacggggagcttgtaaagcttacgtgtgtcttgagtcccactccagacctgtggaatcagcatcggtggtttcagaaccatggtagagagaaaagaacaggggcactgggctcaagaaagatccaattcaggcttaatagtggtagaaattacccaacctcggaattctcacctgccttacagggctgttgaagactacctgtactgataagtgtgaaatagcc

SEQ ID NO: 92739 - DNA, 3284 bp, Homo sapiens
atatttcttaagaatattttgatggtccttctcctcagctctaaatgtcatttgaaatgtaacaaaatcctatattgctggttttaatctgtcttctgcttttcatttttcattttaaaacctaagtattttgagagaatagtaaagagttgatcaaataaatgggaaaaatgcattcagtatagctatgtttttaagagttctttgcatttaattcattagaaacttagcatttttagtttaaaaacagatcacttttaaaaaattcccatttgtgatgaagtcgggtggacggcccaccagcctgagcagttcgtgcctaagcgcaagtgcccgtctattccgtgggggctgcctgtgcccaggcacacacgctgcagacagcccctcacagttcagctgcctgttgagtctctggctttctgggctgttactttggttttttaaatttcattttgttaattcctgaagtatgggtcttacttggcttcttttccttttttctctggatctgtcctggagaccagagctgtgttctacatccctgaggccctcacctaattcataggttctggtgactttgtttatgttacagagaagaacataaagaaaagacaggctttcagtctttctaaattcttggaagaattgccctgatgattgcccaggaagtgtctatgctgtctgctttgttggctttgagtttgaaggattttgagggcttttttaaggaagattcatgatcttagaccagaactttctctgctctttttctggcaattcaaactaattgatgttaaaacaatatttatttttaatactacaaatgcatatgtttttattcttaaaaattcataaaacactggtaaagtagaagttatttatccttgacctggctttcatccaaccaaagggaaagactgttagcaatctggatgtatctttccagaccctttaacttctgcatagtttccatcatgtggattattatcacctttgacacctttttgtcattgttgttccgtgccattataattcctttccctttgcttcctggtttcccctcttttccttcctctttcagtgggaacttgagaagaacagcaggtagctgtgtgaatttcactgttagtcttgggttaggacttggccgtgttcttcatcggacacaaaccatcttgtctgtgctctaacactgctctttttcgccgtgggcacttagtccatcctagtgtcagactttgcataatgagttacaaatgcaagagctggcagaaattttcaacatcacttcttgaaatcatcacactgtaattgctacagtaaattttattttggcattttttttgtttcttatgactaaagacttcctcttgactaacacccacgttacttggttttgcctgacttgcttaccttgtttatctttctcatcacctttttccacacccaccttcttagcatctttttcttttactttccttctcttaatttttaaaagataaaacacttttccccaacagttaaaatagaaatggtttagccctaactacatagtaactaacacttaagtatttgtaggatttcattttgtatttcatatccattgtctcacttgatcctcctcgaaaccttgcggtgcaggcatggcagtgttgtcctcattttccatgctggccatctctctcctctgattggtttgttttcttttcttttttcctttcctttcctttcctttttcttttcttcccttctttcccttcttttctttcctttcttccttccttcctttcttttcttcctttctttctttttttttttgggcagaatctcactctgtcgccccaggctggagtgcagtggtgctatcttggctgactataacctccgcctcctgggttcaagcagttttgcctcagcctccctagtagctgggattacagttgcaggccacgatgcccggctaatttttgtgtttttagtagagtcggagtttcaccatgttggtcaggctggtcttaaactcctgacctcaagtcatctccacgcctcagcctcccaaagtgctggtattacaggtgtgagccactgctcccagctgtcttccgatttctttcaatacaagttaagctgggtacacttcacagattatgagagatttttttttaaagttgatgcataattcaaacttcatcttttcttgccatgttgacattatctttaaaatgttgtaatttttcttttttttggacaggtcacttcttctccttaggcctgtttcttcatctataaaatgggattttttgataaattgataagataaattctctaagatttttaagaatttaaattttgtatttgaagtaggctattttatttctttacataggagtagatggttgagttacagcttcagtttgacattgccaaagttgttgttctttaacttttaatacttcgtttttgcttgctatttttagggaaaaatatttacttccttggagccagagcatgaccttaatgatgtttgtctctaccccaactcaggtatgcattctgtagtgaacgttcagtgagacaaataaaaagatgcattctgtagtgaacgttcagtgagacaaataaaaaggctatacttttttaggttttaaacccattttatttcttaagatagaatttggctttgtcagcacaattcttggatatttaacttacttagaagaattaagagcaggaagtggtgtggatgattcagaaaatggcactcttaatgactcagtgctcagcccgcccagctattagtggaacgtggtaacagcatacaggtaggaggcaggtgaagtgctattttagtgtgctctttagctcttttatgtgattagtaatagtgtgtggaaattgagggtagagatttggagaaagctagattgcctgataatacacagatggctcatgaagccataggttttgtaaattctaagttgtatgctattcagcaatttacatgttaggtttcaaaatttaacagtgcattcaaggcaaatctgtgaagaatttcagagtatgggagaaaaatgagaatagtttctactctgagggcagaggtacccagatcatcttgatagagagaagtaaggcagagcgtgagaactcctatcacatttgtgcaaagagtactttgacagcttgctggagagagagagcttttaccctgtgaccaccgagagcggagcagtgagaagattttgctttgcgttgagctggagtgccgagtgagatttggt

SEQ ID NO: 92740 - DNA, 1078 bp, Homo sapiens
cccaagaagtcatagccttgccaccaccatctgtcttgatctactaggactgttcctgattatgtctttcatttttgtttatatctgttgctatgacactgcctggtacataggccctcagtatatatttgttgaacaaattaaattcttatgggctttcattttttgttctttcttagtatgttcagtagctcttacaaattaatcttggggttgaattcataaaatgtatactctaaggattatttaagagatctttctggaaagaatctcaaatctcagcaccttgagtaagggtgttcattgtgttcataacaaagcgatgaagcaaatggctgccattattctcacttagaaatatttcctttgaagataaaatgtctagtttgtttaaacagaaataattttttttcaggttttattatatgaccttcgatctgataagccattgctagttaaagatcaccagtatgggctgcccattaagtccgttcatttccaggattcattagatctgattttgtctgctgactctcgaattgtcaagatgtggaataagaactccgtatgtatttttggttgaaattacttgcttctttatttgcaggtgttccgaatgatcctttcctctccctttccttttttatgtgggttattgggaaagagatactgaatatacatttgggaacttagcgggaggtcagttacttttggatagataatatccatatttagataagatactcatgattgctttccttctgttaagttttcccaattatctagaattggcatgcattttagatgttaagttaggtagagagaaaatagtggtttacaaaagttgatctatgacccgagaaaccccctagatattgagattccctcacaggtgtaggaaaagtcttcagagctactaattatccttccatgcatgttggtattattacatatctcaaattcatacttttcctatttgattttttttttttgagagagtttgctctgtcgcccaggctggagtgcagtgccatgatctcagctcactgtaacctccgcctcccagtttcaagcaatt

SEQ ID NO: 92741 - DNA, 2194 bp, Homo sapiens
ttaaataaattggttataaaatgttcaaaaatcagtgaccttgtcagcactatccagttaaaaaggttataaatggaaaaacattctaataacaacaaaaattgtaaaactcgataagaacatatatgggccaggtgtggtggctcacacctgtaatcccagcactttgggaggccaaggcaggcagatcacttgagatcaggagttcaataccagcctgggcaacatggtgaaaacccatctctacaaaaaaatacaaaaattagctgggagtggtggcacacatctgtagtcccagctactcgggaggctgaagcaggagaattgcttgaaccggaaggtggaggttgcagagagctgagatcatgccactgcactccagcctgggcgacgggagtgaaaccctgtctccaaaaaaaatatgtgaagaaaatgacaaaggaataagtagagaagtatatcactatactgaaagaaatgattaagtatactttgaagagtaagtgactaaagttgctgtgcatatgaggcttcgaggttcccacaggtgccccagcgcagttacaggctcaagctctaggtggcagaagagacctgatgatgccgacagccaacagccaggactctaggtcctgggccaagggcatgtggacgataggattgatagtgatattgtccacttctgactcatcgcctagcactctttccactggagatcattgcttttggtgctgattgtcttggttggtatgtgagaagcatattctagagtcgtggccatagcattcactctgtctttggtactttcagaggctctagggtccccatttgaggattagtcttttattttagctgaacttggctaattttaaagtggaaatggtgtacccatgtccaaacaaaactatgtcttcttaagtatgaaaggggatgtttctataaataccttattctggcttaattaaaatggaagaaagtagattacgttttgtatataaagtgtaactttgattatgaaagtttgaataaaattactatttacttactatttttgagacagggtcttgctctgttgtcccagcagagctccactgcagcgcagtggaatgatcacagctcactgcagccttgacctcccaggctcaagcagtctcttgcctcagccacccaagtagctgggacaacaggtgtgtgccaccacaactggctattttttttttttttaattttttgtagagatggtgtctcactgtgttacccaagctggtcttgaattcttggcctcaagaaatcctcccacctcagcctcccaaagtgctggtattacaggtgcgagtcatcttaccaggctgcagttaccttttaaacagaagcctagaaatgtgattcctcccccccccccccattagatttgaagtgaagactaataatgaacttgttacttggaaggaggtttggccgtatattcatgaagcatgaatattttgcttttcaggataaacagtttaccaacaatctctgctttgaaatttaatggtgccttgaccatggcagttggaacaaccacagggcaggtaaatatgtttaatttggaaaccacatgtaagttggtatttcagtggtgtgtgtatgtgtcatgagaaatacactgcaggaacagaaaatgagatcatactattttagccagaccagagggtattccagaatgctggattcttccacaccttgagaaatcttgactcttgccttggtcagtctgcagtgctgtggacttagagctgcagtgggataggcctgcaccaccacacctggctaattttttgactttttgtagagacagggtctcactgtgttgcccaagctggtcttgaactcctgggctcaggcgatccccccacccttggcctcacaaagtgtggggattacaggcgtgagccaccgggcttggccataggtattctcttgttagtggtttggaacagcatttttcagagtctatgcaacagaattctgtggtcagacagtcttgggagtctgccagacttttactcttgaagattgacagtgggtttcaatactgttttaatgaaggctctcaggaattcttgcagacaagaaatatgtttaataaatatttccaaaatttgtgtgttcaaggaacttttttttttttaatatagcatcattaactata

SEQ ID NO: 92742 - DNA, 1067 bp, Homo sapiens
cagactagtctcaaactcctggcttcaggtgatcagcccgcctcggcctcccaaagtgctgggattacaggcatgagccaccatgccccgccttctacagcttttatttaaaattgtttttcatttgcatagggtagagtggagtgctgggacccaagaactcgaaacagagttggcctgttagactgcgccttaaacagtgtcacagcagattcagagtaagtagaaattaatttgcaatgtaaatgttcatcaacttttaatttaagtaatgtgtctatattaaattcaaataaattgctacaggatatctgaaattgtactttccatgattgtttttcataaagatcctctcctgtaaaagctcactagtgagtaagccagatagaatttctttccaaaatactatacagaaggccttatttctttagttgctgtacgattttattaaaacaattacactacaggaatttgtattccaattttgtagaatctagtgatagaaccaggagtccaccacaaagtccacagaggtgtgctttgaattctaaggtggaaggaagcaagtgtttttttaatattttcttgttcctgtttgcctaatttctacatttaaaccaatcagaagagttttcactattatacatccatttacagttttatgattatttcctgagaaatgatacctagaacctgaatttctggattaaatagcatacatgttttgaaggtttttggtacattgctaaattgccctacagaaaacataacctcaggttaaatgtctccctgcatgcccagagcatacattgctcactctcctcagcctgggacgtccatcacagcactgctaataataagtcttagaaagagcctgaggatattgattaaataaagcttagtagaaatagtagctgacagatagtgctttctatttgccaggtactgggtctaagttctttacatatattaacttatttaatacgacagccctttgctgtaggcactgttattgtatttattttatagatgaaaaaaatattcgtcaatggcatacatgttactca

SEQ ID NO: 92743 - DNA, 1015 bp, Homo sapiens
aaaaaattagccgggtgtagtgagtggcgcccgtgagctgagattgcgctattgcactccagcctgggcaataagagcaaaaccccatatcaaaaacaaaaaaacaaaaaaaaagaaaaaattcagccataattacaccacccagagaggatccttattatatttccttctagtcctttcttatatacatatgtagatacattacatatacttttggatcttgtattctccatcttatttgtaaatagtattctacgtaatgacttcatatttccttggcacatgaatggtttaaatcacttttatacatgaacaaattcataaagtggatatttttcagatttagaatacgtttttgtatcagtgttacaaaaggaagtggtggcttatgagtaatatatatatttataaaatttatatttacttaaagtttcattgtagtttagcaggtttttaactttctttattactttacagttctgaagtttataggttaaacttagaacaaggacgatacctgaatcctctacaaactgatgctgcgtgagtagttttagtaattctgctatatacattttgaccaggaggtggagccagatgctcagtttgttaacaagtaacataaactattgcaattaagcaaaactcccagcaacttagttaaaaagtactgttgaatttattctcagacaaaaaattcactgaaagatctggtgattactttaaaaattaaatgaaagctttttttcatctactcaactttaagtcagttaaaaatactcagtttattattattacttgtagtgttctttaaatttacattcatggttttgttttgtgatattttctcctgtggagaacttttgaattaatttggagtgccatttttaaatttttatgctctgctagcggacatttaaggtttttaaaggtttccttttatcatacattatagtctacacatatgtactatgcagcaaaaatttttaggaatgaatccatcatcatcatcatc

SEQ ID NO: 92744 - DNA, 1094 bp, Homo sapiens
tggtctcaagctccctacctcaggtgacccacccgccttgtcctcccaaagtgctgggattacaggtgtgagccaccatgcccggccaggattatttaaatgtgttcccaagtgaaagagggaactgatcattgagggtaccatgagagtgctctatgttatgacatgctggtgccatgtaaatgaagggcgtttgtttcaagtctttaattagtatgtaaggtttgcagaaaagctatcaggatacaggaaggcattaaggagccgatggagtgttttcattcttaatcccagtggagtgtgtgtgcatggacatgtgtgtttagatacagaaagtgagagagaggtaagggttttccttggtttgccagttttttagcgataatgaagtaaacacctaactagaaacctaagcaaactaatttttttgttttattttcagattgtcttcttacataatgatagatacattgaatttcattcgcaatcaggtttttactacaaaaccagaataccaaagtttgggagagatttctcttaccactatccatcctgtgacttgtactttgttggtgcaaggtattggatccagtccctttttctccttttcacctcctaaaacaaccaacttctgttcctaaatttcgtgtacattttctctgtttaggtaacttgctttaataaaaaagtgatacgtggctcttgtaaaaaaaaaaaaaaaaagaaaagaaaacacaggataggcaaaaaattctattttctacatattggtttacttataagtaccatatactgttttaacaactgttgttttgcttaatacaatattttctaatgttaaaaatatctgtgatagttatgtgcctcattgggaaatactgatgggaagtgtgtgagccttttcagtttagcccggttgccacaatttatgagacatagtattgttttatttatctgtttatcttctagacttttgtctcgaccttaagtttgcttcatgtcagtaatcagtttctatctgatcactttgtgattaataggtcatatgtggttatggactctagtttaaaaaaattgggagagggttttattgt

SEQ ID NO: 92745 - DNA, 1543 bp, Homo sapiens
tactttttagaaacaggatctttttctgtcacccaggctggagtgcagtgttatgatcacagctcactgcagcctcaactacccaggctcaagagatcctcctacctccgcctcccaaatagctgggatcacaggcatgcaccaccatgtctggctaattttttttctgtttttttttttctttcccatagtgatagggtcttactatatctttgtttattgaaaacaatagaaactctgtgtgccactaataatggctatttttcgctctttttctttatcaggtagactatgaatgggtaaaaaatgacatcttttttgttaagcaacaatttttttgttctttaatgtatatttgaaagtctttaaaattattttgttttcaacatctcagagtgtcagaatttagaagtcattatattttgtgaatttgcattcagttctacaagaaatctagttgatgtgtattgagaaattatgaggcttttaagtttttgttggtgttttgggacaatatactatgacaattttcttcttgtttcacgtagaggcagaaaaaaactggtatgtatataatttctgtgttgaattagaatctttgcatcaggtttgcgttgttactaagaatattgtttgataattgtatttttcctatttcttgtttttcagttgtcacctttgaaattttgtctgatgactactcaaaggtatgttttatagcattggtttgtactgactagacccaagaaatgagtgagtggaatttattttaatgataagcagttttataatatttttattgttaaactaaaatggctgtgtagttctattgttaaacaaaaatggctgtgtagtaaaatgtaacccatcattttttattaatattaatacagtgatacggatagcctttggccaatctaatatcaaaggtaatttttcatatcgtatatgaaaccttatttgtatttttaagaattggcagcagtcatcttttatatcatcctgtattctagatttgtgattctgattattacgtttaacctagatttatttgccaggttgctttcattttcttatttatatgtgaaatgtaaactagcagggttgtgtgtttaatttttttttaactttgcaaatggttgtggtatattctgaaacagttcaaaatatagctaagtagatttatttctcttttttggtgccattagtccatctttcaactctttttttttggagacagggccttgctctgtcacccaggccggaggggcagtggcgtaatttcagctcattgcagcatcagcctcccgagttcaagtgattctcctgcctctgcctcctgagtagctggaactacaggcatgtgcttccacacctggctaatttttgtgtttttagtggagatatggttttaccaggttggccaggctggtctcaaactcttgacctcaagtgatccacctgacttggcctcccaaagtgttgggattacaggcgtgagcaactgcccccgacccatctttcaactcttataatcactttc

SEQ ID NO: 92746 - DNA, 1396 bp, Homo sapiens
ctccagcactcacctgtgctccccctgtacttttactttatagtacgttttggcagctttccatgtcaatggttactactgaggtctgcctcatccactttatgggctatgtaatattcccttgtgtggatttattgtcatttattcaactattttcctgtcagtggacattttattgctttcagttgctgaccatttataaataatgctgcagtgaacattcttaatatctttggcaggcttgtggatatatttctgtgagttcaatttatgtaagttgaaatatagattgaaagtatggaaacatcgtgtgtttttagggattgtccttcaaagaagttgtatcaattgtatactaatcaacaacagtataggggaatattttatactttcaccaacacagatattaaccgttttttaatctttgccattctggtggacaaaactgtttcattgtttgcatgtattttgttagattacttgtaggtttcttagttattttgtttggttttctatgacttgcttgtttagcttttgctcagtttttccttggggtgtttgagaggggctgcttttacattcctttcttttgatttggttacaattaatcctgcctgtctctgaacaagaagtacactcaatgtatctggatgttttgactatgaaagtatgtctttaggttttacatcacattaattttttgtaggaacatataaacctcgggttcgatgttatgacacctatcaattatccttgaagtttgaaaggtgtttagattcagaaggtgagtaaaaagctaaatttgaattcatgaaaatggctttttatgttgtctgcttttctggttttaaaatgagaatggtttgtaattagttttttattgctgtataacaaattactgtactacaatcccgatggcttaaaacatccatttagtagctcacagttgtgtagatcttaagtctatgcaggttctgtgctcagacaggaggtcagggtgttgaccaggtggagctctgacttggaggtgctgggcaagaatatgcttccacgtgttagtttgtagttcttttagaattgactggcagcttttcttgttttcagagaatgcaccccccccaaacccccaaaataataaaaaataaaaaagaatttgcttccaaatacactcaggttgttgtcagaattcagtttgttgtggttataggattgtggttcccatttccttctggctgtcagctgggggccactctaggcttctagaggctgcatgcatttctcatcacacactcacctccaccttcaagccagcaacagctcatcagatcctccctgtatttcttttctttcttttatttatttatttattacttttttaaagagatagggtcttgtt

SEQ ID NO: 92747 - DNA, 1051 bp, Homo sapiens
ttgtttttggggctttaattttttttagagacagggtctcgctgttgcccaggttggagcacagtggtgcaatcatagctcactgtaacctcaaactgctaggctcaggcaatcctcctgcctctgcctcgtgagtagctgacactacaggtgcacaccaccactttcagctaattttttttttattttttgtagggacaggatcttgctgtgttgctcaagctggtcttgaactcctggcctcaattaatcctcctgcctcagcctcccaaagtgcagggattataggcatgagctactgtgtaccctgctgttttttattgctatgttctttgaaaggcttacaagtattactttggccactaggggaaaaaagtggtaaaaaaaaaaaaaaacactaataaaagtagagcctctatttcttatctttcatccccaagtaacagaaaaaattaacacaaccactaaggataggtttgaatctggcatgatcataaacccaatgcttccaaaaggaatcaagaggccagtcacttccgtaacaaatcaatactttgcacatcccctgagttcattcccttagataatctatttccccaaccagaatgaaaggtcttcagggccaatcttactcaactttttagccacaaggcctagaacaccaaagggaatctgagaaagaagtagggatagataccgagattgaaagaaaaacctctaccaaattaaatggagaagcaagtgacattccaactccatttcccctaccaataccagaaaaaggcctctaggaaagtcaaaccaggactctggactctacaattgtgctgtccaatatggcagccactagtaatgtgaggctaagttaaaatgaattaaaatcaaattaaatttaagattccagctgggtgccgtggctcatgcttataatcccagcactttgagagacaggcggacaactgcttgagtccaggagtttgagaccaatgtgggcaaaatactgagaccccatctccatttaaaaaatattttttttggccgggtgcggtgg

SEQ ID NO: 92748 - DNA, 1102 bp, Homo sapiens
ggtttttggctgttactaataaagcactatgaacaatcgtatagaagtctgttttgtgggtataagctttcatgtctttggtgaatacctaggagtggaatttttgagtcctaggtaggtgtatgtttagtgttctgggaaacttctaagtcgttccccaaagtgatcatatcatttgcactcctactaacaatgaatgagagttttaggaaaggtcacttataacatgattttctgtataatgtactaatttttaaaaatatctctaagattttacattaacagtatttatcgttatcaaaaaatcatgaaatgtagaaaacttttagtgtgttggagtgttgaacagtatcacccaacctttagtggttgtgattttggcgcgtaagtcctgtatattgtccaaacattttttgctgataacagtattccttttccaaccactttctttttggtaataccttttatacatacacaggccagtctcttttgctttgtgttaatgattatctcagtactaactaacactatctacatctcttagccttcagttttatgttcagaaactggtaaaaagaattgaggaaatctaagatacatggacacccttactgaagactagaagaaactcaaattttcttcattttatagatccagagatattaagtgacttgtctaggctcacagatctagtacttaagaaagctaggatatagatttgttaaatgacactttcttttatgaaatcgtcctctattcccatgcaaaattaatggttccttttctccttctcctccctctccctctccctcttctccctctccctcttctccctctccctcttctccctctccctcttctccctctccctcttctccctcttctccctcttctccttcttctccttcttctccttcttttttaagagtctcactctgtcacccagtctggagtgcagtggcatgattttggctgactgcaacctccgccttccgggttcaagcgattctcctgtgtcagtctcctgagtagctgggactacaggtgctcgccaccacacccggctaatgtctgtatttttttagtagagacagggtttcac

SEQ ID NO: 92749 - DNA, 1180 bp, Homo sapiens
gcccagtgcggtggctcactcctgcaatcccagaagtttgggaggctgaagtgtgaggattgcttggccctagaagtttgagaccagcctgggcaacgtggcgaaaccccatctctacaaaaaatacaaaaatacctgggtgcagtggcatgcgcctgtagtcctagctatttgggggggctgaggtgtgaggatcgcttcagcccgggaggttgaggctgcagtgagccatgattgtgccactgcactccagtctgggtgacagagtgagaccctgtctcaaaaaaaaaaaaaaaaaagtggtttaatgtttatgctcttcctcctgtaacactggatgtttgatacactgttgtggaaaattttttttcaattaatgatgctactttttttattcttgaaaagtaaaaatgaaatacttagcttagaaaaacaacgtatgagctaaggaaaaaacctctgctgtttaatggttgggctgtgctggtgacctttcccaaggccaggaagcatttgggatgaatttcacctgtttatagttgtggtgactgcttggtacccatttgtcttcttatgatagagaataagcacatgttagttaaactagttgtttttttctctctttttagatgtccgtaggagaattgaacttattcaggactttgaaatgcctactgtgtgtaccactattaaggtgtcaaaagatggacagtacattttagcaactggtaagcatctttttggttatgattttcatgcattttgtaccaggaaatgctgcgatgggaaaggtctttttttttttaaccctaatattttattataaaaaatttcaaacacacagaaatattgaaaaaattgtatagtaaacacccatttaactactacctaaattctgcaataaatagtttactctgcagtatttgatttatcccatgcatctgtctctttgttcatgtatcagtccatcttgtttctttgatgcatttcagtgtaagttgaagataccagtatacttcaccctgaaacacttcagcaagtatatcattagctggagttcaatatttatcagtatttacttatagcctttttcaaggtaaaaacatttatattggtgaaatgcacagatcctaagtttaccatttggttagttttgacaaatgcacacgcttgtgtaact

SEQ ID NO: 92750 - DNA, 1386 bp, Homo sapiens
acccgtgggccttttaagaggttcttctctgaagacccttcatcttccttatcacaagtttaagtgctgcatggcatttgatactcttgacagccaagatacatttcagtagtaaggttgctttcctgattattaccttaaagtgaacatttaacctggaattcatttactttatcttagaaaaatagaaaatgatagctttgaaattagcacttatttctgtactgttgtgtcccaccctcctcaaaaggacacgttcaagtggcttccagtgttaaaatggtgagtgatgtgatgttgaaatgtttcacctgagttctgagcttttccatccgtataatcataggtacgaaggtcagggtaggagtcagactgaggagaacctggattgtagcaggagtagctccagagagtcgctcttccataaaatgagatgttgaccttccagggtgtccccttctgcagatctaacagtggctttctgtcgtctcccagcttcccgtggaggatgacattgacctcagtgatgtggagcttgatgacttagggaaagatgagttgtgagagccacaacagaggcttcagaccattttcttttcttgggagccagtggatttttccagcagtgaagggacattctctacactcagatgactctaccagtggccttttaaccaagaagtagtacttgattggtcatttgaaaacactgcaacagtgaacttttgcatctcaagaaaacattgaaaaattctatgaattgttgtagccggtgaattgagtcgtattctgtcacataatattttgaagaaaacttggctgtcgaaacatttttctctctgactgctgcttgaatgttcttggaggctgtttcttatgtatgggttttttttaatgtgatcccttcatttgaatattaatggctttttccattaaagaataaaatattttggacaatgccgataaatgtatgaagttagtatccacatcataaattcagagtgatgtttagcagtaaatcaatattttgaagtgatacacagatgtctttcctccccacaaacttttttaaacaaaaaacaagacctcttttctttagatggtgccacctatgcccaccacaacagagattttacatggaaaccgggctcagtgagaactgatttcctgcccaatatttgtctttgggctgtctctagtgactaattattaaggaatctagctggttatacagttcaaggctttctatgttgttaatgaacctcaaaatagccgttaagacatgaaatacagcagcaggttaccaatgcgaacaggtagttcgcatttatgtaaaacattcagaaaatgaagttttgaatttgttggaacattcaaaggacttga

SEQ ID NO: 92751 - DNA, 1141 bp, Homo sapiens
cctcctgccttagcctcctgcgtagctgggactacaggcgcacgccaccatgcccggctaatttttgtgattttagtagagatggggtttgcaccatattggtcaggctggtctcgaactcctgacctcaggtgatccacctatcttggcctcccaaagtgctgggatcacaggcgtgagccaccgtgcccagcctccttcctatttatctttttgcttcttgtcctcagtatccattgctttccccaggtacctagcgccccctgttgtccctctctcgatgaccttgctcctcctccattagtccagcaaatgtttattagatgcctacagaacgcgagaacatgcttaataacccaaatgatattggtgggatttcaggtaaaaagggaaaatccatatagaaactcatcttttgtttttatttgtcattctacgaaatatctgaagcgtgatcttttgttctctaagatcttctagttagatcgtaagcaatttaaaagacatatttgccctaaaaaccagtctggttttctaggtggctgtggacagaagctggagcccagtctgaacttgagaccgcgttggggattggagggtttgggtaccccgccatggccgccatcaatgcacgcaagatgaaatttgctctgctaaaaggctccttcagtgagcaaggcatcaacgagtttctcaggtaatttgttttcttaggttgtttgttgttttgtctgtttgtttggttctgttgtaggtttatatttggaactaggtatatataagccaggtaataaatggaatttaaaatgcaaactaattccagagaattgaatgtttatacattagagtttttaaattgtctccctgttcgttcttttttccatggaatactctgcttgcgggatgaggagaaagcattgctaccctcgggccgccctgtgtgccattctgtgcatctggccctgggctctttctcattctcataaaggtctcatatgggctagaggcagccctgtctgtccatcctcaccctcatatgcattgtaatcttgaccttggggaaatgtggtttccatttctgggcacttggctttggaatgtagttatttatttgaaaatgggcgtacttaagttactccaa

SEQ ID NO: 92752 - DNA, 5487 bp, Homo sapiens
aaacttaagaagagaaatcgggctggacacggtggctcacacttgtgatcccagcactttgagaggctgaggtgggcggatcacttgaggtcaggagtttgtgaccagcctggccgacatggtgaaatcctgtctctactaaaaatacaaaaattagccagaaatcactcgaacccgggaggcggaggttgcagtgacctgagatggtgccactgtactccagcctgggcaacagggtgagactccatctcaaaaaataataataataaataaaaaaggaaaaggaattggttttccaagtgttaagtttagtgcaaaatgcattgtggggagaaagtgtgttctgtcagagatacacgtgtcagaactgtgtcacacctggtgaagccgacagtgaggtaaagacacagtcttgggccgggccagatgaggcacttgctgaaggccgggctgaggaccgcctaccttccgtctcctgtaggtggcagaactggtgaagccattgtagatgctgcgctgagtgctctgcgccagctcgtgaaggatcgcctcgggggacggagcggaggatacagttctggaaaacaagtaagaccataaaatgtcagtttttaatgtgtcataattttgaagccagagtggataccttgtataagatagttgttttttaacagtatgttaaagtggtgaactctcaattaaagaataatagaggattggatccaccgatcccagagggaaccagccctccagcctgctcatttggcctcctcagaattgctgttgccaaagccagtcagtcccagggcctcttgccacacctgcagtccaagtaccaggcccaggagccacgtgctggcatcccatggcacttgtaggtccagagtggggatgggatggacgggttttcctctaggtaggctttggcaaaccgtgatgagattggattacctcttggcctgtatctgtggcagtcagccccaaatccatggaaaattctacacaaatggatagggaagaagagagagagagaggagcagattggtgttttagatgcccttatgtgaaatgtgaagcttacactgatgttcttgtgaaaagacaaacttgaagatctatcaatattaaatgggcttttacttttaggagaccagttacactagcttctttatacaggctcagagcttacccagagatttcatgctcttgccttttattttaaacttagacatttaatgagcatagttgcctggccccctgcaccctgcctggcaacagaaagcaatgctgactgcttcttagatttagtactgaagaacattcttcgaaaaaagaaaaggattaagtgttatttttagctctgttgactggtagggactttgtctatgaaagatgtaacataacatcctaggatgaagcagcagctgtacttgagtctgaattagaacagtgttgttcaggtggttttttgagccatgttgaggtttctctctaaaaatagctggtgacagcattcaggtacaggttatgtgttgtactgaatgtattgataattacttgaaagtaaaagactatttgccaagcaaaaattacagtgctgaggaatgtacccaatttgaatacaaccgttttcactattttattcactaaagaaaaaccctaaaactttgttaagatgtagcagtagtgttattatttaaaacaggaaaagtgttcttcttggcccaattgtttgatgtttaatgtcataaatgacagggcagaagtgatagttcaagtaagaaggatgtgattgagctgacagacgacagctttgataagaatgttctggacagtgaagatgtttggatggttgagttctatgctccttggtgtggacactgcaaaaagtaagtgccttctactaagtagtctgttcattcacagtgttttcagtacattcattagcttattttgaaagagctgaagtagataatagatcaccactaagatctcttccagcaaaactctgactctaagtgaatattaaacattgacattagcgccaagagcttccactctcctattgccaaagattaacaagggactggctcatgtctggatttaggggcagtggtggaatgggaagctcatgtgaagggtagcattgtatctttagtaaagccacacacaaaatgttttctaggtgtgacataattggggattgggcagaaatgcacagatcagttaaaaagtataggctaggcatggtggctcacacctgtaatcctagctctttgggaggccgaggcaggcggatcacttgaggtcaggactttgagaccagcctgggcaacatagcaaaaccccatgtctactaaaaatacaaaaaaattggctgggtgtggtggcgtgtgcctgtagtcccagctacttgggaggttgaggtgcaagaatctcttgattgtgggaggcagaggctacagtgagccaagctcacaccactgcgctccatcctggataatagaaggagactctgtcttaaaaaaaaaaagaaaagaaaagaaaggtgtttgggctgcaagttaaaatgcaagtatttggcctggtgaggtggatcacttgaggccaggagtttgagaccagcctgggcaacatggggaaaccctatctctactaaaaatgtagaaattaacagtgggtggtggcacacacctgtagtcccagctatgttggaggctgaaatgagatcacctgagcccaggagattgaggctgcagggagccatgattgcaccactgcactccagcctgggcaacagagagagactgtgtctcaaagaaacaaaacaaaacgaatatttttctatagcctagagccagagtgggctgccgcagcttcagaagtaaaagagcagacgaaaggaaaagtgaaactggcagctgtggatgctacagtcaatcaggttctggcctcccgatacggggtgagtatacttataaggctcatttcattgtgaaatacatggtgtttcgttacttcttccaatactccaggcctccctatgaggtagtaaaggagatgtttaaaccattttgtaagtgaagagataaagtcactttattgtcataactaacaagtctgaaactcaggactgtcaacttttccccctaatgtcacactgcttctggtatatacttaatgtgaggtttcagcttgcccagacttattcaagttgctcatatggctgttgtgagttggtccatttgttctagggcaggtactttgtgttaattatataccagggcttgaatatgattggctaaacttcacagactgttaaaactccctgattgataattgacctctgtgagtcattcctttgaaatctgtgcagtctggagaacagttttgttacattaaattacctataaggccagagtggtggctcacacctgtaatcccaacactttgggaggccaaggatcacttgaggccaggatttcaaaaccagcctggccaacatggtgaaaccccgtctctattaaaaatacaaatattagccgggtgtggtggtgtgtgcctgcagtcccagctactcaggaggctgaagtaggagaattgcttgaacccaggaggcagaggttgcagtgagctgagattgcacctgtgctctccagcctgggcaacagagtgagactgcttcaaaaaaaaaaaaaaaaaattacctataaggtggttttagaaactgtaaagattgtgttattttgcattaagtgttaattggattttatcctctgacctttttttaatagattagaggatttcctacaatcaagatatttcagaaaggcgagtctcctgtggattatgacggtgggcggacaagatccgacatcgtgtcccgggcccttgatttgttttctgataacgccccacctcctgagctgcttgaggtaaaccacttcaactgcttgtagtccagaaagcttttttagctgatggtgaggaatgttaaagcagtgtgacacactgttcattttatgcccttaaagatactctctttaaagtggtttctatactttgaaatggaaaaaaagtctgataaattgcttttcataacttttagcattagaataattacactgaacagaaatacgagcttcttaaagatagagtgtattcaatcactcttgcttatcattctcaaagtaatagaacatttatcaagtactaatcatgtaacaggcaccgttctggtgtctttgtatagttttgttttgttttgttttgttttcatttaattctcacatgaacactgagaggtagatactgtttttaatctccattttatatatggggaaattgaggcacagagcctcaagtgtgtataaacatataagacatataatacatgtaagtataatctatttaaacaagtaagtggcagagccaggctgtgtccaggcattgcgatttcagagatgtttgtatgtgtgctaatcaccccacctccaccaccacagcttccacaggcttaagaatcagtagcagaaaaatctcctcttagagaacatgcctccaggtgtttccatacgaggaagtagtcgtgggagaaatgttttcaatgaaagtgacggtgcgaaggtcttgtttgccagcttacctttaggtgttgtatcatgcagcctcctgattgtcccttgtcttttgggtcccacagattatcaacgaggacattgccaagaggacgtgtgaggagcaccagctctgtgttgtggctgtgctgccccatatccttgatactggtaagacagacggaaatgatttcccttagctgttctatgctagatgctctgagaatactttctaaatggattaattttatggactcctttatctttacctttaaaaaactttgtctatttaaatcaggagctgcaggcagaaattcttatctggaagttcttctgaagttggcagacaaatacaaaaagaaaatgtgggggtaagttactgagcttactgtctgagtgtcatctgaacagctgattataggctttcttgagagtggttcccccgtgtttttgtaagctgtgttctatgtttgctctgctatatgttttttttttttttccctcctgcctcagcctcccaagtagctgggattataggcgcccgccaccacacccagctaatttttgtatttttagtagggtcagggtttcaccatgttgtctaggctggtctcaaaactcctgacctcaagtgatccacctgcctccacctcccaaagtcctgggattacaggtgtaagccaccgcacccggcctgctctgctatatgtttttattcaggatgtgaaaactttatcatgggaggaaaagaaggaatgaagggctgtcagcacagcatgcatttttctcataggaatcatgttttacatggtgattggagtgccaggttagcaggcagacacataaggagtagtgcacctgaattctactg

SEQ ID NO: 92753 - DNA, 1711 bp, Homo sapiens
gtaagtaataaaatggtgagttcatccaggttgctgatcctattttacttatttatttttatttttattttttgagacagaatctcactctgttgcccaggctggagtgtagcggcatgatctcagctcttgcaacctctgcctcctgggttcacgtgattcttgtgcctcagcctccccagtagctaggattacaagcgtgcaccaccacgcctggctaatttttgtatttttattagagacggggtttcaccatgttagccaggctggtctcaaactcctgacctcaagtgatcctccctcctcggcctcccaaagtactggagattacaggcgtgagacaccgtgcccggccttgatcctgttttatttgtgcttgtcctctttgcaggcatctcattcaatagaccattgatggggttttttaattgaatttttgaattttttgaattgagaatcaaaggctttaatggttgctttgtgttgtcttcccccaaaaggtgtggtcactgtcaaagattaacaccagaatggaagaaagcagcaactgcattaaaagtaagtttcttaggaatgcaaaaggcttacaaaacttttttttacagtaagtttctaagatgtccatattcacctgtgtatgtttaagtaataagtatgcagatggtttaatgttcaatgggaagctagtttgcatatcagagttgaaaatactggttctgttgtcaaaatcatactgagaacaaggggataatacacatttaaatgtttacattgcctgtttttgtttattgtttttcccagataaatgacagttactctcagccctgccaattctgtgagctgcagagttccctccatgggctttgatttcccccatcattccatttagattctcttctggtgttcaaggctaaagcccttattgactgattgcaaactgcaccctgtgctttattacctttttctgagtctatgtgaagcagataatgagttcttgtggagtctgctttagcggaaggaaaaattgttatttcttttacatttccacaggatgttgtcaaagttggtgcagttgatgcagataagcatcattccctaggaggtcagtatggtgttcagggatttcctaccattaagatttttggatccaacaaaaacagaccagaagattaccaaggtaaggacttttcctagctacttcattcccctggtagacaagaacctactgttctttaacaagcttgagaacctgctctacctgcaaggttctcaacctcattgtacctgaattatctataaatggtacacagtgattcctataccctccgagtcattctgaagatgaaatatgtgtcacacaggtttgtctcatcacttaacgcttgcttaggtctatgctacattggcaatgatagaaaatagtgttctgtgctaccctgttgtctttctcattacagtcacttgtatttaataaagatctacatgtattttcttgctctaatctctcttccctttactgtaggaaaagggtctaacataacactatggaaaaggagactgtaatttgagagtcttagtctcctaaactgtcaataataaatggataccacaaattctgttttgtagataagtaaattgttagtgtctgctgtgagccactgaggcaactaaagaaagaattcaggtttcaccctcccaagactaaatgtta

SEQ ID NO: 92754 - DNA, 1690 bp, Homo sapiens
cacaatctagtggaagagacaataattattttcccttcaaaaatatatttgaataaagataatgtgctaataattgcaactgaataacatgaggaatgattactacgtgattgcccagggttacacaggcagaagtgacctcccaatttttcagcgtccatgccataaaatgacagtagtactgcctcatggagcggttgtaaagaacaaagacgttgatacatgaaagccactaagaataatgcttcagcctttttccagtgcagcccaaggagtgggagtggggaccgtccgttcctttcttgctcagcgttgcagcaatgggagtgaaattccaggggctccaactgcagcaggaagggcagaggggccagagctaggccgtcctcctgtgtgaagggccctggtcagttaaagaggactctggttccccagggtttccagtcaaagcatgaacagtgctgttaatggtgcacttttgtttttatcttcaggtctggtgagctgtaccttctttctggcagtgaatggtctgtattcctctagtgatgatgtgatcgaattaactccatcgaatttcaaccgagaagttattcagagtgatagtttgtggcttgtagaattctatgctccatggtaagtattataaaatagttgtagattatttatagtactttctgaaattggagaaaacgctgtataaaaatctgattttattaagacatctagtttagcttagtgtttgtttaaaagaagtagagaagagggaaatgggaaatgcaaagtatctagtctgttgttaaggaagatctgtcttttgatgaggtgatgcgtgtggaaggaaaactgcttttatgaggaaggaatcttgagcaaagaaaatggaggggccagtgattaacttcactctgtttcttgaagagaattatttcctgaaaaaatgtagttagaaaatctggtttaatttaaaaattcttttcttaccttacattcaatgctggaagaacccttgtggggtaaaaatgtaatcaccattgaaactaacagcacaaaattatatacagtcaaaagtacaacattgcactagttatttgtgtgattaaagcatttaatgcaaaaaaacaccaaatagaagagtggaaactgtgcaagatgtatatgaggctgtctctgctgtaaaccagcaggccacaagtatcctgagaggagaaccaaaccctagccagctgtgtgtctgtgaagaactgtgtggttatctgaaatcccaaggagtcctttgacatgtgaacaaggctttgtaagcttaagtgagggatattagaacctgatgggtacattttagggtatgcctgatgaaactttttcctttctcactttaacttttttctttgaaactaagttttagaaactaaccaccagtcctcatggaccattttacttcatgctcagtgtagcaaatggaggtaaaaacgctctattttcaaagtggatgttgccacattgtgcgtcctgtccatctaatgcctttactgttttaaaggctctggtatatatgtgttcagtccaaatgctaattctgtgtggattagctcaattatactagcaaatacataaatagtaattgtacaaactgttgtattgttaaacgtctctgtatgtggtttttacaagcttatcatatatggcatag

SEQ ID NO: 92755 - DNA, 1061 bp, Homo sapiens
gtgtccacggaatattcgtcgggcacaagaggaattccctgtcagctcccaggaccgtgggtgccctgaggccgagtcacgctcccccgggataaagagggtgggggcgcacacaggcaaggaggaggcggggtgggggggtgcagaataaggaactaaggtaaaaacgcccagtactggactcccctccgagcagcaccccgagagggcccggaggagctgaggcggtgcgagccgagactgccagccccgcccccagcaggccccgccttccgctgctcgccaccgcccccgtgaaaaaaaaccaaaccggtaacctctacccggccgcctcccattggatatgtgagtgagcgatgtccgcccggaccaatgagccgcagccacggcttggcgagcgccttccggcccgcccccgcgcggccgcccctcggaccaccggactggcctggggcgggacgtgggcgcgggggcgcggcgtgcggcacgctgcagggctgaagcggcggcggcggtggggactgcacgtagcccggcgctcggcatggctctcctggtgctcggtaggtgcgggccagcggagggaggcgggcgagctggggtcggcctgaaaggtttcgaatctctaggccgttccccggcgggccgcggccgcaggcggccggaagtgggcctggcgggcgggaggcgcgggcctcggcgtccggaggagctgctaggttgccccggcggaggtgcgggtgcgcgggagactcgggcgcccgtggggaggggcttccgcagccgcggggggcgggagcctcgtgcgctggagccgggcgcggggtccagggccgggcgggagagccgcggagcccagccccggccggatcccggggagggggtctgtattcccggagagtcgcaggggagcttgttccgggctcttctcgaactcgtgcgtggggacggaggttggcgggcgtcctgcactgctgcttgtttctgccacctgctttatgcagctcctacttttaaaaactgaaatgttaagccgggcgcggtggctcacacctgtaatc

SEQ ID NO: 92756 - DNA, 1062 bp, Homo sapiens
gggcggctcccggcggcggctaaactatcgggtggcaagaacgcggaaatgcgaagcagctgctggtggagcccgcaggccagggtgggactgtcgcccggggcggggctaggaggggaggggcggggcgaggaggggcggggcgaggcgaggttggccacgggattgggctaggtgaggccgaccgggagggggcgaatctgggggcggggcgagatgagggtagtccgaggactgagcgagcccgggcgggcccgtaggcgaggcgagatgaggctggccagggggcggggcgggcccgggcgggaggggcggggcggggcgggcccgggcgggaggggcggggcgggcccgggggcggggtgcgtccaggggaggggcggagcgaggcgggtccggggcctggcggcgcgcggaggggcgggccctggccgggtggtcccgggcggatcccgggaaggcggaaggcttcggcagagctgcgccgccgaggctgagcggtcccttctcgctgcggccgcccaggtgcccgcgcccgtggcgctatggaggcggcgctgctggggctgtgtaactggagcacgctgggcgtgtgcgccgcgctgaagctgccgcagatctccgctgtgctagcggcgcgcagcgcgcggggcctcagccttccgagtttacttctggagctggcagggtaaggcccggggcggccggggctgcctcctgccccctcgcagctgctgccggctgggagcccaggagagcctcggctcgaagtagggcggggatgatccccgcgcgccggcgtcgcagctgggcggccgagggtgaactagggagcctaggggctcggggtgctcttcccacggccacccgccacccgcgtacattgtttctcaccaagccccgcgtggcacgaattgattgcgcacgcccattttacagatgagaaaacagacccagcggaggcagcccttggtgcgctagtgacaaaacctgctggccctgagcaaggccatttgcacctcgaggctgtcatattcattgtccctaaactcaccacgcacc

SEQ ID NO: 92757 - DNA, 1037 bp, Homo sapiens
agctgccggggtcagtgggagcccaacatggcaggcaggccagaagcgtgggcccagaaggcccagtctcatattcttgctcagggatttgccttctgtaaaaatcctttgtaagcgaccatctcaaggcactctatagagatcgtgggtattgcactgtggcccggtgcccagtaagttctggatgctccaaaaattgtacagatgattcaactgaattccatctattttgttctaaaccttcctctttgacactggcgtgtccacacccccactgcaaggattcggcaaactgacctcagtgttctggtgcctgccaggccccgacagctgcgttttggggcagccgtgtggacatgtgcccttctctctccagattcctggtgtttctgcggtaccagtgttactatgggtatccgccgctgacctacctggagtaccccatcctcatcgcgcaaggtaacagccccttccctgtccagcggactgccacgggtctccccttcccccctcactcggagcctctctctttcagatgtcatcctcctgctctgtatctttcattttaacgggaacgtgaagcaggccactccttacatcgctgtgtatcctttctgaatctgagccagaagtgggaacggggatgttatttgtgaatggtatgcattgtgaagcaggctcctttaccagatgtgtattttttggttaaactaaaaaaaaaaaaaaaaaaaatcccaaatgcaaacgtgtccatgtacaccagagatgccctcagtacagcccctgctgctcctccgagaccagcatgccctgggcggtgccagcaggccgagtggaaggcagatcggtagagtccacccctgctaagagcagcatcgtccaactgcattagttcatgtgagacatttcttcctgccctgataatgtcctccgaggattggaagcaataataatgagagtatccggcgcctctcaagacgttagcttagaggctaaaccttgaggtctgaggggcagttgttggcccagaggcttgc

SEQ ID NO: 92758 - DNA, 1106 bp, Homo sapiens
cgagatcccgccactgcactccagcctgggcgacagagcgagactccgtctcaaaaaaaaaaaaaaaaaaaaagttattcccaggccgggcgcggtggcacacgcctgtaatcccagcactttgggaggctgaggtgggcggatcacctgaggtcaggagtttgagaccagcctggccaacatggtgaaaccccatctctactaaaaatacaaaaattagttgggcatagtagcgcatgcctgtaatcccagctactctggaggctgaggcaggagaattgcttgaacccgggaggcagaggttgcagtgagccaagatcacaccactgcactccagcctgggcgacagagtgagaatccatctcaaaacaaaacaacaacaaaaaagttattcctggatatactgatcactttcaagaacagctgtcatagataagaaataaatcacaattagaacaatcttgatcttttaatttctaatgtataggttttgctgtttacttgtggtttgactttcctttccatgctgagaattcaagtcctgtggaaagacccaagcctgtcttccttcccatttcccacttgatcaaagtttatgctttgaccagaacaattttagtcctatcatcagagctgacaaaaagtattcgagcaaaggtataacctccaggaagagactaacaaacatatctctgttctgaagcactatttctcaaataataattagctcatttaaaaggtctacatgctggggacattttctgatcttcacaggtgacaccatctgttctaatcattttccaaagatgtataatatatgcttgatttgggagttgaaaacagcctaaggaattactaaattcttttgtggttaaccatagtatttcctcctccatgacagctttttcttttaaagaaacagaacaaaaacatagtccattggtgacaccacttccctgcttcaaagcctccagagccttcctactgttttgtaggcagttcttgtaggccctggatacttgggccactgccagtctcgcatccttcctctcctgaaacccgcttgtcactgtccccctgctctccgcactctagccctttgtcct

SEQ ID NO: 92759 - DNA, 1046 bp, Homo sapiens
cagaatcttttaggaaataaatcctctccaggacaaaaatgaacatgaatggagtggcattttgttccaagtcagaggtgggcacctataataaatgactagggttcactttctgggactgatgtttaattgtaacacagatacaacagggtggccttgttgtgtataatacggtattatacccgcatgtgctctagcaaggataccaaggcaagcatacatgtagctggcttgagtttgtaccaaaacagtccttcaactttgcactgtgccttaagtaattactaacaaaaggtactaggattagctgcaatctctactttcgatgaggaaatcccagtaagctttctgattcaagtacaatgctgccattttttaaagggccacaactatagaattaccactgttggaatttggtacaaaatatgttttgtctattgaaaacatacacggtaaatggtgttgttaggtaggttctgtccagttcttagggacttttttcacattatagcatttttaccctaaacatgatgttgagattattatatactgtattttcttctaaattaaccctaatgtttaaaaactcactttccccctttaattgaaggcattgttttgttagatgcagtaatgatgtttaccagagattattgtttcctatgcaaaataaattttcatattttgaattctgctgagtcttaaaactgtcaatcattaatatgactattttatgtaaggtatagtttttaaacaaactggttaatccttttagaactactgcttgggaccaacaggaagagaaacatggtatctaaagacaaaattattcattctgtagttgttaaaattacagatgtcatatttttaaacatgcaagttaatcttttttcatttgcagttataatctgaccattagcatcaatacaaattatatgatttttagtccaacaaatgttatatttagataacattagtactttatcactgcttaaagcaactcctttaagagcatacttaggtgacagggtctctgtttttccccc

SEQ ID NO: 92760 - DNA, 1106 bp, Homo sapiens
caaatttcaaccaggagcctgtctctgatctgatttgggtgttttaagacgcacgcaaataatagaacaaactcatttgaattggtaaggatagggaaaagaggcaggatgtctgttttgtcaggaaatagtgtgctgattgattgataggtgattttctagaaagtgtttctctggcaatcagtggaaccttttctagggcacttatttgctatgtgctcttgggcaggttattcactctgagcctccgtgttttcatctgtaaaatggagatatagattgtgtctactttacaggatcactggcagattaagtaagtatgatgtgtgtagaatgtctgagatggctcgagtgtttgttgccttacaaagggggaaaaacagagaccctgtcacctaagtatgctcttaaaggagttgctttaagcagtgataaagtactaatgttatctaaatataacatttgttggactaaaaatcatataatttgtattgatgctaatggtcagattataactgcaaatgaaaaaagattaacttgcatgtttaaaaatatgacatctgtaattttaacaactacagaatgaataattttgtctttagataccatgtttctcttcctgttggtcccaagcagtagttctaaaaggattaaccagtttgtttaaaaactataccttacataaaatagtcatattaatgattgacagttttaagactcagcagaattcaaaatatgaaaatttattttgcataggaaacaataatctctggtaaacatcattactgcatctaacaaaacaatgccttcaattaaagggggaaagtgagtttttaaacattagggttaatttagaagaaaatacagtatataataatctcaacatcatgtttagggtaaaaatgctataatgtgaaaaaagtccctaagaactggacagaacctacctaacaacaccatttaccgtgtatgttttcaatagacaaaacatattttgtaccaaattccaacagtggtaattctatagttgtggccctttaaaaaatggcagcattgtacttgaatcagaaagcttactgggatttcctcatcgaaagtagagattg

SEQ ID NO: 92761 - DNA, 1019 bp, Homo sapiens
aggttagttttaaaggcactaacctttactttggctttactggtatgcttatccattagttagctggaacattttaaaactttcatatagatttttaaaacttgtttctagagaacatggttttttaaaattaatactttaaaaacattcactgtacattaatttcaacagtaataccggcaccagttttcctttcacttctgtctcgttatccccacaaaacaaaagtaaaaaatccaataagaaaatcccagtattcatgatttcttagttccccataggaggtatttatggttctaggagaaatcaggtgtgaaggaacaagcaaattttagtcttatatttatcttggaagcttcagggcctcaagaaaaacgagaaacgagcacaaaatcaggttgttttatatttaataagtgttgggaagaaaacacattgataggtgcatgcactcatgtatgtacatgaaagcggcaatgcggtaaaaagcgaattcttacccaaggtcagaattttttattaagcgcattttcattagttggacaaacaaccttataaacccttatgtcaaaccatataatgtgaagaatctccatgggagagatttttttttcacccttcagaattatctttttcccctaagaccttcatatgaatcttccttgtacagttggtcacaccatgattccccatattctctaatatatacagcattccaaatttaaacttttgccttttttactcaaatatttcagttactcatatgtaaacttgaaattatttcaccttaataaagtttattaaaaatatatatatatatatatatatatatatactctccaattcagaataggatagaacctcccataatgtaacaaaatctttatataaaatattaattcagtctccttttaacaactctaatgaatggaaatatttattctatataaatttatatatttttcattttttaatcttacttaaaaaagagctatcccccaaaaccagagctgcagaac

SEQ ID NO: 92762 - DNA, 2893 bp, Homo sapiens
acaagactgaaatatgatggcccaaaatttattaaaaagctatattttcctgagagactgatacatacactcatacatatatgtgttccccttttccctgtaatataaattacaaatctgggctcctttgaagcaacaggttgaaccaacaatgattggttgatagactaaggatatatgcaactcttccagacttttccataaagctctctcggcagtcgctcacactacaatgcacacaaggattgagaagagttaaaggctaaagaaaacatcttttctagcttcaacagagaggtttcaccagcacatttaccagaagaatctgggaatggattccactacagtgatattgactgcatctttaagaagtgaccattatactgtgtatatatatataaacacacacacatatatatatatatatatagtactctaatactgcaagaaggttttttaaacttcccactttattttttatacacattaatcagatatcattacttgctgcagttgcaactatgcacttgtataaagccataatgttggagtttatatcactcattcctgtgtacctgatggaagttgcatgttcatgtttaagcagttactgtaacaagaagtttaaagttaattatatcagtttcctaatgcttcatgataggcaactttacccattttgaatgccttaatttaatttttttcaaagtctcagccctgtctgtattaaaaaacaaaaaaagcgtttaccagctcttaggatgtaaactagctttgtggaagataaatcgtgcactatttttacacataaatagttatatcaatgtcagcctattttgattaacaaatgtttttaaagtattattggttatagaaacaataatggatggtgttggaactaatatatccttgatgtctgtctattattcattcaactctttttacagacctcagtattagtctgtgactacaaaatattttatttgctttaaatttgctggctaccctagatgtgtttttattcctggtaaagacatttgtgattacattttcacacttaagattcaaaatttttcccaaatataaagaaaactaagacagactgtagatgcattttaaatatttaaatatgatcctcagacatgcagctgtgtgtggcagtattttagtaccgggttaagaaaactggcaactgggaagaagtggcctcaaaggcacttaatttgatttttattttttaaatgctgtcaaagttacagtttacgcaggacattcttgccgtattctcatgatcccagataagtgtgtgttttatactgcaacaatatgcagcaatggtaagcgtaaagttttttttttgtttttgtttttttttatattatgaagtcttttaacagtctctctttatataaatacacagagtttggtatgatatttaaatacatcatctggccaggcatggtggcttacgcctgtaatcctagcactttgggaggccaagacgggcggatcacctgaggtgaggagttcaagaccagcctgcccaacatagtgaaactccgtctctaccaatatacaaaaattagccgggcatgatggtggtggcctgtaatcccagctacttgggaggctgagacaggagaatcgcttgaacccaggagacggtggttgcagtgagcgaagatcgagccactgcactccagcctgggcagctgaacaagactccgtctcaaaaaaaaaaaaaaaaaaaagtcatctaatatttcgatgaaggaaatagacatttttcattgattccctctgatgtcagttagagatatttaaaaagttagatccccataatagatactattgtggaaactgaagagtagctactggcctactgatagactgaaactggttttgttattcttaacgttctccagtctgcactctgctgtgctgtctgtgctcagactagacgtgcatgccgtttcctttgcaggtgtgttctgcagctctggttttgggggatagctcttttttaagtaagattaaaaaatgaaaaatatataaatttatatagaataaatatttccattcattagagttgttaaaaggagactgaattaatattttatataaagattttgttacattatgggaggttctatcctattctgaattggagagtatatatatatatatatatatatatatatttttaataaactttattaaggtgaaataatttcaagtttacatatgagtaactgaaatatttgagtaaaaaaggcaaaagtttaaatttggaatgctgtatatattagagaatatggggaatcatggtgtgaccaactgtacaaggaagattcatatgaaggtcttaggggaaaaagataattctgaagggtgaaaaaaaaatctctcccatggagattcttcacattatatggtttgacataagggtttataaggttgtttgtccaactaatgaaaatgcgcttaataaaaaattctgaccttgggtaagaattcgctttttaccgcattgccgctttcatgtacatacatgagtgcatgcacctatcaatgtgttttcttcccaacacttattaaatataaaacaacctgattttgtgctcgtttctcgtttttcttgaggccctgaagcttccaagataaatataagactaaaatttgcttgttccttcacacctgatttctcctagaaccataaatacctcctatggggaactaagaaatcatgaatactgggattttcttattggattttttacttttgttttgtggggataacgagacagaagtgaaaggaaaactggtgccggtattactgttgaaattaatgtacagtgaatgtttttaaagtattaattttaaaaaaccatgt

SEQ ID NO: 92763 - DNA, 1028 bp, Homo sapiens
gtctcactcttgttccccaggctggagtgcaatggcacgatctcggctcactacaacttccgcctcctggattcaagtgactctcctgcctcagcctcctgagtagctgtgattacaggcacctgccaccatgcccagctaatttttgtatttttagtagagacatggtttcaccatgttggccaggctggtcttgaactcctcacctcaggtgatctgcccgcctcagcctcccaaagtgctgggattacagacgtgagccaccgcatctggccaggtggctatttttaaaaacaaagatgatagcaatattacagtttaggttattgaattagaaagaaaagaccacatatatcccaactctaagtccaatttagccaagatgacttgctaatgctacttatgtacctgtggcttttcccttgtccctagtttttcatatgcaggacaaagctcttggtgacacattgagcaggcagggtcctactggaattcagaaagctgctttcttattctattactccctttttaccccatggtttttggtgctatgatggaaaaactgagctgacaatctgaccactttggtgaaggggaacattgacaaatgtgctttcataattctcaaatcaaactgggcatcaggatggttatgtgtttatctggggtatgggagtgaggagggagaagcagattgtttcttattatcccaaatatgatcgctgtcttcaaatatctggaaagtgtacttggccaacatgattatatgcatttatatataaagggcaaggcttccctatgtgcgtccgtcttaattttaatcttgttgttatccatgaagggaaaattaaaatgcttacaagcacattcaaagtatgatttctaagtcataacattaagttacagtttctaaagagtgttagagtataaatttacaaacctcctattgcagattgcttgatttggcatttaaagactgggattggtcatttgatgatgttgatggtggtggtgatgatgatgacgat

SEQ ID NO: 92764 - DNA, 1050 bp, Homo sapiens
ggatatggggggactactgtattaagaaattagcattaaattaaaactataacataaaaccatttttcacctgccaaactggcacgggttaagaaacgaaatgggtacttttgtggactgctggtagaactccaaattaaatgcactctttccaaagcatctttgacaataagtttcgcaggcctgaactatatccctgttaatggtggagacagtcaagcaacaggcaattacagtactatgtaaaatgctgtttataatatagggatgaacagagcgcttggggaaacgagggaagcatggagaattctgcctgaggacattaagaaagatctcaaacaatggaggatggataattttacaagcagacaaataagggaaaatcagttccaagcaaaatgtcatgtgcagaggtacaaagtcatcagaattacttatgtatttgtaattttgtgttggcttggcgttgggagaaggcaagggtagggagtggtaaaagatgatgtgacactagagagaaagtctgaacccaactgaaaagctccatgtacactgtgctcaggagttttgatttataagtagaagtctttcagtaagggattggtattcaggcttaatgagatcctgaactgagtacttgacaatgaaaacgaagaaaataaacctggatttggaaagatttcttcagttgaaataactagaattagatgactgattcgaagggatgagggagagggttgtaagggaagtctcgtcatacactacagtcgcatctagcgattagacttaaatttgagattgtgacactggcacacacttcaaaggttttgaaagggtatgcaatgcagctttctcctaacctatgctaaagctgaggcttggatgccctggaaggcctgctgatcacaatctcccaagcagtagagctgaaactatggctataagttacattatatataagtctagagaagtgagtgtgtgccaggttgcgatatgtgttcagtgagtaattatatctgtttgtgtgttttctcaaatgttgtgctgtgt

SEQ ID NO: 92765 - DNA, 3992 bp, Homo sapiens
ttattctaaaagtccattttctctgaacacgtaattatttaaaatatttactccttgaaaatgtgcacaatgtggccctcttccaaaggaaaaataaaggagtctaaggcaggtgtaccagtgagaatagagagttgctgctgctgccttttttttttttttggcaacttttctcctgaattttataaatgcatgaatttaatcaatggaacatttgactttataaaagtatagactatctgtttccaatatgatataacctggattttgttttgcattgcataactttttactactgatcctgtactattactgtatcctagatgatgtatagtgataaattctaaaggatatattttatttgttttataaatttcatattaaaattttattaagttctttgttatctaaggagaattgttatctttagcctcacatgttgtgcttatttgtagaatcaagattagaaggatggctttcattgcctgtacgaaacaacactaagaaatttggatgggttaaaaaggtaattgatactttggaatatgagccttttgtttttgtttttgttttaactctagtcatttggcttttgtagttgtaggatatacatgactggtacctttagacacatagaacttgtttatacttcaggatttgaaatgatatgattttatttatctttgtaaaaaatttttgtcctcataccttgttaataataagacagattttattgttaggaaattgttgattttgatacttttgctgttttgttgggaaaagaactgtgaatatagtaaaaaagacccacttatttattttcctctgttactatgattattgatgttattatgtttatttttgagaaggttactaatgatgttggatcccaaagctaagtccaaaaaaatttgactttacttctccccacagtttgcttatttaaaatatctattaatataaacaaaatttattgttattttaaggaagactgtcctaaagatatattaaatactttttagttacttagtattttatgatttttattgctaatatagaatttattttcaaaaaaatcaataaataaggtatataaaaacttgaattactgatttcttttctccctgttttaacagtatgtgattgtaagcagtaagaagattcttttctatgacagtgaacaagataaagaacaatccaatccttacatggttttagatatagagtaagtgtttttgttagaatatttagaaactatatcttttaaagtataagagactaacaatgcaatttattagtctcatagtatagctcctactgtaatattgttacattttcctgtgatttgcttcatacagatgaaagtctgggatacagggttagttaaaacatctttatttcatgggcctttgatacattattttttgaaactaattagaaaatttctgacatagaggtttctaaaaatcttaattaattatagaattaatagaacaaaatattctgagttcctaacatgggtcaaagtagtcagtgtttaacgtctgatgtaagtatagaataattaatatataatttgatccttgggtgatattttattcctttattcaaaattttttatagcaagttatttcatgtccgaccagttacacagacagatgtgtatagagcagatgctaaagaaattccaaggatattccaggtaaacatagttttgtttatatttggttggttggctttgttttgtttttttcacatttagaagttctcaagtgacatgacatgttaaatctcttcattctttgaccctcttcaggttacctttatgtttcagtcctatttaaagatggtttgttgctttgtgacttttgtgcttaattctgtttgggaacgttttcattcctttctccattttatttgttaaagcttgcggtgtgtttgtatcatgtttctggtctttgctatatttttgtttaaggttggttatgacttttttttaaacatgaatttttccctttctgtttttgtttaatctcagctctctagaaagttagaaaagtcagttatggaggtaaattttgtaccttgtagcccttttacctccgatttaaagtgaagccacattcttccctttactacttccattttaaaattagtcaaaccaacaatgacttactgatttccttctatgtaagagtcgttgtgcttggtgtactgtgtggaagttggctccttgttttctggatgcttgtcatgtttatttggagtttaatacacatcctttcctctttcttttctctctcaactctcaaaatataggacttttaaaatgaagctgtgctcatagctgttacccagttttctgttaagtattacaaaacaccaattagtgtgattgccacatttcttcaagtgattattttgaacagtctctcccagaaaaacttcctaacacctatgaagttaccttttgctgacctattctgatagtgctgctaaagcatgggtgttataaagaaaataaggaggcagcatttgaacaggatcagttcttttgaaatgcaaaccaaagtgactgtctgatgacttttcttatataagctcttgattaagtttgcgtaatcaagagcttaagtttgtacttcagatacattttcttctctttgaataatttaggctaattttattttacttacactatcagaattgttcctacataaaaaaatagcatgtttggaaatcacttattgttcttttggcattcatagattctgtatgccaatgaaggagaaagtaagaaggaacaagaatttccagtggagccagttggagaaaaatctaattatatttgccacaagggacatgagtttattcctactctttatcatttcccaaccaactgtgaggcttgtatgaagcccctgtggcacatgtttaagcctcctcctgctttggagtgccgccgttgccatattaagtgtcataaagatcatatggacaaaaaggaggagattatagcaccttgcaaaggtaaatgataaattacttgctccatcgatattggttatgttcagatcattttaagcacattaatttttttttctaatttttctttatagtatattatgatatttcaacggcaaagaatctgttattactagcaaattctacagaagagcagcagaagtgggttagtcggttggtgaaaaagatacctaaaaagcccccagctccagacccttttgcccgatcatctcctagaacttcaatgaagatacagcaaaaccagtctattagacggccaagtcgacagcttgccccaaacaaacctaggtaataaactaaaatgtggtaaggaaaaaaaaaaagtctattaaaatattttgctatttatgttcaaactacaaattttcctaattagttttcctttgctttgtattttagttaactatggaataccaaatgttggaactgtcttaatgtgcatgtcatgttcatcgattcagatgaaagtaatataaacttacttactaaatcacacacatacagtaaattcaaccaaaaatctttaaagatttttgttatgtttatttgtacaataaatcctcacttaacattgtccataggttcttagaacttacaactttaagcaaaataatggctggtcctggaattaagttgtttccttcaaaattgttctgttataaccttgatgagaagaaaatggttttgttatacttcatttagcttaaagtcatactttccaagaacctgtcgatgatgtccagtgaggacttactgtataataatataattttcagcttttataagcacttgagtaatttaataacttaaaagatagaattaacattgtacacagacctcacattgtcaagtgcacacactgtgtttcatattataagcttttattatgttgggtgacttgggaggcaggtttaaaatcagcttaagttttaaatcaaatctataaa

SEQ ID NO: 92766 - DNA, 3581 bp, Homo sapiens
tcatgtgtatataatgaaatacagtcatgggtggaaaggcaaaacacgtaatttacagtaaaacttccttcaggccaggtgtgttggcttatgcctgtaagtaatcccagcactttgagaggcctaggcgggcgatcactcgaggccaggagtttgagaccagcctgaccaacatagtgaaaccccatctctactaaaactataaaaattagccaggtgtggtggcgcatgcctgtaatcccagctactaaggaggctgaggcaggagaatcacttgaacccaggaggcggaggttgcagtgagctgagattgcgccactgcactcctggttgacagagcaagactcacctgggtgacagagcaagactctgtctcaaaaaaaaaaaaaaaagaaaaataagaggtttaacaatattctaggatgtttctcatttgaatcattttataacataaattgtgtaaattgggatgtgattattttttcctctttcatttcttagcttgaggaaactaataggacactaactagtgatgttgccaatcttgcaaatgagaaagaagaattaaataacaaattgaaagatgttcaagagcgtatgtattaacaaaaaatgtttatttttaatatacctaatgtttatcagctgctgtaattaccaatgtaattttaacttttttccatgtttcagaactgtcaagattgaaagatgaagaaataagcgcagcagctattaaagcacagtttgagaagcagctattaacagaaagaacactcaaaactcaagtatgtataatagaatctaaatatgattttgaattttgtctcagtttatctcttttacattttacttctagcattacaaattggtagcagtagtcatcgaatgtaccaatatttgtgaagtcacaattacctgatttttgccaggttgagagaagttagatttgattaatattgttaaattctatagcaactaaaatttttcttaatatttccttttggaatcacattctctttcaatttattgttgtaatttaatgtgtttttctacttttaagaactgttgggattgaccatttgctgacaacctgaaaagtgtcagttagttcactctctgccaactcctacagttgcatatgtactgcatgaacaggtggggtactagatactcttcactgttgttgcacatagaatattttattaatttgatgtcactgcaaaatgttcttcctccagaataaaagaagaaaggtctgcctattaaagtctctctagaactaaaaagtcaaaatggtagaaagcaacatcagatcaattctataaatatttaaattataattctcagaaaacacgagtaaaaatctaatggctcattggatggagaaggatgatgagtagtaaaggaggtgtattatttaaatattatagaaagtgtttctttgtagccctgtatgtagggaaggagagtatttgtgattgtataacttgttgctcttgatgagatactgagaaaccataaacgtaatttattttatttatgtattatatttatttttacattttttaaggctgtgaataagttggctgagatcatgaatcgaaaagaacctgtcaagcgtggtaatgacacagatgtgcggagaaaagagaaggagaatagaaagctacatatggagcttaaatctgaacgtgagaaattgacccagcagatgatcaagtatcagaaagaactgaatgaaatgcaggcagtaagaatactttttggactctagactgaagacttctttttaagaagtagaattattttcatgtctgtgttttactggttatagaccatttctatttaataattattattgaaccaagaagcaaaatgttgagttatgttgcatccaattaacttattgtaattaaatttcttatagcaaatagctgaagagagccagattcgaattgaactgcagatgacattggacagtaaagacagtgacattgagcagctgcggtcacaactccaagccttgcatattggtctggatagttccagtataggcagtggaccaggggatgctgaggcagatgatgggtttccaggtatggatttgttttcagcactaatatttatcttaaatataaatcagttgattgttttaagtcttgcgactgactgctctgaaggaaaaatgtttgtaatttctttaagggaaaacctactccttggagtaaggattcaagtaacatttcaaacttattttatttattgattttttttacaaagtttttcataaacatacaaaagaaaaactccacatgtctagtttttaaattattatattagctctatttttaagctttcgtttcattttctcttctttctgcattcttacttccttttatgttgggtgtttagttcatatcactcagtcacacactatggaatccatgtcattcacctaccagcgttcctctacttctctcaatattgccactaagccttccagttctcacacgctccttgactctgattctgactcagaagaagaatctttgccttacttacccatttcatcggaacctaatggtacaggtgatatcctgaaaatcttctcatctttggagtttttcccactacccttaattttagtccttttgaagattttttatgtaacattaactaataaccactaactctaatatgttgttgtagactcagttaaaaataaactgctgcatgaataaagaatttgtttttaaggtattttctcatggcattgctgttataattgatagatgccaacttgcgagaaatggagtaatacattatattgcttaagagcgcatggtttcactgcttgttttagccattttcaaccaagaagaaattcttcctgaagtttcataacaagagtggtggtacagaaaaagtacttcgactgattcaaaggatatgcttaaggtttttactgagtacttactgacattatcctaggcatatgtccttcataagaaacatgaaagaatttggcccgatcgttaccctgaaagagattacagtttaaatgaaaacagcagagagttccgtcattcagagtcagaggcagccctgtgtgatctttcaagactgcagtttcctcatctaaattaggaaaataattcctgttctgtgcggtttttttaggattaaagagaatttgtgtaaagcatccagcacgattgatacataatagaagttaaataagtgatagctacttttactattagaataacttccccaaatgctatttcacatatttatttcattaaaagacattgatcaaatgtcattaaaacaaattccgaggattcatacacattccttagttgaattacaatgttactgattttgatattttggaatttagaaatcttttgattattttgctgcttattaaccaaattttatctaaaatgtacgtaattggtcaggtgtggtggctcatgcctataatcctagcactttgagaggctgaggcagacagatcacctgaggtcaggagttcgagactagcctggccaacatggtgaaaccccatcgctact

SEQ ID NO: 92767 - DNA, 1029 bp, Homo sapiens
tcagtcgaagtactttttctgtaccaccactcttgttatgaaacttcaggaagaatttcttcttggttgaaaatggctaaaacaagcagtgaaaccatgcgctcttaagcaatataatgtattactccatttctcgcaagttggcatctatcaattataacagcaatgccatgagaaaataccttaaaaacaaattctttattcatgcagcagtttatttttaactgagtctacaacaacatattagagttagtggttattagttaatgttacataaaaaatcttcaaaaggactaaaattaagggtagtgggaaaaactccaaagatgagaagattttcaggatatcacctgtaccattaggttccgatgaaatgggtaagtaaggcaaagattcttcttctgagtcagaatcagagtcaaggagcgtgtgagaactggaaggcttagtggcaatattgagagaagtagaggaacgctggtaggtgaatgacatggattccatagtgtgtgactgagtgatatgaactaaacacccaacataaaaggaagtaagaatgcagaaagaagagaaaatgaaacgaaagcttaaaaatagagctaatataataatttaaaaactagacatgtggagtttttcttttgtatgtttatgaaaaactttgtaaaaaaaatcaataaataaaataagtttgaaatgttacttgaatccttactccaaggagtaggttttcccttaaagaaattacaaacatttttccttcagagcagtcagtcgcaagacttaaaacaatcaactgatttatatttaagataaatattagtgctgaaaacaaatccatacctggaaacccatcatctgcctcagcatcccctggtccactgcctatactggaactatccagaccaatatgcaaggcttggagttgtgaccgcagctgctcaatgtcactgtctttactgtccaatgtcatctgcagttcaattcgaatctggctctcttcagctatttgctataagaaatttaatt

SEQ ID NO: 92768 - DNA, 2093 bp, Homo sapiens
ctccagcctgggcgacagagtgagactccgtctcaaaaacaaaaataataataattattattattattatcatcaagggttccaaatgagtttttgtttacgtttgttatatctaatgatttgtattgtgttagaaattaaaactgagaaaactttaaaacacaggaacacacaaacacgttattttagccatcagaatgatgtaattacaagtcatgtggcctcaggaaaagtacatacggtatataacgagggaatgagagttttaaaaaaaaccatggtgctcagtattatgaaaatgatttgaccttatgggttctgtggaagaacctcagagactcccagggcttcccccagaccatactttgagagctgctcgtttaaaatatgtgtaagttatttaaacctttgattcattgtcctcacagagaacgtcaggatgcagatgggcaaatgaaagagctccaggatcagctcgaagcagaacagtatttctcagtaagttcaagacacattaatttgcaaatagcaaacagagttttggttgggatattttatttataccatacaactcatataaaaagagcagctgggcaaaagaatgtagatagtttaagagaaatttattatcattgctagaaaaataattctaagcacaaaacatacctggtgaagctgattaacagcattgttttcaggaagaaaatattttcataatgcaagaaataaaattgtaataaaattatcattttaatagttgtgctttttttgagatcagttttaaaaatatgaagtagaaactcctgttttattgatttaagccaataacatttttttgtctaaattgttaatgtttttccttgcctccttattcattttacctatctgtgctattaaatgagaaatatcactgtgatatccagttgaaaatcatgcttcttaattattacctgaacttgtattagttaattgatgactagaaataggaaagttcattaaactattcatttgctcggggacttagcagtaagaaaatatttgtatgtgttcattctcctttttgtctgaatagcttttgaatgtagaagtaatatttctgatgatgatacgcatttctgttgtattttgctatttagaccctttataaaacacaagttagggagcttaaagaagaatgtgaagaaaagaccaaacttggtaaagaattgcagcagaagaaacaggaattacaggatgaacggtaagtatgagacccttgtctctttttgttcatagctgtatactttgctcctagaacaatgcctggtaatcaccaaataaaaaattattgatgaagtgaattagacaaaaactttcacttcatagtgaaaactgaaccattaaaatgatatattgctaaaatgtagggactctttggctgcccaactggagatcaccttgaccaaagcagattctgagcaactggctcgttcaattgctgaagaacaatattctgatttggaaaaagagaagatcatgaaagagctggagatcaaagagatgatggctagacacaaacaggaacttacggaaaaagatgctacaattgcttctgtaagtcaaattcttggtgcttttttggattatagttaaattgctatatcttaaaccttctttagacatactaagtatcacagatctaaatgaaaaattatatatgctgactacaagatttttaatctagttaactgccaccttctcaatgttgtcagaggagcttactaaaagtgacttcacctgttaatgaattcaaagttaaaggtctaaagtgaaagggtcatttttttttttctttttaaacagaacttagttcagaagaatcttgaaactaccaggaaaacagttccgtgcaggttgaaaaaattgcaataaaaatttcagagagaggtcaaatatcaagtagttaggtttaccctatcaattaactagacctattgaaatgctgcggtaattaaaaagtctggtattagaacagggatattcaatcctgttcagtggaaatgaaaagggaggccagaaagatttctgcacatacaggaacttggtatatatga

SEQ ID NO: 92769 - DNA, 1670 bp, Homo sapiens
aaaatattaaattgaaaattaaggccaggtgcagtggctcatgcctgtaattccagcactttgggtggccgaggcgggtggattgcatgaggccaggagtttgagaccagcctggccaacatggcaaaaccccatctctactaaaaatacaaaacttagctgggtgtggtggcacacgcctgtaatccgagttatgtctggaggccgaggcacgagaattgcttgaatccaggaggttacaaagagctgagattgcgtcactgcactccggcctgggcaacagagtgagactctgtctcaaaaaaaaaaaaaagaaaagaaaaaaagaaaattaatagaatataaggcagcatcatttattataatttttattagtatggtgtcatttaatgtgcttttacttacaaatttatgatatgcttcttttatttgtaaatttatgattgtgtccatttttattatactagaaatggagaagaagctcttggaggaaagaactttaaaacagaaagtggagaacctattgctagaagctgagaaaagatgttctctattagactgtgacctcaaacagtcacagcagaaaataaatgagctccttaaacagaaagatgtgctaaatgaggatgtaagtattaagtgtactaatgattaataataaactaatgaattaataggtttattcatgaaggtctagtgatggtttcataattttaaagtttttcttataatagtctgcaacctgttggtttaactaaattttgatgatatactaaaggaatcataatttaaacatttttaaagttatatttaccttattatattttatttaaaaaatacaattataatattattagaaatacaaaaaaaattttagtatgaaatgaattagctacctaagggtaaaaaaatctgttttacatcaccatattttataccaacttcattgattagaaaaatggaaataatttacttatataccaagtacacaatttatttcttaggttagaaacctgacattaaaaatagagcaagaaactcagaagcgctgccttacacaaaatgacctgaagatgcaaacacaacaggttaacacactaaaaatgtcagaaaagcagttaaagcaagaaaataaccatctcatggaaatgaaaatgaacttggaaaaacaaaatgctgaacttcgaaagtaagttaattgattgagatgttttaatatgcataattatccatgtataagttaattttggtgtatctgtggattttcttttgagcattttactttctagaccatgttttctatttatttctgtacaggtaatgtgttgagtgtcactgttgtccttcgagattatattcgtttccccaacagtttttactgctgctacctaattacaatgtgatgatagaggaagtgttggtgatgaggcagaagaaaatatctgggattttcataccatgcttttagattcctcctcagggctctttctcaagcttattgtccgtgtgcctgtttgtttccttagtttcttagacttggaaatgtttgactgttaaataaacagcatgtaaatttttaatcatgtcataggatgtactctagtgtctacttgatttacttataaaatggagaacatattgttaaaatactttaaaaatattataggcac

SEQ ID NO: 92770 - DNA, 1053 bp, Homo sapiens
ctaaagcctttggtccttctgttgcatgtcattggctccttggattaagaacatggctcaccaaataattactagctatgtgaccttgtctagttatttaaactttctgtgtcttgtttcctgtgaagggacaattacagtattgttacgttgttgtgaaaatcaagtgcaataaaacatgtaaagtgtttagaaatgctattattagtactacatggggaatgtttcatttttctgcacttttgaagaccattcattaaacactaaatattcataggtttaatttttacctaatacaactttataatagatgataattagatgttgagcattaattatgaaaaagcagaggagccttaattgaatgtgaactgaagtactaaccagtatatcaagataatcctttaactgtgatgacttacatttaacactgaaatcacttggaactttgccttctgataagtaaaatagattaaaaatttattgtaaataatttagaaaacacaggaaagtataaagaaaaaagcaaagattactcataatcctatgagttaggatactattttgtaaattttctccactttctataccgttttgctttttaaaaaacaagacattgtgagcgtttccttggtcattaaaaattctgcttaaataataagcacttaccaagtgcttgccatatgccaggcagcatttaagtggtacacatgtattaaatcttcacaacctccctaggtgctgttatccctattctggagataaggaaacaggtccagagaggtgaattacttgcccagtcaaacagtgttagacccagggtttaagctcagaaagtttggttccagagtcttgtcctttaccacctccctaaaacatatttttcaacacctgcataataatgtgttaacatggaaagtcctatggagatcatagaatctacctggattgttttaaggtaaaaatagtaacactgagagacatagaatagcagtaagcagtagaatataagaaacctttgtttaaagatgtaagcatcttgtagaatataaa

SEQ ID NO: 92771 - DNA, 1054 bp, Homo sapiens
gtctaactagaatataagttcactgagtattttgatctctaacatgatgaagatactagccagatttggtcgaagccatataatactaatagataacaaagttaaccttcccataaactagactttatcctggaattgtcttaggataattttttcttttccaaactgactgtttataatgactctgaaattccagagaaaatcagtactttaagctattcttgtgaaaggcttaaaactcttgaacagaaatttattttcatattgaagcattacatgagtaactaacttagaaaaaatagccttttaattattgcatgtaattaaaatggtagattttcttagtaaaaatcagtgtagtttaaggcactaaatcaggatgataagaaatgaaatgagtactttatttacaaaaatctaattgtaagggagaaagttactgggccatatttccttgtctgtggcctagaagacagagttcaattattttcattgaggtataatttacatgcaataataaaatgtaaacatttttgacatttcgtgatatgctcacataactactgttcaaaacaagataaagaatatatcaggctaggcatggtggctcacatctgtaatcctagcactttgggaggccagggtgggaggatctcttgagcccaggagtttgagaccggcatgggcaacatagcaagaccctatctctacaaaaaatagaaaaattagctggatgtagtcgcgtgcgcctatagtcagagctacttgggagtaggactctcagtattcctgcaatgatgcaggaacattgcttgagcccaggagttcaaggctgcagtgagccatgattgcatcactgcacttgagcctcagtagcagagcaagaccccatctcaaaaaaaaaaaaaggactattttcattatctcagtaatgcctctttctattctcaatgcctacattatggtgattgttttttttgttaaatgaggacatttgtttagtgattattctctgaattgataaaaatgaaccaattcagtattaactaccatt

SEQ ID NO: 92772 - DNA, 1825 bp, Homo sapiens
atggcatatgagtagcagtcaaagatgagtcccagatttgtaggttgtgacaagatatatagtgatgctgttaataaagaataaaggaaaaatagctcatgagacagtgataaacccactttagtcctcttaagtttgagggtacctatgggacagccaaattagcatgtctgcactgcagtaggctatagtagtagaagttagaaatatttgagtcattggtatgtaagtagctgaaatcatgtgagtggaatagcccatctgggaaaagactgtgtgaagtagtgatttttttttttcttttttaggacagagtagattactctgttggtggattatgtggtttgagaaatcattttttgtatgaaaggctttatttggaaaaaagcctttatcatatttatgatatgaactataaaaatcaaagaattagaaaacctttggggtttatgtagaaaataggaggagtattggggcttagatcaccaacatttaagggacagctgggaaagcttcaggagcaacagaaaggatgcaagcagaatggagagaaccaactaagtacaaggtcggcaatgccaagggatagttttaaggggggcagtgagttcaaataagactgaaaagggtctttagaatttgatattgagaatagcattggtctttttgttgagattaagtgagcttgatacagatctcagaacagcagagtggtggtgtagactgttgggtacagtgggaagtagagaagtagagtatatagattactattctaaaaggtttgagtgaagacgggaggggaaatactgaacattctagttaagcctgttaaaaaacaagttaaggttgagcaccatggcccacacctataatctcagcactgtgggaggctgagtcgggaggatcacttgagcccaggagttcaagatcagtgtaggcagtgtttaatgagaccttgtctctacattaaaaataaaataaaataaattagccaggagtggtgacaaacttctatagtcccagctactttggaggccaaggtgggaggattgcttgagcctggggaggttgaggctgcaatgagccataatcaaaccactgcacttcagcctgggtaacagagcaagactctgtctcaaaaaaaaaaaaaaattagaaagcttttgaaattgtgagctagtctcttttttgttgatagctgcattttaaatatttaataggaaaaaagcaacatggaaatagatatgacataccaactaaaagttatacagcagagcctagaacaagaagaagctgaacataaggccacaaaggcacgactagcagataaaaataagatctatgagtccatcgaagaagccaaatcagaagccatgaaaggtatgcattttttaaagagggttttccagcagcgtcttcctaagaattgattctgtgttagctttttggttttgaaacatttttttttatatttcattgtcaaatattgggaattggagggaaaaaaactattagggaagctttacatagatattctattatttttcctttgtatcattacagtaatcatttctaagatagtaagacccaaacacaaaattacatgatcagatttttagatcagagataaattaatatttctcaatattatatacctggtaatatctgtaccactcggtatacgtgtatcagtagtaagaaggaatatctgaacttcacacgctgtatacctgttactattgatacaggtaattcttgtaatacaagagttttgtattataaaattcttgccagtttatgcaaggtaagaatttaaaagtaatag

SEQ ID NO: 92773 - DNA, 3596 bp, Homo sapiens
ctgcgacttattagctatgccatcttggcctgattatttaccttttttgaatttcattttctgtatcaagtagatacaatgctaccatctttgtaggatttttgttaatattaacaagacaacatttgtaaagtgcctgatattttaccaaaggcaccacaggagctcaaaaagttaaatcctttaaaaagtaaataatgttccaaaaatggattatttaatagtttcggtaatttttgcttgtttaaagacttacatagctagggaaagctgctgaggagctggcttgtaattaattagctatcatttattcgaaagttattgattactcctcggtaatatgaccagcactacataggaagatataaaagaagagcttatattctttactttgagcatattcagttgagtactctgaatatttgttttagatgtattcatttttatccgactagcacaaataatgacaatattttcaagcaaataattcatagaaaagcagcagaagatatctgaggtggtattctttataatgaatttgaaactttgtgtcatagaacaattctgccaaagttagagcttcttatgcatggttacataagtatgtttcatatatacatgtgtactctgatagaaagcaagagatgggggagtttttccttttatcaatataagtcacattaaggaggtacaaatactgtaccattatagaggacattatgtttagtggaaagacaaaataagcttatcattgttttctttaagcctctcatctttaaatatgaccaaaatacgtaattacagtttcttgttttttgacagattcagaaaaaactgtatacattagaagaacatcttagcaatgagatgcaagccaaagaggaactggaacagaagtgcaagtatgttttgtagataattaaatattacattataaaatttaagtttaaacatttactgaaaaaagagcggccaggtgtggtggctcacacctgtaatcccagcactttgggaggccgaggtgggtggatcacgaggtcaggagttcaagaccagcctggccaagatggcgaaacccagtctctactaaaaatacaaaaattagctgggcatggtggcgggtgcctgtaatcccagctacctgggaggccaaggcagagaattgcttgaacctgggaggcagaggttgcagtgagctgagatcatgccactgcagtccagcctgggtgacagagtaagactccatctcaaagaaacaaaagaaaaaaaaagaaaaaacagaaacggagagctatggcctggtgcagtggctcacacctgtaatcccaacactttgggaggtcaagggaattacttgggaggctgaggcgggacagtcgcttgaacctgggaggctgaggttgcagtgagctgagattgcgccactgcactccagcctgggcgacagagcgagactctgtctcaaaaaaaaaaaaaagaaaaaagaaagaaagaaatggagagctacggccgggtgcggtgactcacgcctgtaatcccaacactttgaggggccaagggagctacttgggaggctgaggcaggacagtcgcttgaacgtgggaggcaggcattgtagtgagccaagattgcgccactgcattccagtctgggcaacagagcaagacttcgtctcagaaaaataaaggagagctaccaagtaattatgtaattacttttaaatttatagactatgttttattgtaaattagaagttatttactgtttctttctgaaattctttagatctgttaatactcgcctagaaaaaacagcaaaggagctagaagaggaggtaaagttgccccacttttttattaacatttttgttagtaaaaatctttgatgtctgacttacctaaggagctctcttggtaccatagtaatacgtgccttgaaacctaccttgtagtattggtggataggactaaattatagggaaatcatgttataaataggcttcattctgttatgtttttgcaaacttgagttaattcagtatgtgtaaatatttcaagggaaaaaaatgctattcataacattttaggccaaagtattaaataatgatagttcagtaattgtggaaatttacaggaagtttgaatagtaaacaaaacatttacggtctttatgatttaagagtagtgtgctagtttacaatcatagaaagcattattacagttttaacaaaaaagcagtgaaagcctttttgagatcttttttatctgtttggaatagcaagtattttttgttttgatttcatttttatacatacttttttgataataactttaagcattatttcagattaccttacggaaaagtgtggaatcagcattaagacagttagaaagagaaaaggcgcttcttcagcacaaaaatgcagaatatcagaggaaagctgatcatgaagcagacaaaaaacgaaatttggaaaatgatggtttgtggtgtagaatattaattactcatcaagaaaaaaattaagtgtgtgtatgtgtgttatgctaagcttgccactgaaatgctttttatcatagttaacagcttaaaagatcaacttgaagatttgaaaaaaagaaatcaaaactctcaaatatccactgagaaagtgaatcaactccagagacaagtaggtggatctaatttgtagtaaagatactgggttttatttttaacgcgataacattagttttaattgacagtgttgcaaaaggcctttacctctaattttagaaatcatttggaaaatatttttaggtttttgtttattttaaatagtttctaatgggggaatacattgacttattttcattacatacatgtgtgtttgtttgttgttgtttggttttgaatggaataacagctggatgaaaccaatgctttactgcgaacagagtctgatactgcagcccggttaaggaaaacccaggcagaaagttcaaaacagattcagcagctggaatctaacaatagagatctacaagataaaaactgcctgctggagactgccaagttaaaacttgaaaaggaatttatcaatcttcagtcagctctagaatctgaaaggagggatcgaacccatggatcagagataattaatgatttacaaggtattgaagtcgtggttgcacttgaattaattttgatgattcttattttaaaaataactttagatgatggatagtgtgctggattggacatttctgaatatactattatgtaaagttagaatattagaaatacactgatacaaaattttaggaacaaaagatttaatttcaaatagtatgattttaagtattaaactcttcaggtagtagattggattccatttgaattaactataaagcacaataccaacaagtataaaacttctgctcacaaacaacagctccaaaatagaaggtggcttgcaaactttttattcctaattgaatgtatatactttgtgggtttaatgttttaaaaaaacgttgcaatttttaggtagaatatgtggcctagaagaagatttaaagaacggcaaaatcttactagcgaaagtagaactggag

SEQ ID NO: 92774 - DNA, 3386 bp, Homo sapiens
taagtttaatatacatgtagagatatactttaccagaataaatatggatagcttcaaacataatatatgcattctttttaggaaagggagagatttttaaaataatatttctattagggaagttttgaataactcttctctgccgaaagttagacctatgtctgtttatatcctgaagttattgtcattcagtcgtggcacatgcaggtgaatttttttacttgatagtcttaacgtactttcatttgatgcaaactatagacagaaacattttacttttcatgacatttattgtgcattacagttttttaaatctgtctaaagagatcacatactgtaacttgggattgcttatttttgagaaacatttaagctgaagcttttaatacaaatatctcaaatttacttgagatctttattttggttaaactgttgacatagagttaatctttttattttataatttttaaataatacaatctttaactgcattgtttagggaggtacgacttgggagaaatggggtggaagaaatcagacagcatcctttctttaagaatgatcagtggcattgggataacataagagaaagtaagtcaataaacctaaatattttcattccatcacattctgaaactcataagttgattccttttttgaaataacaagcatatttgataacacttaatgctaactcatttttaaattgagaaatttcatttcaaatttgttctgtggcaatatttataacaatattcctcaatatctttgcaaactattagcaatatttctcaacacttttacaataaacattacacatttcttaatttgccaagttaagctttgtagatctcaataattttcagaatcaagggaatgcaatcctttaatttaaatgcgtttgacttgataaatcaacaattatttatggagaccatactctgctaaatattgctgtaagcatagtaacttatttttactatgtatatatgacattgattcattttaagggtaagaaatatttctgtttcgagattgtagaaaatggaggtctctaaattctgtgcaaattattgctgcttgtaatttttaacaactagaataatatgttgctttccttgtttaatctatatttaaaagtgatctaatatagcaataaattacaaaattttaattctgtgaatcgataaaatggcaaatgcgctgctacaaatttatatagtgttattaaataataaataatacatcataataaaataggatggtttatatattttggttgtgaatgaaataatttatttcttttcttttaatagcggcagctcctgtagtacctgaactcagcagtgacatagacagcagcaatttcgatgacattgaagatgacaaaggagatgtagaaaccttcccaattcctaaagcttttgttggaaatcagctgcctttcatcggatttacctactatagagaaaatttgtatgtggtttattatttgttaaattttactgtttttagaatctagctataagatgatgtgttattttgagactcaattataggagataaagtattaatttgttttttccaaaaggactatcatcagaagaattcttaattttattttattatttctgaatgttatatgttattcatttataagttattgcaagacaccattctacattcttttggggatatacagtaaaaacaaatacctatttttgaagaagcttgtcatctcgtgaaggatataagagaattatatagtcataaagaagggtaaaatgtgacagttgccttaagaaagatgctgagagaatctgggatggttcagaagaaaaatagaagtcatctctttggggtgggagtagggagaaataggtcagacctctgggaagaggtggcattttagccaagtctaacaagaaaaggttttgagtggctgaaatgtggggaggttaggggacagttgtgaggtgttgaatagtggaagcaaatgtttggaatgtgagcatacattgggagcagagcactcgcattgagtccagtagcactcaaacatagagcaggtgctactatgtcattacagtttggaggactcgatgagactatgtggttttcttgcctgtagtctctgcatctagcagaaagtctgacacaagatcattcaataaatattggttaactgaagtgagtattggatgtaagattagaaaatatgttgaggccaggtgtggtgattcacacatgtaatcctagcactttgggaggctgagatgggaggatagcttgagcccaggagttctagaccagcctaggcaacaaagtggaaccctgtctttacaaaagaaaaaaaaagccgggtacggtggctcatgcctgtaatcccagcactttggaggctgaggtgggcagatcacctgaggtcgggagttcaagaccagcctgaccgacatagagaaaccccgtctctactaaaaaatacaaaattagctgggcatggtggcacatgcctgtaatcccagctactctggaggttgaggcaggagaatcgcttgaacccaggaggtggagattgtggttgaaacgagatcgtgccattgcacgccagcctgggcaacaagagcgaaactccatctcaacaacaacaacaacaacaaaaaagccagatgtggtggtttgcgcctgtaatcccaggtactcagaggctgagatgaaaggatcacttgaggccaggagttcaaggttggaatgagctgttccagcctgggcgacagaatgagaccatgtcttaaaaaaaaaaaaaaaaaaagtgagttttggggaagaataatcaacagatgattgttgtgtgctctgctaaggggcttttgaccgcctggcattgggaagccactgaaagctgttcaatagttgaatgaggcattaaagatatttgagaagcccaggagttcgaggctgcagggagctatgattgtaccgctatactccagcctgggtgacagattaaaaaaagaaagaaaaatgagataataagatgaagaggtgggaagtatagtttcatttagtgagtctggtgcaaacaaaattaaagactagttatcccgtaagagggaaaggcaagaaaagtttagcatttgattgattgattgatggatggattgagatggagtctcacttcgtcgcccaggctagagtgcagtggtgcgatctcagctcactgcaacctccacctcccgggttccagcaattctcatgcctcagcctcccgagtagctggtactacaggtgtccaccaccatgcccggctaatttttttttttttttttttttttttgtagagataaggtttcaccatgttgatcacactggtctcgaactcctga

SEQ ID NO: 92775 - DNA, 1435 bp, Homo sapiens
gtgttgtataacatatctctagagaatgatttcaaaatgctgatccagcccaagcattaaaggaccctgactgatctgaccccacataggaactctttctcttggactattcagtaaaacatttcctctcttaaattaaaaaaaaaaaaaactcaacaaattcgggagttatcattgattttattttgcttttaagggatgagggatcattggtggtgttaaattttaaatatattctttgatttagaatataacaatatgtctgttgttttgactgggactctgtgcccgtagaatatttgttcttccctgcatgtgacaaatttaaacttaacatatttaagtactaggtgaaaagtgtttcctttgcattctctgttacattcagtatcttctttcttgaaattttaggggatactccattttatgcggattcacttgtaggaacatatagcaaaattatggatcataagaattcactgtgtttccctgaagatgcagaaatttccaaacatgcaaagaatctcatctgtgctttcttaacagataggtaatgtacattgaatttctttgtagagaagccctttatgttaaatttatagaaataaaagcatgcctagcttattaacatatgaaatcagtctgcctctcattacccaagtagcatctaattctgggttagccttttccttctgctaagcctggtgttgggctaccttgttgttatgtgtgtacagcccagttgtaatcgaactctaaccttaaccctcatgtctaaaaaggaaaaaatagaacgtggtaaaacaatggatttgaaagaaataaaactttcgtgttgttcacattttatcctccaagctggttattccatattactcttatataacttttgagagtattttgtgtagataaatactcaacaggttataatcttaaaaactatttgtgttagacttgggagtgcttccttcccaaccctttttaatttgcatttgaatatgagcaagactatcctggaaattccatacttttaaaaacaaaatagatgaacaaaggtgtgaaaacctgcccccaaaagataagctagaaaactatttgatttctcttctttgttcaccccattccatttttttctaatgtcccgttttatatttgtgataggagtcatcctgtcaaaggaccaacatatacaagaggatgctcacaccctcgttcaaacttacacatcagctttatgatcttggggaaattatttttacttttttgggaaataattttactcatccataaaacagtggtctcaaattacaaaactaagggcatttctagctttaatatgctaagattccttagcacatcttattgcttattaatttgttacaagcattactgcagtgactatcctcacacattcatctctgcatactttttatag

SEQ ID NO: 92776 - DNA, 1246 bp, Homo sapiens
gccacagctgcatatttctaaatatatagcttggaagtatagctttcacacttctaagatcttttaatttaaacatttgatctatttcttcattttttttcttggtaatacaagagccaattctttattcagtctccaaactggggccctttgttatcttgattacttcagtttattctggaaatatgaaagcttcctttctctaatgattctttttcctgggtcagtgtccttaagaccacattttgtactaacctcataactgtagtgtaagaaataagaaaaagaaaagttgttgatttgcatggaatctccattttaccaaacttttttcttctttcattgaggaagcctcctgtattttagagttcacagtttattcctatctcccataatttaggcattttaatgcattttccagtgtatttattctctgtatcctgaagtcatgtcagcagtgaagttctgttggttagcaatatgtaatcattgtatatctagtaataaatggattcattgcatttataagtgtgtgtttttacactgaactgttttttctttatctctcctgttcatgcagacaggcatggtacattgtgatacagcagttggaacaccggattatatatcacctgaggttctgaaatcacaagggggtgatggtttctatgggcgagaatgtgattggtggtctgtaggtgttttcctttatgagatgctagtgggtaagtaaatattttaacttcttttttcaaaatgcttcttataatactttatttcagtcaagaatttgagaatataaggaaattaattgcctttgtcgtagggaagaattagatttctggaaactttgaattagtagtatctgatagggcagactgttaattggaaaattaataccaagcctgatactggcatggtgattaaatagaataagtagaatgtaaaaagaattaaaaatatatcagacatttttgaattaaaatattagaacaagaagcaagtttacagcttcagtgggccttcattctaagattttccttcttttttttttttttttttttttctgaggcagggtctcgctctgttgcccaggctggagtgcagtggcatgaatgtggctcactgcagccttgaccttctaggctcaagtgatcatcccattttgcctcccgagtagctaggattacaggcacatgccactaaacccggctgatttttctcattttttgtagggagtggtctc

SEQ ID NO: 92777 - DNA, 1027 bp, Homo sapiens
aataaaaatctttagtcctacccaagtatttattctgcaagtggttattcacactgatatgcagcttatccttccagtcttcattgtgtagaactttacatttagttgatttggatttcactgcatttcttgaacaagtttataccaggttgttcctgtttctttatgctctttttttctatctaacctgtcataccatcctctctcctttaaaccctagcttatccgtcctttacagcctaactttatgccaattctttcttatcttgccctttcttctccttcctctgaacctttgaatgctaagtaatttttcctttggttgtatgtgtgtgtttgtgtctgtctgtgtgtgtgtctccagtaagttggttttagtagctaagtctcatataattttttaaaagcttaatttctgtggatgtatgtgaaataaggaaattttctttaacctaataagcctctattgattttttcccccaacagaagtctagactataggacagtccatgataaaaattaattgtataccctgccttttgaagtcaggcactgtcttgttcataatttgtcctttgtaataatccacacaaagtgttactcccatggtttgctcaattatttccataacatttatttttaaatttctattcacactaaaatagcttttattctctatttgctatatatgtgggaaaataaagccattgagttagttctgccaatttgagaatgaatgaaaagatcttttctataacaagttttatataaagttacataaattaggtttacaaaatgtgttcaacctccttttctcaaggtagccataatactcaatattaggtagtttgtatagcttccttatgaggaatgtgggcaacacactctttactgggcaggtaaaggaaataaagggcacttaatctctcaaatcattgcaagttggacagagctagaggtaaagaaataccatttagcaccatacttctctagtcatttaattttgcagcatgcagacacacacacc

SEQ ID NO: 92778 - DNA, 1087 bp, Homo sapiens
gttttcataactgtatagcacccaaacaagatataaccaacttaaaacatttccttaaccaacttaaaacatttcttttgtaatcatttatgtagctgtagagtacttatcaagagaaataaaaacttagcttagttatcttcctcatagactgttgacaagcatttgctaccaatcaaaaccggttcatatgtataatttaggtgaagaaggacacaaaatctaaattaaggtaaataggtattttcaccaccattgttacttctgcatttttttctttaagaggaggtaaaagtaagtaaagaaatttatgttacaacctcctcgtcactccctctgcatcaaccacacagaataaatttgggaacatcatctgttccgatgctttacctgttgatcaattcatattatgattgataggttcagtggcattaacctcgtagctaattatgatactgatttattttggttgtaaaatttatatatcttgcccttttctctgtaagtgtgcagtaagtaattcttgatggagagggatcggttctgtttcctttgtattaccctgttggtcctaggagtcgacttataaatgttaatatatattgacagcaaactgtatttcatcttttgtatgttttttataactttccagtatgcttataaagccaatcttatttcttggtagttacctagtcaaatgtttattttgagttaaggtaattttctctctacctcttaacttgttcatgccacctgtatgacattcacttttattgatcattctaccttcatcagcattccaacttctaagctcatctcagattttacctcggctttaaggttccttctgataatcctgacctgactgatcattctttaatgtcataatgtccataatttcctcacatagtcagaatttgtgctatactttatgggccatttttgtctatcttaatctatccagctagaacttaatatccctatatatttttggtctttttgatagagtctgttatattctgcaacccttaatcaatgtttaataggtggagttttttattgtacccaaagctccctcttgtggtat

SEQ ID NO: 92779 - DNA, 2420 bp, Homo sapiens
gctgagaaataggtgataaataagttaaaaatgggatgtaagatggtaataagtacgatgaagcaaaaacatgacacagagaatggaatatggaatatgctggcagcagaaggggatggtgagctaatatgtaatatgctggcagcagaagggaatagtgagctgaaagtttaagtagattgatcagagtagacctcattgagaaggtatgatttgaacagggatttaaggaagtgagggattgagccagctacaggaggtgattccaggcagagggaacatgcagagatgatatgggaagtagttagggggttttaagcagaggaatgacaggaaatggtttatattctagaaggatgactaggctgtggataagagagagtgacagcagggaaacaagttgggaattgaaataaaatatgttgaaccagggtggtatcagtggaggtagttagaaatggttggattctgaaacttcttgaaggtagaactgacaggatttgctgataaatttgataagttgtttgagagaaaaagaggtgccagaggtttttttagctagagcaactagaaggatgaagctaccattttaccatttactgaaacggggaataactgtgggaggaataaattcgggtgaagattaggagtttcagttttaggcatcctattagacatccaagtattcgtgttagcagttgttacttatctaataaatgttaactgttataatcattcattaaatatttattggctctctggtgaacaatttgctatgttcttggaattaaaagggtggtcaaaaatagacaatcttcttgcctttatgaaatttgcagtctaattggaaacatagaaattggtcaaatgacctcatcattggtagtatttttttcctaaaacacaaacaaacaaaaaaaccctttaattagggcacctaaagagaaataagagtgacttaacaaaatcataggtatcccttgatatctaaatttattaggttcttacgggcagatagtgagggatgtgtatacattgatctttcagactacttacataaatggttttttttcagtagacatatattttaagtttcttatttaacaatatctcattcttaaagttggttagcttaattaatatgagagaatgaagcttcacgaatttaccttcatttagttgaaatgagagagttgtatattgaatttagtgtttaaaagtattacatatttcatgaaatacttaggttgttagaaatgttctcctttgtttctttcattaaaaatgttttgcttttactttttattagctaaggaccatttttttgtaactgaagtctttaataatagcattatagtatcatctatttacctttctctcataacatgaaagtattaatttttgtgttttcaaaaatcaacaggttcgtcacaaggcatcgcagaaggtttatgctatgaagcttcttagtaagtttgaaatgataaaaagatcagattctgcctttttttgggaagaaagagatattatggcctttgccaatagcccctgggtggttcaggtaagcatactaacttttataagtttatttcctttttttatgagtgctttattattcatgagttgatttttgtgtgccaagtcttatgcttcatttacatggtaacagtgcagttatttttaggagatttgattcaaaacatttgtttaatgttccaaaacagtatgtccacatagatatgacatgtaatacttacttaaattgttgtatggaagcaagtattacttgcagctttttcttcttgataaagaattggcttgaataccagtatgccattgtttcatacccacttattcttgtgatttacatagtaggaacatagtaaattcattgaatcatctggaaggatatatacatattaatattccaacatggcacatgtgtacatatgtaacagacctgcacgttgtgcacatgtactctagaacttaaagtataatcattaaaaaaataaaaagtttgtgtggccaggcgcagtggctcacacctgtaatcccagcactttgggaggccaaggcaggtggatcacgaggtcaggagattgagaccatcgtggctaacacaatgaaaccctgtctctactaaaaatacaaaaaaattagccgggcatagtggcacacacctgtaatcccagctacttgggaggctgaggcaggagaatcgcttgaacctgggaggcagaggttgcagtgagccgagattgtaccactgcactccagcctggcaacagagcaagactccgtctaaaacaaaaaaagaagcttatgttacattaatcagcctatcttgaaaagaaaaaaaacaacaaaaaacttcctacaataaacatttagaaaattctacaatattgtggctccta

SEQ ID NO: 92780 - DNA, 1048 bp, Homo sapiens
gaaacaacatcaaaaattacaaattatgatacctaccaggaagaaaacaaatagggttctatggttgagaacagtgagttcttagttcagttagggtggtcagagaagacctctttgaggagttttatatttaaactgaatggataaggaggtagtgtccttatgggagaggttgaattaggtactatgatgggtttttaaatacctttccagtacccataaagatcctgaggaaagtttcgttatattagaggaactgagagaagataagtgtgtctgaagtatgaacaatgggaagaaaatgacaagatttaagtcgggaaggtggacataggctagatcatttaggaccctgtagacaatggtaaggtgcttgatttcttcttctttcttccatcgctgaatagggtaactatataatttgttgtacaaaaactggcatactctgagtaaaaaggagcaccaactggatggaatactgggtggacagatgtaatctagccctgtttggtaaaatcatcctaattgtgtacataacatatgtagaaatagtatagattctgcctgcagattacctttaaatattattattattattattattattattattattattattattatacttttaagttctgggatacatgcacggaacgtgcaggtttgttacataggtatacgtgtgccatggtggtttgctgcacccatcaacctgtcatctacatttctcctaatgctatccctcctctagcccctcaccccgtgacaggcactggtgtgtgatgttccactccctgtgtccacgtgttctcattgttcaactcccacttatgagtgggaacctgcggtgtttggttttctgttcctgtgttaatttgctgagagtgatggtttccagcttcatccatgtccctgcagaggacatgaactcatccttttttatggctgcatagtattccatggtgtatatgtgccacattttgtttatccagtctatcactgatgggcatttgtgttggttccaagtctttgctgttgtgaacag

SEQ ID NO: 92781 - DNA, 1988 bp, Homo sapiens
aggagaaggagttgaagaataaagggaaatctacagagatgctgaggaaaataataataaaataacttggaaagagacatcctcaaaggataatcagtggaaaccagctttgctaaagtaatagcactttattgtggtacttgtaacatgactgctaacgaattataaaggtatggtatagatatttggcataaataagcttattgcctcttaatgtttgctctgtagattaagttatgtcaaagaccacaagctgatggttcccagctcttgatttatgagccaggaactgtcctgtcaaagcagtttaagtgaaattcaggccctatgaactagaacatgtagccaaaatattctaaagttttgtagatatcctacagatatatgattttgttgaattagtcaatttagcattgtgccagccactacgcagtctcacaaatgaaagtatgtgttatattcctaaaggagcgtatgaagtagacatgttcacaagtaatagattattttaagtgctatggaaacacatagaggggagcatttttgcatgaagaatcaccaaaagtgaagtcagtcagcatttttctcatattcaaaagccatcttatgcctatcttgtgtgattttattttatataaatgaatatctttttccttctaggtatatttgtttttctgtttagttatctcatatgtaaatgctagtttaaatatttaactgttttctaccagctgacaaatatattttagcttctgttgatatctttataacagaagtttaaaaactgttcttgtcatgttctgagtcaagcataggtaataatactgtataaattaaaattggctcttaatgttgtatggattgctttctctaatgaagttaggaagcattcaaaatttgatttgttcttaaagtaagtgaagatttgaagagtggtgtaaatatatatagaagaaggactatgttagcacaactcctttttttttttttttttttggagacagagtctcgctctgtcacccaggctggagtgcaatggtgtgatctcagctcactgcaacctctacctcccaggttcaagcaattctcctgcctcagcctcctgagtagctggaatcacaggcacctgccaccacacccagctaatttttgtgtttttagtagagatggggtttcgccatgttggccacactggtctggaactcctgacctcagatgatacacctgcctcagcctcccaaagtgctgggattacaggcgtgagccaccacacccggcctaagcaacttctttttaacactgttgacatattttaaactatatttaacaacattgctggaatgactatttgagataacctgctaattgaacacaaatcagttgaaaatctagtctatctgctgtaagagggttttctagtttcaagtctaggataattcattccttaaattcccactccccacctgtgttttcatagtcctttcctgtgcatttattttcagtattctataaattttacaacagtatacaaatcaaaggaattgttactccagcttggtcatttaatataaaagatggatgtaagccatgattcttgtcattacttacttggctctttgcatttaggattcttgttatatacagttactgtatatcaatccttcaaatttcaaaaaattttttttacaagaaaagtatattttaaagataaaattaatccaaaagtagtgccaaataggactgcttattagtatagatttatgtatcactaaggataattactaattaatacttttacacaatttaaaaatatataaacaccgttagctacataaacttatttagacctaacaacaaccttatgatgggtattatgatactagctttatagattgcaaaactgagtctcagagaggtcaaatgacctgcccaaggagaaagaattaagtggcagagcaggacctgaaacccatatttgtatgattttg

SEQ ID NO: 92782 - DNA, 1931 bp, Homo sapiens
catagatctctaaaatgtgtgaaatcagaatgtttgattccctctctaactttgttcttcctccacaaatctgttccttctctttctgatcgtagtaaatggctcttgcatcaacctagttgttcaagtcaaaaaattaggagtcatcactgattactcttttttctgtcaactcttatagttaatttttcagtaagtcctgtttctgctttcataatatttctccagtccatccacttttactgtcatcaccttcatcaggccactccatcgttatccagttatgtatgaacacctgctttgcattctattttccacttctgctaacagtgtttcaccattgttactattaatcttaggttgtgaagtgctgataaagacagtgtcaggactctgcttattacatctataaattcacactatccaagctcagttagactgacattactatttagcagaccatcttcctcctgcttgaaatatccttgcgttctcatgtattactcctatccccattcctggtttatgtgtagtggaattaagagtggagctttttagcatacatgtttttttttttttcatcttttttctttatttccccacctccttatattgagttagataaaaaatgggaattctacatctgatctgactaatataaactgctgtcaaggtgaccttataaaatatatttatgtactatctctgctgtatattcaatggatctttttccaaccaaatgaactatgaaaacttcatcctggccctccaggctgccttttaaggtgttgccaattaaaaaaaaaaaaactttaacccttatcttccactgagctattcattgtagtcaggctgctcatttcagagcatgctctttgtttttttttgtgtgtgtgtgtgtgtgtgtgccttgtgctatagtttatatatatactttgatttcttttttttttttaataatgtaaaactttggatgcaggaactgtgtctttcaagtacttttggcatttacatcagggattcatagctgttctacatagttcacttgtatcgggaagattatcttacttagtcaggaacacagttttggaggaatatctgtagagcagcaggaagaaaaggagaacccttactgtaggcatttgtcagttcaacccagacattggtaactaatgtgtgtgtgtgcaaccagatcatatctggagttagatttttcttgtctttcagtatgctgtatagcacagaaacttgaatgtagaaagttttcattgaagaattgactgtgatccttcctgatcactgggcttattgcttcctgggcatccactggcttttaatttagttttaagccaggcttttaaagtagaaccaaccaggaggcaaggatgttgggggcatgattttccaatgctactcatgtaaactcaactttttaattccttttttggaataaaacaggctcttcactgtttacagggttatttctaagttgcaaaaattatctctcaacatgtttttgtaatttctgtatcccccatttgatcttggctgccacaaacagaaaatgtgagaacattttttttgtgtatctatggtagaaacagtaactgctccaggtctgtcaagtagattcattggatcttcttataaaaataatatatttttgttaataaaaataaatttgaaaatttcaaatgaggtgttttacttagaatgatgttcaaaagtttttgtccataagtgtttgaggaggtccattttaggattttccaagtgtattagtctgttttcatgctgctaataaagacatacccgagactgggcaatttacaaaagaaagaagtttattggacttacagttccacgtggctggggaggcttcacaatcatggcagaaggcaaggagcagcaagtcacatcttacatggatg

SEQ ID NO: 92783 - DNA, 1849 bp, Homo sapiens
tgataggggcagtcctaatattctctgacagaggttaggaaaccagttaaagctgttggatatggaacttatggacactatcatatcaaagtgggttggcattttcctggtgaaaatgacataaataaaattaaaagacttttttaaatgaatgcttggaaattgtaaaaactgtcatttcctctttttatttcttaacaggatggcttaaattccttggtccttgatttagattttcctgctttgaggaaaaacaagaacatagataatttcttaaatagatgtaagtatgtttaaacttcatatttgatcttataactctacttttgataagagatttttgtttggttattatcagcctataaatttattaatttaatcaacttatttattaaacttaagtcttttgcttaccatttgatttattcaaaaattgttacttttatttttaaagcaattgcagaaccgaattacaatatgcaaagcagataaagttctaaattttgaaatacattattaagactattttaggacaggttatttatagcagtttgaagagaagttttaaattaatatttacaattccaagacttaatattgcccagagaattaataagctttatacttctgtaattgtggacatttcagactagttaataataaataatgtaactattattaccatatgtgtggtaacccttaatctttgccattattaatgttgcaatgcagaagtaagtgaaattgaattccaagaataagaaattctcaaaacaattaatgtatacattgtatcatcacagtaagctctttactttgaaattggcagagactgaggtattttcccaattaaacaatcttatctatagttactatttatatagtatgattaccacttttcagagaagtaggccatcaaaattcattactaagattagccttgcaagtaatttcatggcaactttctgccatgattcagagtgcacaccaggattgcttgggtcatcactgtgtcagctatcatctaacttgctaagcaacagaatcagaaacagaatagctgtaactgctactttttggcagtcagtggtgttcatttatatgtgttaataaaccatagagagttttggttctttaacgttaatgtatatcttagatttttaactaacagcctttaaaaactggcaagtttagctaaaaactgtcttttcttgaaacaaaaatatatttataaatgttgattatgtaaaaatataaatatgattgatattataagtatggtgatctttttatggtagatgagaaaattgtgaaaaaaatcagaggtctacagatgaaggcagaagactatgatgttgtaaaagttattggaagaggtgcttttggtgaagtgcagttggtaagaaagtgttttgttcttattgttctctatgacatcatggttttgtgaagcattatcaatagcagctgagtagatctaatttctatgcccacccatgccagaaggtggctttgtgatcttggtcagtgtcctcatctataaaaggaagcctttgttgtctactctgggtctcttccagctctgaaacacattgtagaaaataaggccaatatagcttcacatgtgatctgcctagcagttactattccaccagaactgttgtatttttatttagaatgttcagattaaaaacatctgcttaaggaactgagatttatttagatgtataagaaacctaacagataaattttaataactgaaattaaatctgaaatttattttcgcaggccatactggtaccaattggaattataagaaatgttgacaataactattacctttatatta

SEQ ID NO: 92784 - DNA, 1041 bp, Homo sapiens
gagtgggactgcagggtcatatggtaaatttatgcttaacttttgagaaactgcagactgttttctgaagtagccctaccattttacattctcactagaaatgtataagggttccagtttctccatattatcacaaaacacttggtagtgtgtgtcattgtaattatagccattgtagtgcattttaccaatgacaaatgatgttggccactgttttatgtgcgtgttttgcttgttcttttgatttttgctaatgtgtcatgagtgtggcctaatttggatcattatatttaagttgtttttgtttttatgctaggaaataatacggtaatcaactggtgaaggagttttattttgtataccacaggccaattccagtgtttggaattccaaaaatagaatacaaatacagatcagtgccctctgaatgtggaattatcctactgataagtgtttatacctgaaaggcctagttaatactaagcatttttttaaaaccttgttatgatactttttgtttccaaggaatgaatgagtcttgctgatctgtgtaggctcttttttatttttttaattaaaaaaaggttttttttttaagagatggggtctcactctgttgtccatgctggagcgcagtgtgatcatagctcactgcagcctagaactcctggactcaagcagtcctcctacctcagcctcccaagtagctgggactacaggtgcatgccactgcacctggctaatgggaaggccctaataatggcagtggagtctactagttgggttatttctgtttctgttgttgttgttgttgagacagtctcacactgtcgcctgggctggagtgcagcagtgtgatctcagctcactgcaacttccgcctcccaggttcacgtgagtctcctgcctcagcctcccgagtagctggaattacaggcgcctgccaccaggcctggctaattttttgtatttttagcagagacagggtttcactatgttggccaggctggtctcaaactcctgacctcgtgatccacccgc

SEQ ID NO: 92785 - DNA, 1028 bp, Homo sapiens
acttgaagagtcattaattaaaatacttcccagataaacattttgatatgtgttcctgtcactaagttcttatctatccataggaaagaagataagtaaacatctatatatgcagggaggatgggtttagaagtagaattaatttggagatcatgtaggaaaagcaaattgtgatttggatattttccggattgttgtgaaacagtttgtcttggaaagaattaggtgaattttattcagtgttttaggtgaagtaaagatacctcatgggggctgaacagctttttattatttatatgtgtcattttttcccccttctccttaacttttttctggttaaacacatttacttctttttatgtacctagttatgcctgtgttggaattgcactttatgagcagggcagatgaaatgctggtggtgtgttcacaaggtgaaatcctttaaaatagtgtattggctgttattaatagtaaggcaatatttttcaatagtactaaaaattaagttaaagggcatgagatttttttgacaggaatcaagtgtgtcattgcaagtcacgatgacttgagaatttgtcaggtattaagcattctggtttctcatgtgttgatttggctttaaactgtttcatgtttgtagtatttctttttttttcctaatacatgcaggtgctttttttgtgtgttctctggaccatatttaaaacagttacagaaagaatggaatttagagctgtgatagtttttcttctatatctactagtggtattcatttagcagacaaagaagagtgatacatagtatcttacttgtaataagcctttcatattggttgaacaaataaatacagccagcagatgtagtgcaattggcaaaatgtgtttcagtctcttattagctcttagaatcagctctgaaataaaagtctggtggttgagaatgagcaggtattgaatatatagagtcaggcatcattgtttactagcattgctagttctttttattttcaactgttttattgaggt

SEQ ID NO: 92786 - DNA, 1553 bp, Homo sapiens
ggggcctgggagcttgctcgttgcagctcacacctcagatcccctctccgcccagccctccgtgcccgtccgcccgtggggagggggaggtcttgccccaccccgccctgcttccggcagccggggccggagaccaaacgattctgtcaccgagttccaagagtagtgacccgcctttgattcctccctctacctcctgctggagccagtgtcatccccggctgctcctttcttgcagcactgggaggaaaacacccctcttctccttccgcctgcccactctggggaggtgggtggaggactggccatgcttcatacaccaggttagctgatttgaaagtgtcatgctacgtggggacttggtgcgagcgagggagaaagaaacctgatgctgtccctgttgcgagtactcactggggtacatgacaaagagccgccctcactctctccttttagtctgaaatcttggaacacacagctaaagttttgctgttttcacttgcgtttgagcattccatacttgctatttagtgcattttaattgctgtaaatttaattccctgagattattgcgccagagccaaaaaatcagtctgaattgtggagtggaataaatctgtcctcttcattgcgtctctttcctataacgacctttgaaatccagattaatagcaccgtaaaggctgctaattggctcttggttaagaaaggagcatgttttacaaaatagaaatgcaccgtagaatgctggcttatttcttatttttgttaggatagatgattgtatttcgcaatttgagtagtgtgcagtgtagatgcatttatgggaaaagggggtgtggacttttaccctggggaggggaagaaaggtgaaaacgatactctgtgtattaaattgactctggaagactagaactagggtgggaggtccttagatccgttagacattctgtgctggaatgcagatgtttagttctattccctcctggaataaaccttactgtatgatgagaaaaactgcctcctccctttccagggacggacggactggcttttggtcagaggcggttggttatcctttgaggtttcaggcatcgtttgcagagtgactcagtcctgtttggtcaaaatgcaggaactgactttagctatatagtgtctttctgcacagtgtacagaaagtaatgaatgatgtgctatattgtgtcacatgtgtttgatgttttactgtttttcgggttaatgtgttgttcctatgttttaatgggagcagtctttgaaagtctttaatcgggagtaagattgcttgcatggatggcatagcttttcctaggctaaagcggagactctgggctgcactcccagcattttcactttggtattttgctagcaaaactttgacctaaggccagaaagtttagttaaaaatagtacagcaaatctcaagtattcatcaggttcatgctaaatcctagatggaaacgttttgcaattcactttgatatcttagatctttaatgatattaatcataattattagagttattctgagc

SEQ ID NO: 92787 - DNA, 1070 bp, Homo sapiens
aggcaggcagatggcttgagctcaggagttcgagaccagcctgggcaacagtctgtgaatccctgtctctacaaaaaatacaaaaattagttgggcatagtggcatgtgcctatagtcccagctcctcaggaggctgaggtgagaggatggcttgaacctcagaggcggaggctgcagtgagccaagaatgtgccactgcactccagcctgggtgacagagcaagactctgtcttaaaaaaatagaaatttaaaaagtgtggcaaccctgggttggaaccttgtgttttcttaaagaacttatcctggcctagaagtctggaggcctgaatgccattggtgtaacttgtcagattcatctgacacttgcttggggagatgtacttgagttacccaatgtcatccagcaagttggaagcaaaattagacagggaaaagacctggccgagtagaatttcagcatctgtgagatatgaaaatttgggaatttcctttggtttggacaatggctgactacaggaaaggcaacctctagaaataaattcagaaaacaattctttcaacctatgtttccccagggacatcccggcttcgacaatgtacttctgtgcagctccaggaatgcctctgcattcctcagcagagtgggaatttccagtcctggttcctggaggcgcgttctcacctctccctgctgtactgcctcccactcaggaacttctttcccgttggctgtctccatggtgaaaccaagggaaagagagagtttagatggttgccatggcaacaacaaaggcgctgtggtttccttggtgataccgggaaggtagaggcggcagggctccagggatctgttccccacaccagttaccctgcctagctcacatcctgggctgcctggattaggaccatgcatgacaataatagcaaaaccttccagatgacagacactctcagggccagtgaggcagtgctctgttcggactgtgggtccaggcacactcggtctggggcatgttatttcacccttcaggctctgttgcctcatctgtaaaatggggctaatcatag

SEQ ID NO: 92788 - DNA, 1070 bp, Homo sapiens
gcagcctcaacctctcaagctcaggtgatcctcgcacctcagcctcctgagtagctgggactacaggcgtgtgctaccacgcctggctaatttttgcattttttatagaggtggagtttcaccacgttgcccaggctggtctggaattcctggactcaagtgatctgcccgtctccacctcctgaagtgttgggattataggcatgagccactgtgcctggcccagtttttctttttaattgtaatttgttgtgatttttttctcctaagtaaatatccccttttatatttgatgtgtttgtaaatttgtattcttctttcttaaaaaggaccctccacactgaataagcttcaggccccacaacacccagatccactcctgaatgaatattattattactagtcaaagtattattttatcacatccatgagggagatagaattgcctctgttttacagaaaagtaaaggccaggagatgaagttgcttactcattctgactctgaatgcttttcccgctagattctggaatcttcaggcttcttggcgctcagcctgttcgttgatccccctgctgcttctaccacccagatcccagcagggaaagccagagggagactaaataggaagaagaagcctctctgaataagctgagaaggttccataacgtcccactcttccgcagcccgtggtcagggagctggggtgggggtgggagtggccgcacagaaaccaaaaaccaactggcccaaacaaccagcttttgcaggaaggcagaacaggcagttaggggctccggatcccaggccaggaccctcggacctcagttaacggctagtgtagctgaagcctgacgtcaccaacagagacaaggaggagagtagggaaggattacatatctgtggttctgatttcctgaaatagtccagccctgcatgaaaggtctctgtgcagagtcggagtctaatccaagttcaggatggccactaagggcacctgatttatcacttatctttagccatgggccatgaacattcctttgctaatcaaggctgttaacaaccccaaaa

SEQ ID NO: 92789 - DNA, 1098 bp, Homo sapiens
cctataacttattagaatcctctggatgagggttagaagagactttttccaaacttctacatgtagaagtatcataaatgtgctacacatttatgtttgtggatttaattaaagtattttaatatggttttcagtgctaaaattggagtcagatacttcttggttttaagctgtctacctaattgctgtctcccagcagactggtggcatgcccagtggctttgggggcaaggatagaaatgccatcaggaaatagctgaattcattgtgaaacatgaattcagtcatggtgataattggaaactcctttcaggtttttgcaagtagattttgtaatgtttgtgtatgcagccttgctgttgagtcagtccaaggggttttacttaggacaagttgtaccttgccctctctccagctctgctcccacattttcacatacctagctgtttctacctcattgggtaagtcatttaccactctgtgcctcagtttactctgtagtttaccattagactgtgagctccttgagggactttgtcataatcactgttacatcccagtgcctcacaccatgcctggcccttaagaagtgctcaataaatgtctgaacaaataagtgagtggagtgagtgaattgtaagatcagaataataatatttggtttgtctatcgtacaagattcctgtatcgtttgaatattgcttttaaagaaatatttgaagcgacttcaaattcagactgtgtttaaaaagatttaaaatcggaatccaaaatcaaagtattaaaaaataatgctgagtgtttaggattcacatacctctgagctctggtggcttttgccagtcctgtccctctgctgagcaccagcccttcctgcagcagtcctgccggtgtgtttctgtgcacctggggatgaagtgtgctcctcccccagcggttagcctcaatgcttttcctccctctgttttattatttgaaattagccaaagaaaagctgcagggggcactgctgatcatcactggactggtgggtcgtactgtttgacagaatagggaatacaggaggaggagcaagcctagggtaaaacttaggtttgg

SEQ ID NO: 92790 - DNA, 1016 bp, Homo sapiens
actctagaagctgagcacagatgttctctagcccacttgtagtaccaggaagtcatagcaagggcaggtgaggctctgagaccgtctgagaggctgcatctccacagactcaccctggtataagatcacaatgaggtgtggagtgggagggagcagtggtgtatgtgtgtctagcccaggcctaactgcattaaaggggagaaaacagactttgttatagttgaagcagctcccaattaaagcaatcatttataactggggctgttccttaagaatttagcataattcccagtagaagcactgaagttgcctgataccttacggaaaaaaagtattttgattaatcctgaggaaatctgaaatcaaaggatgtgaatatcataatgagttaattagtcctttataaataatgtaaacgatttttttgacattttacttgagatatattttgatcttttcctgttctttcaactggacaaaagaatggcccttccattatctcaagacctgttcattggtctggaaatccaagcacatatttatcctgtgagactctagggtattctggagttctgtgtcatcaaaacactgatttttgactgaaatacggcctccttgaagggtcagctcctgagtagaaaaagacaggctcttgagtactgaggttttcacatgatagctctgaagccattactgcaggatcacatgtagctgtcttcagcatgggaattggccagtgctgtaatgtgactacagctaaggtgattttctcaaatgtctcgaaatttttgcagttctagtgagtgaaaaaatatgatttattatttcattcatcttgacgattcctgtgtcctttgctaggactctatcacagtgcacataaggagcaccaacggacctatcgatgtctatttgtgtgaagtggagcagggtcagaccagtaacaaaaggtctgaaggtgtcgggacctcttcatctgagagcactcatccagaaggccctgaggaaggtaaata

SEQ ID NO: 92791 - DNA, 1050 bp, Homo sapiens
gggctctttcaaaaaaattcatcagacaacttacactatgacatggatagagtcattaaaaggggaaaaaaagccgccaattctctgcctttgctttgtaaagaattccttaacttgaagaccaaatgagaaatttaattttaaaaatcatgtgtaattctattcctgagagtggtatggatgcaaattaatctcactgctttgtccgagaagatacagtagacttgtgaaagtccacatgttcggtggacactggttgcatatttcaaatcctcctttgtttaaatctaaagcctttgtttagagccaggataggccagtgaattttttctccaatttaagagatttatttcatagaaaccagctttgatttggtcaatgtgtaggcatttctgtagatgtctgctatctgatcaagaggaaacagatgatttttaaaaatgagttgagaaatgttatttaaaattttacaaatatgtttattttgtttcccagaagctctaaaagtgaagagacctcgttttgatgtatcgctggtttatttaactcgaaaatttatggatcttgtcagatctgctcccgggggtattcttgacttaaacaaggttgcaacgaaactgggagtccgaaagcggagagtgtatgacatcaccaatgtcttagatggaatcgacctcgttgaaaagaaatccaagaaccatattagatggatgtgagttgctttcaaactttttcgtggcttttgttccttctcatcaagtgacaattccatgcttaaactagatagtggcagtgttttgacaatataatacaaaggtacgacttcttgttagaagagaattctataaaattttcttgcatcatcctagagagtacataaattttttaaaaagtatttcctcagttccaattgattattgatattgggaaaatttgttaaggttgtaaaacagtggttttcacacagaagtgtagtaaacacctagaggcttactgcctctggagttgtaattcggtaggtctgagggaaagcaggaaagtacattctca

SEQ ID NO: 92792 - DNA, 1076 bp, Homo sapiens
agccatcaaaaataaggattaatttagaagataatgtacaatatgtgtccatgagaagtaagttgattcctgaataggttttaggttttgttagtttgaacttcttatgattaaaatgatttgtttaagtgtatgagttgatgagaaactgaaatacaatttgttatgtgtacactgaaatgtaaagttgcaagttttagtaacaactcctgaggttatgggttgaatcatgtgcacaaatgccagtttattctccatagaacagtctgtatttaaggctattttctcagaattcctcctgggagagaaatgtactctttccttcttgtcccttatcttaggttaatgtttagggtatctgttagaggcgataggatgtaaatggctctagttccctcttctggaagtttccatgatagaccgccccacctcagcttcctaatctcagtggatacatagtgcatcgataagtcagtgtgaatcttagaaatactcacccttagttttgcctcagtgcctgccccagtctcacccatagttggtcactgagtttggtcagcttcacctttgatgtgtttcttgcatctgtcccataccaccaatttataataatatctaacatttattgagctcatacagtgcctggcactgcattaagctctctgcatggattgtcacaatgacctttcaaaatataggtatggattagaattcttactttataaaggcccagagaggctgaggtgagttgctcagagtcagggttgaatctcttacctctctgacgcaagagcccagagtctttaccacaacgttgaattgcttcttctcgttcagggtctaacttcctctgtagctgaagttgctgggtctccttcttagaaggcagtcagcttccaggctttccaacctggatgctggaaaaatccagggggatttgtctaatacagaaattggattatgatatcattcaacctaagttcttcagtgacgctcttttacatgtagagaaaaccctgattccttgtatatttgattttaagtgtttgcattaaattcataagccacttcatatt

SEQ ID NO: 92793 - DNA, 1738 bp, Homo sapiens
cacgccattgtactccagcctgggcaacgagatcgaaactccatctcggaaaaataaacaaacaaaaaaacaaccacagaaatctatgatttagatatagttactctgaacactttggtctattttttcctgttataaaaatgaaattctatatgcttctaaaagttagttaaaattatattagatgatataattttatatctcattttaatgtaatatattatggacattgcttatttcaatatcaatatttctttgacattattattttaaataacaatttcatggtctattgtgttgataaattgtcatttcagtatttcgctagtggatgcttgagctttgcctatcatttgtacttttaatgttctaatttggtaaaacgtcattgattgatggtagtacacatttctcaaacttgactgctcttaggaagtgacaaaaatattgaatttcagggacgtgaaatgaaaagagatgaagccttgcctcagtcctcttgatctcagtgggtataatctagctgactcttaactgtctctgatgccactgttcaaccccgtaggacaacgcttgctttttatttatgccatcatattatgggcttcttaggaacagatatttatgtcttaattttgtctgcatcccttgagtccccagccaaggcttggcaagccatagatgttcaaaacacactgttttcctgagggagagggtatattttaggggtagtgtgagagactgagcccttcagaaatgtgcaatgacaaatcttgatccaactgattccgataacttctttttgattatggaaaatttcaaacatatctaaaacatgtgcaaaaatagaacgattgtgagcctctgtgttcatcattcagcttcagcagttgtcaagattttgtcaattttgtttcttgtgtttcctccctccccacaccacaacccttttggatcactttaaagtaaatccaagacattatatcatttcatgcccctggtgtttttgaccacgagtttacatcagaatccaatgagaagggaatgtcttctggggctcaacaaaaggcggtggactgcctgggaggttgtggcacaggaaaactggtgacctgggagttggggacctaccatacttatttagttttgacctcgacagaggtggttcgcctctcggggctcaggttctcatctgctccttgaggaggttggcttgggtaacctaaaagcttcctttgacgttgactttactgaagcatatgctctgcctgtctactgtggtggttctcaaattctagtacctggaccagcatcagtgttgtcagggaacttgtacaaaatacagattctctggcccctccttagaccaactcggaaactcggggggtggtgaccagcagtctgtggtttaacgagcctctccaggggtctctgttgggtggtcaaccttgagaaccatgaatccatgaaggtggccgaggagtctgtaagctcttaaaataaaaacaacagagacgaaacctcctggaaagtgcgcatttacttgcttgcagctctgtaagtcaaccgaacgttagacttcttccctctgtgcagaatgatactggctgtggaaggacagtgagatcttttgttgatcaggaactctgactgaaagttaaagtgattcataaagatttgggaaagaggccgggtgcagtggctcatgcctgtaatcccagcactttgggaggccgat

SEQ ID NO: 92794 - DNA, 1007 bp, Homo sapiens
gccacaccatgtttccatgatcagatgtcagtgttgtgtcctcagatgtatgtactatgtaactgctgtcttggggagaagtttgaccctcagcaatgtttgtcaagccaaagaggaggggtgttgattacagaggactctttagagggaaagaactggaatgaactttggaggtttcagttgggccaaaggaatgccactgcaggtttgggaaggcacatgctgaacccagtgccaagagatcctttgcatcttttggggctcagtctgcacaacccctctgtgctcagtccattgctctctcctctttgttatagcatttatcatgtattggcttaggaatatggcatttccccctactaggttgtgagtccctctgaagttgagagcaggcatcagtcatctctgtatgcccagtgcttagtgctgtgcttggcacagagtgggcacttaagagctattagttgaatccatccgtccacacatgtatccatcttcccatctcttcctccactatccatccatccatccatccatccatccgcgcatgtgtccatcctctcatctcttcccccacctgaccatctatctatccatccatccatccatccacacatgtatccatcctctcatctcttcccccacctgcccatctatccatccttccatccatccatccatccatccatccacccaccccccatccgtccatctatccatccatccatccatccatccatccgttcatgcacgcacccactcactcattcagtctttcagtaggtgttctctgaacagtacaacataccaggtattatggccagtgcagagggaacagagattgaattggatagagatgatgtgctcaaagaacagagtctaggcgtagtgagaggaaaatgtgctaagtaggaaagaatgaattaatgaaaatgtcattaactgcaagcctgaggctctccaagaagaaattaggttgttattgttgtgttttttaaaagtcttga

SEQ ID NO: 92795 - DNA, 1039 bp, Homo sapiens
ggtttcccactcctgggctcaagcaatcctcccatctcggcctcccacagtgctgggattacaggtgtgaaccattgtgcccagccaatagctggtgttttcttgaagatttcctgggcctctccagggggtttttgttgttggggcatgttccatggtattcacagcagagttgtttgaaggggcacgtgctcgcttatgtggcttaggtccacgctacctgtagtccttcggaggcaagccaggctgccagctgactgtcttccaccacaaagcctgtgttcttctcctgaccctttgttctttgcacagcgtactgtggctccagtccaagtacacaaacttccatgtagtttaaaaagaatcagtttaactgttggtggttagacagattggtatgtacctgtgtggagagcactgtgacccagcaaaacacttcagggctaagaagacacgaaacggtggcatttgccatctgacccggcaggcgctggggcagatgaagctccagttggaagggctactgctgaattttttttttttttttttttttggttgttgttgtagctctgggagcagatactagctctgaaacttttcccctggctggcttggctgcctctccctgccgggcaggggccaggaagcctgggtgtcaggcagacccgagccaggctctgcacagcagggcattacgcgccccacgcatcctcttccatccccaggcacagatcaaaggcgcagcccaggaggcgggagcccctgcacactttccacctctgctgggcttagcctcttggctggttggtctgtggagtgcctgaagtgaccagctttttgtaaggtacggtttatttgactttgcaagcgagcacctgctttgggggttggagaggtttgtgttgacttacgaagacagctgtggcctgtgttcagcagaataatggcaaagcattggcccttctaataaggtgcaggggagcagtaaaccgagacaagtccacttaatgaacgggtgtccttatttttattgtttgaa

SEQ ID NO: 92796 - DNA, 1030 bp, Homo sapiens
ccctcctggcctgcttccagtaccagccccattgtaaaccaagttctcactgatttctcccctcttttaagttgtagcacttatggacaatagtgcttttttgtcacttgtcatttataatctgaaattcttttcctgtgaatgctcagatttaactagaaattaatgattacgcactgactatactccgtctctcttactgtccgtaacgagcaatcagtttttctaagtgcccattttacagttgagaacaccaaggcccagtgattaaatcactttgcgtggggttgcgcatgctgtttacagactagtacagccaggcttttgtgcattaaggtgaaggctgttgttcggccatcatcactgccctgatgggcactgcttcagattctgtagttgaagagcatcacacaccagcctggagagaagctggtccaggccttggaatgcaggcgttggatgtgatgtgttagggcgtggaagaaatcccacaggcagtctgcagagttgaataactgcagcagggatctagcaaagagaccacggacagagaacgagtggtcagggccagcccagggaaagaaggaccatcccaaggaggcctttgataggtgttgtctccactccatgcggcatttgggaggattgaagctttagtgtgtgaccttgaactaggctcttccctgtctgggtctttagttctccactggtcaaatgacggattccagtgggtcagagagctccagatgtacctccgcggcaggaccggtctggcccaaaccttcctcacccagcaggtgtggctttgcagtcagggtctgtctgtaagatagagcactgccatggtatctagaaagtccccacactgtttggttgtggccacaatggaataacaaaaagagccgcagttggccgggcgcggtggctcacgcctgtaatcccagcactttgggaggccgaggcgggcggatcacgaggtcaggagatcgagaccatcctggctaacacggtgaaaccccgtctctactaa

SEQ ID NO: 92797 - DNA, 1054 bp, Homo sapiens
aacaaaaaaaaaacgttgacagagggccagagtgtgcattacctcctatggcaagtatttggggcagtggttctcatctccccagattgagtggttcatccaagtgatcctcaaccatgggtgacttttgtcccctagggaacgtgtggccataactcaagacaagtttgattgtcatgactggatggtgccaccagcatctggggtagggaccagggtatggccgaatattctgcagtgcacaggacggccccgagcacaaagaagccccctgcaaatgtcactggtgccaaggctgagaacctgacttaagacagcttggcttgaacaatgccccacccaagcccctgaaccctaaactatggccagaaagaccagcttcacgttgctggtctctgaagaagtgattgggatgcagctttcagaaatgttgggagcaggctgccctcccacccttctttgtctcagctttgcccttcatggccacagtcagcaacgcagggtgaggaggaggctggatcctcagcggcctgccatgggtggagggcaagtctggggtgtgaggtgtccctcccttgtctgtgtttgttcccatcttgtcttccggacgctcccgggcaggtcctgggagtagaaggaagaggccttaggctgggtggctctgggcacgcccccctcacacccgactcttccttcctctctgcttttcttgttttgttcagtaaatgcctcctgagcccctactacttgccagtcatttctcaggcccagaggctgcagtggttctgccccgtgtgggaccagttcaccgtctttgatcacctgctgggtccaagcacctcagaggttccccacctcactggccgctggggatggcctttcccagaggaggaaataagggtggaagatggtatcatttctttatcttcaagtaacactctcgtctatggctacgggtagctgtagggtgacttatttgtgtaatttttccctttcttctaaatactcaccattgctcccactcttgacaaccagagctgccccttggcacgta

SEQ ID NO: 92798 - DNA, 1015 bp, Homo sapiens
ccgcgaccatcggctttaggtagctctgcctgtcctggccgtcctggggatcctgctcttctttgggccaaggccagagggggcatgggagctgctgggctggggccgctgagcctcctggagtctgatgtggcttccatgagagtcaggccaggaccacaggtgcctcctgagtccgtgggtctgggcccaggccctggtgctctatgagtgacacttgggagttaccgtatgtgccaaggagcagtgagacacctgtggtaatggcgagtgacctgtcctatgggctgcacagctggaggatggtagaattttggagcaatagtgggcagtgtgttgttggggaagaacatgggcttctgaatcagaaaaatatgaattcaaaacctaccgctgtctcttgttagtcaggggaccttggccaagtctcaataaatgtttcttcatctggagatgagaattctgctccaagggttgttaagagggatgaggtgctgtatgaaaggtcagagcacatctggcagctcactaatcggtaccggctgttctcatccaaatcagcctcattgctgaggctcgtctgctcagggaaggcttcctggaggaggtgataactgagctgcaacttagaagctggggaagcatcatgtagagatggaaagggacaaagggagcaaagagggaatgaggaggtgaggatatggatgagaggggtgagtgaaggggctgagcagacctcctgccagaggagggtttgagggagctgtgaacgggcggagcaacctggggacctgctcgtggactcccagtccagtgctctccccaccatgctcatctggagccacatcataagccattctcgtctttctttcctccatcatgcactcagctaaattggatttgaagatctaagacatcaaactggaggagcccttagaaaccatctaggccagcgctgttttacagaggaggagacagaggtccagagaggcaaggcaggtctccatgctcccac

SEQ ID NO: 92799 - DNA, 1035 bp, Homo sapiens
atatattgtcccaactcaccttgccagacagccctgggagaatgcagggcagaatcctccctgcttggagtcagggaggcaagacctggcaggcagcacccagtgaagctctggaaggtgctctgcccacaaggtgtcccattggtggtgctggaggagtgacaggtggcggctgcttggctctgggcaagtccctccctccagccccctcacttgtaaaaaataagaggattggacgaaatgaaccagcaagtggcacagccccattggttagaaaaggtgactcctctcatcctaggctccaggagggtgagcaggtgcactcaatgagcaaggcttcccaggacagggcactcgagggacctggcgcagctcacctatctccttcagtgccctcacccccagagaacccacatgtatgggaccgtaagctgtgcacaagactgggtgccaagtcgctgctgttcctctgcaggccatgggaacttcccttacctctgtgggaacctgaatgacgtcgtggtcagccccctcttgtacacgtgctaccagaattcccagtctgtctcacgggcatacgagcagtacggcgcctctgccatccagcccatctccgaggagatgcagctcctgcttaccgtctactacctggtccagctgggtgagtcacctccacctcctggcccagtggcagggagtggccacagcccgagcacagacctggcctcggccctcgtgggggctgacttgggctgctggaattgaaatacatggggagagcttatggcttcactggcgggacgtcatgaagtcactgtgggcgtccccacactggggggctgaaagtaggttgaggttgatggagacatttccagaactctttatctgccattctaggcacagggatacagcagggaattgagcaaagaccctgtccttgaggcgattctagtcttagtgggagagagaagcaataaaccagtggaaaacaggcaggtaaagatgggtgcatgcattagtgtgtgtttgtatggg

SEQ ID NO: 92800 - DNA, 1035 bp, Homo sapiens
gggtttcactatgttgtccaggctggtctccaactcctgacctcaggggatccacccgcctcggcctcccaaaatgctgggattacaagagtgagccaccgcactcggcctaaatattctgattctcagatgaactcatgactagataaatctggataaaacttccagaatttatttttcagatacagatttggaaataacatgaaaatattgtctctggccccccaaaaatcttgagctggaccaagcagttggtatttactaggtgcaaacctgtagtataatgttactgagcatttcatagaaaacggtgccctctcttggatttcttctttttcagatttctgtttgctatgtgagctccaggccccactctttaaacatcagctgctcggacttgctgttcagtgggctgctgctgtacctctgtgactcttttgtgggagctagctttttgaaaaagtttcattttctgaaaggtaacttttgtactcttaactctgcaccttgtcttcaatggctgtagtcaccgggtaccctgaggaggggacctttggtcctagtccttatttgcccatgggtaaactgaggatcagagagggaagtgactgcctcagccacccagggaagtgcaagagagctgggatttgatccccgggggctctctttcccctatacctgtttgggtagaggcaagacacatccccctttcttttagatgaattgcggacattttttagcctttgtgtttcttttctttctttctttctggtttttgagatggagtctcgctctgtcaccttggctggagtgcagtggcacgatcttagctcactgcaacttctgcctcctgggttcaagtgattctcgtgcctcagcctcccgagtatctgggattacaggtgcccgccaccacacccagctaattttttatttttagtagagacagggttttgccatgttggccaggctggtctcgaactcccgacctcaggtgatccacctgcctcggcctcccaaagtgttgggattacc

SEQ ID NO: 92801 - DNA, 1003 bp, Homo sapiens
tctcgctaagattgtacatcatcccgaaagaagcaaggggccgacttggatgccgcttctgcccttcccaacagcgccctgtcttgtcattgcaagtagaatccgggcagccgctttcctctggataaactcaccttttcccttcccacacctctgccgttgtccacgcaggtgcgacgttgtgtgtcatctgtcaggaccggagctcactgcgccagacggtcgtccgcctggagctcgaggacgagtggcagttccggctgcgcgatgagttccagaccgccaatgccagggaagaccggccgctcttttttctgacgggacgacacatctgaggaagacagcggcgagttttctgaagagatgagtgctcagagccctcatgctgttgaggctaaagggaggcctggaacggtggggcgtttgactggaatggaccccagggactgtccaggtgcagcccctcctagtacacatgggcccccgaggccgtggtcctgggagccaggaagactccgcagtgggtgagaatgaaaacttgagactcccaagttctgggccagcccattgctctgggctgttttaaagcccatttcacgaggaacaaagatttacttcctgtcctgccattcgtgtgcttccatggacaaacctgatttttttctcttagttctaaagaatcttgggttattttgtagcggtgccagtatttcagtagatgggatttcagccaagtaggttcccctgtaacctcctacaaagcaatattccaaaggaacattttaactgtaaaggctggagacaagaaaaaataagtagatcgttttaataacaattatttaattgcctataagtttgctgtttcagaggctagcccaaaggcatcaaatttaataaagttaaacaaattgatttacttcagagcaaatatgatcctattaaaataatatagggtaaataccctacctcttagaaagggcaaaaatgcaaagaagctttcttt

SEQ ID NO: 92802 - DNA, 1040 bp, Homo sapiens
agctttgcgccggggactgggatgagagcctttctttcccccggagttaggattccagcgctgcagttgaggaaactgaggctcagggaggttgacctctgtgcccaaggtcatacagttgccgggcggcagggcaggctgagcccaggttggaatcccggttctcatattacagctctcccctgcgaggcctctgcacctttcttgcagcctaggaggtgctaggcctagtgagctccgtcagctgctcctgcacgtaattttattatgggcaaggccaggaaaatgcaggatgagaagtaacgttttgggagtaacttaagtgctgtggagctagagtaggtaatttgtgtggtcagtagttgctggagaaagcagatgtcaaccctgtttttgatcagcaagcaggaaaccaactaagacaactggcagtattaatttggagatgttttagaacccggcagtttcccacaggatagaagtgttttgggaaatcaaagcttgtagccgtttttttaattgggggtgttgtggtatggtggtctaggggtagtgattgtgagattgactgtttatcctttgttccgtaatttgggtcttattaatgaaagtaagcagttgaggaatgtatagtatttgagaaataagcacatccacacatgaacacttttcttgctcccagattcttgttgaaaggtgtaacagttggatttatgattatatactttgatagcacttcacgtttgccagcatttgttattgagtgtttttgtgcatgggttgtgtgttttggcgcttattattcctatttgcatgtggggccctgtggtcctgtggagccaggcctggatatagccctggactcgggtcgggaggtctgggctctgcctgagctctgtgggaccctgagcgagttctttcacccacccaggtctcgcttatcagcagttcctttcttttagaaaagcacagggggacaaggggcggacctgctgagtcttgtggtgtgggagagaacgcgagggttcaggtgagagacc

SEQ ID NO: 92803 - DNA, 1013 bp, Homo sapiens
cttgagatcactgagaattacctcccattgttaaaattacataaatgcaggattgagtacaaagtggcattcaatacattgttggctttctgatcttctaccagattgggcagccacatctccaggtcaccatggctgtggcctctagctgggccatctgctgtggccctccccaggaggtgcttggcctctgaagtgaatcctggaggcctctggcaaggccctgcttcttatacctgaattaacgaggctctttttagaaaatgtgttcttttcttaggaagttatccctatgcacctggccacctcccccatcctgtcagaaggagcttcgagaatggaatgccagctgaaaaggggctctgtggacaggatgagaggcctggaccccagcacgccagcccaagtgatcgctcccagcgagacgccgtcaagcagctctgtagtaaagaagagaagaaaaaggaggagaaagtcacagctggacagcctgaagagagatgacaacatgaacacatctgaggatgaggacatgttccccatcgagatgagctcggatgaggccatggagctgctggagagcagcaggtaataactgtccagggtggaggggctgtgccagaatcagacagttaactgttcaagattatttttatgaacttttcccccataattccttattcttttatgtgttttagaccagtggtccccaacctttttggcactagggaccagttttgtggaagacagtgtttccatggaccaggggtggatggttttaggaggactcaagcatattacatttattgtgctctttatttccattactattacattgtaatatataatgaaatacttatacaactcgccatcatgtagaatcagtgggagccctgagcttgttttcctgcaactagacggtcccatcttgggggtgatgggtgacagatcatcaggcattagattctcacaaggagtgcgcagcccagatccctcacatgtgcagttcacaa

SEQ ID NO: 92804 - DNA, 1029 bp, Homo sapiens
gatattcctgaggaaaacctctccctggctgtgatttaccctcagtcagcctcataccctaattcggatagagagtggtcacccactcccaggtaagctgttccctgttcccctggcccagtgcagaggcttagaagtcagtgataggaagcaattctaagaaaagaatgaaatagaaatgaaaagtgaaaataattaggaccaggaaaaacacggtgtagagtcggaggtacagattaggatcaaacacagaacatgttcagatcatacacttatatctggtgtcagaatccatctgcagatatggctgttagctccctggaggtgaacttgaaaggaaaaacatgtaaattacatcatgctaattgttaataggagaaaacacagtggcagagcctttcttgatacttagccctaagtaaaattcaaaaacagacgttgcttcaggagctgctgaggtcgttcagggctattagaatggtgcctccgccacacttaatccattctgccgaattcaagaatatttatttccctgaaatgaactcacaagttgccctagaggaaaacttggagaactagagctgctcactgtgcagatgccatcctgatgaccccagagatgtttacatcagtgaaacctctgggaatagtgagccccctggctagttttcaaaggacttggggaagagggtagagctaaatcctgtgttctcaacacaggaaataatataacccccattgggatgaaaattcattcttgggtggtgacaaaatcttagacgttataatggtttgtggtctctaaggggccacagcattaaaatctcatggtgggtggagttgggctattaatttctcagaatgctcaggggcatgttgataatgaaaaagagactgagaaacgctgatctaaatgccagtgacatccttgggttattcgtatacctcatgctttagattcgcttctggttcatggtgccagcccttagaaactctgggttcctacctgaagccggtcttatcaaaacg

SEQ ID NO: 92805 - DNA, 1032 bp, Homo sapiens
gtgtatcacgtggtggtatccagtagcctggtagattgcaaaaggactgcccctcatcttgcagttgcggccgagggaggtctgtctagttcttgccctccacagtcttccctgttccatccttcggaaaggtagaggagttattttccccattgggatatattcaataatgaaaaatttgatctaactcttactataagtctattttaccattaaccaaattacttatgaagaaaatacctgtagattatatgaagtgaaaattttgatttaacttttacaaatcgatttcactaaccaaattacttatgaaaaatatgtatatagattactcttttcctttcgttataagcatttgtagatgatcagatttttttttttttttaattcctaaatttgactctctggaaattatggttaagcatataattttacctaattctgtgaagtgctttgaaaatgagaataatgaaatatagcttgggaatatgatcttctgttttctgtctcgggttgtttgacaaataagtttacaagatatttttggaataccactttaatttattataaacatttaagtagtttattgggctgtctgaataatggagtcagacactttccacagcatttctagaacagaatcttggagaatggcctgggctgggtctcaggctgaggatcaaaggttggtgtgttcactcgatgtagtcatctcagatttctgccttcattccctcagttttgacctacctactttgtggacttacatggtttactttgtaagccttagcaaatgaagctacgattaatttgtacgtggaaaaccttttgtctttttgattaaagatccagacctcaggatgtacttcattcagaggctacatttgcagaagaaaagtccgtttaaaatgaggaaaacaaagttgttaatagttaaaactaactagccttattgggactggcaaaaatactgaaaactttgataaggctaataaataccttgtttatgaacatcagtcattgaccttgtaa

SEQ ID NO: 92806 - DNA, 1090 bp, Homo sapiens
tcactctgtcacccgggctggagggcaatggctctatcttggctcactgcaacctctgcctcccaggttcaagcgattctcctgcttcagcctcccgagtagctgggattacaggcgcatgccaccacgccccactaatttttgtatttttagtagagacggggtttcaccgtgttggccaggctggtcttgaactgctgacctcaagtgacccgcctgcctctgcctcccaaagtgctgggattataagcgtgagctgccgtgcccagccaggatctacattttctatcacagctaaatgcaaattaaattaaagaaatacaacttacacacaatcttgctgtcttgaaactgtaaacaaaaatagcttccagctcttgagtctgctaggtcattgatgagtggagcaaagccacagggagagagttgtggactcttggcccattgaaaaagaagctgagttgtaagagctggaatccacatgttcttgtgtccctcacacagagagacatctgggagagccctgggagagggaaaggctaatagaacagaaatgaaagatttcagcctaatagataaacaaagtcagaaaaccttaaggttttgattcatcaagtagtaagtatttctgggccctcattgttggtgggaccctgaatttgaccctatggagatctccaaaataaatagagaagcagctgagggtagcggagagaatgagggcctgggaggcagcaggttattctgggtttgagtcctcactgcaccgcttgctaaaaaggtgaccttgggcaaatgagtagacttccctgaacctcagtgtcttcatctgtaaaactgtgagaaaatgacagaattgttgtgaggttagaagggctaatgtaggtatgtgaagtatctggcacctgtaggccctctgaatatttgcattctttctccttggctgtggtacatgcacgctgagccccagtttccctatcttggatatgcagtgggtttacatgtaggtacataactggttcagcaaatatgtttctaaaaacatgaaatgaacacaatcttttctttcaagaaattttatttggtatgc

SEQ ID NO: 92807 - DNA, 1060 bp, Homo sapiens
ccttacaggtgaggccagatcgtcacagtcaggagaccccaggagagtccccggaggtcctgattagggctctgagggtgcatgttgaagccagtcaggctggcatcaagacccagggactcttttcctggacggaggagattctcagtgtctgatgtctgctgggtttcggttcggttcagggtaaataggagctcccagggaaggagtgggcgtggctctgggccagggagatggtcagaaccgcggtcaaggcttaaggtacagcccagctgccagagcccgtcaaagaactgagggtccggggctgaggtctgggcctcctgaccctgccaccttctcctttgctctgatcctggtggggctgccccaccatgatgagaacagtgccctgcctgcttctgattgtggtggaggcagccccatttttgaaagggccctgtgctttctatttacgacattatcagtccccatgaccaccctaggaagcagatgtggttattatccccatgctagaggagggaactggggcctgggaggtgaaccgcttgcccagggttacccccgtaatcgtgacttcagccgagggagcctggcttctgcgccatgcgtagccatgactctgcctgtgcagatgcacgtgtgtgctgttttcacccctactccctgtgtgaacgtatgtgcctcaactaaggtacacgtcccccaacatcctcagccttgccctggcctccctgcattgctgcacagacgccgccttccaggtaaaatggtgcggcctttacaaatacattttataggattgtctgcacagttggaatgcacaaactctcagaaaacacttgtgagtgagcaaatgaaaggtaggcctaattttgaactgaattttctttttgtttttccctgatcctctgcaattgctgtcacagatgcattcctggagcaagctgtgtcatatcaacagtttgtggacaaccccgctattatcgatgaccccaatctcgtggtaaagattgggagtaagtaagtacctcttgaaagtcactttggcagtagcatg

SEQ ID NO: 92808 - DNA, 1032 bp, Homo sapiens
ttgactactttatatgacattggaaaggttttcagtctgagcctcggttttttgacatatatttcattgttttgtgttagatattataactggacaacagcagcacccctcctcctggcaatgcaggccttccagaaacctttgccaaaggtgagctttaacatgagaaagaaaaggggatgctagaaatgatgggtagcttaatctggggtggttggaatttcacttttattttggaaactacagagttaattccactgtgctcttttgaagttcatgagcatacaggccaggagtttctgatctctctcttgcaccttgcacgtggttgcccctcttccttatcaaggcaaaacctcccaatcatggtcgagcggaccgaagattcctttctcaatatctgccatgcaaggggtacaggtggaggctgagcagacaggtgccaggacctcagagcccagtgaggacaaagggagatgattgtcaccctggaaaggtggagcaggcatcagggtcaggtgcaggtgccctgtgtcaagtgtcaagtgtcagtgtcaagtgctgctcagccaggaagccagccccatgcctgagtctctgaggccagagccagtacagggcctggacagctcccagtctgcaggggagagtaggtaagtggccgtagggaggagttaggagggcagccacgccacctgccagtctgcagtgttctcatcctaccccaaacaattcactagacagtcagcctggagttgttaattttttcaatgatagatcttcctgctagattatacgttctttgctgcagagactgccttaggcttgtttgtatcctttgtgcgcttagcaagcttttgtatggcttaggatgttgccgtcggtcagccagttcaaacacttgagattcttgaaggtctaattggactttgttgagtctaggcttgctgcttcctgggtttgtgtgtgtgtgtgtgtgtgcctgtgcctgtgtgtcagtgtgtgctcatgtgcatgtgtgcatacgtgcat

SEQ ID NO: 92809 - DNA, 3038 bp, Homo sapiens
ttttaagctacatagtaaattacttatctgtctgcttcccttagactgaatctttcagcttaaatctttcttttgttactagctgaggtgtcagcttcttgaaagttctgtaaactgaggaagggacattacctaacttttaccttggtcctggaattaacctcaagatagataggtattttgttctttggaaaaacgtagaaaattatcaattcatatttaatctccccattaaacccatttacctaaaagtatgaattttctttttaatactcgagattttaaatcaaatgtacctattaatgcaaatgtttagaaatttacccttagtaaaaatcttatgcattttaccttttgttgaaaactgttttatcctctatcccatattaatcatttcatattttatttgataatcatcatattgagagtaatgatatcttaaccagttagccactttaatttgaaaacttccagtcttactaatcactaatgatttctaatgctttctttttttgttgttgttgttgtgttgtattttatttgttgtttgtttattcctttaacatcttcttaagtcttcatgcttaagttaccttcatgtaattttggacgccattaggttttgcttctctaaaatttttaacgcacaaatagtatgttgtgttttctctgatttttttttaaatcttactttaatttgcatgtatgtttcttttggtttgaatgtgctaagttgatctttttttgttccattatttatgttaccatccatttaaaacaggccactgtggaatctatcatgagggataaaatgcccaaaaagggaggaagatggtggttttcatggaggggaagaaacaccacaatcaaggaggtaagcccagaagacaaagcagtgctcacacttagcaagtgttggttttgtgtagtgagattggttttcatgtacttacatcagagaaatgaagataggccctagtgctgagtttccatgagccagctctgccatgaagtagggcgagtgctcgtggaacgtggggaaggtggggaggaaggtcaggagccagcagcataggtgtcacctcctggctctgtaactgttgggagactgtggtccagtcactccctcatggtaagatttcgtcatctataaaagaagggattcagcctgggaattcagtttcttaagaaattaaatatcttccttctgcttgtggagacaatttttctttttctttttctcccctcccctcccctcctttcttttttggagacgggcttgctcagtcacccaggctggagtgcagtggtgcaatctcagctccctgcaacctctgcctcccgggctcaagcaatcctcccatctcagcctctagaatagctgggattacagccatgcaccaccacgcacagctaagttttgtatttttagtggagacggggttttgccatgttgcccaggctggtctcaaactcctgggctcaagcgatctgcctgcctaggcctccgaaagtgttggcattacaggcgtgagccaccatgcccaggctgtgaggacaattttaatgaggcatactcacagcagttgactaattctctgagtcctttcactgaaatggcatgtctaaaggtccatggctttggcgttcatgtctatgagtgcctgtgatttctttcagatcttcgttgccctctcctctatttcttgaagcgcttgctttgcttggctcccaggcccctgtgtccacctgggtctcctcctcccagcaggctgctcctgctctggcttagtcacctctaggagggtcctcaaagctcatgttaggccaccttttctccttttacttcttacttttcccttctgcccatgcgatgactccatttttgtctccaaaccagacattcttttctactccacatccacttatcaagtagtcgactaagcagacatcgtcctgtggatgcctcaacgtatttcaaacttaacgcttccagaattgaactcatgggattcttgtgagttcttccatcattggggccatagtcagaaaatggcaccactgtccatctgtgggtgagattcatgcttttagcctcactcccacaccaggtcctatcagttttccatctgaaatacttctctgacgtgtccatgtctctccagctctgctcccacaaatctgcattaccatcatctctcccagaggtgcttccagatggtctctttgcacccatcctcacccttgcttcttcattctctgtactgcagatgcattggtctcttcaggggactgctcctatttttgttgctccttaaagccttactgtggttccccagggctcttataatgaaggcttgtgtccttaccacggcctacagtgcttgtgtgttctagctcctgcctgcctctttaatctcatctttgctgttctctgctctttgtgcattagcttcaatggctgaaggtaccttctaccctgggggctttgcacatgctattttcattacttagtattctgtggacccctctcccctgcttcgcttagctaactagcagatccagtagccctttccctgcagatgagtctggtctgctgtcctctgcctgtgaacttttccttcataaattttgtcatagttgataattatgtaattactagcgtgactatttgatgaacctctcctttctgtctagacccgaaacttcatgaggcagagaccatatatggctttgattgctttggtgttcttggtctccatattggacccagagtaggggttcagcaaatatttgttgagggcacgctgattactctgggaaagtagtatgaagaagccacagggacaacagtcaagttggttattttaatcataaactgccatgaactctatttatgccattagttgaaagggaaaatgtttgctggaagagttttatcaagatataattgttctttgacattttctgttagcatatctgaggtctactcatcagttttactaatctccaaaggttaccgataaatgagttcaaat

SEQ ID NO: 92810 - DNA, 1010 bp, Homo sapiens
ttactaagtgattcatatagcattgaggcattttcaaagatagtggtcctgggaggcagagctgatactactgggttggggattatgtcatagcaggattttcattgagtgaatagctaattacagatatgcattatgtgagctatttaaagaaaacgagcctaattcccaccctgcacctcccagctccccactaaacaaaaaagtctagaagagttaggggcactgacctgtatattctgagcagggaagtaaggcgtattccttgctcatgggatgaccctctgggggatcctgagagaagaattggtgagtctttcttgctttcactggcacctgtccgtaagtcctagaaaggccctaattgcttggagttgtatatttggcgagctttatatagggaactgatggatgagtgtggacttgtagaaacttggactcctagcgcttggcatgcagtctcagataggaagagaagagagacagagaagacagcatcttcctaggccaagagggagtttaaccctgcttgtcatgagtaggaacctgttggcttaaaatagtggtggtagctcatcaataggcaagtgaatgaggagaggcagcccccacacgtgtaatgcaagagatgcatgaatggggatgtagtgagagttcattgataaatttaacgtcttatggtaaatgaccacccgagagacgggactcaggagagactggattgacttagtcattgattaaaggctaatgcatttttcatggctacccagatgcattttctaattggtgatgacatcactgtgtgttccagggtaaagcatgaatcatcctccagtgatgaggagcgcgcagctgccaagccatcaaacgcaggccacctccctcttctgcctaatgtcagctacaagaagactctccggctgacttccgagcagcttgtgagtctcccatgcttggcgcggctgtgttgtgagcacatgaggtttctgcagactcctaaggctgtgtga

SEQ ID NO: 92811 - DNA, 2023 bp, Homo sapiens
ctggctcaagtgtgagggtgtttactaggaaaagataaggaagaggcccagacacccactcaggccatgtgtgggaccctgcagcctgggggtctctgtgtgactcactgctcccactggcgacactggggacacctgcagtcaggcagcctgggggtctgaatggccagctggtgtgcaccaggagtcctggcacagagactcaaaactgctcaaaagtcactttgtattttgaatttggtgtgatttctttgggtctagactatattcttctggatatgaggcatgactgataaccaagacttctctttttccaattcgtgtcagtataataataatttaaaaacatggttatttagggaaatgtattttcacacttggcttaaatttgtctccctgaatgatgatcttcctatttagtcctagagtggtaagtgtatcctattccaaacttgtgatttattacgccgtgtagccccgtcattgaatcctggctaatgactgtaatctgaaaatacttgatcaaattagcactatcctgggaagtagaacaactctgtagcaagtaggcaagttgcattacaagggggcctgagagagctgaggtttcattttgcctgtccagccccggaaagaaccagaacaaggaagggtggggaaagaaagaattatacaagggcccagggcagtcacttgtttttaaagccgaatcctgcttctcatagaacagaagccaaatgcccatcaatcagggcctttccctcaagcagacaaatactaatggttcatgtttttcagaaaagcttgaagttgaagaatggccccaacgacgtggttttcagtgtcaccacgcagtaccaaggcacgtgccgctgtgagggcaccatctatctgtggaactgggatgataaagtcatcatttctgatattgatgggacaattaccaggtaggtcctgctgacttggggcccatggtagatttctttgcttcaccgtgggggtctctgggcctggtgttggcacctctgctctcctcatgggacttgcacggttcgaattctggtgcagttggagctccttacgtagtttcagctccttggtggcaatcattgtgtttagggcttagttgtttccttctggggtattattatctcttcgacttggttgcttctgtgggggcttctcaagaacgtctttttgaatggcctttacctttgattgaacaagccggtcacctcgatgcatgatcagactggaggcgtccttctgtggattacctgtccctccgtcagcatcaactttgatgacttgagccttgggctttctatccagaaagaaagttgtgggtcttgtttgtgttttttttttttttttatgaggcatgaatggtgcaatgaatctgaaagggatttttactttatttttctcttttcctcttcatttagatcagatactcttggccacattttgcccacccttgggaaggattggacccatcagggcatcgctaagctgtaccataaagtgagccagtgagtacagagttcctgtttcccgcctcctgtgaacgctggtgtgtgcaccgcactctgcatatggaatctttcctgtcccagcacggggtgacttgcagagagggctgcacctcaaccagggaggggcagtgggggtcaggggtagcagtggagtccagagtgaaagtgaatcccagcaactccaaatttgaattcaataccaagaaacaaggggcgaagtataggggaattgattactaggagaacacagatggtggcagcattaggggtgagactgaggtttagttcatcccgagggatggcagaggtagccagttgaagaaataggagcttatatgttatatatgccaagtgattttctgtagactaaaaagttgcagattccaggcaagttttggcggcgttgcagaccctgcgagccaaccagcagggcacatcatgtctacctggtctgtggagtgctccagcaagtggcccaaaacagaaca

SEQ ID NO: 92812 - DNA, 1350 bp, Homo sapiens
aatcagatcccttctgggtctaaaatttaaactcgtggttagagtctgctacagaatggaattgaatgaatttgaaaactagtagtttagatttgccaagttaggtttgaaagcctagaatgtgaatgagaaatataaccaaactgaaatatgtgaagttatatttaaagatgaggaactgtatatctcttcacataccaaatgtttcttaccagagacattgctgtgtaattgttaagaattcccttcatatttttggtcaaagcccagtttttctgagtcggtgggctaaatgggattactctttctaatgaggcatccttgtgtgcttagaatcactcttgactttatcctgtccccctcgggttcctaacttattaggatggagagcatttcctcattccatgttgttgggaggttggcccactgggtgacatcagcccaggccgacccttgtcttcctgccttgtccatttcagagactacacctcttctggtctggtctgtgcagacctggaaaagagcctctggcaggccaggcacggtggctcatgcctgtaatcccagcactttgggaggctgaggtgggtggatcacctgaggtcaggagttcgagaccagcctgaccaacatggagaaaccccgtctctcctaaaaatagaaaaattagccaggtgtggtggtgcatgcctgtaatcccagctactcaggaggctgagacaggagaatcacttgaactcgggaggcagaggttgctgtgagcccagatcgtgccattgcactccagcctgggcgacagagctagactctgtctcaaaaaacaaaagagcctctggccttagtggccccagatagcccgaggggttcctctttatctggaggagttagactgggggagtttggttctaggagattcctaaggattggttttctccatgtagcttctgtggttttagatagagagataagttctctctagggcagatttttactttcaagatggtccttaaactagttggattctaactgagtgtcaatagggcagttctaggctaacaggagtcctggggctgccccacaagactcctctcaccctgcagtcatgccagtacccaagcagtcctcaaggtttgtgcagagagaggggaggctggagccaaggccctgttccctcctgcagaaggcgaggcagtgccaggctgcttcctgattggcagaaaaacagcaggaacttgattcctttcttaacccttccttgcggtttctgccacctccactgttctaagtggctgactgtgacaatgtctcgttcccactcccctctcattccccaggctggagaggacctac

SEQ ID NO: 92813 - DNA, 1128 bp, Homo sapiens
gccaagtagatgcttgtcattcagaactgggacagtcatctgaaatgtcttcagaggctggggccacacagcgggagcagctcagttctttttccctttcgtttgcgagtgtctgtgcgtaagctctgcctgcttgggaggagcactgtgtgtggaggtcggtctgggggaggcgcgcagatggaactcggcctggccgctcagggagtgtgagagtgggtttggttccagtgcaccgcggccttgtagtcaagcctgcagggaggggccctgctgccgcagccacaaacctcagacaaataagccttaaagccgggaggtattttaaaaatctgtctgtttgtttgaatcccaaggaaagacataactcttggttttgtattaggagacgtcactttcccattttgtgcaagcacactgtttctcataagtcctttggaggtcctttattaaatatacacactcggcttcatttagtacattattttatacctcagaacatgcacacttctggagtctggattttggaagttcctttaggttcttagcaatttggaactagacagtgatcagtgactgtcaaggaggaatctggggatggctggcagtgggctgggtgtgccagaatctcagtttggaggtgcctggaggtctgaacatgcatattcaatatagcaatagcaactttcttttcatagtataagccacagaaactaacatgcaacatatttttgggcatgcaaataaaagagagcaagagaacgttgtaggaagcattgggaagccctgctctaattcagctccacagactataaagacgaagggctccaagagggcaagacaattgtccaaggttacagcaagcaggagagcccgggtctcttgaccgtcatgccaaccagggcttttttctctaagacgtgttgataatttgtcatttagatacatttgagcacccagtatacattattttaatgttgcatatgttattttatttaaattatccttaaaactgtggcatagtttttattttcctccctttacagtggaggaaattggcttagagaggttacgccatttgcccacgatcacgcagctagtaaatggcagagctgaacatcaaattaa

SEQ ID NO: 92814 - DNA, 3720 bp, Homo sapiens
ccccaccccggggctgacatttctaagcaagataggaagggagcactttctaggctaggagttgggtgcatttgtaccgtgaaaagcattcctcagttgtggcttaatgccagttacgacgctgcctttccggcctgctccagcaagtagctactggttcacgtgcagtttggggctgtgaaacctaggcagaaggcggctgtctgagggctgtccccgcctaggacagggtcaatcgaggaatgccagatgtgcacggtttttggcaaagtagggggcacatttccattatagcaatgttagtgccaccaccttctgaacacagtggggagggctgtgaaggctcatgtgacctggatctgaggtctctgatagaaatctggacgccaccgggtccaggcctggcctcagacttggccttgtggatgggccccttacagtatttgctgactagtctcatttttaggtgataaatttttctttaattcctttggttaaagatagtctatttcattggcatatctccccccagtttttgtggctcaaggctggaatatttatgccttaatatatctatggcagacatttaagaatgcgctttatctagctcatggtaactttgcaacgccttagattaaaatgacagtaaatattactaaggcagtattttgaatgagtttgacactgccggcttccttccatccagcgaggtggtgctgacagtgtggacttgagcacacttatgccaaatgataatgatactgacttctgttgggagctctccaaagaaactggttggttttaagaaaatagtttcaagaagttcaactatattcttttagatattatgtattgttttactctgattaggttactgtgataggcatttattcatattctttctataccactgtcattaatatattaaaaagatgtatgtgttagactatcgaaagggccttattctctctttctcatagactgaccttcttttggaatttctgagtcatttattttccttagctttttccactcaaattaagggcaagcgaaaaagtaataatttggcattctttaagcctacagaatgtgattctttcacttgtttattacactggctcgtggacagaacaatttgaaaagtgaaagaattattttggtaaaagattttgctttacttttcgaagcattatttttttaaagagtgttttactccaacgattgaaacattttcctatttaaatttcattgttagaatcacaggaggcaaaaaatggaacggttgaatgaaattttactctttctgtgaaagaaaatccacagagttgttgcctccgttgtagttggtgggccccgttagcattggatgcctttgccaaatggttcatgtggacacacaaaggcaaacagatctgccatcgatcgcagatttctgtagaaacacggatgtgcatgtgcagattcccttttgcaggtattaaaaataattaaaaatagtcctgcctgaggttgcagtgagccgagcttgcactactgcactccagcctgggtgacagagtaagactccatgtcaaaaaaaaaaaaaaaaaaaaaaaagtcctgccttaactaactcctctgcgcttgttcactagtaacctaaagaggctatattcattctttatgcaatgagggtatttttgagtgaattttaactgctctgaactaagtataagctcatgggcctgcaaaggttcagacggtttctcctttgcacccaggaggaactttggctgcgagaatggggggatgtatccctcatgcagttggcatccaggcagccctctgcagcagcacaccctgcaggcggagttttcagaggatgcaattttggatcccgaattttgatgtaccttaaacttccacatcactgcaccctgaaacagagcatgctttccagaaagtcacactctcagatctgtgtcaagttcaatgtgagccctggcaaggctggcatattaacacctgccttctggcttctgaaagtgagatttgtatatgggctgcactcacgcatatacgagttggtttatctttgtgtacatgactataacccagtgatgctgaggtcatgtgctggaatgctgtatttggaccacacatttcaaagttgccctatggaaatgaatcctacttagtgacaagtcatcaaatgtttgtcacatgtgatgaagacaaatatgtatacctggcatagagaaaaatatatacctggtacattggagaaaaataattacactttcaaagagaattccctttgcaattttatgtttggatcaccactgtaagcacactttatttgcatttgatctgtatttgtatatgctgatgcaatgataaaaatcactgtaatacttcattgtgttgtactggatgcaaagctagaaaatattgcaataaatgagaccgatgaaagacttctctgaaaatcaggtgtgtgaattttaaatagtttttggtaagttactaagttgttgacttttctggggtgtgttatcaagcatattctaaaaaaaatcttcaggctatgaattgttcactatttggaataaatgtttttcctgatgttttagatttaaatgggtaaaagaccagccttctctatgcacttgctggggacgggagggatgaagaaagagaggagaaggctgcacccgggatccctccctgccctggtgggatgattcaggagtagggaggtttcaatcaagtgaatttcatgaagtgcctcccagggcctggcctagaattggtgtttagcacatgggggttccccagcctcacagctgctgtcctcattttttcgactcttctctgtggtaaaccccagattcatttttcattttgaatgaatcaaaatccttgactagtgcaatcatataagctgaaaactgtcataattcctattgattttacatgtcaacgtggctggaagcttcctattgatttacctgcatcagcctaagcgtttttggaataaatggaaaagtattggccccctaaatgcaacatagccggccaggatactaggcccaattcctaatgaagcccaaatccaaacggttcatctctaggtgcctgtagaattaatgcttttgcatcttaaaaaacaaaaccttctaattttgttgaacaccatcacggatttgttccaactcggacttcagtgtgcgggctcttttatctataaaataaaaatttgtctagactattgtctttggcctgtggattcccacgtgctggcggagctctgcaggcagctctcacgtgtgcggggtaaacgagctcgggggcttggatttccccagcgtctcagctgtgatcacctgaatgtttaaaaggctttacagcttggttctcaaacactgacacatcagctctcttgcatcggaagccgaggaaggttgacgatggggccattgaccatcagcattggaccccagagtgctctttccaggaagagggaatgcacgtggccctactacagccctagaacagcggaactgtcctggaggaaagttaagtcggccccttcttaaaaaattaaaaagctggctcctaaaggctgggtgcgttggctcacgcctgtaatctcagcactttgggaggccaaggcaggtggatcatctgaggcccaggagtttgagaccggcctggccaacatggtgaaaccccatctct

SEQ ID NO: 92815 - DNA, 1043 bp, Homo sapiens
aaagctgactttaatttataaatttataaaagtataaaacaatatatatcttctcactcatttttattttaaaaatagttactttattaaaatacgttatttatgttaatatgtaataggcttatattgtcatatttgcatgcattcatatatatttttaactgtctcagttttaattgctcatacagaacataattagtagatataacccatacaaacagaagctctttggggtcctcagtagttttaaagagagtaaaagcattctgtgatcaaaaagttcaaaaaccattgcactctaacaatctttgagcttgcaaaaattacctcaaaaagccattttcagtatggaatgaatgggtgtgatggcccagtttccaatacctaccgtcatttagcccccattccttttgagctagtccagagaggtgtggctggtaggcagagagttgaggcctacagagctctggtcatttatctaaaatatagttctaactctaaaatggacaaaggctaatagctgcacatttgtcctataagacagagccccagtattaggtggttgtgtgtatctcttttccatagcatcaaccctgtatctcagtgtaggtagcatgtcatcttctagaaaggtaacttgatacagacccaggcttgaagataagagcgccgggttctcttctcagactcaccattaaccagtcttatgacctgagcagtctctctctctggacttcagtgtccttattcacaaaaggcagatgtttggtaacaggaccatacgctctctaagatatttttcaacttggaaattctatgaatcaatttggagaaatatttgaaagacaataagaataacagttgacttttatatggtattttatacttgctaaattacttttccttccaaattcttggctggtgttaatttcacggcaattgagattaaggattccagaggcgatagactggtattgagttctgatgtgtcactaaccagctgtgtggccttgagtaggttatttaacccatctacagctcag

SEQ ID NO: 92816 - DNA, 1031 bp, Homo sapiens
tctaacgcgttgggactgagtcgccgccgtgagctccccgaagactgcacaaactaccgcgggctcctccgccccgtctgcgattcggaagccggcctgggggtcgcgtcgggagccctggcgctgcagctccgcaccttagcagcccgggtactcatccagatccacgccggggacacacacacagagtaactaaaagtgcggcgattctgcacatcgccgactgctttggggtaacaaaaagacccgagttgcctgccgaccgaggacccccgggagccgggctcggagcagacgaggtatccggcggcgcccatttgggggcttctaactctttctccacgcagcccctcttctgtcccctcccctctcgctcccttttaaaatcagtggcaccgaggcgcctgcagccgcactcgccagcgactcatctctccagcgggtttttttttgtttgtcgtgtgcgatcctcacactcatgaacatacacaggtctacccccatcacaatagcgagatatgggagatcgcggaacaaaacccaggatttcgaagagttgtcgtctataaggtccgcggagcccagccagagtttcagcccgaacctcggctccccgagcccgcccgagactccgaacttgtcgcattgcgtttcttgtatcgggaaatacttattgttggaacctctggagggagaccacgtttttcgtgccgtgcatctgcacagcggagaggagctggtgtgcaaggtaaagggccagtgggttgctttttgtctttggaaggggcccgagggagcgggagggcgccaggccctcgagtctgggagagggagattcgcgggataattaccgtggccttattaaatgggtttatttatttatttgctcaggttcggtaagttgcgaagtttttagaccgtttcagacaatggggcgggcggcagtgggggcgtttcggggagagcccggggaggagagggcggcgggactgcgcgggggccacggacacgcgtgcaccgaaggctccagg

SEQ ID NO: 92817 - DNA, 1022 bp, Homo sapiens
actaaaacaaattcatgtgagacaaattaactaagaataaatggataaagccaccaagaatagacattttaaggtctagagatttctttgaggtgaattatatggaatagaccataagataaggtactcgtttaggtaaaatagaaggtgtagcacatttaaatagaaaaaaaaaattctcaacacagcattctctaagaggtttcagttacatgatttctctgactttcaaaataagattcttgatctaatccaaataatcaggtttaatctacttgttcaggatttcaggaatagattaaagagattagctagatggaaataaattcagaccatataatggggatgatataaagatttatatttatccatccatgtttacacatacaaacacattgaaccattagactctacacgaactctaaagtcactagacgagctgtgagatcttctgttcaatatgaccataagaacatccttgattattttctggcccggatttcttttcctccatattctactgaccctattgtgaccctactgatttccgccctaaaaaatcaactccattgttgtttgtgtgtttcctgtccctaaatgtcagtttgtacgtaagaatgttctcaagttttaccaacactgttttgttataagaggttatttgccggcagcacttcataatctgacagtttcttccgagcactgcaggtttctctctcacccgcccccatcccacccaccccctccaaacagcctgtctatttctgtgtagtgagttttctgctgtgctatgataagggaaggaacttaattcctttagtgggaaagaacagttctaattcggatcaaattcgaaagtggttttcccattaaacagacaggtatattatgaatctttctgtgaaaagcccattaaacatctatacccacgattttggaacgtttttagaaatgttttctttttatttttaaatcaccaaatgtttcttaacaattgttctcaggtactaagacaaagatgc

SEQ ID NO: 92818 - DNA, 1047 bp, Homo sapiens
taacatttgttaactgattaaaacttttggcatacagctgtccttataagtaatggaatctcatgatttatgggctttttaaattgtttcattgttttcataatttatacattttattaagttaataaaactaattttataagtaatataacaaactattttattttgcctctccaaatgtaccaaaaaattgtattttgattcaaagatcttacttgacattaagctaaaaaccatatatcctttgataataaacttaccttctagtttaccactttacttaacattaggagaggcaaagaaggagaaggtaaagcaggataagagcaatttcctctttatgggagactctgtgttatatgtaaaattagtgtttattggattgaatgtaaatatttactgtatgcaatctatcacattataaagcaacacatagaaaatgtgtttttctaagggtttcattttgctactgttatgtaattagcaatgtcctcaacagtgtcactgcagtatcgttacaatcagcaacattaatgatgactctatgtataaactgaaaacactacaccagtgcacagttcacttaaagcaaagagactagcttttatggtattactttctatacgtatagttgattcataattttatgtgatataataaaaatatactatattggacaaagaaaagcttgatttgccatttttcagttatgtgaccttgactagtttacttaactctactcataggtttcaatttccacatctactaagtcatggagttggatttcacctgtaattcttcattaaagccaaataccaagaaactggccatagtgaaaatgaatagttatgccaaaatagggtctaatctaaaccatcattggcaaaggtagctttttgttggtagtattacttgattgaggtaattagtcataagaagtaaatatgaaaggtacttaaatttaaataacttgaaattttgggtattatatgtcttcagtatgtgacatggatacatatgctggcaacttaaaattttacctcattt

SEQ ID NO: 92819 - DNA, 1085 bp, Homo sapiens
actgactgggtttgagagagacatgcctttactactcagtccaattttggaaactgaggctataggagacctttcctttgaatgttctcacacctggtactccttggaagtaacaataataattattattattattgagagaagagcctttgtcttctcttaatcttagaaattcaggacagatgctaagagcctcccgcttgtttttcctaaagcagtgctctgaagtgctgaaatttctgtgccttctcccaatcctgcagagtcaagccagccatccacttgggaggcttgcactctctgcaaaaatgcatttgaagagcttgcctgtgggatgaggagtgagacacagtgagcatttggggtgcctgtgatccagctgtgggaaggtccacaggtgaagtatcccaaaatttctgattaagtccatggagtaggtaatagggtccatttcctctctctctctctctctctctctgtttttatttttttctcccagcctttctcaacctctcagctgtgctaattatctcaatattctggatggattaagaaatacatgaaccttttggaaagttaccttatggctaggggtctgggcatttattcaacacaatctcatttattattttctgtagaagaatcattgagtgagggttttctctgtgtagtgaactgtgccaccttagaggaagagtggcatgggtaaagttaaggttgttcttttactctcttcagtgtatctatttttataatttccccctatttgtgagctagaatttctcagctggatttccacactcctacaaaagtattcttgtctgtgagtggttgtcaaaattaatgcttctgcatgggaataaaaataaaaagctgctttttctgccatctttctgatatcttataacccatctttaatatgaagtccctaaaattctgctaaattaagaaattgctccaaatcacagaataattaagtggtgagtcaaaattttagcacagatttatctgactagaaagcccctgtttatcagccaagccatgctgtccttcacaaacctggttgctgtgcccattggccagtt

SEQ ID NO: 92820 - DNA, 1025 bp, Homo sapiens
attgtgaccgtttctcagactttccatgtttttgatgaacttgacaatgttgagcagcactagtcagatattttgtaaaatgtccctgaattgaaatgagtctgataattttcttattattagacttgagtaatgggcttttgggaggaagaccacagaggtaaagtgtcattccatcacatcatatcaagggtctatactattaccatgacttgtcactgacgatgctaactttgatcattgctcccaagatagtttctgaggtaaaaaattatttggaatgattctacatgggaaatttgtttatcctcccctatgtatatgtttattcaagtatttatttatctcagtttaaatgtacggatatttatgttacactctaagttataacatttatattttaaattttataataattttatttagttacattgaagtgaatctgtgcataaaaccttgattattttcttagtgattgacaaaattttcttgggttaaaggtaatacattcttgaaggcttctgatataatttgccataatgcctgtcctaaatgttataaaaatgtccactttactttgcctcctaactactttataaagggcaaagaaagtacctactctttctatatcccccaacagacatattgtagagctttttacatcaaggaggcatggcttgtgaattactctctcatccactgcatctactgtatgttttgtttttgtcttcagcaagacctctaactacacctgtttcaggaatgacatgtaaacctcatcatttggagacaacacttaatgaaaataatcccctctgggttaaattaatattttgctctcctttttcacttccttataaaagatatgtgggttggatagagacagtcatgggcgtttgtgtcaattttacacttagttcatgagagtgctggttatgttgcatttgtcacgacaacactctacgcgtaaatgggactgtttatgtttagaaggtgaggaaacagattccaaaaggtcaaggtgc

SEQ ID NO: 92821 - DNA, 1040 bp, Homo sapiens
tgtggctatttccctgatccacccaactgaaacacattttgataaattcttgaaatacctccagcttgctaaatccaaaggacatcttttttattccacatattgatttttctatttcgtctttctctaaacacacctggtttcaattacaccatgcactccaggcttaaccagaatgaaaatgtcactgttttatccatctctgttggttcccattttatgattatctttataggcttctccaacatttagccattagattttagagtcccttaacatttttccccagaccttcaactttccttctctataatctgtttccagacaattttatgctttcccaacattttaatcaccaccttgatgctgattactctcaaatataaatccacacttaagagcttcctttgattatcccttacctgtctagctacctgactgcttgatttctcaatttgaataaacataagtacctcaaagacaacatttctcgacccctatttatttgctttcttctcctgctttgcatgccagattggattccttcccattgtttctcatgtcatagcgtagcttccacatccagtaggtgaagcaagttacaaacctaactgccaccattggtacctcagtctttctaacactccatgttcaaatcatcatatagtcaggtgcacttcacattttaaaatagctctaaaattcatgcattttcaatgtctatactgatagaattttagttgctattcctccaaggtttattttcttatgttctatagcctgagagtaaacttcttatttatgaatttctttctatttatcttgttaaagttgactaaactgtgaatttcagggttgcttattattatcaattctggaatatagtcaatttctatttattgcctctgtatttgctttctctctggattctacttaattatatcctgaagactcttacttaattgtccatttgtttgatgtttttcataatttctgtttattgcttctttctgctacattctaaaatactttttctgctc

SEQ ID NO: 92822 - DNA, 1041 bp, Homo sapiens
aacagatccaattaaaaatgataaagttcaccaatgtttaaattagagctagctgaataaatattcccttcagcatttcatcaaagtttcaggtaaacaggcagactccaaggagagattataattaaaatatctatttttcctacatggatatatattaggtttctttttctgtaatacatgtttaaacatactgatattttttaaaacattatggtagcatgtagcataaaccccacctaaaggacactgaaagtgatgtggcatcagaatgaggttcactgtctactttcaggaagagataaactctgcttcttcatctagacttctacagcaacagtgtgtaaaacactacttgaatcctttaactggattgtcatcctttttctttaagctaatggaaacataaacttttggattcttatgccttaagattaaattttattactaaactctttactctctttttaaaaactttcttcttatttaaaccctttagtcaactccccagaacttataatacttttatctttatacacaccactgtaacttttggggtttccccgtgactcaatgtcaccattaattgggaaccagtatacccaactacttcacagattctttgcatataaggggatttattggatttattaatcaatttcatagggaatggaataaactagaaaacacatgtacatttttagcatttgcaaatgggaaaatgtttcagaatgcactactttagattacggtgtccgctgtgtagttctgacttcctacgagagactgaggtttcagtgagcttctaccaacctatttcactgctaagaaaaggacacgttgatcctttgtccacctggatccacggctagaagctaacctaatgacatgtcttctatcgttaagtttccttcccccagataggaaacctagcaaaccagagcagagcaattagtggtcctttatctcaaaaggatagcatgaatattcaggaatcgtgatatacagtgaatctgatgaggcttctctgcataaatatgc

SEQ ID NO: 92823 - DNA, 1044 bp, Homo sapiens
atttttaagagaccaggtctcactctcagccagacggtggccacactctggcacatagcagatcccaaacaaatgtgagacccttcccttccctctctccctgctcagtgccatgggcttgcctagagacacagaggaattctccttgctgaaaatgaacacccccatgaggagatctactttctgggatggttctcacccttcctccccttgtctgtctgacgcccacccctgaggccagcacacctcatcccttgtctgtttgttattctggacccctgactccaaaccatgggtaccccactacctctctgtttttgttgtttaactcacactgcgttatgtttagttgtttagttgtgaattgctgcttaacaaactaccccagaatgtagtggctgaagacaaccgtgtttattatttctcaaggttctgtgggtcaggaatcagggcagagtggatgaagctggctcatctctgtcccatgtgacatctcctgggactgggacaactcagacagcttcttcacttttctgcaccttggctgagagggctggcaggctgagctcagccaggacacggtgtctctttgtgtaatctcccgtggccactccacatgggctgtccttatagcctttctagcaaggtggccagacttcatgcatagaggctcagggctcccaaatcacaagagcagaagctcttaggtctccttgagactgaggcctggcactggtggagcatctgttcagttgcgttctattggtgaggtcaagtcacagggcagctcagatacaaggtggaaggggaaaaagtctaaacaagggcgcgaatatgggcatggtggctcacagaggccgcttttggataccaaccaccaccttcccttattcttcagtgatgacaatggctgagaacaaagctgctttgcctatgtctgacccacacaaagactttctcaagagtttcctcagtgatcttcattgataaagttgcgctagccccagctgcccctgaaatccctgattgatgactgtcacaggc

SEQ ID NO: 92824 - DNA, 1037 bp, Homo sapiens
gtctgaatggcacgagagaaaaatcaatcccgtggatagcaatgatcatcagttctttagagcaacccttgctttagtgtaatggagtcattcatcgtctggtttttggtccaaagtgttctcttctttatgttacagctaaagtcaggacctaaatggcaacacagctcagcagggcaaaacagattgcaaatcttattcttattgttttatgcttttgttgtaaaggattatcatttgttaccttatacgaaagcctgctctgtgaccacaggttcagttggtaaaatacagggctgagaataaaattcagatacacctgtggggatccaaacacattttcatttttctgcaacacagatagttttcgtgaagatagactgtcttaagtatattaaggagtcaattcattttgacattaaaatgatagatacattttaaaatattttatttgctgatttcctttgtttcagtgaatgacaactagaggttgttaacaatattagcaattgataatactttttattataattcagcctccactatatgctgagcgttgtatgctgcgttcatcaatacaaactctctctctctcacacacacacacacacaaaacacaaaacctgcaaaggagctataaatacatacattttacttatgaggaaattagggctgtgagagtttaggaaaataaattataccactatatctgtacaatgagcattacaaagccattaaaaagcaatattgtcgatgaatatctgatagcttggaaatctgtacacagtttactgtgaaccaagtgaagcaggtaccaacgcccatattcagtatatccagtgcggtaccatatgtggctttacacacacacacacacgctaccacagaaaaaggggtggaatgatccagccagaaccgtgccggtgagaagtacgtcgtggagttctcgctcacccctgctctgtggtttcagggtgtgaaggagctgtgtctgctgctgcttaaccagtccctcctgcttccatctctgaaacttc

SEQ ID NO: 92825 - DNA, 1061 bp, Homo sapiens
atatttgttgaataaatgaatatcaaatctttaaaaatttgtccaaggtcacccttaaaatggcagggcaggactcctgactttcagtctgatgttcttgccattaatgatgaaggattagaccatgccacttccccctgacatgcaagcaaaatgatttgcttggaataatgggaagatttccttatagagtggcctggtgcttttattttatttttattagtttgccatagtttgctgacaatgatttctgaccagccagttgcttctcatgtcacagcatgtttgtcccaatatgagcaagagatttgaaatgtttggatatagctccttgtgtcttttttcctaaaatgattaaagttgacagaacatccgttttaattggtcctgcaaatatttggagatgttgagagtttctctttatgaacaatgtgttccttgctttaaatatttgccctctcgctgttggcatcactgggggccaaagaaggaaccctggaatgtgtactatgtgcacgctaatctttaaaactgtcttgcaaagtggttaccatcctctctgttttaaatgaggtcacatgaccaatttaaggtgatacatggaactcaaaccagttctgtctggttctaaaacctatattcttggccttgtactacacttcttcctattttccagggaaatatatggcactgatatttgaatagcattggactacataaagcatagtcttttcctcttcccactatgactttacatggattaaatttgattagagatgagaaatcaggggtttgacagaatagaaaacattgcttcatcttttacatttgtcacgtctcgatacatggtactatatatgttaactgctgcttaattaaaatattgaaaaatgccatgcctattaactgttgtttgaacagggcaatatgtgtggaatattcaccaaatattcttcaagcatatgtcatttgacatgcactgtgctacactctagggacagaaaaatagacaaggcaattgatagtaaaatgtttggactttttagccaccagtccctagc

SEQ ID NO: 92826 - DNA, 1138 bp, Homo sapiens
tctgtggtggtgcaaactttttccggccccctaggaaatctctcccaagagtctctgaatgactctaatacaagtcatctcatatccccctcactctttttgttttctcgcctctctgctttccccttatgtaagagcattttccctgttcttggtaggtaatgatacagatttgttgaatatttggtagtacaaataagaaagccacactggcttaatgatgctactcatctagagtcttctccaagaagtaaatcagtgagtgtccccctcctcctttagaaagtaaagatgtctgtctggcattactgattgaaatctattttgaaggacaggtgcatttgatgggggaaaatgacttataattgtaaataacctcttgttacttggtgagtgaatgcagaagtattgtgtttagaatggaaacaccaacaacttctggaatgttacaaaactatgcccatagtttaaattgtctcttaaattattgtttttcaaaaattgtcttacctttcactagagtagtagaaagatcagggcactagtgggcagatacttgtgtgtgtgaccatcctccctctaccactagttttagaatttgggggaagattcttcatctgtgtgcttggctgcttggtgtataaaatggaagcttcaactagaggagatagaggatgttgtgctcccctcatcatttctctcacacacattaaactccactcttcatctccatatcccaaacacctagaagatccccaagtattgactgtatgagctcttgtttttttcattttctctctatccccttcttcattctcagagataactttgggtgatattaaggatagagacaagttcttacagagtaaggataagaatagataatgatattgcaatgttcagttaccaaaaaatgtgtgactgctactttcactgtggctgccaaccctcttaggcagactttgcatacatcagagagagacttaatatttaattatcctcgaggtgcccaaagtagtggccccacaaatcagtgtgttgctgggaaaccagccagctcctgcaaaattaaacacagagtctctggttcttgctacctcactggttctcggagagacagtaatttttagttttctaa

SEQ ID NO: 92827 - DNA, 1063 bp, Homo sapiens
aaaattaacaactgagttgctaaatttatgaaattcttaaaccaattatccacaacattttgtagtttcacttattcttaaatacaaataattcttttaaattgccataagatagcatttgacaagtatattaaataatacatactgaaagacatactcagtggcattgcagaattgtattcttctcagaagttaaaaaaaaaagacttgtaatcttattagggcatggaatttgatttaaggtaagttagactgggattcagcctaggtgatttatagctaaaagccttataaggatctggctacagcaaaacctgtataattcagtgctttagcatggatctccaggcccttgtgggagtgagtctcctgtatggataaccccttaagagttatggataaataatccattgacataatcaaataagatattcatttggggttacaagaaaagagattccagtatgagatagaacattgtacaaactgtccccttttctgaatcattttaaacttcacagtcctataataaccaagcattcatacttcacttttagagtagtataagatttgatactctaatggcatattgaaattctaatcatctggggaaaatgatagaaagaactggagctttggggtcctacagcactattattcatttgtgtgggcatattatatcacttccctgaagtttgttggttcagctgtaaaaagtaacttatgatgcctactttgcttaattattgtcagcaagtaatcagatatatagccgccccgtccgggaggtgaggggcgcctctgcccggccgcccctactgggaagtgaggagcccctctgcccggccagccgccccgtccgggagggaggtgggggggtcagccccccgcccggccagccgccccgtccgggagggaggtgggggggtcagccccccgcccggccagccgccccgtccaggagggaggtggggggggtcagccccccgcccggccagccgccccgtccgggagggaggtggggggatcagccccccgcctggccagccgccccgtccgggag

SEQ ID NO: 92828 - DNA, 1050 bp, Homo sapiens
ttgagcctgaatggtctcctgaatagagcacaccgatggctcttgactttcatccaatttgccagtctgtgtcatttaattggggcatttagcctgtttacatttaaggttaatattgttatgtataagtttgatccagccattatcatgctagctggttattttggccgttaattgatgtgatttcctcatagcatagatggtctttacaatttggtgtgtttctgcagtggctggtactggttgtttctttccttgtttagtgcttccttcaggagctctgacttctttcttgagcgagatccagaaaccctctcttggcgtctggatctggacacctttcccgtaacgctttcattctgcattccagccaagcccatgtacttctaggtgccccacttgctcctttgactagtgacctcttcacattcctcctttcttgtcttagtttctattcactcttgaggactctccttggagatgtcacctttcagcaaccctttcctgaccttgcatgcccatcacttccagtctgcagagtggcccttctgagggcttccatggcaccttgtgtttaccctgttgtagttgtaggatgatcatgcctctttgtaatgtcttttatctctccgtatttacaactagactttgacatacccaggggcagggccttgatctaattttgtcaccagcactcagcccaaggcagatgcacggtgtgcactcagtggatgtatgttgaatgaataaacagccatcagtagcttgatgccgttgtgccccttcctgcatgacttccgatccagggtggcattgtcccaatggcaaacatttggtctcagttttttgtttctttgtttcaactcacttaaagtgtcctttttaaatgtctcctagggccttcttacaggaattacttactgcagagtaactgggtaattttggagcattctgaaccacaactttccagggacatgttgagaacatgtaattttattgcacttgtaaagaatctttgttttctccgtatgttgatcagagttgttcagt

SEQ ID NO: 92829 - DNA, 1024 bp, Homo sapiens
tacaacatatgtgatttgatatctactgctatcacttaaaaacatacaagaacacatctacagctgtcagaaaggttgcatctttccttttcctcaaaccatttctactgtgtcttttgtcaaagagaaagccagatactttttaaaggcagtaaagacagattttcttaagtactaactactgcagagggaagagagcccagcataaaccaagctcagcttcaccaaaacaaaaaaggcagaatactttttcaacactggggtgtgtgaaaggaaaggcacaaggggcgttaagggaggtttggtccatgtaactgaaccatcttggtttgcaaattggcacttatctggagaagaaacaaactgctcatgtctttatgacagcaggtagttgtgcaagttggaacaaggcatccatggaagtgaggcccttaccctcccacagagagttggctccttgagtgtttatattgcaaagagactgatcccaggtccttcaggaaacacactaggtggtagaagatttacatctcaaagggacagagaaaggattataattgcaagctttctaaagtaactgctgtaaagaggggttgaggagcctattggcttatcaccaggtgttggctagaacaaacaatgcattctactgacagctttgaactttcttggcattttgacggggactggagtcattctagggacatggccttgctagaagccctgctaaaatttggtcaagcgtattaatgcaggggtttggatggagtcattttgtgtggagagtttgtgtagttttcactttcgtataattttattgtaatgcaattcaacgtctttgtgcttaaaatcatgtttctctgcatcagaaataatcaaatagaaagtaacatttaaaaaatgtcttgtgactctagggtttcaagggtttttttaaaaaatctatattcagttattttttcaattattgcagcatatatttgatcagagcagcattgatgtatcgggggaacccacccccaat

SEQ ID NO: 92830 - DNA, 1021 bp, Homo sapiens
atttataaacagcacttaacgtgctatactaagcactgagaagaaaagaatgactaagtgggggtccacagcctggtgaggagagtgtacaccataaaagcacacacagcatttggcatcagcacacagagagatgactgttaggctattagcaaaacataaagtgatttattgttttaatgaagttagttaaatatagctgagataatttgatgtctcttttgtggctccaatgtttgctggctcctgcaagccatcctgttatcatcagagcagatttacaggtgctttaaaaactctgagttataactcactagtgggtcctgtaattagtttgagcattgtggtcagcattaaagacacacaagcaaaacagaccactagactgtggattaggatcggaaacatcagaatgtatctccccttagtagggggtcatatcgtttcctgacatttttgtttgctttcagtatatgcaaatatgtctgtgtatatatatgtataataattgacttttgatacataatattgtttcttactgttggtcttgggcaaaaaagtttgaaagctactgtgtcaacttactggcagctgacgacatacatcagaggagtgcctgctccaggagctggcataagacagcataggagtgtttttcagtcctttaacataatgtcatttacaaccgaaatcgcctgtctccttcaaccccatccactctgtccagactcttgcagtgaccacctcactgtacctttgtttcaagtcccaggacccacctccattcacctcctaaactcaccattggccagttggttgggtcactcagaagcttaaaggctccagagctgcacactttctttgctattagaattaaccaggaaatgctcatgcaagatactggtttctttccacgaatgccgatgtctttcccaaacccacggattgagtcagtaagcctgataagagccagggaatttgcttttttgaggttgcacttaggtaatttcaatacaggtgg

SEQ ID NO: 92831 - DNA, 1038 bp, Homo sapiens
tgctggcttcttctgttagttaatctctgaaagttaaatatgcactatgtatataagctgctttataactaaaacttggttcaggaaaaatcacttaaacaggtttgaagggtaatcattaatttgattagtgaaaagtccacagtggtttcatggtatttctttctactctcttgaatatgggttctttggaatttttttctaaacaaagatttcaaagaaagatttcccttttctggttccaaagggaagataacagcttctttcttcagaatggaaactattaaaatgagctattgattactagcatctataaaagatcttagcaccttgtaatttactgaaaagggaggtttgggtatttatcatgagtcagtaaaggtattccagtatctgtcttgacaagataattgggtaaaattgcacagcaggcaaactaaattgtaggcacagaagaataagtgagtgggcaagagggaaagtaatgttgattgagagagactatattcataatcaagtcaaacatagatgaactaaagctgttatgatatagtcattgtccattttgtagatgagtctgtcttgaatactttgtttatcaaggtgttacgaatgaagtatgacaggagaactcttttcgattattgctgctgggagagagaactcatatctgtgttgcagaaagaatcctggttttgaagtggttgttgatatgggtgcttgaccttgatggttgctttgtgatgtcctgagcagttgtgtactttgagtccagacagatctggactctttatcttaaacaagtcatataacctctctgaatggcaatttatcatctataagttgataattacccaactttaacttagcaagaaagtaatcagcatgataaatacaaatttgttttctttcctccttttggcatgttgttctgcctgcaaatctttgtcaataagattccttttattgcgactacacagtttcttatttacttccttactacattgtttttagacttcattttgcaaattatgaagg

SEQ ID NO: 92832 - DNA, 1307 bp, Homo sapiens
tatgtagcatgtcttcccaggaattgggatggattgaattaatgctgttcaagtattaaactccctattagtaattccaaaatcatggctcagctctgtaacttcattaacacccagaccaactttaatataaataaatgtggctagttaatcacttactctcctttcctgtcagctgttggattctaggttgtgttctatttgaatgagtttcttgttattagagaagctgctaagaatcgtagaataatatcccattgagccccaaattagaggagtaaaaattggttggatgcctttttttatgcaacttgcactatttatgatttcaggaacagggtagaggttttttcccgaacttatccctggagaaaatacttttctcctcaggggtctagccatttatagtgaggttattgaactgcacctttgttattgagaacacttactgtagtccacagaaaatttatccagaggcaatggcgatgaaaattacttctagagtgagttactgtgagtgatcagatggttggcagacaaatctgatggaggtttataatagttgaaagagcaagaatatattgttttttaagtgttcggaggttttgaggttgaagaataacagagcaagagttcaaaaagctgtttttgggcctagttctgtgtcctgtctttgtggtctgctaactgggtaaagtgccacttctgcaactgacttttcagggccgttgtgagccttatgaaatggcaatagtgtacagggccaaacagttccttgcagacatggtcttcttccatttgttactcacttgctcgtgtttgtatgatgttggtaaaatgtcttcttttccatgtctttcataggctgatcccaaagaactaatcaagatggtcaccaggcatgtgactcgacatgagcacgaagcctggcctgaagaccttatttcactgaccaagcagttacactgctacaatgaacgtctcctggatttcactcaggcgcagatccttcagggccttcggaagggtgtggacgtgcagcggtttactgcagatgaccagtataaaagggaaactatccttggtctggcagagtaagtgataccctttgtttcataaggggatggatttaaactgcaaaagaataagttcagttaccaggactattaatttcagtcctttgaagttttacattcatggttgctatgaatagggctttccccaacttcatctagtcttatgtgggatgtgtgccttctccaaaccgatcagtagatgcagccagcattcccagctaaaaaaagttt

SEQ ID NO: 92833 - DNA, 1284 bp, Homo sapiens
ttgtttctaattccacagtcttttcacattttctctttccacctcctggatatgcgctgcaggaatgctaacttaggtagattactagccttggataaaagtattgatagaatttgtgggcttatttctcatgcacagcctgtgcatcttgaagggcagcatcgtcctgagccagcagaggccccctggagcccagcagctctctcagatgatccatggagctgcctccctcgcctgcatttttccttttaattttatgcattgatggttagcaaatggtcagtctgagagaattttctcttctagtatttgttctaattaactcatttttacgtttttaaaaaatacacatgtgaccccaaaactcaagtgttgaaaatagtatataataataagtcagtgtttcccatttgtatccatccagagatagttgatggctgtacatacttatataactattttttagacagatgtaagtaggctgtgcacattgttctgtatcttgattttttttccctcatatcttacctttgtaattgttgtaaatgtattttgaagtgtgatctttgcagcattcttttaaaaaagtgttcagaaggtaaaatcggttaaaaatggaaacgtcctttagttttatagactagggaagcaaactcagcgggggatgacattcagaattttatggtagactatttctaaaatgcgtttttttaagctactaattgaaaatactaagtagaaaattatctcaagcaaaataacaaccctaaaggggaaacacaccacctgtttaaaactttcgaaataatattaccaagaaatgtagagactattaaaccagaatagatttattacctctagtagtaagcagtagattaagtcattgagcattttgttgtcatgaatatttatgcacattttgtttttacggggatttgaccatattctttaaagaaatcatactttattcacctccctgaagaactgcattgccaagttttgaggggaaaatcaagtaatttaactcttcacaatttcctttttaaattatgaatggctttttatgctgttagtttttgcagcctgtgctattttgccatatcactttgaatactgaatatggaagattttgaagctgcccagagagctcttcataagcttcctagaggctaaaagctttcatacccatgcgtcatgtcactgaagtcagatgctggaaagagggagggaagtctgagtgtactctgaacaccaagacttccgagtgattctgggtgtgaagct

SEQ ID NO: 92834 - DNA, 1051 bp, Homo sapiens
aaagttactgtgactctgaatcctctcttgtaagttgaggaaaacatctaacttcttccgtagagaggttgtgagggggaactaattcaaatgattgctgagtgctcgttgagaagcagctaagccacaggaaataagataacagaggtttgtcagctcatcaagtgtgactatttaagtctgttcttgcttcttggtgaaattagtctttatgcttaaatgcaattgttaattcattaataattatgatttatctaaaatggaaataattgtctctgttgcactgtggttgttattggaagaaccttttatcaatcatttttagtgggaaacgaaaacatgttgtaactgaagaaaagaatttgcttactcaagcctgtggtttatagagggatggagggaacctactgggtactttctgtgtgctagagtgatgctctgcactttgcatactttacttcatttagtccttatttactgcttcagaccccaaatgcaaaatgctttgaaaaccagaaagatttttataatttgtttggcatcaaaacctgaactaaactgacatgaggctactttatagtctgcttatctcacttaatatgagtattcagatgttttgcagcagatatattaatgtctttgattattgggtgttcccacaccatacttagggtgttatgtaatacatgatatgtatatagcacaacctcctaaagtccaaaacattctgaattctggaactcaaaattatgtagtcaatcagttggggacctgagctttgatcccaggactttctggttctgacaatggtttccttcctgctgtatcattctgttggattttgtaggcaagagattcattatatatgtatagattttgttgtagttgttgttctaaaacatgcctgggattttggttttatctgggtattggtaagacacacagacatggaaacgattgtcacgaaggaagaagtttatattcacagatgcctaaaaatggaaggcaggacacacccaggtggggaagcatcctggtggtttagaggcag

SEQ ID NO: 92835 - DNA, 1075 bp, Homo sapiens
tggccatataacttgtttagacaatgctttatattcaaggtttgagaactagcattacaaattaaattcgtgcacactgctaaatgtagagcaggttttatttatttatttattttttatgtttaatggcaacgtccatgtaattcagtctctagccagtattacatgttgtgcatcccagtgaaacttacttaccatcttttctgaatattttgtcaaatattgcttcatatggtttgtggattccaagactaagaaacttccaagtgtgggttttgatttctactttattaggatctctgagtctgggtgagggctgctgagacagttttgatgcccagaggtagagtggagactcatgttctccactgttcccatcagttccctacaattcatgttagttaggagagccctgggctaggcacattatagagattaatgcctgggattattgtgtgggagaaaaaaagtcatgagataacttcaacaacaattgtgttagggatttgagaagagagattcctttcctttccatctcaaatcctgtggagagtggtatacttgatgcctgggatttttccagtcttgaagcagctgggaggccatgggtttagtgtggccagaaacagctggctgagtgcagtgctggagaccaggcatatataacttgtccagaagtgtcttctaggaaaccccctttggggaataagtaactgacagggagcttaagcatttgacgcagttttcagggaggatttctttcatttttcttccccagcatttttattgagaaaatttaaaattcacagtaaagttgaaataattttgcagtgaactcctgttcaatcctgctcattctccgttcactcccgtacactcctgtgtaccctccagttaatattgccacatttactgtacctgtatttttccacccctctattcatcaaccaaacccaacttcttttctgatgcatttcaaagtaaatcatagatatcagtaaacttcacctcttgacactacactgcatatctttaactattttttacttttgtgtgttttaaaatttacagtgaa

SEQ ID NO: 92836 - DNA, 1122 bp, Homo sapiens
attaacagtagatataataaccacattaaattatagctcataaatgagagatgactttatgtgtaatctactttaatacttaagactttcattacttcacttgtgaaaataatgatttttatttatatatccaagcaaaataaagatgtaattgttatgcagtagcatttatgttagtacaaatggagccgacaagtttgaagatattgctgttgtccctgtgaacaggatgtttgtctataaatagaacaaaatgcataatttgtgaataactaccaaaattacagatttccaatttcttattaatgttggtcattatgctttttagatggaacagtattctaccacttagagtatattaacattttgtttagctagtattaggtatatcacttaaccaatggtgttttctctagataaatctaattagagttagaaatggattgtatacaaggttcccattaaaaaatcatttgcactgtgggaaagcttgttatgagcattttaagtggctacagatttatacgactggactgattaatgtttaaaacttgagcatgggctaagtatagagctagtttgaatttgtaaaattattgtttagaaatatttaaataaaagtgagcagaatgtcagttatattacagtatcttggccagcatttacttcttccattcaccagttggtggacatttgggttgtttccatttcttagctattttgaataatgctgctctgaacattgatgtaaaagtctttgtatggaaatatgttttgatttctctagatgtagaatttctgcattgtttgttatattatgtctaacatctgaagaaactgccaaactttttgttttccaaagtgtctgcacatgttttacatttccacaaggaatatgttaaggttccaggttttctacatccttgctaatgtgtgttattaactgacttttttaaaaatttattttactttaagtcctgggatacatgtgcagaatgtgcaggtttgttacataggtatatgtgtgccatggtggcttgctgcacctattgacctgtcatctaagtttcctctcctctcccgcaacccctcaacaggccctggtatgtgttgttcccctcc

SEQ ID NO: 92837 - DNA, 1044 bp, Homo sapiens
tgccagtgctctggacagcatttgcattccaatttctaaatagtagttgaatttttatgatgagaagtttattgctgcatcatcttcatccgttcacttaatctgctggtcattatttttcaagccctttttataacctggtttcttttggaaacataaattttcttctctttcccttaccctggtaataccaagacttttttgtagggttccaaactaccatgattttggacttcctggtttgggtattttaattgggaactaatattaatcattgatctcttaggagactgatggctaattccatgcttcataagtggattgaaaggtcaaagcaactttttcctctcatcatttaaaatccctgtaatctctctgttttattttttaagtaatttgaaagacagtgttaacaagctcttctatcaattgacgttgcttgtcataatcattaagtcctttgcttggacttacaggtgagaacccagaagaaaggcggggacaggttctaatccttttagtggagcaggcacttcgcttccatgactacaaagcagccagtatgcattgtcaggagctgatggccacaggtgagtagacagcttatttaacactttgcttatgtcctctttatgtgatggataatggaaaaggtctgttctgaaatcaattgacctgattggtaagccagccacattgaggcttgagatacattttatgagcactggtaagtatataggctgtgtacttatatgttaatgtaaacattttaacagattcagacattaaattttatttgagattttggttgctttctagtccctattcaaaacatgctcgtaatttaaaaataattttatgcaaaatatttcaatgccatttcctgtatttgttatctaagagaaaatttaaatttttatattagtttgtgtctatatagtcaatatttccattctttaattttttttaaagatagtgtattatttcgttctcacactgctataaagaaatacctgagactgggtaatttataaaggaaagagg

SEQ ID NO: 92838 - DNA, 1001 bp, Homo sapiens
aaccagtgagcatttacatagctggtggttactgtattggatagcaaagatgcaaaacatttctgtgatcacaggaagttctgttgaaagcactactctgccccaacagcttacaatccagaagaccatttatgttggttttaacaacatgcactgcaggctcttgataagtgttttagaatttgtgaatgaaaacttatccataccttcctttaattacttgccaaattttttatttgtaatttttctttttgagccattttatgattcagcaatatggtatttcccatttatatagtatgtatataatatgtatcctgtaccacttaaaatactataagcatgaatcttagatattaatgttatagagatgctgtttgcattttactccttgtgtggctaagtcattgaggtaatgtgaattttaaacacttatttttttttaaatttgagttttaacggtgactccctgatgatcattccttggcatgaacataaacaccgagctaaagattggtgcgaggagttggcttgcaggtcagtatgagcctgcaggaggcatctttgtttctttgtgggatgggtgaactgatggccctgtgaaagtggtgtctgaccaatgaaaccttacttgatgacactccctaatttagaaagtttgagtgaagttttaaactcctttgactcagttatgttaaaattttttaatggaaaaattaaatactacaaaggaattatgttaaaaaatggtgcttattacaacaactgttttcattttgtgttattccctttcagtctttcacatatagtgatattaatttttttatagttgtaattatggtatgtatgcaattttgttcttgatcagttttaattttttttcttgtcagatttaactttgggaagcctcagaatgtgtaggcatccagtactgcagaaggggggtgggagagtcggtgtggggctgaaaattcatgtgaggaatattggaatgcctttat

SEQ ID NO: 92839 - DNA, 1073 bp, Homo sapiens
cctgtaatcccagcactttgggaggccgaggtgggtggattacctgggatcaggagtttgagaccagcctgattgatatggtgaaactgtctctctaaaaaaaaaaaaaattagccgggcctactgtggcgggcacctgtagtcccagctactcaggaggctgagacaggagaattgcttgcacttgagagacggaggttgcagtgagctgagattgtgccactgcactccagactgggcgaccgagcgagactccatctcaaaaaagaaaaaaaaagttgccctctacctgctgtgtacaaatctgactggtggctcctgatgcatggagggggaatggtggaaaaatggttggggactagactatagtccctatgtcctttctacaggcagtttagtatgctagctaaaagtgtaagctttggattctgactggttgtgttcaaatcctggctttgtcaatttattagctttgttaggatggacaagttaatttatgctttagttttctcattgtaatatgaggaagataatatctactacattagattgataggactaaattgagacattttatgttaacagcattgtattgggcctagtccatagtaggagatcagtcagtgctaaagattattgttgtcactgatcattgctgatacagcagcagtagtagtagtaatagtaatgctattattatcatcatcattgtcatcatcatcatatcagtgtgatcagcaaatttagaaacagactggttgtgctgtaccttgaaaatgcagcaaatgtgaaaatctgttttgattaaaaaatatgtatattatatatctgttttcttatttctgttcagtgaagataccattttacaacttactagtctctacataccaaataagtattattttgctgagggttcctaataactcttgcatctaatatatactttgaataggaaatacaaatctcaacttgtgatacatttttctaaaattcttttagaaaacattttatgtagcttaaggagccatgtctgttttaattagaaaggtcataatagcttgctaggtttattt

SEQ ID NO: 92840 - DNA, 1031 bp, Homo sapiens
gtattgttcaatgtatcacagtgcctatcacagctcccttagcacatggtgagtggcactcggttaatatttgttgaatgaatgaatggttcaatctgcatttgacataggtcaccctagcagtggtgaaactaaagttcatctatagaggttcaggtgctcataatacattgtcatgaataactgttgcttatttttacctggtggttgattttggttgtcctactgcaattaacttaatttttactgcctatttcatttacttccggattaaaaaaataacatttattaatatagccctttccaaaataaaggcaataatgcagatgtagtactttagttaacaattgatggttgaaattaattaattcaggccttatttatttaggcaggcagagttgtaaaggtttttaatattttcttgtcacccatatttaaaagccttttcattaaatcacttttcattaaatttcccctcaggaaatcctaggagtgcctcatgcatctgaacagagatatgatgctgaattctttaagaaattcagaaatcagaatattgttctctcagcaagaacttatgctcaggtaatttgctttttgtaaataaaataattatggttattaacactctctaaatctttgagctgtgcagttaatgttattgtgtgcatatattacattttcttttttgttttaatattaataagtgtagagaaaattttaatttaatatccatcattctgagttttaaaaataaataattttcatagccttagattgagaaacaggatataggctaggaaaaactagggtcatttcaaggtgtttcatatcagagctgcataaaaaagttagtttttgaatgttgtcatataaaatcactcctttatttcttagatttacattagaaacttaccccttgccttttgtacaggaaagtaatgtacaagccctggaaattctgtttacttaccatggttccgacctgcttcctcatcgccttgcaattctgtccaactttccagagacca

SEQ ID NO: 92841 - DNA, 1046 bp, Homo sapiens
ttccaagtaaatgagttgttactgttcatttgatagtttctttaaaataactaatcatttcagtgtgttccttactagtaataattagtccaaattattttagcaacttagatcaaatgtacttactattatcttacccttgtgcttttctgaactgtttcatgagttttgggctcaacggaatattaatcattttcattataactcctagagaaataattctgtgtaaatataagtggcctaacatagttattcaaaacaggttgacactggaacaaaaggaactttgccgttgtagacggaagttattaacctacttagatcgacttgcaacatatgaggtaatgaataatttttgtcaaaccaattatgttcatttgatctgtcattataaatgctatggctgccctaatatcggatattcttggtctttagaactatttttctgggaaaaattaatttcttatagaagcaagttctcttatatactagttttggtaaaaattagagattgtgaaagccagaagttgttttgttagactagggaatagaagtgccttagccatttcagtgcatttgtgttttctagatttataatctttttcatttacttttatattttgattttaagataatggcacataacttttttccataccagatttcagtatatactaggttttaatgtgaatatttctgactcgttttattttagtgatttttttttttttttgagataggatctcactctgttctccaggctggagtgcagtggcatgatctcagctcactgcaacctctgcctcctgggttcaggcgattctcatcccttagcctcctgagtagctggaactacaggcacatgccaccacacatggcaaatttttgcatttttttagagacagggttttgccatgttgcccagtctggttttgaacttctagactcaagcaatccacccgcctcagcctcctgaagtgctaggattacaggtgtgagccactatgcctggcgtattttaattatttgttagtgggttgaattta

SEQ ID NO: 92842 - DNA, 1029 bp, Homo sapiens
cttgggactacaggcacacaacaccacacctggctaatttttgtatttttagtagagacgggggttcaccatattaaaaataactggccgtataagtagatttcagatacaactctagaaacccagtgaagatagtgattattatagatctggtagagatggaagattttatatagtgaagatgtttggagcagggatttggaaggatttaaattaggccttcttgaatgagaagggaggaagacattcttaacaggacagatggtatgaacaaattaaaagacactgagcatgatttatgaggccagtgactaaatctgttttattcactgctatatttccatgtctagttcagtggctggtgtgcagtaggtgcccagtaaacattttatggataaatgagctctgtacatcaaccagtttgctggcactgatatttgacaatagtgaacactgggaaacatgattgaaaagatatattgatttgagttcaggaggatgtggaaagcttctgatgacttaggcatttatctactgttgtggatttctgactgtggaagcagaggaagatggtgtagagagaattggagtggaaggaaggtaggaaaccttgcttggggcaggggactcctacagtgtgctagatgttttgtgttgatgatttagactggtatggaggccgcagctgtggaaaagggaaagtgaattaagagacatttgaagaaagaactgatgtgaggcaatatataaaggatcctagggaatgagtcaaatcttaattaaaatttataaccataatagctctttctaggaagagggcaagtcagggattttttttttattttttattttttaattattattttactttaagttctagggtacatgtgcacaacgtgcaggtttgttacatatgtatacatgtgccatggtggtgtgctgcacccattaactcgtcatttacattaggcatatctcctaatgctatccctcccccctccccccaccccccagcaggccccggtgtgt

SEQ ID NO: 92843 - DNA, 1050 bp, Homo sapiens
cactttgggaggccaaggcgggtggatcaattaaggccaggaatttgtgaccagcctggccaacatggtgaaaccctatctctagtaaaaatacaaaaattggctgggcgtggtggcgggtgcctgtaatcccagctactcgggaggctgaggcaggagaatcgtctgaacctgggaggccgaggttgcagtaagctgagatcacgccactgcattccagcctgggtgacagaggaggctccatctcaaagaagaagaagaagaagaagaagaagaaaaaaacaggctttagtttagatttgagctgataatgtatgtgcatatttctgatgtatataatgcttgctgtaaggttcctttgagttccattgttaatcttgatcacatagctgatttaatgaatcaaaccagagtagatttagaaatatattttctttcattaattctaaaaagttattcttatttccttactattaacttcaaatctcctttttcaatttagtgtgagattaaacttgcccccaaacgatctcgtttggagactagagctggagaagaagatgaaggagaagaggattctgattctgattatgaaatatctgccaaggctcgctactttggttatataaaacagggcctttacttggtgactgaaatggagcgatttgcaccaccacggaaacgcccacgaaccattactaaaaactaccgccttgtgagtttgcgctccacgacaccagaggaactttatcagaggaaggtgagagagtagcatattactacccaagtttgaagtcatcaagcttttcttttattgagaaaaagttaattttttaataaaggagaaaatttcaagagggatgttggatcattgacatgttaaaaatatcagttctataaagctttttaaaataatgctaatctttgtacctaaataatcaaaatcaaaaccatggataaaaattgaattcacttagactgattatccacttggtggcttagctcatttctttgctacccttcatgtggccttcagctctccctttatct

SEQ ID NO: 92844 - DNA, 2108 bp, Homo sapiens
tcctcttgtcctgctctctactttcatgtaaccatttctgccgtactttccaaaacttcattccattgtaaacacgcctgtgaggcttcaacctcttcacagacactctggtttctttctgtatgctaattgcatacttgtatagcttaataggaagaaggtacaggaataagatcgtcttgtagcttttacaaaatttaccctaactacatttattatttattgagcactttgtcctatggttgtgcaacaagtaagcaatagagctgagatttgattttatacctctctgacactgatgcatatgttctttccatgactgtgtgggaaagaaatacataaaacaacaaaaagataagtggaagaatacttatttattaggctagcgaatgccagagtgtactacacacattttttcccacaatacttgtgttattagttatttagtggcatcctattatttgaaagatcagatttgtatgtaaaaggttaggaggactataatcactctttataattattaattttttacattgattctttttatttgatgatctttaaaaacacagagacaaatcctttttctcggtggatgtgatacagattccttcagctctctcagatatgcttaactcttgagctagttagtgtgtaccagataccagaataaataattggggaagcctctcattggtaaacccttagctttctaatagatatctagagtactcatgatgtagtggggttgggggaaggtggtaactttgtcaagcaagaagagtttgaacaaccatagtttctttgagtctttcacctgtatcctgggaatcaatcacttggatgttttagatttgaattttagcttatgaattactaaaatctagtgtattatagtaagtataataaagcctatgtgtaacaggactgtacagtagagtaggttgttcctatttacgtaataacataatggtgaaataataaagttcaagtatttattgactctactaagagctccagtagggaatacagtgtcatagtccctgctcttaagatattcacaggcttccaagggaaattatgaacaaatgattaaaatgacatgttaatattttgagaagataagctcaggaaaggcatgtaggtcagctgatagtgttggggagaaggattattggaaataaatagtatttgtgtagtaaggcttgactatttacagagcatagttttcatttgtctcacaacaaccctattaacccatgtatgctggaggtggcaaattttttttgtgaaaaatcagaccttggccatgaccttgagcagtaggatttaaataactcccacaagcttagcattccaataatggaacactaggcataaatgggtgggaatggtgctaaaagaggttaacttgagatcactaaatgttagagtcaagattccattttgattgaagtctcctgacttcataggttaagccttttttcagaatatctacttacagtacttacatttagaagtattgacttttatctgggtaaatcagagactagcatatgatattaatggtaagcaagggagatatatcagcttgaagtttatatgaataacatcccctggagtcacgcagttcattatgtagagaccctagaaatgtgcaagtagtaataactgagaggtgtaatacagttgtttaccaaatatgtaaagtggctgtgtgtactcatcactggaatcctttaaagagaaatcccaagctttgaaaaatactgagacagctactcttctttcatgtctctagtaataatcaagtgagcttggatcagccaggtagggcagagtttcacctctctttatggctgctctagtaagtagacaaaccgattagtttcaaatcgatgatatggtgatatttaaactagtcagcttataattttagtttaaatgttgtctgagaagaaattaatgttgctgctaccctgcacagccttaaacctctttaccaaaattgtgaattcaactcatttggggctttcttcatgcaatttgccgctttattagtttttataatatgctttgtgtgattgagtattttctctgtaaaacctaat

SEQ ID NO: 92845 - DNA, 1029 bp, Homo sapiens
agtattttcactcagagtggacttagtctttttggtggtagttttggttttagatggaccttagccatttttgctagctcccctctgtcctccctgggtgtttttcaatttgcttttgctcaccaccacaccttgtggcaggtcacaatggagtaagtggggacataggttttagcaggagcaatggagatgacacattgggatttggtgatttctttctttttgcttacagttattgtaaagtttgggttattctctatcttcaggctaagtggagagtatggtttttgtgtagatttatctccctttcttgttcttgatttttttggagaaagtatttggagaagtgtatcaaggccatccctaatgttttcaactcagaagttctggctattgtgaatattgttgctgtgaacattcatgtacaaatatttgtttgaatgcttgttttcattcttttgtgtatagatctcagatggaattgctgggtcgtatgttagttttatgtttaagtttttgaggaaccaccaagcttcttccacagtggctgtacggttttatgttcccatcaatagtgtatgagggttccagattccctacatcctcaacaatgttattttccactgaaaaaatatagtttctaagtctaaagacaaaaaattgtcatgtgttatattaaattattttatgcactgatttctaatgatgaagtcttttttggtgtttttcaagcatagaatcaattgttaatagatgaaattgctttgggaagttttagctttttctatactgatgttaggataaaatggcaaccttgggcagccttacttgagaagagcttgcggtggattttgatttgcataaagtttactggttatatatttaaaaaagcatttgatcatggatgtcttttgtaagattgtaccacttggtggatttttttttcccaaacaaaaacaaaatctcaccaagatccttgacaccttcttggtgattttctttaatcaattaaaaaaatactagatttgc

SEQ ID NO: 92846 - DNA, 1022 bp, Homo sapiens
tttaatgtgttggcagctatttggagtgctttttatatgctctaactcatttaattctaagtaaccctttgaggtaaatattgttactggcccgagtctgttgatgaggtggtaagtgaggtgtagttaagtaagttgccctgatcatccagctagcaaatggcagaattagagtccagatttccatgttgttccatatttacatggactattcatccatccatccattcattctatacttacttattgagcttctattttgtgtcaggcagtccttggggctgtagtagtcagcataggctaggttctattttgataattcaagcaatcaaatgagcaaatgcaaagtcctgaaatttctgtggcttatcatatacatattttttccttattttgtggcaaagcctgatgttgagatcatgactctcctgggcagcttgttttaagtgatgattaaaagatccatggagaatggtgaccttttggggtcccactatctccgtttatggtcttaggaagggaagggagagataataggtggaactttttactgtcttagaccagaagtgacattggttctacttacagttcatttattgtattatggcccctcctagcttcaaaggggctgggaaatagttttctatgtgtccagaaagatgtgaaaaactaggtattggtaaatactaattatgtttaccatcctggccacactgcagtcttgcatgtcttagttatttgtgtaaactgtatgaaagtgagcacttgggccgggcgtggtggctcacgcctgtaatcccatcactttgggaggccgaagtgggtggatcacgaggtcaggagttcaagaccagcctgagcaacatggtgaaaccccgtctctactaaaaatataaaaattagctgggcctggtggtgtgcacctgtaatcccagctactcaggaggctgaggcaggagaatcgattgaacctgggaggcggaggttgcagtgagccgagattgtgccactgcactccagcc

SEQ ID NO: 92847 - DNA, 1039 bp, Homo sapiens
tcccgccttggcctcccaaagtgctgacattacaggcatgagccactgtgctcagcctgtttaaatagctcttttattccacttgtgtacttccaccatcacagccttagttcaggctcttaacattttttacttggtttcttacaacagtctgctgacaaagttttcttctgtatgccctctagtaatccacactttatactccttggcaaattgatcattaaaaaaacactattctagcaggtaacccttcacatctgacttaactgctttctagatttctggtaacctcgggcaagttacctctctgagccccagtttcattatctgtaaaatgggcataattttataaattgagttgtggaaagattatatgaattaatgtatgtaaaactctcggcatagtgtctgacacatcatgaatacttaggagatgttaagctattgttataattactgttactataattctacctgaaatctgtcagttgtttgctattgactggaatacagttcattttttctaatttacgataaaagacttttcgcaatcagcctgtctatcccgtgagagtctcctgctatatgtcttatgttctagtacaaaacagtgtgcaattttctaaccccattgtgttcttcatgccttcacgtacagatggttccttttctcggaagctcctacctttgtattgaattaattagtcttgtatattttagatcaagcatcggctctcctccctgtgttcgctcccaccatttgtacatcttcatgtttcccatctagttgcttctgcctatatcacagcacttacttagcctgctttccttttttattgatttaatttatatatattttttgagatgaagtcttgctctgttgcgcaggctggagtgcagtggtgcgatctcagctcactgcaccctctgcctcccaggttcatgtgattctcctgcctcagcctcctgaagtagctgggattacaggtgcgtgccatcacacccggcatttttttgtatttttgatagagatgcggtt

SEQ ID NO: 92848 - DNA, 1047 bp, Homo sapiens
gaacattgatatgatgcctggaaagtcagcaatgagtcccgaagataaaagccgcacactaagactactgaagcagaaataaaaggctggatccttaatgatggtaagcccaggtctgtctacctctagacctctcttgcagcttgagaatgtcccagttaagccactttaaaatttcttttttctgcagcccaacactttgctaagaggtacagaaaagaaaggaaataaaacacacatcattatggatattgtgtaatgtatctttcaggaacattttttgaatgtttcataatacagcaataatcaagctattctggctaaaaggcggaggagacatttggcctgagttgtgagggaaacatccaaaattatccctgaatatatggccatttcctcacaatgaaaatgaaggtgaaatgtgacatatacagtagaggatgtgactctgaacccagcctagggaacacaagtcaaattaggttgtttagtttgtcctttcattgacatccaccctcctcctcagttcctattcccaggtccttctggaacaagataaagccagctgcttagtttctgaggatctcaccaccaagaaggaggaagcagctagagagagaatttgttttaatctaaaagaagttgagtagaaaatacaatatcgtcatccataaaccccctccctcacaaagtccttcctcacaatatagaatacaaacctacccatcatttcacacaagtaacagtaaccttccccctccataaatgctgtccgtgtaggttgccccagatctacctgttaggagggaaaaaacgactcaggagtacttgcactggatcttgaatcttgctatggtcagtctttccattaacaaactctctccccttcaacacagctcttagttggtaaggctcctgaatccaccctccataggatggtcctccatgtccagcctcctgcttacttccagccttattacctgccactctccacaaattttactttctagcatatcaaactgtgtagaaatccttgcatatgccaca

SEQ ID NO: 92849 - DNA, 1072 bp, Homo sapiens
ccatatctccagtcatgtaagatattttttttcttttttgggggggagaatgggggggtggggggatgtagtctccttctgtcgccccagctggagtgcaatggtgtgatcttggctcactgcagcctccacctcccaggttcaagcaattctcctgcctcagcctcctgagtagctgggattacaggcgcctaccaccatgccctgctcatttttgtattattagtagagacgggggtttcaccatgttggccaggctggtctcgaactcctgacctcaggtgatccgctcacctcggcttcccaaagtgcaacagtcatgtaagatttctgactgtttcagttacatcttctaataggattcaattggaaactgctcagagttgttgctgtttttcttttcccaacattctcctaaaacgattttagagccaaggtctgtaggatagttctaggtagtcattttataggttcacatctttgggagtcatacacaaatttcatgaatgttagaggtaaaggactggaaaaagtctgtgatatgaaataagacaaaactggaatttcacgaatgtttctaatttttccttaactgttaaaagtattatacttaaggtccgctttcaaagaaaacttgcagggaacatgaccagaatggtacaagagattgtctggaatttactgaaaatgatatgttgtttcttgtataacaattttgcaaagagcttcagcttgcagtattccgtatgcagtaagaacacaccactcctttgtttcaagcagtttgcattttaggagagagaacatagactgtaatacaggttaattcttaggaaggtctgcctggatattcaactttagatcttcattagtttatctgtggcttttttttttcctgagattaagagctaggaaagtcgccaggtgcagtggcttatgcctgtaatcccagcactttgggagtccaaggtgggcagatcacgaggtcaggagattgagaccatcctggctaacacagtgaaaccccgtctctactaaaaatatgaaaaaaaattagcgggcgtggtggcat

SEQ ID NO: 92850 - DNA, 1180 bp, Homo sapiens
agggtattcacatggtcctagaatagccaaggcacataactgccacattgtctctaaatgcaacaaccctgtctattcttggcagacttttcacgagtcatgagaggtaaacaggcactgtagtggctacagtttattaggtgacaaccatgctccagttgcattacatgattatctctggtcttcatatagccctgcaaggtaggcaatatcagccccattttgtgtggagaaaacagatttatagctttgcctaaggtcacttgctaataagtgagaacttagatttgaactcaggtctttctccagaacttgtgctctttcaacagtgccacgctcagtagatttgatgtaactgagctatccttcaaaatctttaccctgttttatgaatagtaattttgagagcaatgcaatttatcatttcagtttatgtggtttttaaaattaatttttactttcagagatgggtgtaatgcctgagattgcacaagctgtggaagagatggattggctgtaagtacataaagcctaaatgtacctgggagaggatgttttataatttaaacagttgttagtgattttatcaaatatttttgtgtctagttgggtaagtgaaaatcaggttttttttgtgattttctaaattatggaaagtttcctttttttaaccttgacatatttctagtggaataagatggatcgtatttaccacgtaaaattttcttttaggcaaattaacgtgacttaatttgcttaggcgatttttttccccagtaactaaaattcttcaaatatgattcttttagcctcccaactgatatccaggctgaatctatcccattgatcttaggaggaggtgatgtacttatggtaagtttaaatttggtgaggtgattggtagctggggacacactctaagaattgcataggcttacaaatgctactttacctttattcacaaacatttatgatacatatactgtattcagactattaggtaaaagcttcaaacaggtaagtatttactcctgagaagcttaaacccactagggcaataagacatgtataagaatgaatctcgtatcagagagaatgtggcttcttcgtaagagatgcagagtagtatagaattcaagtgggaatccagttgtccttttgcttgaaggatcatagggac

SEQ ID NO: 92851 - DNA, 1031 bp, Homo sapiens
ttatgaagagctaaaaaaagtatgaccttaagaacatagttttaaatgggcgttagagagttacaatagctttagtgtttatactcacttctgaattttaatatgatgactcttaaaataaaaaggttacatacagaagttgatctcctactggcctggactagagaaataatttgtcggactggatggtatttttcctctttagtgtaggttcattctaccagtctccattgttctatctttttgtgatgttagctgcgtcctatttccttcattcagtccactctgtgttgtctgatgggtatttttggtttgggtaaatgaaattgtagtagcaatctggaatatgtatgattagttgatgtgtgtgcataacttttgtcatttatattggttattaaattgtcgttaatatgtgaatactaatatagataccttttgtttctttgataggcttttagtattccagttatccagatagtttatgaaactctgaaagaccaacaggaaggcaaaaaaggaaaaacaacaattaaaactggtgcttcaggtaatttttgtaaattgatatttccttttatataaatcattggttctcatcactgacagttaggaaagtgagatttgggtatgcatttttaaaatcttgtcagtatctggggggtggtattgggatctggaaccctggaaaccagggatgctaaatgttgttgagagcctaaacactgcaaggttgtccctcctaaaatactaatagtgttccctttgagaaaacactagcattttggagattacatttcaatattatagtgtttttcttaaccttataactttctatgcttaatgctaaaggaaaataggtacattttacaaaaatattaaggaaggattttacaaataatttatggagtaaaaacccatgctggtgggaagtattgccttacagggaacagaggcattttttttcctctaagataagaagggaaccacctaggaagttaaaatataaattttaaagttgtttcttatgt

SEQ ID NO: 92852 - DNA, 1034 bp, Homo sapiens
cgctctgtcgcccaggctggagtgcagtggctcgatctctgctcactgcagtctccacctcctgggctcaagcgattctcctgcctcagcctcccgagtagctgggattacagtcacacgccaccatgcctggctaatttttgtatttttttttttagtagagatgaggtttcaccacgttggccaggctggtcttgaactcctgacctcaagtgaaccacccacgtcagcttcccaaagtgctgagattacagtcgtgagtcaccgcacccggccaagcattttaaattttatatatctgtgggtaacttttcttattttaatttgtttagtgctgaacaaatggcagatgaacccatatgacagaggatctgcttttggtaagtggatagactttccatcagctcatttgtaattcagaaactttaaaaaataatacatgagaacaccaagtaaataagattaagatttaatttaccagatattagaatttagtcactatcattaaacagtatagaactgacataggaatagacagtggaacataatggaaataaatctcagcacatatgagaagttatatgcaggaaaaataattatatttcatttcagtgagacaaaaggatggtttattaagtaaagggtgctgacacgatccatctggagcaatataaaattgacttctatctcatatcataattagaaataaattccatgtgtatttaggacttaaatatatatgtatgaatttgaatacagaaaactacatgtataatttagcagtggcaaaactttcctaacccaaatagaaaatgcagaaattataaaagaaagtatttataggtggagttggacagtcctccttcttggggttaacagaccttacagtggcttttatccaattcaccaggctggctgttcacttgggaataacctccatcatgcatagagccatctgtgattgttccatagtgagcagcgagacctgcatcaactcaaatatgcccttctattctgctgcatttaaaactaag

SEQ ID NO: 92853 - DNA, 2684 bp, Homo sapiens
cagacacatgtttgtttattcttggtttcccatactttcccattatggtttcttccagctgagaactgtaattcaattcaattctgacaccgtcttcatgaagatagcatcatatcccacaggttgagggttcaatcacacaagactgtcccccacatctgatgcccaggttgtggcttatgcttctaacctattggctataaatcagggttcctacaattccttcctcaggttcaattaatttgctagagtggctcacagaactcggggaaatatgtttactggtttatttttaaagctattataaagaatactgatgaagagatgcataagctgaagtacaggaaggggcttggagcttctcccctccctgggcatgacacccttcaggaaccgtcatgtgttcagctatcctggaagctcctagataactttttaaaagttcagttctacataattcagtacccatatgggtaagaattcatactttgaataattaaatttctgaaaagtgtaggaagatgtgtgttgaggtgcttaacagtttgttctactttcaagtacagaatacgagttggaaagatgaaccaggacagaaattatagtttttttccagtacagacaaaaagctgaatctttacttaaaaccatttagtatgtggacatcactgagactgatcatgatgtatagtatagaatatacctcatcttttagagcccttataatattagcaagtaacaaatacatgcttatttattcatgctttctcctagtttcccatatggtttcttccatggattgaggaacaagctagagacagttctgttatcttttagttatatagtcactcaagctctaatttaagtataaaatcaggacgaatattgatgagcgagttgtgcatcatccttgagtacgtttctttaaagggctccagagaatagttatctaaacacatttgtattgatggtgcaactactattagtgcaagtcaggttaagagctgtgttgaatcctttctagacttgttgctgtaaaatcttaccttagttaacagatggcagcatagaaaatagcccccaacatagccaaggacacccagggaatgaaatggttaattacacttgggaaatactactatcactcaggaatcagtaagtctcagtctctggaacattgcaacaaatgaaggaattatcttgttagtgagactgaatgattttttttggtggtagggggtgggaatgtatgatttataaaacctgtactgacgtgtttttctgtgttttcttctcaaatccagcaattgggtcagatggtctttgttgtcaaagcagagaagtaaaggaatggcatgggtgtagagctactaaaggattaatgaaaggtatttgaacagcatctgcacttgtataaacttttgaggcaaggtattaatacgtgagggtttttttgttgttgtttgtttgtttttgagatggagtctcgcacgtcgcccgggctggagggcccgggctggagggcagtggtgccatctcggctcactgcaacctccacctcccgggttcaagcaattctcctaccgcagcttcccgagtagctgggattacaggcgcccaccaccatgcctggctaatttttgtacttttagtagagatgggtttcaccatgttggccaggctggttttgaactcctaacctcaggtgatctgcttgccttagcctcctaaagtgctgcctgcaggcgtgagccactatgcctggcccatgagtttttaaaaatagctttaagtcgaggatctgggaaggtgtttgatggtacaaatatacctataattcttcatttggtacatacctgtgtaattcagaaacaatgggaagatgacttcatggtaaatgaatcgtgtgtgtgatttatataaatctcaatgtattttacccttgtagggaaacactactatgaagtatcctgtcatgaccaagggttatgcagggtcgggtggtctaccatgcaggcctctttggacctaggtaagtgtttctaaaataactgaattgattgatttacatttgggggataacattttattatttggggaagcaaaataataaatttaaccataaaaaggttttattttaaagacatggaaacaatatttatctgtaccccaccctgttccaaaaaggatttgaaggaacttacaaaaagtacagatattatagcagtatgaaatgagggataagaatatgaatggagtcagggtaaagttagtgtgtgtgaatctgtaccacacagtaccatatagatgcttcatgttattgtaaacttgcatctgaatttcttagtggacaaagcagagagggatgcagtatcactggtgtccctagtctcacacacgctctgtggcctaagcactgtttagttttttgcaggattcagaaacttagggaatagttttcctgtgggtttatgaaatggacatactatgtgaataaaattacttcttttagaggtcttttaattttatattttctcttaccagaaaagtaaaatattttttaaatctaggtactgacaagtttggatttggctttggtggaacaggaaagaaatcccataacaaacaatttgataattatggagaggtaagcgattatgttatgacttcaacatagcataagt

SEQ ID NO: 92854 - DNA, 2514 bp, Homo sapiens
agaatgagggtatacaaatgattctcaaaatgagcagattttctgtatattttccacagaaagtttggatttggactttagtgaagaaatattgtcaagctagataaatatgtagtagttataatttttcttttatgccatttgtcatcccctccaaaatacattacgttgtcttctcttttcacctcattttgattttggctttgatacatgttattctcatttcttattattgatcatgatgagtctaaatatagttcgtctggtgagctgaaatctacagtagtgtgaatgagcctaaatatgttgattctaacaagcctgtcaaatgcttgtactattgtatatgtcatatgctctaataggcatttttgatttaaataattattttgaaacacatacttttgatgcagctatattttaactttatttaagaatttactttctattaatagcatttgactttctggtgttctaggaattcactatgcatgataccattggatgttacctggatatagataagggacatgtcaagttctccaaaaatggtaagctctatatggatcttagtagtgaaaagatacatgatattcaataattgtggtttttaaaaatccccccaccctgtttttcaaatccccgtccctccctccctgcctttacttgaactaatatttattgagcattgactatgtgtaaggtaccctggtaagtactggaggcacagaagaaaatggaatagacatttggggcttacacactagtggtgaaagacagacatataataccatgttaggtggtagtaagtgctgtgaaggagggtataaagcaggggaaggaagtggagagtcatagcggtttgggggtttgtgcttttgtgtagggcagtcaaaaggcttgataagggacatttaggtagagatccaaatgagttgggtggtaggccatgcagatttctgcaaagggaatagtaaatgtggatgccctgagatggaagcgtgcttgaggtgtctgagtcacagcgaggaagccactagatctggagtgctctggggataaaggacggtggtagaatgttagatgagtgaggtggtgaggccaggccatggagagccatatgggccatgatctaaactttggtttttattttgagtgaaatggaaagccatgagggttttgagcagaggggtggcatcatctgtctttagtttaacagtaccattctggctgctttgttgaagacacattggagggtggggtgagattgcctagggattgagggtagttaaagagaagaagagatctgaggcctgggttcctgtggttaggggtcagcaaattgaggagaatccagcagaggggaatgaggaggaaggccaggaggagaaccaagaaagcatgggtcctacagtcctggtgaaggaagtgtttgaaggatcagggagcaatcactgttcagtgctgcggatgggtctagtctagcaagatgaagaatgtgcattaactgctgcatttgacaagtggaaagcattagagagctgttttggtggagcaaaggggtgagggtggggagcctcctaataaggagccagttcaatagagaatgagatgaaagaaagtggatacagtgtaaatggaaatcggagtttcactacaaaagggaggagaaaaatggaaggtaaatggagggagaggtgagttcaagggaggttttcttgtgtgttttactgtgagagtatgtttatatgctttgaaatgtctaatggaaatgaacttgtagacagggagtaatgaaaaatgtagaggggtagaagtgacagtttcaggagtaaagtaaaaaaatgaagaagctggccttaggcagcacagtttatccatagtgacaggagagaggcatgaatgcaggtaagctggtagatttgacattgtcagcatgaggaaggtcttttctgattgttttaatctctctctctctcttgttttttaaggaaaagatcttggtctggcatttgaaataccaccacatatgaaaaaccaagccctctttcctgcctgtgttttgaaggtaattaggaatctagttagaaaaaatttgctgtggttgtaagctgcttactcttcattattttgtatacgatggttttcaattagggtaggaattttaattttctgttttattcaatgctagaatgctgaactgaaatttaacttcggtgaagaggaatttaagtttccaccaaaagatggctttgttgctctttccaaggcaccggatggttacattgtcaaatcacagcactcaggtattatacctgcaagggtaaggatttctagaatagtgagaataattgatgagaactccagtaagtaaggcgtctcatagtgagttacatatactttccttgctggtttagtcacacatctttttttaacacagcagtaaaattcatttttaaaacctaattcataaactcttaagtatttggtttcagtgtaggcattttgggatcg

SEQ ID NO: 92855 - DNA, 1018 bp, Homo sapiens
aaaagcctgtgtttttttttaggttttttttttttttttttttttatgaagtctcgctatgttgcccaggctgaagtaagtggctgttcacaggttcagtcttcctacactgtagccttgaactcctagactcaaggaattctctctcttgcctcagcctcccgagtagctgagaatacaggcacatgccactgtttcaggcaggcctgtctttttaatattgatcttatttacaggttgaacaaacttatttagggataaattatgtaaaataattactaattttgttttgaagattgatgcatgttccttattcagcaaatgttcatctaccttccatatgtgaagttttaggctgggagccagggcttcaacaatgaaaattaatcttcctttcacagaattaagtgtgaaagtgtggggatagtgtggaggggagagaaacaaaacaaatacaataaatgccttgagcataccatgtaaccagggcatctgcttagtgtaagaaactcagggacgtctttataaaaggatttgggaagaatgtaaaatgctagtgtgaattgatttttgtgctgtgattatgtataaaaatgaacatgattatagacaaaagttagaggggaagatgaataataaaatcaatttattggttaagatggtaaagtcatgggccacttgtttggtattcggtacaaatggacattttctttcttaaaacccagctgaagtcatgatctttgaatgaagctaagctggctgtcccagcccagccatctgcccctcctctgatacactgactgtacatgcctttccctgatccttacatactgtcatgtgttacttttccttactttttaattttcttaatttttatttcctttttagagctatacttgctttaagtttcttgctttgaatatgcaaagcttttatctaactcagttttacattccttagtgcaggggtggttcttttatattcttcaaccctacagtgctttgcgtataagcatcaa

SEQ ID NO: 92856 - DNA, 2384 bp, Homo sapiens
cagctttgtttgtacatacattttctacatactataaatttgttccttgtgtcagagatacaaaatgtagaccatctggaaggacataaatgtgtttgagtctcttagacatacttccaaatcattttcaggttgggttacctagttcctcagcactgagggtttttaattttttatatgaaaagtctgttgaaggatatatgttagaagctgttgactgaaattttcattctagattattagattatggttttggattgcttattgtcactttttcatattttagtcacaagaaacttaaaattgaatttataaattatctttatccaacaaaataattttgaaaatataggactatgtatatgcatgaattagtttccttatattttgtttgatttagaaaaaagatttttgatactgattaaaacttacgtttttttccatactgattaaaaacttaatttattctttgtttctcatgcaggatgggcttctttctcaaggttattctgattttataaataggatgcacaatcagattcctcaggttacctctgatggaaaaagacttcaggtataaaatttatcaatgcatcttaaaatgcatgtaaacaattgttatgtataatgttacgggatcccagggggtgttgcttttctggctggaaacctctgcggctagtgatgcccttgcccgggttttgctcagttccacccacttggcctggcaggctgtgctcagctctcactaccagcctggaccccatgcctcccaagggtgagccaggcgcggagtggtgaggcgtgtatgagcgaacgtggggtctggccatggcacacagccaggcacattggctgcggcagggcgggtagctccaggcactggcatgggcaccggctctctgtgaggctggtggccaggccccgaggcttcaggtcttccccagttgaaggtggggcttcaccggggactagcccccttccgcccaggagcctgtctgcctcctgctgctgttcatggtgcccagactgttcatgccaagggacacgtgcaggccagcactgggccgtcctcagcctgccttggccctccttccgtgttcgctggcgcccaaaggctggaaggggccaaagtggcagtgggttggtgtatcaatgctacctcaagtgtgcacacccagctggcccaagcttgagacagtgcccaacctcggccttaactttgttctgtgatcagagtgggtgttgacagcagggagaggccaggcagtggaagcagacatctccgaacctgtgggggcaagggagggccttttagggccccccgagtgcagagatgtctgggtccgcagccataacttgggcagctgcagccatgcctgggatggtggagctcctgcctgccctggctcccaccaccaccctgggcccagctccatctcagggctcctctctctctgcccctctgtgcccaacctcactgctccccctctggcaggcgactcggcccagccccattgaggtggctcccagggcagtgggctccagggtcctcccaggggtggactctagagactgtccgcctcctctctgtgccctccccgcagcagtggcgggcaagagcggcaacacggggccagggtccagagtggtggagactctgggcctgggagcgggtcctgcccagcttcgcgaaggttggggtggcccagtcagctgccttggggatgcggggcacagggaacccaccaccaccactgcagctcctgcagcctctcttgctgccgctgctcatgtctccccgctgcagccagcttgatggcagcagctgctcctgacggcctgttgctgccatcattaatgcttatgagcagggtcaaagggtttttgtttggtcccctctcattaaatttattactatgtaaaatgtttgctttacgttactggacgaaatagtatactcaaaggtaacagtcttaaaagctgcttttagaaatagaaggaaatttgaggaaattacttgggtgttgcagaaaactacaagtaaaaattcttagttactttgtcctgtagaccgtttagggtgtgtattccagattattagtactgttgcctgttcgaaggaaaaataacttcagctattgaaaaattgttgtcttctctgtagttatatccttctttcttaggaagcatttaagaaggacaagcttttgagagaaggggacagacagtaatacaggatttttggcttacaaaaatgactcattttacttagtttttgtagggacgtgaggaagagatggcatgatttctatgtgacagtgagggaactgaacctcagagaggttaacctgcccaaagtcataactctagttgtcgctaca

SEQ ID NO: 92857 - DNA, 2351 bp, Homo sapiens
gattttggctcaccacaacctctgcctcccaggctcaagcagttctcctgcctcagcctcccgggtagctgggattacaggcacgtgccactaccacctggctaatttttgtgttttcagtagagatgaggtttcaccatgtgggccaggctggtcttgaactcctgacctcaaatgatccacccgccttggcttcacaaagtgctgggattataggcgtgagccactgcacccagccacaaatatttttgattatctaattctcatcataggaaaacagcgaatttttctagagagattattttatattgaccctgaattccataagaaatatcatgtaagtttctcatatcaggaatattgcataagaaagaaaactttctttagctatagctttgcaaaagatactgaaattgttttgaaatagttgttgacttttttgtgtgtggtagaatatacataacataaaacttagcattttaactattagtgtacagttcattggcattaagtacattcatattgttgtacaatcatcaccactgtccatctccagaactttttcatcttcttaaactgaaaatctgtatcattaaatatttatcaatttttaaaaagcctaacattaaattccgcctcaatgaagattcttctttgcagagctgagactctttgtttcaggttaaatagtgttttgaaaatataggaaggtacatcatgatacaaggttggtgcttagaaaacctagaagaatggatcttaaacccattaggctgcatgtctgacatgagatgtttcaggtggatcattcattggtgagggtcggactctgcttgcttcatggttgaatttcaactatatcaaaatggtgaattatctgaaatcttgattaaagatttgaactcagttttatatgtaggtctaaattaacaagacacatacttagttatccttattgttggagaagagcagagacactgtttgaaaatctgtcatcccaaatgcattttataaaattccagtttttattgcttcttatatttttcttgcataagttttgcttagtttagactaacaattagagatgatcagagagaccttagaaatatgttgggtcacagaattaaagtcttacattcagtggttgaggaataacaattatagcacagcttcacactgaaaaatagagagttggaggatggtgactaaaaaattactagagttttgtgttaaggtttttactgcgtagagtgaagtatgaactttctggtatttagattgatttagaaagtacattaattatttttaaaaggagttaaaataattgtataaagcatttattgagcatttagggaagttcatgcaaggcagaatatgatttgttcttcatgagagataacagttttgctgtatgtatttctgttaatttgtacgtgtgtatgtgtgtgttccctcataaggggtacggttatgggtgtttatataccccataaagtagcataaaaaatattaacagaaacaaaaataaatgaatgaatggtttaactcactgttttactctatctttacttcttgtccttatctatatataatacttttattaaaacaagtattcttttttaggaaaattaagcagtcagtctgtgactataattatgtgtattcatgacaagttcagattgaaattctgttggtttttgttgttgttatgatattcaagagatgtggtctgaagctattaaaatcctgaaaggggagtatgctgtccgggcaatcaaggaacataagatggatcaagcaattatcttctgtagaaccaaaattgactgtgataacttggagcagtactttatacaacaaggaggaggtaattttttctcacttgaaataaattgtgtttatatcctcttgtaatagattattaatctcatgttgatgcaatctagaacacatgcacagaatttaaagcagttgatggcatattttaagtatctatgcttattcagtacttttccatatgataagccctaggaaaaacaagagagaattttccacgtaggtacattttcattacagtaaacttgaatcacagcatcctaagagttttatattatatggaagaaggataaagtaatttattagtcttaaaatttaaaatatgatcactgaaataatagaatgtatgtcttttaaaccagtagatggggaaaggggaatgaggaaaaaaaacctaaacaagagcaagaaaggaaggggaataaaatgagaaaaattatggttagaaattatagaataagatcaatgttggaaaaatctgaatgtatgagtaaacactgtaagtatcagtggac

SEQ ID NO: 92858 - DNA, 1050 bp, Homo sapiens
tcatggtgaggggagatttattttgatataattacaaatttatagaaaagttgtattcataaagagctcccatatactcattgccaaattcagtagttgtacattttgcattatttgctttattattctcttatacaaaagatttgaacttatttttcttttgaacttttttatgttaatattgacatagtatgcttcaatatttactttttcatcctacttttatctgagaattccttttgatatctgacacccattttaggaaaacttttggattattctcaaaaagaactttttcagaagacctatttattcaatgagctactgaatagtagtggtaattggatgatatatcatacctataatctatttttctagtgccttgaggacagaaaacaattaaaaacaaatttagaataagatatttagcatgtctctatctccatgcatgttaatattttttcctttttaaatttaggtttggtaccatgtatgtagcagccgtggaaaagggtgttataacacaagactcaaggaagatggaggctgtaccatatggtacaacgagatgcaggtaagacttcgagttaggctcacaaataatgtattaaaatggtagaatagaaagcatttatcttcaaaaattatatcttggcttttatctgtttgtcacttataagggaaagtcgtagttggttataatgttatctgcactttgctaattgtaagttgtgaatttctctcttcagaaatctgacttccatttataccaagcattctggcctttccagctttatttaatgatgataaaatgcaactctttctaaatgaaatttttatttggaaattttctctccattacttagttactatctgagatagaagaacacctgaactgtaccatttctcaggttgagccggatataaaggtaccagtggatgaatttgatgggaaagttacctacggtcagaaaagggctgctggtggtaagctttgaattattttaaatacaattttaaatgtaaatatacctgttttgaacttcggtt

SEQ ID NO: 92859 - DNA, 2220 bp, Homo sapiens
aattgtgtcatctttatgtgaatgaaagacttcagcttagctctttctcttgaagtgttaatgtcataagagtagttgaacattttgtggaattagtaggaaacaagagcataataggtgattttgaacaaggaatcagaagcctttgacttaactcaggtggtaattcagcatattatttcctctgcctgggatgcccttttgttagcttgttcctgaaaaattgtaagactcaggcctaactagttgtttccgagccaagggtgggtagaggtgttgggacagctgttagtgaggcctaattatttatttatattgaaataattgatttaacattttttaaagtcaaagttctggagataacttgcccagtagtacattttattgctgcaagcaaagtttaaagtgatataattgagccaaagtattgctgacaagttatttcaagcatgtcatttacattactttgttatttgtgtgtgatgcaggtggaagctataaaggccatgtggatattttggcacctactgttcaagagttggctgcccttgaaaaggaggcgcagacatctttcctgcatcttggctaccttcctaaccagctgttcagaaccttctgatttttacatttactgaataagatttgagtaatgaaagtctgtagtcttaaaactctaaaacagttgtactgcttccaagcagcagtatttatagtaacgtaagctattaatgctaactcttgcatgtcaagaaacattagtcttaggaattcttcaaaaaatggcatcccaatgaaaataaatttgatgactatattttcatgaaggtttgtgtcttattttaaagttatattgatatattttttctatttcttttttaagaacagtatgggcttatgaagtagaatttatgggtatgtgaatctggcagaggacttacgtggaaccactcgggaatattctaaaagtaggttttcagatggctaaggttgtctatgtgtatattgaagctagaggagagttggaacatgaagggaaattcgatgatcccaatgtagaagaactgcttggttagtttggaagcatggaagttttgagggagtcagtaaaggttctgtatctaaggactgatgactgatgtgatggtgccagtgaagatgtatcttctttttatgaaccttgctttccagatgatgcatacccatcaaagtagaactaatctgctgtccctacaggtcttaaaatcaaacttaaactcagggttttttttgttggttatttttttgtttgtttgtttgtttgtttgtttttgtttttgagacagggtcttgctttgtcacccagcctggagtccagtggcgtgaacacagctcactgcaacctcaacctcctaggctcaagcaatcctctcgcgtcagtcctctcacctcagccccccaggtacctgggactacaggctcacgccaccatgcctggctaatttttttgtatttcttttttagagacagggtttcaccatgttgcccagggtggtctccaactcctgagctcaagtgatctactcaccttggcctctgaaagtgcggggattataggcgtcagccaccatgcctggccctggaatatattttcttaaacactggctcttgcctaaaatatcagaaggaaagggaaaatgtaaatacatataattgaattgttgctttgtgccttttgactcttagtctataaggtagttttttgggggaaattattcttgtccaagagtttccttaagagcacagggtgttataatttcttatatgatggttttcaaaccttttagcaatgaaaaaccttgagtgaaacaatatataaacagataaaagctgtagtgagaaaatcattgtcttgtatatttgagtttagggtttgtgtgaaatgattatgaggataccattctttcacttatctctagaccacttgctttggagatgtcctggaactactataaccaatctcaaagctatgtgatgacagctctgtgcagtcttcacgcacattaatcactcgtttagaaacgaacttttaattgatgtgacagcaaagacaagactgaatttcagacatgtaaatattagaatggaggggatctttctaatcaccttgttcatgcccttgttttatgagagagaaagctgagtttagaggaatgcacattcacatggcctggtggttagaac

SEQ ID NO: 92860 - DNA, 2471 bp, Homo sapiens
gtgtgtcagatttttcagttaataatatcccccgagcttcaaagcgcaggctgtgacagtcatctgtctggacgcgctgggtggatgcggggggctcctgggaactgtgttggagccgagcaagcgctagccaggcgcaagcgcgcacagactgtagccatccgaggacacccccgcccccccggcccacccggagacacccgcgcagaatcgcctccggatcccctgcagtcggcgggaggtaaggagcagggcttgcaaaccgcccggcgcccagggaagcgacgagcgccggggcaaggcaagccctggacgggattgcgacgtgcgcaccgggcgccctaatatgcccgggggactgtttctgcttccgaaacaaaaccatctctgggttttcccagaaaagccagttccagccccgaaggcatcctggctagaggagacccgccctaatccttttgcagcccttaccggggggagtaatggcttctgcgaaaagaaattccctcggctctagaagatctgtctgtgtttgagctgtcggagagccggtgcgtccccaccccaggctggggttcttctccaaagggtgcccctggaggaagaagagggggggattaggcagggcgaggccgccgcggtcgcaatctgggtcacggctgctccagcttggaggagaggcggctctcccggcgaccctcctcgcgcgggcgcccctgccattcccgggaacaggggctcagcctctccctccctggaagaggacgttgtcgtgggtttggaagagcaggggtgggcttagagagcttccaattaagctattggcaggagtatccctgcagcgggtgaatgccgaggggcgtttgctcaaatttggggaggggaaggatttgtggatatgggtgtctgttgttggtctctgtctagagaaaggcttttttttatttgcaaagttttctaaatcccctgctatcatttgcactcctgaggttgcatttttacaaagggggtagaaggtactccaaataccattcccggtagctgggtcggagagcctggggcttcccctgagcagccggccccacaccgctgcgagtgcggttgtctgcgtgctcgtgagagctagaattctgcagccaggaacagccccctcccccaggcagtgccttgtgtgaatgaaatggcagtttccaaagttgcggagcctcgccaccaccccctgcatctgcatgccccctcccaccccctgtcgtagacagcttgtacacaaaaggagggcgggagggagggagcgagaggcacaacttcctccaccttcgggagcagtgggcagagtggggggcttggagggaagattggggaacctggttagagggggcgcccattgcctatcccctcggtctgccccgtttgcccaccctctccggtgtgtctgtcggttgcagtgttggaggtcggcgccggcccccgccttccgcgccccccacgggaaggaagcacccccggtattaaaacgaacggggcggaaagaagccctcagtcgccggccgggaggcgagccgatgccgagctgctccacgtccaccatgccgggcatgatctgcaagaacccagacctcgagtttgactcgctacagccctgcttctacccggacgaagatgacttctacttcggcggccccgactcgacccccccgggggaggacatctggaagaagtttgagctgctgcccacgcccccgctgtcgcccagccgtggcttcgcggagcacagctccgagcccccgagctgggtcacggagatgctgcttgagaacgagctgtggggcagcccggccgaggaggacgcgttcggcctggggggactgggtggcctcacccccaacccggtcatcctccaggactgcatgtggagcggcttctccgcccgcgagaagctggagcgcgccgtgagcgagaagctgcagcacggccgcgggccgccaaccgccggttccaccgcccagtccccgggagccggcgccgccagccctgcgggtcgcgggcacggcggggctgcgggagccggccgcgccggggccgccctgcccgccgagctcgcccacccggccgccgagtgcgtggatcccgccgtggtcttcccctttcccgtgaacaagcgcgagccagcgcccgtgcccgcagccccggccagtgccccggcggcgggccctgcggtcgcctcgggggcgggtattgccgccccagccggggccccgggggtcgcccctccgcgcccaggcggccgccagaccagcggcggcgaccacaaggccctcagtacctccggagaggacaccctgagcgattcaggtaaagaccgaactcgggtccggctgcctccctggggcactggaccccgggtcgcgtcccctttgttagtgctcgtatgtcttggcctggggagcattttggaggcagtgctaggggca

SEQ ID NO: 92861 - DNA, 1338 bp, Homo sapiens
agggaagagttaaaaccaagcctttccctgggggtctggatgaacagaactcaacccaaagagtggcattgccttgtccttggagcagggagctgggaccccccttggactttgaaaaccagtgttttcagaatgcaggtggataacaagcctaaatttacttctgggctgaggagagatctttgaggctcctggaaggaaacttggtgataagcctccagtttgaaacggctctgtccctttaatgtctgtgccttgacagcttttggtgaggaagcacttccttccaacagctgtcttcttggcagaaaaccaaaacattggcttaaagggacccacagactggaacagcctcacatttcggctttagaacaaatcccacaattgttcagctttccggtccccttcagatcaagcagaagatatgttttgattttcatgcttgtattttaaacaataattttctaccccagcgtggtagtcaatgaggagagaggggaagaatgcgcacatgatgctacacgtttctgttgttgctgttattattggtggctttgaggagagctgctcccatttgggggtttataccaactgtggattatggctttgtcattaagatttgatctttgttaaatgaaaaactgtttattgtataaaactcaggtttgtggacgaaaagttgttttttttcttcagttaattaaattgttcctcaagtttgtttaaggacttaaaatcaaacacaaccatgtgtaaactgctaaatgaggctcctaaaatgagaggcctcaactctttaagtgtggagctagaaatgtaaataagtccacagggcagactggtgattatgataaaagctaccatttactgagcatctgtctactaggctcagctctatgctaagtctacatgttatctgtcaaagtggtatcatccccatttaatagctgaggaaacagaggcttagaaaggctgggtaacttgaccagggtcatgcaactagtctgcggtggagccaggattctgtctgaccctaaaggccaagttctttatatttatttctaccacctgctaaagtcttgaatggaggctgaaagcacagttggggtatggggaagaaaaatatatatacatacatatatgtatatgtatgtatgtatgtatggggggttgttttgtttttgtttttgataaggagttttgctcttgttgcccaggctggagtgcagtggtatgatctgggctcactgcaacctccgcctcccgggttcaagtcattctcctgcctcagcctcccgagtagctgggattaccggagcatgccaccacacccagcaa

SEQ ID NO: 92862 - DNA, 2035 bp, Homo sapiens
ttctcacatgagagtaactagcatctttctctcagatgatgaagatgatgaagaggaagatgaagaggaagaaatcgacgtggtcactgtggagaagcggcgttcctcctccaacaccaaggctgtcaccacattcaccatcactgtgcgtcccaagaacgcagccctgggtcccgggagggctcagtccagcgagctgatcctcaaacgatgccttcccatccaccagcagcacaactatgccgccccctctccctacgtggagagtgaggatgcacccccacagaagaagataaagagcgaggcgtccccacgtccgctcaagagtgtcatccccccaaaggctaagagcttgagcccccgaaactctgactcggaggacagtgagcgtcgcagaaaccacaacatcctggagcgccagcgccgcaacgaccttcggtccagctttctcacgctcagggaccacgtgccggagttggtaaagaatgagaaggccgccaaggtggtcattttgaaaaaggccactgagtatgtccactccctccaggccgaggagcaccagcttttgctggaaaaggaaaaattgcaggcaagacagcagcagttgctaaagaaaattgaacacgctcggacttgctagacgcttctcaaaactggacagtcactgccactttgcacattttgattttttttttaaacaaacattgtgttgacattaagaatgttggtttactttcaaatcggtcccctgtcgagttcggctctgggtgggcagtaggaccaccagtgtggggttctgctgggaccttggagagcctgcatcccaggatgctgggtggccctgcagcctcctccacctcacctccatgacagcgctaaacgttggtgacggttgggagcctctggggctgttgaagtcaccttgtgtgttccaagtttccaaacaacagaaagtcattccttctttttaaaatggtgcttaagttccagcagatgccacataaggggtttgccatttgatacccctggggaacatttctgtaaataccattgacacatccgccttttgtatacatcctgggtaatgagaggtggcttttgcggccagtattagactggaagttcatacctaagtactgtaataatacctcaatgtttgaggagcatgttttgtatacaaatatattgttaatctctgttatgtactgtactaattcttacactgcctgtatactttagtatgacgctgatacataactaaatttgatacttatattttcgtatgaaaatgagttgtgaaagttttgagtagatattactttatcactttttgaactaagaaacttttgtaaagaaatttactatatatatatgcctttttcctagcctgtttcttcctgttaatgtatttgttcatgtttggtgcatagaactgggtaaatgcaaagttctgtgtttaatttcttcaaaatgtatatatttagtgctgcatcttatagcactttgaaatacctcatgtttatgaaaataaatagcttaaaattaaatgatgcaactcaaccttttccttaatggcattacactctgtcccttaaggagcaaccataaataatccataacctatagagggaatttggtttccgtaaatagccctttttgcacctgtacaatcctggttggggggcatgagtcattgtccccacttaaggtggagggaactgagtttggggaaattaaggcagttctccaagattatgcagaatagagatgttattagcgactattgtgtgcattgtagcaatggcatttgataatttacagagcacttctgtatactgtggctccttagtggaattaagctgagacctcagatcagtccctttaaaagaaaagtaaaaatagccacagggttgtttaactcgcttgtattgggctttggtagtattcgtcccattggcagacagtcttctattttaaggtagagcatagtttgtctccaagaattcattgttaaaaacattcactaggatctgtg

SEQ ID NO: 92863 - DNA, 1049 bp, Homo sapiens
cgtccggctaggaaatcatgtctgaactctagtgtggaacacagtctaccaaaatttaaggagaaacatcaaagatcaataaacatgaaagtaagcaaatactaccactgttctcagaggaagggaaaaaaaaacaaaacatgtttctcatttttcttttaagccatttctatgttgcttttcggaatcaggcatgtattgcagtttggtgcttgggttttgccattgacattgcaactatttgtgcaaattaaccagaatatagtaaagtagcaagctctactgagggcctggaatccatttcatgtcctaatgcatagtcattactcataatatgttcaaaatgtactccttggaaccccagcttgaagtacccagagatcaattttcaatggactaataggtgacattaaacattattcatagaaacagtgtttatttaatctttaatgctacctaatgcattttggtcaaagtcctcagtgtatgttcaggctttattgtgtggaaaatggatgtgctattaataagtcaatacaaatacaaatatggtttcaattggaaatcattaggttgcattaaatggcaaatgaaatccataggaaggatttgttttattttgtttgtaaggaggaaaaggagccttgagaggcatttcttcgctcggtaatgaggaggaatgattggtttctgcagaggggtggattacaggctaagccttgcgttattctcgttaggatgggcattggcacagctgtttgctgccgtgggccaagccgaaattgctgtgtgctttggagtcagccaatgcctcccagcacatagcgggtggagtcactgcaaagctgtctccttcctgatgctggtggccctgggtggacctcagccctcttgaagtcagctggatctctgaaggcactgacttggacgcttctattctcccggctcagcagcagcacctgtgaaagagcatgtagccatttacgtgactaaaagctccttatgagtagaaaagcagccgaaacaggtcttccgctaaagcagagatt

SEQ ID NO: 92864 - DNA, 1815 bp, Homo sapiens
atggcagagctgggacatacacctgaggacctcctacatggcaggcactttcggtgttctacagtgattaattcagttaattttcacaaccaccctcccagggagttatttttatccccaatttacaccagaaaaaacctgagactcagagagaattcgacagagccaggaactgctccctatccaacagagatcacagaatagcagcaagagaggcaaggggacacccaggtatgagcacggtctctgaggctgttttgttctgcctgggttctagccctgctctgctgttggaagccatgtgaacttgggcaagttgcttaatcattctgtggctcagtctcttcatttgtaaaatgaggataatttcaggtaatgaccagtgccttgaagaaaactcaacagagtgatgagagaatgatacaatcacgccaggcatgcggagatgagcatcccagctgaggctgtgtgtattcaaggaacagaaaagctctagtgactggtgtatggagagaggggagagtggtaaaaagaggatttttctaaagagagagtctaagctccaaataggacacaatatagccttggagattaatgtggattctgcataatatttgatttttctgaagttgtcctttatgttaatacagcagtaaacattttagaggaaacaaatttggaatgaaataacaaagaaaatcagtttctgaaactgatcactcactgtggaatctgaaagtcacatttttctcactggtcagggaacagctcattctccatcatattgttcttgttatcactataatgatgatcatattaaggcaattattaaaaataattattaccattgtttattgatttataaacgtgctttccaaactgtaagaccctcatttatatataaagaaagaaagaccattaatgagcagagagctggatactgtcagctgctgctttgatgtgttaattgcaagtcattctaatcttattattaaagaagagcttctgccaggcagtgagcccaattgtaaataccatatgtacttgaaattaatccgactgcatttattttgaacactcctgcaattttcactttatacaactgtttattaagcatctactgtgcccatagcaccacagccagctttttggttgaataaggagcaataaacgacatgaccgtggcctctgctttcaaagctcttagaggctagctgagattactagatgcatcagcatgaaaagtatagggaataggatttaaaatcagatgtgattgcatgtgccctgtgactttgagcaagttattttgtatctttgagctgcaatttatcatatagagatagtgatagaggcaggatcacatagaggttacacacttggactctggaaacagactgagttctgacacctctcagctgtgtgatcttagacatgttacttaacctctctgtgcctcaattccctgtctggaaaatgagggtagtgatagttcttgcctcatgaatttgctatgaagattaaattagttaatagtataaagagcttagaagagtccctgaaaaatgataaattctaagggtttattaaatcaacgaaataagtaatgcctatctcacagtattgcttttaaaattaaatggaatagcatataaatttcctagtataaaactttgcatataatattcaattaatgttgtttcttcctttctttgctctttttcttccttttagaatagtataccaggagcattttctgcctatgtttgcatatgagatgtagactggtggttcacaaactttgctgcatgttag

SEQ ID NO: 92865 - DNA, 1032 bp, Homo sapiens
tttccttactctaatggctccatcctcttccagcccataagcattttgtcactgtgaccccagaggttattcaggccttttgatcttgcctacctccagcccagtttcccagctgccctgcggacccaccacccagagggtgagcctatgggcaggattgggccccgggcatgaggaggggttacctaagcgggggcggtgttggggggattggagaccagggtggggtgggctccagcgggaggcatttcagtctttctctccatcagaatctcctctcctcctggaaatcaaaggcccagggcctggggccttcttccctcggggaagagccaggaggagctctctctaaggcctccagccctccatagctgcccagcgagccgggcctgtctgtctcccactcttggccccggtgcatttcctaggactttctgtttgcttgctggacagtcttgttgtccctggatgttcagccctgcccccctcactccgtcttccacaagttctcccccacactccacattaatgtaacactgccctatccctgtagcacggggtctatgacaacactttggtggccagctgccgacagcccagctacttccccttaccttggggtccactgtgaccgccagctcctggggacagatgccttgctttctgtattgttggagcctccctccccaccccacagcctggaacaatgaagggtagtgttcagtccctttgagccaggaatagggtgacttcggatgtttttagaaggagctttatagactagacaggaatgaataaggtttatgacccaaattcttctgataggcgtctaagatgttgagaggtggtagaggtactggaaagggcttggtgagtttttaaaacatgaaaggatcgatttatttgctcacttatttgtacaaacaggaatggaaccccttctctggatgactgttaaattgctcttagcactgggaaagcagacggtaaaagactctagtcctgcccgtgctgggttcgtagtctggtagt

SEQ ID NO: 92866 - DNA, 1067 bp, Homo sapiens
ccttcctagtatcctagagtgctacccaatataagatgaaattttacatgaactggaaacaattaggataaacccacccaacctccacagcaaagtagtttctgcaactcccaaagttaaatgaacctagaacattgacatattttccaaagcaatttcttatttagctcagaactttatatgtgacctcaataaggtcattttatggctcttagtttctttaaatagaacaccaaagttgtaaaaaggcgcattttttctctaaggttacttagcaaattgcaaatgaaagaggaaatatacatgcgactagagagttcatcaccttactgcactagaaaatatggcccaatttctctctctctttcttgttcataattctcagacaagacaataggagtcatgtgatgtgactgagaaattgggccagttaaaaatagaaggtgcacttcaccaagtttgttagaaagtggaagtttcattgctgattgctgttcatttatctctgcctgccacatctgtgagggagtggggcaagagacaattgcagattctgagggctggagcccccacacccccctctttctatttcctggcccggctaaacagcaatgcccaggagctcaactgagccccgtgcactctctctcttggtcctcagggaactctcttctctggttggcagcagttttagttgggagaaagctctagctggctcctcgttcctcccaatgggagtgctcaacgtcagcttttctaaatgggaaatgaaggtctccagcctcacgtatgcaacatagtgtctgtacttttgcccttgcagagttctgaaagtcttcacaagccttgcctgcatagcagctggcaggtgggagaggagagaggccacactgagacctgccagtttcataaatggaactgagtcctcccctcaccagctcagagtgagcacccaccatgggtccagcaatgcctggggccccagatctagaaagcacgatgatatacacttgcaggccttgcagggttcccaggacagagggtccgaggaaggccaggccaggccc

SEQ ID NO: 92867 - DNA, 1038 bp, Homo sapiens
gtgcccagccccttacccatttgtttaagtacccgaaaaattcagtgttatttttgaaacacagagtctttgaaggggaaattaggtctaagttatcctttcatgcaagagtcctcttgttaacatctcagaaaaaataattgttcagtatctccctggacatccccattaatggtgagctggggggatttttcatcaatcctaactttctttaggaatctgccttcatcatcacttacagcccctgagactctggaagatggaacaacaattataataataacactcatggtttgtccataataatgtttatcatagcagctaacatttattgagaacttatgtgccaggcactgttcttggtggtttacttatttgatcctcatattgaccctctgaggtgatgcgattattatcctcattttatagacaagacatttgaggaccagagaggtaaaataactcacctaaggtcacacagctaataaagtgcagagctaggatcagaacccagatggtgtagctccagaacccacatcctaactaccatgtctgctaccctttggaaatgaatgaatggtgtgtcttaatgcaccaggtccaatcatagcccttttccatacaccagctcacttaccactggggagagtcctgtgacgtagacaagcgaatacccccattttacggaagaccaacctgggagataagtcacacaccacatccctcacatggtacaggctccatgtaccataactggaccaggatagcaccaaggacattgcctcctgaataaggatgctgtgactcagaaaatgcttatttctttctatgccaaaactcaatttctacaaattcattttggatctatcagtacacacctagaatgcccaagaggtctcttgcctctttccccactctgggcctcagtttcctcaactataaaacacaaagatcctctcttaccctggcatagcgttgaatttttagctgaggtctagggaagaggaggagggaagagggggagcaagaggaggaaga

SEQ ID NO: 92868 - DNA, 1017 bp, Homo sapiens
gccctggttttgggagcaaccagcatgtctgaggtctgctgttaatgatctcaaagctgagggtttatgcctaatatcagacatcccctccctgaggggataccagtcaagatgatccctgtgtttctgaaatgtagaggaaataagcctcatttccatctttacctcgttttttataaatgtcaagaaaggcccaacattgctcacatccccaccgccaactcaggtccattcaaatcaaaagaggagatcaaatcccccaccttgaaaaccttctggaatccaatagcctctgccctccttgcatcattgcatccatccccacatcacagtcaagtcaggtgtgagtttcagttaacctgggacaaggtattgaaggctgagtgcctgccaattacctccatagaggcagagcccaggaccagagaaaagaaacagccatcatgtcaggcatgtgtgattataggagaaaggaggaattcaggtgggagaattatggggaggggaggagaaagcagagccttagggattatgtgtcccaatggcctttgtaggaggctggctgatcctgcttcctctgatctggtgaccacaggagctgtgccagcaaggctcaggaccacagatggctccagcctggtgcagtagaaaaagcagagtatttgaaatcaccaagacctgagctacagtcacagcaggggctctagtcagctgcatgactgttcacagatgacttatataaatcttaatttctttactggtaaaatgaggctaataaaatttacctccaaaggtagtggggattaaacaatataatgaaagtaaagatgcaggcacagtattggctacagagacatagcaggtggtaatcagtagttgttcaggcatcaagggacagacatttattgaacacctagcaagagtcttacctgttgaactgactgcccctgatcatcattgtccaaacttatgtcattcactcacttgataaacatttattgagataaactatatgtc

SEQ ID NO: 92869 - DNA, 1047 bp, Homo sapiens
tttttttttaaaggagtgcttgtgatggaaatattaagagctgttgctctaaattatgtgaaaggcacccctttgggttccttttcaaaggtatttggcaggaaagcagctcagccattgacgggacctagatgccctattggatcattctatggggctatttgaagaagatatagaaacttcttcatcaatacttgccgaagctaggagtattgtcctaatttctaactatggggacaggaaattccaggccacaaaggttgctcacatttttacctgatttgcctccagatttgaagttatgtgaatggcttgtttgtctaactcagctctgctcaaatcaatctttcacgggtccccccagtaaagatcaccttgggtcaaaggttataggtcatcatggttcttaaatacctacccactttgtaggagttccaaagtggacaattactcagaaattaggaataaaagcatatatttcaaaagactaattgggaaaaatgggtatggcatgtgcagtaatgtttcaaatgttgtctttatggctatcccaattaatttccagtgtttctccaacctgacttttaaaaagatagaatacaatagaaagcaacctgctattgatgtgcagagttgcctgtgtcacatctgctgtacaatgacttgaccattaggatattcatcctttttatgtgcctgggtgcgctcatgccagcacattcttaaatgtatgtgagtccagacacatacatgcaaagttgtgatcaaaagatttccctaaagtaattaattcagggctactgctgagaaacaaggcaaaacttggaggggctttccaaaaatatcatagttttgccgttcagtagtgctgacttcttgtggtgcaaatctattaattttgatgtaataaaaaaagtgttcatagaaacaagcaagaaataaatagggacattaagattatatggaaaggtggaaactggaaggtgagctaagaattgtccagatgacaggcaaaggcagtggaggcaacgtggatgacgcaggttg

SEQ ID NO: 92870 - DNA, 1048 bp, Homo sapiens
atccttgaaatccagggaccagctgatgtgacttgtgggcctatgatctctgtcagaaaatcattctgcaatgagcaaatctaagacagccagcattggctcccgccaccgcccccttatctgtttttctttttgcaaaagaccttgaggcctgtagtcggttccactacaaaacggttacacaatttccctgggagaaggcgagtttccacctttggggatgaatgagccctttcttttctggagagccggccaatgaggcacaggctgggtactgcaggaggcgcggctgagggaacagcaggcctcggtctaatttgggggtaactatttgttttttcattaaacaaagtctgcatggtaggaattgtggttgcaggagcctcgggaggccgataaagcaggcagggcgagtctgccgggagcagcgggcgagggagctgctctctgattctgctgctgcccaaagcttccacttttctggggctgcaggtcctataaatggtgcctttgaggaggctgccctggtgacagcaggaccctccctgcagcacccactcggccactgacttctgaaagcgggattgtccctccccaagccctgccctcctgcgacattcctcatgctgaccattgtctgcagaaagaggccattgtctggggctgacatatctgctgaccaggcacatgaaacaagcagagctttggggaggaagaaatccacccaaaccaacaaaaaacctgagcctagcctgagggcagggcttagacccagcttgctgaatttcctgattcactggtgttcttcccgagacgaagtgcccaccattgtgggaggatccgagttttatctctgggctggaatgacaccgtctctgcctttgtgtcaacagcactgagaggccttgtttaggatgatgtggccagtgctgagaagggcttgtttgaagagaaaaaagaaaaaaacagaacaatgtttatccagcaggcagctcctgccaaggcggcctcctcgctgtcctctccgtaggatgctgctcgccaggcc

SEQ ID NO: 92871 - DNA, 1007 bp, Homo sapiens
aattagttttcctggaaaggactctgccagcttcctttttgtctgtcaaacagtctagtagaacacttggtatgtcctggttgtccccaaacagcagatttagcccccaccctggcagcacctgttctgtggggcatcttttccctggcaaagcgctttcccattattgcttcttatgtagtgactgactgttaggtaggctgattctttttcatattgcaaacttggggagcatgatggctaattttgtatgtcagtgtggctaggctaaggtgcccatttgtttggtcaaatgccagtctagatgtcactgtaaaggctttttttttttttttttttttttagattaacattgaagtcagtagattctgaataaacatattatcctccaggtcttaagagaaaacactgaggtccctcgaagatgaagaaatcctcatgaagatgaatccaaaggtggattcaatttcagctgtctttggactgaagactgcaacatcaacacttcccagggtctccagcctgcccgcctctcccgcaaatttcagatttgcaagtatccacagtcatgagcaattccttaaagtaaatatttctctgtttctttctggatatgtataggttgtttctctggagaatcctgattaatacatgaagggtcaagataagtctactccagggtaagatctttcacatgatatttaagacttgaaagggacttcaggagactgtctgtgacagcgtctaggagtgactcccagcaggtgccaccctacacagacgtgggaagtgccagctgatgttcctcaaatctgagttgaatcagtgggctttaaactcaatgaagacccacatcatttctttcctccatctgactttagaatgtaaaatccctccaatggattcagggaccaagcctcacttaagccttgatcattatgaaccgcttgtcagactaagcttagccagcctacaaggatcacagcagcaagccacatagtgcttta

SEQ ID NO: 92872 - DNA, 1049 bp, Homo sapiens
gatgattaccaaataattctggaggctcatggctttgaaacaccaatgagacagagaacttgatggtggaaaaactcttcccgagaagaaaataggccatagatgggacttgcccaagtcttccttagggagtgggaaagataagggagctcacattgccaaaaacccaacccaacccatggtgtactggggattttaggaatttcatttgtccctctgatatcttttcaaagtgaagattcaccccattctacagaatagaccactgaggctcagaaaggccaatacttgaccccagtgatacagggacaagatctcggatctgcctaattctaaggctctgctttctcttcctgccattgtggatggacagaagtgtgtgacatttttagaggaaatgagcactatgctgtgtagtttgtgcttggaataccagcaggattaagaaaattgcaggactgataccttttagaattttccatttgcaaaagccacaatcctgtaacaaacatccctacaacaaaaactcaagatgaaagagccagagagaagcaaattaaaggcttggaaagatgcaaatcaagtctttgtctagagtagtggagccaagaacctggtggctttactcaacaggtattcactgagcacctactctgtgtaggagaccctgagagatgataacctctcagtcttttttcttttttcctttaaatagggatgggttctcgctatgttaaccaggctggacttgaactcctggactcaagtgattcttgccagaactcctggcctcccagagtgctgggattacaggtatgagccaccatacttggccaacctctcagtcttaagtcctctgttacatgtagacaccaaggtgcagtggagagagaggctgcagaagagttggcctatgacacagaagattggaattcacaaactttccactccctggcagtgtggccttagacaaatgagtgcatctctgagccttagctaactatttggtaagatacaggtgaccattcttgctcagtctacctcatggg

SEQ ID NO: 92873 - DNA, 1050 bp, Homo sapiens
tggagagtcctcattatgactccccctagagtaggcccttttagagggcaggagtgtctgtgtctctgtcttcagcacaggcctggcagacagcacatgggcccttgtgagtgtgggaggcaatctcctaaatcttagctgaaatacaacattcgtcaggatcttcctgctctgttcacaccttacacatgaatccaacctcatggtgcacggaccagggctctcttctttgaacctgcagaagatgcttcattaaaggtcaactttgtttgcaaaataactttatggctctttctgtaaaagctgaaggactccagtggtcatctcactgaaaaggaagtttcttccctagcagctgagtcttcacaaataatattctctttcaattcacaccgcagattaggcaaggatcctttgtaactcccagtaccacaggtctgaaagggcccttggaggtcacatattcttattcctttattttgcagatgagtttgctgcagagtgcagaggaacttgctgcaggtcatagatcagggctggtcttagagttatgtgtccttccttcaacttgatgaaaacaactctcctggcacttctctggagcaaagccggcggtcctccttggatacggtgagccaccaagctgggctctaaagcaggtggacaagttcagggccccctgttaggatgggttcacagtcattccgaggcttttgcaagtgtttttctggtgcagggctctgcactggctctccaaagagagacacaaaatggctatttttgcagatacactcatggtgggaatggccgtcagccaaaatgccccgatgtgcttctcagagtgtgtggatagacctcccttcctcctccagccatgaactcgcagggccatgggagaagatgggtgtcctgcaggtcagggctgagaacagtggctgactgatggcgacaagggcagtcctgagtggcctgcacagcacctagatctggaacccagaggagttgttggctgcaacagcagattagtcaaactcccagatggcatctctg

SEQ ID NO: 92874 - DNA, 2822 bp, Homo sapiens
aggagataagactccagtggctgcaggagccataaagcaaggaggggctggcagttgaggatcccggggagccgggctttgaactctgccctcatgggggtgggaagcctttatggctgggctgctctggggccgaggtgggagcagagccatcacgggagaaaagagtccccagagccggccccctggcacccagactgcacggtgagacaacggagcccggagtggtgggaccagcggcggaaacagcgctccatccgggctttattgacttgtaaacggtaccattaaagaggaaggcctcaccttggctggaagcagctgtgtgcgctgccgtaaatctagggcgagctctgaggctgcagccgggcctggcaaatgccaagcatgccctgggcagaagggggtgcaggccagggatccccaccacacccagctcctagctccactgaggggctgagtatgggaatttataagaaggatgtttaccaggggaaatatcagcggctaattagactttgcaaataaaaaaacttttcaaactttgttttccactttttttttttttttttttttttaagagaagggatctcgctttattgctcaggcttgtctcgaactcctaaactcaagcaatcctcccgttttggcctcttgaacgctaggattacagacgtgaggcacagcacccagccatccaaaaaaaaattgttaaaaaagagaaaaatgtctagacatctttgagtctccatttgcaaatttagcccagaaagaaggacattgagaagccgaggcttagagtggcctgcagaggagtgagcgaaagtccatcacggtttcttgttcactgtgtatccgcggactagctccggagaagcccaggtctcaagtttttctttcttgttttttttttttaacataaagaataaacataataccagctctcaaaggttggctatgatgatggaatgggatgaacgtagaacacctcaccagtgggaggggctcaacaagtgaattttctctcttctccgattgacaataaaacaaaacagaaattggagatattggccctctttttgttttgttcccctggaattagctaaccttgcacaacaaaaggctagactgctagctgcctgggggcagggacagccctgcctggttcagttttgtaggttagttgttaggaaggaagctggtgtagaattctgagaatgttttctacaaatgttgggtgaataaaaaaaaaacaggggactaagaaaaaagaaggaaagaaagagtggaaggaaaggagggtggaaggaagaacacaaggtcacttttcctctggacaaagtccagagtttttggaagagaaggaaaggagaagcaacatttgccacctcctgctgtgagcccaaatgttataaaacttagttctcacaaccaccaggagggccctgaggataattgcccaagctctgctatttacttattaaccaataagtaaatctgtcttctgggcaagttatttgctgagtgggtgagtaagttctttgtgcccctgacttctcctctaaaatggtgagaattaaatgagataataggtgtaaacccattatacagttattggcaaatactaagtgctcgatacatgttggatatggttatgcttcacgatgaagaaacagaggttaagtaacttggccgattcacaaacctgagaagcacgtggctggattcccactttgcttctagagctcacaccagttctccggggtctgcagctcttgaggcatcacaaggagtggtttgtggaatccccacgccacatggtctcagaatgtattaccagacagaactactaaaaggaactctttaggggacataacttttaggctgagctgctggaaagggttaattgggccactgggattcttatctttgtctgagggattccttcattcattaaataacaaacagataaataaacaaacaaagccaaaaggaggtaagatccttaatgcttacagagcccttacccagcccagcctgagccaggagctgcaggaagctcaaagctctaggacagggcccctcacctccctgtctccagggacttagtatttgctaatcactgcttgtcacaagtaggacatcctcagtgctgtgtgttgatgggaatcagtttcttatcgtataacaaggaggctggatggcaagtggcgtttaccaccatctagaattctctaacgattcacagtgagagagatctcaatccaggaactaccatggtccctctgcgtctgggatttcagcctagcctttgtaggtgctggaatatgcttagatagctctcagggcaaggcactgttctgtatgtccacacatactaacttatttaatactcacctcaattccactcctttactgtcaaggaactgagacacgaagagtttaagcccacacagccagcatgtggtgaagaattcgactccgcacagcctggcggcaacgtcagcgccatgcaatgctgtctccctgcaaaacagatcccagtaaaatggaattcagtttacaaagtggctattcatcttccaaggagggatagaatgaaggagctaaagacagagggagagaagaaagaaatgcagaacagggagcggaaacgggggctcctcccttgcagcacctgagacacgtgatctctctgcctgttccttcctccagcacccaaccccctctgccagcaacttccagataatcccactaagaattccaagcaggtctcattgcttcttggaaagtagccggcagaggcccacaccctgagcgtg

SEQ ID NO: 92875 - DNA, 1079 bp, Homo sapiens
tcgtattaatctttacatttctgaaactatcactgatagaagcaataatatcctctaatttgcaggattgagaaaaaaatgtagtctgatgggggctggggtgggtgagaggttaattctctttcagcaaaagaaaacagcatccatccatcgattaaatagtgctgagtacctactaaatgtcagacgttgtggtagcaggcagagatagggccagggagcacccacacttagagttctataaatacacaagcatactatgttgtgatgtgtattagaataggcctgcactttaagcggtggaacagaaagattggaaggcctagaaatgttttccaaagatggagacacggggccagccaagtcttggaggggaagctggaggaagcctggtcagtgtccttggtggtgaggggagcaatggtggcagtggggataggatgagagaagacagagacaagaagagacatgagagctggtgtatttggggaactccaagccgttctgcaccactggaactcaggattatttgcaggtgtgacagcaggggcaggatgatggacagattgcatgctggctgttctttggaattcactctgcaaacctgggggagccattcacagaagcagctggttagactgacattttagaaagctcaccctggaggctgtgtggagaaattttgcaaggaggggattcagttaaggagtagacaaagggttgggataacccaccagtggaagaggaagtagagatggggggtgggggacactgtcaagggatattttaggaatatcactataaggaggcaatatggggcggtgcttagaactcatcccaccctcttgccatcttagctctaacctcgggcaagtctctgaccttgagcgagtctctgctttagcctgctcctctgtaaaacaggcatgataataaaaatgagccccatctcatacagttgtttttcacaaaggaaacactcaagaattgatagagatgatagggaagatgatggtgggatggtttctaactggatgtaggggctgaaggagaaaaaggtctggacaaatgtccagatt

SEQ ID NO: 92876 - DNA, 1049 bp, Homo sapiens
ttgtagtttaccaagggtctggggcagcaacgtaagggttgaaaccaccttgggggcagagtaggggacaggaatgagaggggagaaatgagatcaccacttgtgaagctgccatggaccagggatggtgctgggtactttctttattaggttattcatttcatgtgggcccggggattaagtactttaatatccatttatagaagaggacactgaggctcagagtggtcatatgccttgcctgagttcacctagttcatacaccgggaaggacggggcagggataatattttagcatgccatgtgtgctgagcttctttctttcaaatcacgtgtgcattttgtgaatggtcttggccacaagttcacatgctgggagaagtagatatcactgtgtccattagattggtgaggggtggtaatgcttgaagaagtgaagtggcttactaaggattgcatgtctcggagaggctgtgtggccagggagggaaagactgctggttgaatggaacccgaatgagtgttccgggatatcgattcatcctgccctgctctcctctcctttgatgtgtcaggcctgagagccccttagctggggagctctactgtcatcaaagtattgtcttctatagggacaacattttccaatttccgaaggacttttatatctactaggccctgtaacctccaaacagcccttcagggtaggtactattgttcacagtttagaagtgaggaaactgaggctccacaattttgtgcaacctgcacaggggcacactgctaggaggttgcggagttgggattccctctgacccatcttctggtcttccacagtcaaggtcaaccctggactgtgcaggccaacgaccttggtctccctctgatctcccgctgcgctgggctcgttgttcctggatggagggttggctccctcactttgttagcccgactgataagaggagagctgctttccaacaaaccagagacttgcttggggtcgtgcaaaagaaacattgactcccttatgtcacaaggagcctgtggga

SEQ ID NO: 92877 - DNA, 1106 bp, Homo sapiens
ttaacgcatcagccttgagaccataaatctttatttattcacttagacaacaaacattgattgactagcagttacttgcaggctacacacataatatagtctctgctttcaaagaactcagcatttaggtggtgacagggtggtgaacagagtggctgagtgctctgataacaggtgccacgagagagggagcatctacttatctcttcagggggtgtcaggcttcacagaatagatatttgctgaactgtttctcagaggatgagcagaaattttcctggcagggaaggggcatgagaacaccccaggcagaaggagcagcatgtacaggagatgagggacatgtgtgttcaggtggctcctggtgactggtggcgggtggaagttacaggagatgcaggatggagaggcgggactttgatgccactcaaagcacttggctctgtactgggagagacctggaccttcatgaaccactttgcaacacagaacattggtgggtggattctgatgtccatgcaattaattcaagtgagctccagcatgaagcacccaggagaaaatgcttttaattgagagacatgtttttcaaatgttgctcagctgccagctcctgtgtgctctggcaggaatggcaagtgatacttagctttcttcaagctccattaatctgcccatttcttttgcttcaaatcccacttcaaacacacagcggctcctcacactcataatgaaataaatgatttataatcctgttgggagccagcaagcctcctgtctggtggttcaggtggttagggcaggctgggttgatccaggtgacctttcagagtgcatcagagggcagacagtggctctcctcaccttcccaaacacagtcttacacaggcatgcacacacatgcacacatacatacatacttggctgcatggaccttgccctgtctttactcctttctcgtgaccatgtgggttcccctgggaaagcccagtgacttggtcaaaggacagtgttccagtggcttctgtggagtaagccactgagtgctgagtgccactttatatgcccagtacctaagttcataatattatgtgacataaaaagat

SEQ ID NO: 92878 - DNA, 1056 bp, Homo sapiens
acccttattgagttggggttggtttgctttcagggtttccagaaatatgtcacccaaatagagagaatgtgatatcctggttgtacctgatgttctctgctaccctaagctttagaagtgggcagtggccagagatgtgattttgtggtgttgttttcacatctggcatggggccttgaatctcagatctcaaaatgagcctgcctggcacaaagcaaccctcgatttcagatccagaactaatacttgcatagagaccccctgggctgcaaggcttttctggtgagcaaaactgactgtccacaggcagggattttgggagaactggtccttagggccccagaccttgtaaatggctttcctgcattttcagttggcaatttacttaggaagtcagttgagtggcaggccctgcacaaggagctgaaaaaacaaaaagaaagaggaggtggtctctgcccgtgttggggacaaattaatagatagatgaatgcaaacatctgtggttagcattatgaaagagctacacatgaggtacatacgctacactgtaagcacttgaagcaacaacaacagtgatttatttctagagtatggtagagtctatggtagagtacttggttgaatagtgccatcctaaattcatgtccacccagaacatcagaatgtgaccttatttggaaatagggttgttgcaggtgtaatttgttagatagggtcaccctagactagggtgggccctaagtccaaccaccgtggtcctcataagaaggccatgtgaagacagaggcaggggttggagtgatgtagttgcaagctgaggattgctggccaccaccacaggggagatgcagggagcagattctcccttgaagcctccggaaggtacagaccctcaggacgccctgttttctgacttctggcctcctgaactgtgagagaataagtgtctgttgttttcagccatcatgtttgtggtcatttgttacagcaatcctaggaaactaatacacatggtgtgttgtcaattacatttcactggcagcactgaatgag

SEQ ID NO: 92879 - DNA, 1586 bp, Homo sapiens
tacttggtttaataaccataatacaaaattcctttggaaggaagaatcaaatattaaatctgagatgactgtgagcattgaagtgtggatttttgtctaaagaaataagcccaaatatcaattgtgtttccgaaggtaaagatgggctgaagcttacacagagcactgtttgccgctaacctctaccattctctctccatccaggttcactacaaagcacttgaacgatgaatcaacttccaaacagattcgagcaatgcttcagtagagctctgctcaaagaagaggatctatgtgctgacctcagaagatgtatatgtttacataatttaatacagattgatgttaatacttgtgtatttacataaccgtttccttcttgtcactgaaatatatggaccttaatttgtatcctgactgactcaacccagcagagcataaattgacttgagagccttacctttgatgtctgaaatgaaacccccttctccaaaggcaaaattcggagactttgatctttgctactggagtcctttaacaacatctataacgataaaaaattcctaattgtttgtggtagtattttaattctagatgtgttatctctctgggaagtatagtttatagaaacacaaaatatttgatttcctgtgtcggctcagctacaagaaacacaactgttatcttgacagaggaagagaggaatccaagaaaaatgcatgtggagaattaaacccaagtgtttcgaattcagcacaccccctctctgtcctcagactgcagtccacacgtgcaacttttctgtttgcacgtgttttattaatcagcatactccttttctgtttggatttatatccctctaatgttctcctttaatttcacatgaaaaaaaaatctcctgtatttttttcagttagtgggagagcagcagaaatagatagatgtgctgttgccactggactgatgaaggtggctgtcttggaactgggagacaggtcctcagaggtgcactcaggcaacaggacagccatctctctgcttcagccctctgcctacagggattagggaaatggagctctggctttgaagttatttgtgagtttagcaaccttccagttacctgcagagttctgggtgcacagccacccctcataagagccctgttctctgaagaccattcatatgagaacaaaggtctaggatactgcattagttaccagaaaactaggggaatttagagggaaaaaaaatccatgttttctatttcccaggtttttaaaaagtagctcttccccaaccccgttgctagcttgttgcaatataaaagccctggtgcacctgaatttactcctggccttactaatgattcataatgtgatcttgagaaatgtgtttaagctttctgagtcttaacctccttgtctctaaaatgggcaattaaaacaatcttcaagagccctgtaaggttaatgccgataaaatgactgactccgcccttcttccttagtacgtagtatccagcaagcatttgccccaccttgtcttgttgatgaacaatattatgaagcctgcagtcattctctctg

SEQ ID NO: 92880 - DNA, 1126 bp, Homo sapiens
tgagaatgaagtcaataatgagatggccaatcgaatgtccctcttctatgcagaagccacgccaatgctgaaaacccttagcaatgccacaatgcactttgtctctgaagtaagtgaagttgagcaacgaggtgcttttttccttaattccacacaagagctgcaagcaggactaatgtacatttgtgtctcccatttagaacaaaactctgccaatagagaacaccacagactgcctcagcacaatgacaagtgtctgtaaagtcatgctggaaactccgtaagttaaatcagagatgtattcgtggttgagacttcacccagccagtgtctgttaagatgatgatgttaatgatatgtaacatttgggtcaacaccctaaagttttcatgtatattatctgctttaatttcactaagaactctgagtggtaggtgtcactatcactactgcatagctgaagaagctgaggcccaaagtggttgactgacttcccaacaactgcatagcttgtcaggtggcagaaccaaggctcagatcacagatgctgtagaagatctgtaagaaccaaatggagggtgtgttaaatgatgggacatcatgataaatatattgtagagaagatataaaaccaggagttgacatgataagactgtttcaagagtgaaaatggaggtctctctctttctctctctctctgtctctttttgtacctaaactagttgctacttgttagatttaaaaatgattgagaatattgaggatgaagcagcatggtaatctgtgctcaaaattctgagttccatttatggctgtagcccctactatgcctgtaaataactggcctgacttcctgagcctcgggttcctcatctaatgaagttcccataaggccatctactttgcagagtctttaggaagaccaaagccatcaagagtaccttataaaatctgatagcctgttcaaatgtaagatggcattaatttcaaatatttcacttgtaccaaagttaagatttattccaaggcagaaatagtaatcatcttcattgcagagccaattcataatgaaatagatgctaagaaagcctctaggaaaaaagcctctagaattggcctgaattat

SEQ ID NO: 92881 - DNA, 1090 bp, Homo sapiens
gaggactgagggtcctgtcttatagatcaccccagctgccaggagagaattactgtaggatggaaggtatttgtttaccacagcccctgaagtccgcctcctctgggagagaagtggtaccagccccctggttactcatgcaactctgtggtcatataaatgtcagtgctgatttgttgaaaggtcccttcacctgggatggagagcgcagcttgtttgtctctagtgccagtacctttttcaggccaccctatcagaaacagtcttatttttgaaacagttaagagaggcctctatttttaaagactgacttgaaatctttctttttttctgtttaagtaatcatcaacaggatttttttaaaaaaaatttccagctctcctctctggcccacttagttttaattctgttttgtctaaaacttatcaagcggtgatttgctagggtggagccaggtgaccgctgagattagaaggctttctgttctggcctcagagtgccttcttctttcccatactattttataaatatactcaaatagtcttagccctgagaatcttggtcactgactatcttgcttttcttcttctccaaatacatacatctctaggaaactgtctttgtttagcttatgatttttcaaaaggagacaggatttgaatagtcagtgttttatttttatttgttttctaggctcgttgctttgcattttttcttatgttttcttccctgacactttccttactcagaaactgccaggcttaccctggaattctattctaccagaacactttctccagttacgggcctcctagcttgtggatttttaggtttgtgtttaagacacttgcatcactttgagaaaagtttgagaaagcagaaaaaggtaaaatacaaagtgattaatattgtgagtaacatcatatctgagaaaacttaccaaatgtttttgggaaacactgataggccataaaacctgaaaaagttcaggttgaataccccttatccaaaaacgcttaggaccagaagtgtttcagatttgggttttttttttttttttttttttctgattttgaaatagttgcattat

SEQ ID NO: 92882 - DNA, 1047 bp, Homo sapiens
aatatgccggccctgtcacacatatttgctggcagaccttttccattttattctgttttcataaacagttagtattgtgctataaatcacttccattttacatccccacatattaataatagataattatttatgcttcttagtttagcctgaaggggaaagagattggaggagagaggaagtgggtgggaaagaagggcagaatttaatttacagctttggcgaatccattttgctgtactttttttcagtgtttatacaacagtcatggggcacagagatagctatatatcctattgatgaaatgccagggcatctttcaaaaccaaagacatctctatgtaaatggtgttttctactcacattatcttagtttagtttgattctctgtcaaattgtccatacagtcctaaacgggttgttaggaaaatgtgtatatgttactggtgcatttgaagacagtgtaagtccttggccgatctataaaaattagaatacatggatttgatagcccttctccagtgcaagccctgctgtcgtgccctgtggcaggttcaccgaagaccttccccaaaaacaaagcacatagccaccttcttctccattagcatcaaggagtgccgtgcattggtttaaataaatatcactcttctccacaatgaaatcttccaccctgcctcaggtgacagcaaagtattcacagttaatattcaccagcattaacaaattgagcccctgcaaacaaaactaatcctgtttaactatcttaatgtataaggtacttatgctattgcaaattctagacactttgaatttagtgagttcttgacaacaaatgtatatgtgtgcaaggtcgcagggcacttgatacattttcaaactttccacagtagcaagtccagaacaggactttaaatcatccccccacataatgtcctggatacacttgttccagggctcctggaagtattggtttctgaaactgcccatgtaaatcacagagatttttaatagctttattgttagacaggagtaactccagcttta

SEQ ID NO: 92883 - DNA, 1022 bp, Homo sapiens
actggggcttacctccaaagagaatagcagacatccctgagagaaaaccagagagctgagcagatgggaacattaggcatgcttatgtttaaagggggcttgagcagtccaaggatccatgagagaggtcagactgtagaagaaggaggacatcttactaaactgagattcctggaggcagggtctgggccccctcagttttgtgactcagcacttaacccatgaatgaacctcagtaacagatgctgatcccatgagggaacagagtgaagcgggctctatccaggcagtcacaagagcacatgtgatcaagaaggagggagtgtaaatggattcagtgctgcagagctgtcaagaagaatgaagcttgaaaagggactgatgaattaggcagtgagctgtccagtcactagtggcccctaggggagcagattccgaatttgttgctttgaatatagaggctggattgtaaagagttaaggaggaagagatggtgggaaggaggaaggctgaacagcatgttgtaacaactttaatgaatttggcacctctactttgagtgttaaatattctttttgaagttagtggtagaatataattgaactgggtcagacagatataattaagctgggtcaaaacaatacaaaattagacacatctgtccttaggtattcctgttgcatagatctgatttaaattctcatctgacctttacagtgcattctatatactttgtattcacatttctctacaaacacttaacatctttgttgttgtttttcatccctctacttctttttcttccctctctacttccttcccatgtctccatgtcctctttgaagtctgggagacagggagaaatgaaagattaatgtagcaaactaatctttcacgagtgatggcttcagtttacaggaagaagtatgtctgaagttctactcaagattgtgcaaccagacccaccattatggcacccaacttgggcagtaggcattaacctttcaatgaagtagtttcag

SEQ ID NO: 92884 - DNA, 1047 bp, Homo sapiens
ggtttgtaatccaaaaaactgacagcctgtttaagcgaattcactatcagaacagcccaaatttgagataacttctaggtgttcccttttactttctagactggagttgaaaccaaccaagagaggaagagcaacttgcccaacatgacactaagtgaatggtgtctccaagatgagtgcttgggtctctggggccccttgccctgcatggggtacctttccatttgaaattaggcagaacgggcctgggtaggctgagagtgtccacctgcctaggtaagaagcaggtgtctcaagcagtttcctcataagcatgttcttgatttcccaagagaaaggggacagattcactagtgacttcccagcggtggcctgggccggagctgagcccagtttgattgcttccatgtcactagcatttgaaagtgggggacacattgactttcattccctaaaaaagaatctaattttgccctcatttcttgggtactttttgctgctgtactattgatgtttatggaaaaattagctatgatgaggtaatagtctattttagaaaactgaactcagatattgaaagaactattttaaacctgcacttaattgttcaattccataatggtttcgtggttttttttttttagaattcccgtgaattgccttacaactggactctagcagcttgtattccatggggaatgccaagcccttttgagggacaccatggtattaatgatcgatgagaatattcaaggcattttctcatttgagtgccattacttgtagtgttaaaacgttttgaaaacacactttagccattaactcatttttattgtcagatgaaagtgcttaatagactcactccacttcagttttcttccttcatctcggaatgaaatcgtctgttggattcttggcaatacatttgacaatggaacagaaaacctcatgacttcattgcaaaaaatggcagatggagcagggatgtgcaagcccagccccgccatctaaaatggctaacctggcttagcaaatacaggctcccag

SEQ ID NO: 92885 - DNA, 1056 bp, Homo sapiens
cccattcaaggtcaatgaccacttgtttgagaagtcagcctgaccatgtggctgcatttaaaaaatatgtcaaaggccagagagtcagagacatgttccaatgtggattcaactcccaaactgctgagtccctgagtgaggctgctttcttctgtgagcctcaatcccctaattataaaatgaaagaattagacaagactatctcttagatgtccttcaggcctgataatctgtgatcttgtgactctctgctctccttaaaaaatacattgtgactagtggagaataggaaattgcttctcacagtaacatgacttgcattccctttttagcagggtaccaccatcttaaggacagaaaagctacaggactctaggaggccaccgtcctgatttgggaagtccaacttactttggccagacagcagctaagctggttcatcccatcagcctggattggtgaaactgaatcacaggagatatttccaggtaagaaacaattgactttcgttataacgtgtagcacactgataaccatcattatactgcaggaagtatgtcgtatgcatgcttatgttatgaaagacatgaaactattaaggaaaaggttcaaggctctgggttctatagctgtattctgagtgggatctgtgctatcttgaggcttttgagggttaaggaatgaaagagggtagctgagaattacatgcaggggaagaacagagtcgagctgtagatctaggttcctttttccttgcagaatcatttagtgttcctttctgcccatgctagccaactagatttagacagtaggaggagaggtcctttggtagccaatctgagatggaatttagatcccatgtcagagaacggacttgcatcccacctgctacaacatctttagaaacaaattcagttcatgaagtttcatccaagggcgcttacagcagacaggctgcagctaaccattctcatcacccgctttcctgaccaccaacgcaatgtctctgtctgcttattgctcgtctctctcccctcctcccagtcacttatggat

SEQ ID NO: 92886 - DNA, 1123 bp, Homo sapiens
ctttgtggttgcatctgtaaggtgggagaaggtggggtgagggtgagagctgagtgggggtccgtgttaactgaatgctagtccatggatcagagccaagttggtggcactaaaaccctctcagaagatttttaaccgtacaagtttcctgaccgctgctctggattgggtctgtattttttgtgagcttcttagatgcgtagccagtacagggggcccgctggagtaggggaaccagtatgtgatggcttacgggctctgcattctctaccccttggtgcccatcaggggtctatgaatagtattagcattagtagaagtggtattcggttattaagttattattagggtcatctctgtgtgtggttgttcaagttaccaggtgactgtcattctttacaatgtgcatttggagttggggaatttctgtaagcctcagtaagtaaatggagtcaacaaaatggacaggaagacaagcaggaggtgtcttagaatgatgatcaggaggaaacccggtgttccgcctgactgaccctcttggttttgtggtggaaaatagcagcatttgtgctgaacccagctgagtgaatccatcccagtcatgcacactgaaaatgggttcaattctgaggacatttgagaaaaaaaaaaaaagcagtgaggatgggatagctctccctgatacctgatcactttgagagcttttctcttgtttccagatccttttgtgacacgcctggcccctcagccacagtcaaaaggtgaggaacagggccttaccccagaatccttctttggaaattcaccaccttccatgtctacacctgaggtgtggaaaacatccctgtgccaggcggtgcttggtggtgggaagtggaatttgtggaccccaaccctgagtttggaggaagtaaacgtctttgccctgccctgttaccatcacaatccggtttcctaaaatgcagggcccagctccactaacgtccactcagaaatcactttctcatcaagccaaggacatttcagagttgctgtgttttctctatcatttccttccctcctcccccacttcacttcctgttttttcttcctctttctccacccccaccccatctctcctggc

SEQ ID NO: 92887 - DNA, 1051 bp, Homo sapiens
gggtgcggtggctcatgcctgtaatcccagcaccgtgggaggctgagactggcagatagtttgagaccagcccttggcaacatggtgaaaccccttctctacagaaaaaaaaaaaaaaaaaaaaaaaaaaaaagccagggatagtgacctgcacttgtaatcccaactattcgaggtggacattgcagtgagccaagatcacgccactgaactccagcctgggtgacagaacgagaccctgtctcaaaaataaataaataaataaataaaagtcatgagacaactcataggcactaaatgctgagtggcacagacagaaagttctatgagagttcagcaaagggagaggtcagtatggattgtggtcttaggtgggtatcagagaacacttcagggaggaagtaaaactctgctgctggccttgaaggatggtagacagggtggggggtgaaagtctaggctgcaaggcagggcaagagggtacaaagctgcagtaaatcacatttgggcttaagctgggagttaacataaaggatggctctaattagtatgcagtcatttatggaagaacttgtaccctcagcttaggaatatggattttattagaagtggtggttctcacatggaaactgcattttcctgtagtcagtttctgtggggaatcttatcattatctattcttctatccgctgctcccctcattggggtggagggtgtgcacccccctcctgcagccctgtgctattggggaaggcagaatccctttgcatcttggggacgaatgcaatgctgaatactgatcatatgacccctgctttgcctcacagcagggagcctaggaacaagagcagctgtgctattgtctggagcgcaattgccagtgtttgtctgccgaggccagggatgacccttgccagcatcatagataagccggctcccagctgtcatgggtgcattctcaatcattcctcatcctatggactctgactctctcccgcttcccaagaatgatggaagtttttcattttcccccgtgcctgctttgtgaaag

SEQ ID NO: 92888 - DNA, 1277 bp, Homo sapiens
catcacaagatccactgtgctgggatgtggatgtgaggaatgaatgacagaggagtgatgaaaggggccaaactcagcccaggagatagccagctcctggtgtgtgggggttttggaaatttcttttctattttttgttgtttgaaatggggtcttgctctgtcacccaggctggagtacagaggcatgatcatggctcactgcagcctcaacttcccaggctcaggtgattctgccacctcagccttcctagtagctggaactacaggcgcatgccaccatgcccagctaatgttttgtatttctttcttatttttttttttggcaaggggttgggggagagataggatcttactacgttgcccaggcaggggtaatttctttccctgaagttgtcctacttccaacctgtggccctaggtcccagatggattgtaaccagcttgtccggagttctgagtaagccttgcagagggagtgtagagacctcaacaaaaacattttctctgaatagataggtgactcagcactggacaccaagaaagctgcatttagctgaaagtcagtaagaaactcgggaccgggcctggggcagttggcctcctatcctggaccatgagctcctcattcacaaagcaaggggctgggcagagagttgcccaggtggcttccagctctggcattcagtgcatctgagtgagttgtcatttatagaccaggaagggcgaaattatccccattaatctgctcacagttctggtgcttgagaagccactgggtcttgccacatctcgaattagctctgggcccttgggcttttaattaaagggctttgtgagtcggatggtttatggtcagattcagatcttcagggagacacagagggaggtcctgtgttctgtcatctgcttgtttagaaatcagctgccactctcagtgtgagaactcagaatccggagtcttgcaagggacttccagcaacggctgtggttacacctcaccccctactttcgctgactccagaccccagaggctgagggacagtagatatgctgcctgccattgcctctttccttgtgcatgtctgagtggtgccagcctgatcagattctgttgcagttccccgtgcttgccacaatgtcggtcgcgtttcttatccaacgctgtttctgcttctggtggtttgtgctaaatgcattttcaatcccaagtggtacagagaagaaaaggattgtctttaaaaagtggctttgaatgtgtcgaaagcaaggttgcct

SEQ ID NO: 92889 - DNA, 1105 bp, Homo sapiens
ctcgcctatggattgtccctgaaacatctgcaagttcaattgaaatatgactttcagatgaaagaatgctatcactgtcccaaggctttctttcctgatttgtaccaacatcaaagtagaagtttatactttttcattttaatggtaatcggtttccttaataagtcttgtctttaagaggtaaattcaatcagctgccgtctgctatgagactgagtggttgtggctccgtgtgtggggggttggtggggcagggctgtctttatttttctgctctattttcttcttatttcccttagcaataattgacccccttgcatgttaaagactcccgcaaaggtagaagaaggaaggcatgcgcagtgatgctggaatcatcttccatgtggttatctaagtgtggcctccaaggaagttacttctagagcccagttaatttctgacttaatcagagcccggaagccccaatcatgcttctgaatttggtaatgacaagtgtctttgcaaacatctaggaagaaaacaagcttagaggaagctttgacagacaacagtagttaagccccagcaacagtgtgacagatgccagctggacagtgtgataggctcctgctcatgggtggacatggcaaggactgtccagaggagaaatggtcacctgaggctggaacacaacaagggcagtcttccagtatgactaggcactgaagttttcatgactcagcccatccaccaaagggactgatcttaagagtttcagtcttaacctccctgtgtggtgggacagacacagcaactaattgggatgtgtgattcactcacatcggctctctacctggggtcaaaccaggcattcaattctaactttgcattttaaaatgtctgttacatatccaatactgcactagctgtgtcattgcaggagctcgtttaaactccacagcagctatataaggtgcatatcagcttcgttttattatataaggaaaccgatgctcaaagaggggaggtacctagttccagactgagttgaagctgaacctctggcttggcagcagggtagagagccctgagatgttggcacagagagttgaggagtggcctt

SEQ ID NO: 92890 - DNA, 1106 bp, Homo sapiens
agggaaaaagcaaagacttgccttttccttattcaaaaactgttttttgagaactgactgtgcttaggtgctggggttgttctgacagataaaccccttcctcatggaacccattccaagcagcctccttgaagaaccttatctgaaggtacttgacataagatgactggaatttcctgcattcaactgcatattacaagtttttaaaatggggaaattaaaaaaaaaattcacggcacctgatattaaaataataaaaagttaattcttggtctgccaatgacctgctcaaagtgagtggacagcctccctgggtcttcatctcctcatcctccagtggagctaatcttccttcctgcctccttttcaggaatattttgaagacaacaagctttgaaaacaagttgaaagctctgtataaattgcagggcgtgactcacatgcctgtgcgggacccatgttcacaaggtgctacctggtgagaggttttggatgaaggatagagtctgttcacagatcaatttttatcaactttacttctccaggtttgtctgcaactgtttagggattttttccagctgtcagaaatacttttcctgattttatattagtatttggcttctgcactgcagtgcggtgctttacaaacatgcacacgtatatgtttacctaatttttctaggatgataatttaatgtagttgatatgacagtataagaaggcaaaggccaggattgttgctccaggtacgaggaggcttgaaaacagcatctgtgggtatacaggagtgggaggtgttagaagtcagcctagcttgggtcagggtaggaaaccaaaggtgtgaattgtcatgaaaagccacatgcaaggtgccaaccctcccagaccccccagaaatagctgttgaaaattgggctttctggtaaaaagatcagctgctgcagaacgccttccatacatgtcagcaagtggggccggatagcatagagcgagcctgaaatgcgtctaaataaatgattatggtgactcactcgcccccgttgaatggaatgtttttttaaagtgaaagtaagagagaaagaagataataaagcaaagaaaaagaa

SEQ ID NO: 92891 - DNA, 1044 bp, Homo sapiens
ctgaactgttgaggaccccagctgagagcagagcaaagccacttgtgacttcctgtttttactcagcaccaagaagaattcagtttgcatttgctcccaggcctagatgcaactagataagtcagggacccagagtcaagtagaccctcccaagccagccctgggcaaggagttcatagctccccagggccataggggcacccactgtcagctgtcagtgaccctctccagtgaggctgttccttcccttccctggtgtttttttcttcagtacacgctcttcttttccattccctgccagtcccttcacattgccatgctctaggtttgttaaaaataagctgagcacgtattatggtagcacaaaaagaccagagaatcagcagcctcagtgtcaaatgttggtcctgagaaagtcagttcactcatatagcctcagtttctccatctttaaaatggggttgacagcatctatcctactggccacattttcttgttcttttaggatggcatagaatagcctaccgggaatgctttgaacactttgaaaggctgaaggacccataatgtcctagttctattgggagatctcaatcttaaagacagccctggaccactgtccagagattgaaaactaatttaggcataattaagctataaaatctcagggttagaggcatcctccaggggcattttgcccagccttgatgttgaatcctctaacttatttatgtatcttacatttattgagtatctgctttgtaccaaatacagttttgggaactaggggttcgaaaaatgagcagcatttctgttttcaaaaaaaaatttagtcatggaaaaagatccttataatacagttagacaggtggtatgataaaaggaagggcaggctgatgtagggcccagaggtggccacttgactaggtcacccatgagggttgaatcaggtgatttgtgctttggggctgaaatacatttgtccttccactgtccacttgaggagcaatggagtgatggttggagagccacacatcagccctt

SEQ ID NO: 92892 - DNA, 1074 bp, Homo sapiens
cacctgccacagacgttcttagccagccagaaagctgctgtgcctaggacccagcacaccttgccgtcaccctctctcctcccccagaacccagaaccccagtttggcaaaaggcacttttccaatactgagctttgggaacaatttgacccacttcccaaaatgctggtcccaggccagccatgctttttggtggagacacctgtcttgtctgccaggagacattctctgtcaaaatgggccagcccgtccctgggtcctcctccaagctgctcctactcgctagccagtgtccccagagaccagggccaagatctttgtcatttaaggcctccaaagctatttccccacgcatccccagaattcccccagccactgttttgggggtgccaggtccagaactgatggagcaatctttctgtgtccagggcctgatgtcctctcccacacccttgtttacccgcctgctccccagggaacccaagacagggtcatggggctggagtttagggccctgatctcccctgaagctctgtgaccctccttttctccctgttagaaactttcctctctgtcaccagtcactatctcctctggatgggacctgggccatctgcacagtgtcgagtccccagggcacagaatgctgatctgggaccctggaaggctgggacttgtgctggggcagcaggaggagagtggctgctagccaggtctgggcttgggtaccagagttctttgggtggatcattgtcggctttcactgatctctggttggggttcgagggcttgctttgcagtggagacaggaggcagagcaggggctgtttttcctgcgtgcttctgactgtcttgtgttgctatggtgacagttttgcctgtcttcctccttctgactcttctgggagctggtttttattggtccgttgtcctgtctttcatggctctaatttctcctttctacttgctctgaaataaacagtcataaacatgggcgctgggcccaggctgggggctggcagaacttcacctcctgctggccctgggttcctgtgaggggagagtgggaaagcg

SEQ ID NO: 92893 - DNA, 1053 bp, Homo sapiens
ttttgtcctgtgatatcatatgtggcaatgtttggtactgttctcaagaaagcagagagagaacaatctcttagagaagtcccattttccccatcctactaaatatcacagttccccaaagtgactttgctgtcttctgtccccccagtgccttcctgcatgctgttccctttgcccggaatacatttcctttcttgtcttgtgtgttgaacacctgcgtgtgttgtaagatgcaacccaagtggctccaatgaatgtttgcttgattattctctctggccattactcactccctccttggatcacagctgtggcaaggcatggttctctctattagagccccttcactggggcccccactgtgagaacgactgagaccctatggaagagcaggtccttgagggcacagactctgtttaagtgtatcctcaggatccaggccactaccagcacgtgggatccaggataaccttgaatcaataaatgagttactcctgagctcatttcacttcaacaggatggactcatcactcctggttttaagcaaagcgcctcacatctaaaaaacaccaatgaagcggggtttttgaactttaaactgtatttcaatgtttttcacaaaactgtgtatgctttaatatctcattttcccagcattatctcacttcttcagaggttgtataaatctcatattacaggggccaaagtcgtcagcacagtgtgggttttttttttctttgcgtgtgaaagagtttcaggcacacaattcatgtcaatacattctactccagagtcttttctaatagaataaaatgagaccatgcatgtgtttaattagagttcagttttccggcttgatttgtctgccttacacagaggagggcatttaggaatgagctgaatgcttgtgattcacatggtgaatctgggtgatgtatgtccagggccctcagaggaagtagagatgatggaatacactctaggcctctcaagatcaaggcccttctgtttgctaaggatggaagaagagtgaaaagccttgaaaattcttaa

SEQ ID NO: 92894 - DNA, 1029 bp, Homo sapiens
ccttagtcacgctagccatacttgaagtgctcagtagccatatgtgcagttatagctagcgtgctgtgcagatgtagaccttcccatcatcagagaaagtactaccgggtagtgctgtgtaaaaaactcaactctctaggggggcatgttctgaaaatgcaaacctgcttttagaggttttgatggaatctcttctgcctccttcaagatcaaaagagtcagagttctgttctgttattaaaaatagctacttctgttattttttgcctactttagatttgggaagacagatgtcttctttcctactgacttatgttgggggacacctgcagcctacctgctgtgtgtgcacagctccacgtagttgcactgaacatacgttgttagcaccaaagtcacactgagataaaatttattgtcatagaatgaacatttttttttcggaatgaacaaatctgttttacttttcacatgccatgttcgttgtccctcttttgggagcctggatgaaaagttggaaagttgcttttttcccttttgttgtcattaattcttcaaattccaaagttgtatatttaagagtagatttagtaagttgttgctagcaactgctgcaattttaaaattataaaataagaattagggggaaaatcaattgttataaatttatttgggacatttattgccaccacattggaagcctttgaaaattcaaacagaaaccaatacacttccatcttttttactttcgataaataatatctttgtgtatatgtatatatagatagatatacttaatcaataagtcatttagcagggtttttacattttatactgcattcatccaaaacagctctttccagatcgataggatgcaaatgaggtaagaattaaggcaaacccaaaaggcatgcaaatgtagtacatttatattcactgataatacaagcttctgtggtgtgtggaccagacacaggagccaagggtccctctgtgtctgtccaatagtattttacaggagggtagtga

SEQ ID NO: 92895 - DNA, 2304 bp, Homo sapiens
gagatgggctttcactctgtcattcaggctagagtacaatggtgcgatcatagcttactatacccttgagttcctgggctcaagtgatcctcctgcctcggcctcccgagtagctaggatgacaggcatgcaccaccatgcccaactttttttttttttttggtagagacagggtctcgctattatacacaggctggtctcgaactcctgacctcaattgatcctgtgacctccacctctcaaagcattgggattacaaacatgagccactgcacccagccaattttctcctaatagtttctggtatttcttttccagtataatagatttcttggacatcatagataatgtaatgactgatccctggatgaaaatccaggagcttgtatcagcccacagaatgctgcttttacagaaatgtgacttacacaatagcaatcctaacttttgcctttgtttttcaggatatggttaataggagaattgccatggacttgatactgaagatggcagattcccagcgttttagacagtttatcttgctcacacctcaaagcatgaggtaactttttaaaactttctagatacatatcaagtatataaaagggggaaagaaatcttttacaattttaatttttaaaatacaaatacatacaagaccaatgaaaataaaaattagctcccctactggttcaggagatttgggatgtttttctctttttgagatatttaaaattttacttgtattacttccctttcataactgaagcaagttgttactattctgttttgagtctgcttctttgtagttatcatgacaaactaaagtaatataattttagtaattctgtttggactaaaatgatttatgatttccctaatcttgcctcttttctcttggtgacttacaaatgtcaatctttctaaacaaagagctctactctgctgtcagtcagtatttattgggtgcctacaattgtcaagcactatgtcacttagagttaatattctgtctctaaagtggccatgtgattatatggggatctaaatttgtgattgggaatatccaggtaactccttccttgctagacaataacagaaatttaaaatagttgatatataaatctctttcattttcttttcctccaaactgaaaacccatgggatctagcaggaattaatttttaaaatggaaaacaaattatttccttattgcaaatgatgtttctcctagaactctagatattagatatatcccagataaaagccaaatatttagctttatattttcatgaggtaatattagaattttttttaattggtaaaaggtttcttggaaatttgagtaattgattttgcttcttctagttcacttccatccagtaaactgataagaattctccgaatgtctgatcctgaaagaggacaaactacattgcctttcagacctgtgactcaagaagaagatgatgaccaaaggtgatttgtaacttaacatgccttgtcctgatgttgaaggatttgtgaagggaaaaaaaattctggactctttgatataataaaatgagactggaggcattctgaaatgaaagaaactcctttatatatccaaccacaatcaaacatataaataagcctggaaaaccaactacaacctgcaatttaagattactattactttaagaaaatcaatttcatagtattggttttaaatctttttaagtttttttaatacgatctatttttataggttctttttcagaagtaaaattttgtacatatatacatgtacatatctgtttagtttgggttcatttctataacattttgtaagaaaataaaagtttgagcacctgattatatttagttttgcttttccagatattacattctatagttaccaaaaatggttgaagggagggatttctcattgcagagggtggggtgcaagggaataagacacttgtacggaacactgaagctttgccaacttctacacatgccttttttgcagtcctttaactgtccaccctaccaagagcttataaccagtatcagaactggataatgacgcagtttttcactctgacctccatcatgcttgcctgatttaaaagccctcagtttgcagtccagggactgttcaggcttgtcctcagctgagaggacacaggctagagggactgtgcagaaccaggctgggagaagggctgggaaaactgggagtggagggtggatcctcatggagcaggagagtagctcatggctccaggagcctgaggccatgcagttgatggtgagctg

SEQ ID NO: 92896 - DNA, 1762 bp, Homo sapiens
ccatggacctttatttagtaaataattttttaaagattttatttagcttttaaaagaaatttaaaattatttaaattttaaaagattttatttagaattcaaaataaatacaatacaaaagaaatttttttttttttttttttttttttgagacggggtctcgctctgtcgaccaggctggagtgcaatggcatgatcttggctcactgcaacctctgtctcccaggctcaagcaatcctcccacctcagcctcccaagtagttgggaccacaggagtatgccaccatggccagctagtttttgtatttttgtgtgtgtgtgtgtggagatgaggtttccccatgttgcccaggctggtctcgaacttctagggttcctttaaaggattcctaaagcaatcctttaaatcttttaaaagatatatttcaatgcatttctttggccagtgtaagctttttaaagttgatttctgtccttttgacgttcagtaatcacttttaatgcagcttaaccactaggtgtcactataattcaagtaacaaaaaatctcagcacttttaaatgtttgaagcttaagtttcagggttaggtgtggtggcttacacctgtaatcccagcactttgggaagctgagatgggaggattgcttgaaccgaggagttcaagaccagcctgggcaacatggagaaacctcaactccacccagaaaaaaaaaaaaaacacaaaaattagctggccgtggtggcatactcctgtggtcccaactacttgggaggctgaggtgggaggattgcttgagcctgggagacagaggttgcagtgagccaagatcacaccattgcactccagcctggttcaacagagcgagaccctgtttcagaaaaaaaattgttttattaacattttttaaattagcctttggaattttggtctgttagattcagttatggtgaaaaaggttttcagttttattctcttgcagtagagcaagaagtaccattatacgtataactgttttactgtaaaattttttgaaaggaatgggtatttccaaatcactaagtcattttattcccatctcctttttactgtaaatctattatttatctgtcttgtaaagaatttaatctggcctttcatttacttagttttttgttccttgtcaactcattctcttcaaggttcagcctggagaaggaaataaagctgctttcaatgacatgagagccttgtctggaggtgaacgttctttctccacagtgtgttttattctttccctgtggtccatcgcagaatctcctttcagatgcctggatgaatttgatgtctacatggtattgttaaattttaaattctctttttcatttttttgtttgtttgaaacatgtatttctaaaggaaggaaatctttctttagttttacccctaacaggaaagatcctgccctgactctttagtctgtgaccagtagtggggaagaactaaagaactagagttctctcccttgcttctaggcacacagtaaccctagagaccctggaggggtcctcctcttctcgcccagcatggatatccgtgccttccatcatatctgcgttttctccctcaccctctctcccagcttattttcatcaacccataaatatgttcagactttttgttttaatacaaaattataacctgttcaccaccctggctttgactcaccctagccactgtttactgttccttcatacccacacatttcagaacaatgtacag

SEQ ID NO: 92897 - DNA, 1649 bp, Homo sapiens
ccaacccagctttctcccttattgactgtgagccctatcatacctcaagcctaatataaggaaagggggcccctctttagtgaaatattgtacgtttggagacgccattgttcttttacacaaaatatcaagcataaggtaataaagactgcgtgcttacccctaagatcaggaagaaagcagttctgtccacgctcaccatttatattcagaagtagaactaaaggttctagccagtgcagttagcccagaaaaagaactaaaggcatgtatattggaacagaagaagtaaaattcttctgatccacaaataatatggttatctctgcagaaaatctgatggaatctacaaaaagagctactagaactagttgaagtcataactagcaaggttgcagacacaatcagtatgcaaaaattaattacatttctatgtacttgcaccaaatgattagaaattgaaattttaaaaaatactatttatattagcatcaaaaatataaactacctagggaaaaatctgccagagatatttaagacctgtacactgaaaactactaaaatagatgctgagaagctaaagaagacctaaataagtggagagatatagggtgttgttagatcagaagactcagtattattaagaagtaagttcttcccaaattgatatacagactgcctcaactcaattttcattaaaatgccagcagacgtttttgtagaaattgacaagctgatcctaaaattcatatagaaatgcaaagggcctaaaatagccaaaacaactttgaaaatgaagaataaaattggaagacttatcaaattgtacactttaaatatatgcagcttattatatttcatttatatttaaagctgtaaaaattgccacatatatgaagaagcatggaaaggtgattgataattttttttaaagtaggaaatagaaccagactaccagatgataattacaagagaaagcagactagtatttttaaccatgattaatttgttaaagaacatagagttaatcataaacaaaatggacaaaacagatccagagtttcaacatagaattggaatccacaatttcaatacagaattggaagctacaagaatattctaaaactgaaaagtgcagcatctgaaattaagaactcattggatggatttaacagccaactggacacaacagaagacacaattaacaaatcaaggcaggtcgaaaggaaatatctaaattgaacagcataaaaacagaaaacactgaacagagtttgagatatgaggagcacaaccagcaagtttaacataattggagtcccgataggatagaacaaagaatgagcagaaagaatatttgaagagagaatgtttgagaattttcaaaactgaaatacatcaatctagattcagaaacctcagcaacctacaagtgaggtaaatataaagaaaaccatacctgaaatttatatgatagtcaaatagctgaaaaccaaaaacaaagaggtaaccttacctttttgtaagtagcaagagaaaaaatatgcattagtttcgaaagagcaacaataaaaccaaaggcagagtttttaacagaaattgtgaaggtaaatgttacctgacagactttaaagtgctagcagaattgg

SEQ ID NO: 92898 - DNA, 2829 bp, Homo sapiens
taatttttaaaattgtttatgtctttactctggagaactttgccattttatgacaacagtctcttttagacatcccatgaatggaagcaatgaatgaatacatatctgtattgaaagaaaagttaacagaaaactctgaaaaccagctagcagtggttgctgtggcagcagaaggaaactcaggctatcagtgatttctagtgtgggaatttaatgcagttcagggagggaaataggaaggaaaagagtaccagagaaatgagccttaggtttactagggagcaaagatgttatgaaaccacagccagtgacttaccatgcagattttattttctaaataccattccccactaaaaggaaccagggctccatggagaaatggcgattccagagctgggcagggaaggtacagatgagcctcatactatggcagagaggaaggaagggctgagaaaaaaaaggggggacacatccagcttgaaggggtgcccattggaaaaatctaggacagtctgaggatctcaataaggatagtaatagatggtgtgaataatgtaaaaataaagccaatgaatatcagactccctaatctattctgataaatagaaagttagataaggaaataaagaactgaggaagaagggaaagttccttacagtaaaatgccatctaatatatagagaaggaaagatagagtttgcattgtgccaagcaaagtgtaaggcattagaggtacccagtgcttaagagagtgcccttagcttttttgctactgtgaagttagaaggaggcaaataaatagatactttgtccatttatcttgtcaccattacagttaatcctctcaaggacaagatacctttataatgtattagggtaatgccttagattattaattagttgaatgactgatgcattcctaagcactgactgtggtataatgggttatattaaatgtgagatgactctttaattcatttcattaatttttttgttataaaagtaaatgaactggtgaaagtgtagggacataaatgaatataaagacacaaggcaaaaaatactacctaaaactcaactattaaatgagtaaccaatgtttacattttggcatatttccatctggttttctcacatgcttagatcatgctgaatatagtttttaaaaaacctttgccctctttttaatgtgcctaatttttaaatttcaaggtgtttgactttacgatgcaaattatactttgacaacttactatctcagcgggcctattgtggaaaaatgaattttgaccacaagaatgaaactctaagtatatcagtaagtatcctaattcttttcatcctaatcattagaaaaactagttgtttcttttcttttctatttttgttgggttttttttagaggcagagtcttactctgttgcccaggctggagtgcagtggtacaatcatagctcactgtaaccttgaactcataggctcaagcgaccctcctgcctcagcctcccaagtagctaggagtataggtgcatgccaccatgcccagctaattttttttttttttttttttccgtatagacaaggtctcactatgttgcccaagctggtcttaaactcctggcctcaagcaattctcctgccttggcctcccaaagtgctgggattatcggtgtgagccaccatgcccagcctgctgcttttcttttgataaaacattgataaactttaacctgttgtctttgatttttaagttaaggatggtctttgccaaggtgttgaatttaaatcgatcttactaaataaagctgctagcgtagattttatttttagacaaacacattattttcttagggtgataattgggaagtttttttcagtgacaagtatttaccttgtctttctactccactagttcccttttaaaatttacacagcattttaaattatttgggactttatggaaagtacatagtctccagtctcctaaaaggaagcaaagatggttcttccccacttaattgtgtttatactatttacttctgaagttgtccctagatctggccacttttgagtaaaaaaaactgccgtgttcaacttgatttgatgggttctttcatagtcatgtgttaaaagagggcatatggagatatggcattaaaaaaaatgtgtagccaggaggtcaggaacaactatccactctaaatattctggggcagaattttcaaataattacctactactcttagttaccataaatcttatcctttcattttaatacttacaataaatgttaaatttttggaacatcttttttgtttaaaagctctgcattttaaccatattagaaagttaacttttactctctctttaatttctactggtagatcatgggtaactcctctttacctgcctttggtttttaaaagacccatttattaaagatacaattttgaaagtattgggaggaattgtgcttattgatagggaaggtagtatgtcatggtagtctattgttctcactgcagactataaaaaagccagggaaattacaaaacttttatttttaaagacattggaaagctgtctaagcaataatgagtagacaaattggaattccaagggataggggagcctgtccaaggtaagctgacaattgctggacgttttctttcctgggagtgtttgctgattctggactttgagtagtctagtagtagtaggagggctgacaagacagagtagaaacttgggaagggaactgctaggcacctaactaatatttcagttagtcaattcctgagttctgatgttgtgcacagttggcccaag

SEQ ID NO: 92899 - DNA, 2425 bp, Homo sapiens
tttgtggcaacactgttctaataagttttctttgtctgtaggagagttttgctgttctttttcatattttccccataaatatctggatgctgtgccagcgcgttttttgttacttatttttttaattagttgaattttcctgggccagttatttgaaggagaatgggaagggtagctgtgggagcctcgaccagggttgcctttcatgctaattcagttataggcttgccacagtaataggctgttgccttttgtaatagcactctgagtagccatgccatctctgcctctttgatcttatcttgtttaggacaggggagggtggattctaatgctggcttgagttctttttttcttttattggcatctgtcactgaaggaaacctttcttccagtgtgaccccttccctttttgaaggtgtgtatttgctagtattctctaagatctgccacctctaggccgtaccagggcatttgttcacacactgtctctgcctcctctagggcttggaccttgttccttccctgtcaggatagcactttcttattccgtaccaccctttcattctgggagtgtaatttgcctggaaatttatgaaattgactgctactaggcccccttagtactctctgcccctccctgttcttcccagttaaatctgtttgagattctactgttatgttttttacgtgtggtgtattttttacgtaatattttgtttatataataggcagtaccaagaagcaagagagacctatcttgatctggatagtaaagtgaggactttaaaaaagtttattaaattactgggagaaatcatggagcacagattcaagacatatcaacaatttagaaggtaagtacattgaaaaatgttactatatattatacatttttgtgtttctctgttttcatattatttatataattctgttatagcagagactattaatgcttgctttgttattcagttcttaggattctctaatttaatcagacaattccgaatctgaagggctctttatggtgagcttatccaacttttccactctgttagatattctttatgcttaataggtcttttatgcttaaataggtcctttgaaagggaactcattggttctaaaatagcttattttacccttgactattgcatgtttttaatggatacaagcatttggtaggaactataaaggtaatacctcagttgatttaccataatctactagaatgacgtagctccatgaatgtagaaactctgttttgtttactgctgtatctctagtttctataatcatacctgatacataccaatatacattggttggataaatgaatacagaattagggaaactggatattaacatatccagagatgtacagactcacagagatagattgactccaactgatcacaagtgacagaaataaacagaggataattgatagggagggacggtcctttaatatacatgaatccgagacagccctagtccttccatttgcctctgtttttctccaggcaaattccctcagtaatacactttttaaaactgtctttacaccaaaaattctaccatcttaagcttgtacaaattaaaaaaaaaaaaggtacctagctcttatattccttagtgaaactacaggttagtttttgaaattcctgtttcagttttacaggcatattagtagggcttgaattaaataggacccatttttacccttttgaggctacttttagccttgttagatgagattagagcagccgttggttgtgggctaattttttcctacctctgaggcagtgctattttgagtactctaccgataccttgtaaatcacaaggttttcactctggccaataagaacatgaactattcctggtcgtgtgtgagctgtcggaattacttctatttcctttggatatttcttttcccagcctcaaatggtgtcctcacacctatgcactgaccagtactcagctcaagactggagcagaaccctttatagatcctctggagtttattttgcctccccagattcccagctccagctcctgaaacaagagcaacagctccactttgatttctactcctttgtcctctgtcggtgaagagcagtgtggggcattggtggggttcaatttgtttcctagaactagcaggcagttctagtcaaatgacctgatagtcactatctgatagccagagtgtgaaaaccctcagagtttggaagaagttaatttcaacccccttggatgtccttgagggattcagtggaggaagtgactgcagatatggtggaagtggcaagagaactagaattagatgtggagcctgaagatagccagagtctgaaaatgcttgttttatatattttgtctcgttttttagtttcaggcagaagaataaacccaatctcta

SEQ ID NO: 92900 - DNA, 2414 bp, Homo sapiens
tactactgtttgtttttaaagtgatcttgggatagcttctttccagttgtattttatgctcaaaattgtgaagttataccagatgtgactaaataaatcagcgttaaattttttcacatccttgctttttcccgaacccaccctttttaaaaccaggtatcctttttcaggtgtcctctgtaaatacctaacacttgcattgttttaagtttttaaaggctaatgtggattcccccaaaaacacctagtttattagaataaaactgaaagtaccataatatatggggaattcagataagaatttgaatttaatgtgacttcctaatttgggaaactcctcacttctattcagacacatatggatataataacacttgcctcttcaaacagcataatcctagccactttaccgagttgtttattatctttatacctatgctggaaatttttttaaaacaatcttttattctggctttgttcaaacaggatgaattaaaccttgctgattctgaagtggataaccaaaaacgagggaaacgacattatgaagaaaaacaaaaagaacacttggataccttaaataaaaagaaacgagaactggatatgaaagagaaagaactagaggtttttcaccatttttttcaagttattttgttttcagccttagccatgattattaaagtgtgttttccctaatgtcatgtttctaaaaacagaaaagttgtctgaatttctgtttcatatagagtaataggtgtttgggtgaatcaacagaagaggcttagggaccctcagagtgtgaggacttaaataggcaagactctgacagtcctgtattatgcctctgagtgctttagaaagtagcgctgtctttcagctaacatagctccttagatgcccaccttggcaagcggatagcccttgagtgtccggaaaaggcaccccttccagtgagtagttgggctgtgggccgggctagattttagctcctacgagacatgtctattggcaattctaagcagtgacccggtgtttagaggagaataaattgaaggcaaccttgtcctaaccagaacagatggattccaattttgcatttatatcttaaggaaaatgatctaaactctgtaattcattttcttacttgttttcctcatttgtttaagaataatacagaaagttgtgaatataaaaaagtactatgtgtaaaagtgccttgtattctttaccccatgagggtctttgtttgtgtttttaataccattggtgctcagagtcaaccctaaaggatgtggaaacctacatctcacctcgatgccctgggtagcaagcttttcgtaactgctgcattaaatttgtttcactaggaagttgtggagatcttgcaccttattagttacacacagcaatgcagttttctcttgaggtcattactctggactttatcttcaatataaaacttagataaatataaataacattgatattaaatgtaattaaaatacatttcttaaaaatgagttcagaattttactttgcagattttggcacaagtagtataatgaattgttatatcaaagaagagttttaaagatataaacatctactttcttaggagaaaatgtcacaagcaagacaaatctgcccagagcgtatagaagtagaaaaatctgcatcaattctggacaaagaaattaatcgattaaggcagaagatacaggcagaacatgctagtcatggagatcgagaggaaataatgaggtaagtagctggtagcttttctgctttaccacattattcatgcatatcatcaagacaaaaaatgaaaaacatatacatgtcttaaatttgaatgaagtgttactatagcaaatagttatagctgaagtagtcctttatatgtgtattattctcaataaatagtaaccttttttcttctgaactattacaaaactcattatggaatttcattttaacataaatgctttcgtgtatctataaggttcatatagacatgaaaatgttcaacttcataagcaatgaaagaaatggaaatcaaaacagaagccatttttcaaatacatcaaattgaataggatgaaaataacactaatattctaggtcagtaaggttcaatgaaatggatattttcatattactgataaaaacagatgctcttgataattagagcacaggttctgaagaaagagtatcttgatttaaattgcatttccaccacctatttatgtgactttggcaaattagctatctctctgaactttaattttctcattcacaaaatggggattgttctgaagattaaatgaaatgatccataaacaatatgtgggaaatatagtatattagttgttaccattaatgtctttctgaaaagcatttagtggtatgtcaac

SEQ ID NO: 92901 - DNA, 1085 bp, Homo sapiens
tgttgtggtattacaaatcatatatttataaactttatatatactcatgagaaaatgctaataaaagtggcaaataatgtctaattgtttttatgaaaatagttttggcttcacagaccatctgaaggatatcagaaacccccacagcttacttggatcatattttgaaaaccactggattagaataatcattccataacttgagactttggatgtttcagaaaaatttttctcgttggactcaacagtgccatcatttaaaatgctaagatggattacttacatctcttttgcatgggaatggattagtatataagaatgatatggcagaatttatacgtaatttcctttggttgatttaatactaatgtacccctttcattaattatggaatccttctgtatcatcattatagagctttgtagattaatgaatcctttccaaggttttcggtttaaatttttttttatgttactaaaatccaaatacttttcttttagatgaaaataagaaaaaatatttctgaaattcgggaacttgagaacatagaagaacaccagtctgtagatattgcaactttggtaaaatactttttttcaatttaaatgtaatattaaagggtaaagccaccatttaggttaatggcatcaactcagcttttttagaaagttcttttaattgaagctactctttatgattgctgtctccattcaccaagaaggtaaaaactacctggtatacagccttcatattttttaatgttttgtgtatatataactttcatgcataataattgattttgtctcctatcacatggaaaaaaactttaccaaaacttaattgtatttctaaacaagggcccatcaaaccctgctgttgagcatagtgtttttcacataggcactctcagagttcagcagtatcaatatgaatgggcacagatgtcaggatcatcttttagtcagttctagttggtgtcttgttttttttctttttttcaaatcagtatttttcattttaaatcaacgcattttttactgtaatctttttttcgggaatctgtttatgacacttagctttttctg

SEQ ID NO: 92902 - DNA, 1042 bp, Homo sapiens
atatgataccatacagtatgtcatatattcttacaatacagttagctacagaaaagagtatgttaaaatcataaggaagagaaaatatatttactattaattaaataaaagtagatcatcattaaggtctttatccttattgtcttcacattgaataagctgaggaaaaggagtggttggtcttactgtctcaggggcggcagaggcagaagaaaatctgtgtataagtggacccacatatttcaaaccctgcattgttcaagagtcaactctacttgttaaggaaataagtaaaacttgattcctgtttagaatgttttttgaaatgtctgcaatagattttcatgattaatagcttggtaggattatagaactggtttaactgaaaaggattttgcacataacttactataaataaggctttctttgtaaaggtctaaagtatttgtaatattgagaaaaagatttaaagtattttctatcttctcctttcctatcaagtgacttggagaatgaggttgaaaataagacggcccagatattaaatcttcagcaacatttatctgcccttgaaaaagatattaaacacaatgaggaacttcttaaaaggtgccaactacattataaagaactaaaggtaaaaaaataataataataaaccttcttttgtttttttcaacttactactacgaagttgattttaagatcccattattgactccaagcaattctcaaaccttttggcctcaagcccctttacactcatcaaagagctttcatttatgtgggtatatctgtcaacgtttacatttttaaaaattaaaacaaaatttaagaatatttattaattcatgtattagtctgttttcacactgctgataaagacgtacccaagactgggtaattaataaagaaaaagaggtttaatggactgagagtttcacatggttggggaggcctcacaatcatggcggaaggcaaaaggcacatcttacgtggcggcagccatgagagaaagagagccaagcaaaaggggaaacgc

SEQ ID NO: 92903 - DNA, 1082 bp, Homo sapiens
aagaaatatctaagacaactgagcaggaaaaaaaaaaaagaattataaatgacttgtatgtgtaggggaaatgagagttttgttgaaatagatttcttctagtcatttttatgtgattatgagagcagaataaaggaaaataaccataatggatgttggaaagtttagtaaaacaattagcaatagaaaaagttgaatgactagcaccttggtgttctggcacttgcttttgtttattatctcaatgcagttttcagttacaaaagtatacataatgtggaagcaaacccttagaatgattaccagcgtggttcataaaaaaaattacctgtgaatttttgaattgttaaaatgctataacattttaatctaatcttcagaagtatgctctttaaaattttattcttttatttgttctttcaaacaacaaatacttaatgggtatctaatactccaggcactaatcaaggcacaagacacatcaggaaacaaagtattaatatacaaaatttctctactggatcttaaatttaggggaagatagactataaatgaatactaggttaggtggtgatcagtgctgtggagacaaataaagcatagtgtggggcaagagagtgacgagtatactattttagataggctgtcaggaaagatgtattcatcccacacaaacaactcacatactcagctcaggcttaatatatttttcattaggtaacatgttctctatgtaaaaactcagtaaaaaaaactaaggaggaacactgtatgaaaatgtataggaattagttttacccagtaaaaacaaagttgtaaaatttattagttttattaaagttacattgattgcttaaatttattctatatgttcagaaaaattgtataatgacaatattgtcttgcttattttgttggttttcatttttggcttaggctgtagtttccgaagtttgtttacttggcaattttttttgtttttttgagacagggtctcactctgtcacctaggctagagtgcagtggcaggatcttggctcactgcagcctctgcctccggtgttcaagtgattcctgtgcct

SEQ ID NO: 92904 - DNA, 1077 bp, Homo sapiens
gttaatcttttattggaatttgctattcattcatatcttttctagggtataaaagtcatttagaaaaaataattactatgaactggtctaaagtctatattttcacattaaaaagcacttagaatagttttaacttttaaatagatagcaatatgtgaatttaaaaataaatatacaccaatttgtcatgaagcattgtttactaaactgttttaagactttttaaatagttttcattcttctaaccttgaaagtttttaaaattcttatatttaactttatgaaattatttgaatgttttaaaaagaatacttgaatcatattaaaataataaggacgagtaacattttgaaattctgtacatcagaaaaattttcacatcgtcttaaaaaatttattttcttctattcttttagaataattctgtagctcgtgcagtaatgcagtcccaaaagccacccaaaaattgtagagaagcttttactgctgatggtgatcaagtttttgcaggacgttattattcatctgaaaatacaagacctaagttcctaagcagagatgtggattctgaaataaggttagagtcaagtttagctttactgtatcattcccactgcttccttgggggttcattttctttcatattactcttttagtggttgtttcagtgaggacgtgagtaatctatctcagtgcttggtcttaaaacatcacttagctagtcatagaattcgaggttgacagttatcttgcatcatcactttaacaacgtcattcaggactgataatccagaacgtattccctcaactggatcatttgtacactatttgttacttgtcctcaaggagataggagcttgactcaatgtaaatcagctacatcactgtgctcactgtttagttttgcctatttgtctcagagaggatacagcagactggtttacattctggctcaagctccttataatgtccctgattggtactttgaggtgcacagttctagaaagaagatcaactgacatgattagaacacatgcctaggaaaatacagctactagaatagacaaattgagaagt

SEQ ID NO: 92905 - DNA, 1082 bp, Homo sapiens
aaaaatgtaagctccatgaacagggtgtagtctgttttgtatactgctccctttatcctctggaacagcacctggcacagagtaggtgctcactaaatatgtgttgaattaatggatgaataggtataaaacatgtatgcaaagatactttgttttggaattctaggactaggaaagcactaagaatgctaccaccatcttttcctcctcagccattcattgctcctgtacctcctattcttagtatgttcatttttcagtgctattgatagctcacatgtttacattttagttgaaagattgtctctttcatgagcccaaattacaattcataagaatatcttttctttcatatttcctctgtgttggtaataaactttacttcagtttttcttttctcatatcagggaaaagattgtttagctatttataatgaattttaaataattgacttatgtatgataactgtatgagatttaaggaaattgtaattattaattatagtaggcagcagggcatattgattaagaatctggactctagagctgagctgcctgggttaaatcctagcccagttacataagtagcttcatgacgttggggaacatactcaactctctgaagcatccttatctgaaaaaaatgtggagagaataatactatttatcttatgtggttgttatgaggattgaatgagctaatatttgtaacatgcttataacagtgcctagcacatagtattatataaatgctaaataaataaacctatacagctatgttttcaaatgttaccagatatttgatattgtcttgttatttataatttcccccattacaaatatatatggaaatatatatactcttatatatatatacacaattttcatatgtatatatttataattaaaatttgctaagttaatccttctgtatttttgtctcctagagctgcttatcatccagactttccaacagttctgacagctttagaaatagataatgcggttgtggcaaatagcctaattgacatgagaggcatagagacagtgctactaatcaaagtaagacctccagatctttgc

SEQ ID NO: 92906 - DNA, 1237 bp, Homo sapiens
ctgtgcttctaatcacttagccacgaaacacatgtgacaaaggatccagtgtatgtgtcataatgccagttttcttggaagtaggtgagtttatgtgctgagaacaagggcctcaggagttgctaggaggtaccttctttaagggtttagattggctaccaaggagaatgagagaggaagctgactcgaagtctgcttaagatacaaaagcctagtggctgcaggatttttcactaataatgtttctttagagatgtgagtggagggagagtctgtactgttagataaacattagagttttttagagtgggtaggtactgcagaaagggaaaagggaagcagttgagtgttttgttgacaaactagtttaaagaaagagaggcctacgagaaagtgtttagacccacctcagtgaagttagagaatatgcttaaatgcatgataagtctggaaggataggaggttgtggtaagagtgagaaattcaagttgaatggaacaggtctaggggatgacaaagtccatgttttggcttcaggagcaggtagctgaaacacaagttgttggagttgtggaagaaactagattctaatccttttgggtgttgacaggatattgacaagagtcttgagtatgtctaacattctgttaactttacctgccttgtaaacattttgaaggggtgatttttttctgtgtttgaagaaatttttcggtatgaattatggttcaaatgctaaatttaaaaactggctatattattttaatgtggaaaataatagtaaaatattattagggtattataatgcatcagatacataggactcatttcagtcatttaggcttacgctagataaccttaacagaggtacctaggaagatgcctagctcgtaaggagtattcagaaaatgtgctttcctttcctgtaaagatggtcttgtttcttcttttcagaaggacatagaagctactaaactactactcctgctattatgcctgcatttgtacatcttgcccccatctcaagagagattctttctgtctgaggctagtctacttgtgccttgaatcacatactttcttgcctgactctattaaccatttaaaaaaattatttcagccctctcctgagccttaaactttcctgttaaattttctctctgttttaaacatgataggtctctgatttgcgtttcttttaaaaatacacctctcctaggggagactgcattcactc

SEQ ID NO: 92907 - DNA, 1046 bp, Homo sapiens
ttttgttagtaaagtattgcatttaagtattgtagtaatatctcttttaaatgatacatacctttataccaggatccatttcaaaggatgaggcttttttttttcgcatcccattaaggactttgaaaatcgtttgattttcagaaccccattggaaggctagaatagtataaactgaacatagaaaagccaccgttgatttacattagagtgggacaatttttttcacaggatttggtggattttctctccattgtatcctatgggtataggggatttcccattcagttaaaatattatttaaactgctttatataaaagtatgttaaatcatttataaactatgattaaatgatctgtaaagtcatttaaactgctttatataaaaatataagtcatttatatgctataattaaagaggaggatgttaatatttcaaaataagtatttatgagcccttctgtaattttctctcacttttaggagcttgcattcatcttcgggacccagaacttgctttggctattgaatcttgcttaaaagggcttctgcaggcctattgttgccataatcatgctgatgaaagggtccttcaggcactcatgaaaaggttttatttaccagggacctcacggccaccgataatagtttctgagtttcggaatgagatatatgatgtaagacacaggtaaggcattagtaattgaatatgtttctggctttgcttaatcatatgcaagattggaaagagttaaaacacttttaatgttaatcatatctttaccactgatttgtaaaatttcatcaagccactttaatttctgtctaggtattagttctgggcattagagaaacatagataaatactccctaccattgaagttcttatatgtgggagacattacagggaaacagatgtagtatggcttagaaattacaccagtgaggaaaatgatatgaccaatttaagagggaggggcctgaggaagaacattggcacccattacacacagttaaattctgaaggtgtttcacagaatccgtga

SEQ ID NO: 92908 - DNA, 2187 bp, Homo sapiens
tagagacaggatttcaccacaatatccaggctggtcttgaactcttggcctcaagtgatttacctgcctcagcctcccaaagtgctgggattacatgtgtgaacctctgcacccagcctcttctatttttttaattattatttttctgagacagagtctcaccctgtcacccaggctggagtgcagtggcgcaatctcagctcactgcaacctctgcctcctgggtttaagcgattttcctgcctcagtctcctgagtacctgggactataggggcgtgccaccacgcccagctaatttttcgtatttttagtagagacggggtttcaccatgttagccagggtggtctagatctcctgacctcgtgatccgcccaccttggcctcccaaagtgctgggattacaggcgtgagccacagcacctggccttctattttttaaagtagagattttgtacctgagttgaaattagtgatgctttgagattttaaaaaatgtaatggtttcaaatggccattttgtgcttcatttaaaaaatatattcctgtatatattcagcctctgaagatttgacaaaagtggacgtgaatgggatatttgtgttttcatttttgtaaagtgtgtctaatttttttggttaggttttatataaccgatccttaaacgaatataaagcattaaagaaagatgatgagcagctttgtaaacgaattgaagagctgaaaaaaaggtagggtagttactttgaaattttcatggctatcccattttgtaataaagtaaggtagatgcattggagtattatattttatgtattgttgttaatggaattttattacatcggtttgtgttctttaaatgttaggctgttcattgaactaacatttttcactttgggttatttactgttagtactgaccaatctttggaacctgaacggttggaaagacaaaaaaaaatatcttggttaaaagagagagtaaaggcctttcaaaatcaagaaaattcagtcaatcaagagatcgaacagtttcagcaagccatagaaaaggacaaagaagaacatggcaaaattaagtaagttgcaacatccttagaatgatttttttcaattacttttacatcatatagttttgttcttgtatgaagagagcaaatatggttgtttcttctacataataagggatctttttaaaaagattttatttttatgttaaatactttgcagagcagggctaactcattggcagtgcacctacagccagctggatcttttaaaatcacttttcaagacttttcttatagttgtagagttgaacaatttctgggattcctagcccatcattgttgcattactttttttatgccaagttttgaggactccagactgtttttctctggtaacacaattattttcaaataaataattctgcttttggtttttagggtagctagctgggtcgttcactgggatgtaggtgttatgggcaaaggttaaatgtttctgtaaaactatcacatatatgttctgtttttctgcttttgttttttaggagagaagaattagatgtgaagcatgcactgagctacaatcagaggcaactgaaagaattgaaagatagtaaaactgatcgactcaaaagatttggccctaatgttccagctcttcttgaagccatagatgatgcttatagacaaggacattttacctataaacctgtaggccctttaggtatttgtcttaatttagcgaggttataataaactttagaaataagtttttattttcagaacgattgaatgaagttttcgaaataaaatgatttcatttaaaataatgaaattatataaagctttgtagctttcgttttatatttttaaagcataaaatatccgaaagaaagagaactttggaaaaggaaaagtaatcatagagttgaatgatttgattcttgtttttctgaataaatgaatgaataagtaaatgaactaatgtaatataattgattattcagaaaaaaccagtaacatcaagatatagttgaaggagcagttaactgaattttggtaatctttttaaaatgacttttctttcttagtttctattttggttgggcagcatgatttctaagttctcttccaactgtaaaatctgtggttacttcactcttacatatacatggtact

SEQ ID NO: 92909 - DNA, 1285 bp, Homo sapiens
attgtgccactgcactccagcctggtaacagagtgagactctgtctcaaaaaaaaaaaaaaagtgaacttagttaagaaaattataacttgtttgattttcagaaataaatttcttctcatccttacattctctttggaatgcctattgactctgctttgaggaacagaccatcatgtctatcagatagggaataaagagggaaaatgggaaagtgagttttgggatttctctatatttgtgtagtcttgaacctttaattcctttgctcttcatctgaagagtatttggccatttttatagtgcagaaattcacaaaattattggacttactaaaagtataccaaagaatcaagaataattttaaaaaatagaagttatttttaaacgaatatttatgtagtacttgtttaggcattgtttttaaaagaaatagatttgcaaaaatgtgttttttcaacattaataaaaaatacgtccgttctgttttctttttttaagcggcttactgaactaaagcgccagtgtgtagagaaagaggaacgttttcaaagtattgctggtttaagtacaatgaagactaatttagagtccttgaaacatgaaatggcttgggcagtggtaattatcacttaattacttgttcacgtatctatgtgatatgcagaatgtatttggttattattgttaatctgatcaatttgctatataatttctttcttaggtcaatgaaattgaaaaacaattgaatgccatcagagataatatcaaaattggagaagatcgtgctgctagacttgacaggaaaatggaagaacagcaggtaattacagtttttaaatgcagatttaataggttgaatcatatgaaattacagatattagactatttatgacccaccaaaccatcagtttcagacagtatatttgtctatatttgaattgattgcttaggtgaaatagacctaagcttgttttcaaggcctgttgtggtgactctcttttgaaaagagtactctatccttgataaacctgtcagaggctagggctctagaactcatgcatattgtcagtggaactttgttactgacaagacatagaagaagagcatgaagcttttactctttggttcattaaggagttgaaacacaaaaagacctgagaaataaaggggtgctagaataatataaattagaaccacattaaaggtaagtatcagaaagtatgagaactcagaactgaaaacaatgcccagagattgctaagggaactgagatttatggtcca

SEQ ID NO: 92910 - DNA, 1061 bp, Homo sapiens
ctgtgctgtaaatcttaaactattaaaaattttaaaaactaacaaaatacttgactatactgctaaatattctgtgtagccttttgagtgagttttggtatttcttactctaaaaatttaagatgtactaagaccaacgatgccagtcttttcagctgtttttgcttaaagaatggaattagtgaaaatgagcttattaccacaccctgaagtgttttctttcatggggttttaagagcttttgcaaatgaacatgtggatgtgagcatagtaggttcagtcaatttgaatctgaaatatgatgtattcttttgtgtttgtgtgattgcttacgtttttaatgtctttttacatcattgatctaaaagttttcagaaactaaatttttctttttctttttaacagttctatggaagtttacaaactcctaattgcgtttttttttgttattgataatagttcttcatgaaagcaacgcaacttgaacagatgaaggaagattattcatacattatggaaacgaaagaaagaacaaaggagcagatacatcaaggagaagaggtttgtaaacagttaatgtaaatctttttgagatcagccaaattcttatagtacttacagtaaatgatattgtaaaactatgtgtctgtatatttatataaaactagtaatatttttatagcactctgaagtatatgcaatgtagtgtttatattccgggtattaattagctattacttttttattttgtaataatgactgtgtacatgtcttactttctctattagattataagatagagaacagggcagtatcttacatacttatcctctgatagtatgactaatgggttccacaataaggtatggtagtttaagtagtttaaaacctataagtagtttaaaaactgcaatatttcttctgctgggataataagcacaagcttcaagctgtttttaaacatagtatgcatttataattatataccgtaatctacaaatcatagtaattataactctagtaaaatgttaacattccttaagcaactggtaggttagtag

SEQ ID NO: 92911 - DNA, 1109 bp, Homo sapiens
aaattaccttttttaattctaatcccctttgaaaatgttaactactttaccataattcttacttcatcattctttaaaggcctactgtcaagcatgatgctttatataacttacagtagtcaggcagtataattttgattacatgatttttataggaaaatgtataacttatctacatgtcttgaaacaaccgaaacttaatggtttttgtgcagatgtgctatttctatgatggatagaatagtcagtcaattatttttttgaagcttcacttattctcaactttatttttttgttaggcacagtatcgttaacgttatgctgtagtgaacaatcagtgtcagctgttgatgtaaatctaatttgcaaatgaattggccaaattatttggtggttttgaaaaatttgaaaactgtggcaacctagtattgtaattacactgtatcttcatgtaacttagctcaacctcattctttcagctctgcagatatctcaataacattgaggaacagaggagatgatgcctttaaagccagtgtgtatggtaactctatacttatacagcaacacatcagcatagatggaagtcgatcttataaacttaaaagtgcaacaggtttgttttgattctcttttcatttcttataaaatattaggaaatactcaaaaagaattagatgactgctggtattgattgaactatcttccttgtaacatgattggttgtgtgcatatatatatacacacacacacacacacgtgcatatgttacacatggttgttttaccccaggatattatagcaccaaaagcatgattagcagaattggggattatttgaaacaagttgtgctattttgttttcacctacagacttcctatcacaccagggtttttatagcatgtggaaataaatggttagcaaaaggtgcaaaatgacataaaagaagaggtgagcatttagtttttaaaaagagatagataaggagcaaaatatgtttagctgtgggaacaagataagcaccattattgcatgtgggtactttttcttcctctgtacttgtgccatgttcattcatatttgtacgtattcaatggtacctttcttga

SEQ ID NO: 92912 - DNA, 1226 bp, Homo sapiens
tcttgagggaccagactgagaccctgtaagaactgagtcacttctctctctggggctttcttttaattgcatctctggctgtctctgtgtgtcttgtctctggacctctgtcttcctctccctcccattggtttgttctgcaactctcctctgtgcacctccctcacaatcctaacttaattggctgtacttctgtgtgtgtgcactatgctctcctgtctctccttgtgaaaagtgtacaggtaagtgagtgtgtttctctccatcactgtctcaagtatgtgtacttccttattttttgctaatctttgttgctgtgtgtctttgcatgtgcaggcatttataagtcttactgtcctagtctgtaggtgtatgtgtataaggaagtgatcttatgttttctgtccctctggttcactgccagtatctgtgagtatgttatgtctttttattagcctgcctaagtggtttccaaagagcttatctgttctattcagacttttctattttcttatcagactataatgccccaaattggtttctctaggtctagaggctccataactttgtagctcccaggattcaccatctctcgacttcatcatgtcttaatttgattttttaaaacctttttattttgaaataattgtagatttacagaaatgttgcaaagatagtacaattttctgtatatccttcacccaattttccttaatgtagatatcttacgtaactaagatgcatttatcaaagctatacaattaccattggtacaatatcaactaaactacagaattctgaaatttttttaaccacattttcttagtttgattttttaaagaagaaaatctgattgcttagttggtaaaaaatttctatatttagctcaatcccaagaggatgggatggaaaattatatcgttgctaagccctttctgctagggcacttgtacagaaaaggatggtggagcaacagagcaaacacttcactgtgtctactgtcttagcagtaattcacaatgaagctcatctggagtatttcttcctgcatttcccacaaatgggaacagttttagagtatgattacaaattcacaaaagcaagtttgttctgttaaaggtttcatttaattaccaattaaaacacttttatattaagggactttagcattttgacagatgctcatatgaaccaggtaaaatatctgcttttatgtgtaagaaaat

SEQ ID NO: 92913 - DNA, 1106 bp, Homo sapiens
aaaattagccgggcatagtgatgtgtgcctgtaatcccggctactgaggaggctgaggcaggaggatagcttgagcccaggagtccgaggttacagtgagcaatgattgtgccaatagaatgtcataaaaattagatgaattaataatatatgtgtaaatagagggatgattcatttattaggttgataggccaaggtggtacaatgaaaaggttggaaaggtgtcacaacaatttttaccattttctttttagtggcaacaatttgattcctgaaatgtactattttttttgctaataatggcagttcaatttttccttacatatataactttttttttaagttgttgctttgcacgggaagaaaattagagttgaattttaacattttattttaaagtgagtctcattcataaatctttttgcattacatggtaggagtcagctttttcctttttcttttaatgaatgtgatttcttcaacatctgtttctttaggtgggaagagtgcagtactcacagctctcatagtcggtcttggtggaagagcagttgctactaatagaggatcctctttaaaaggttttgtgaaagatggacagaagtaagtgtttgctttctaccatctattttcaattctttagtaagaaaacagttactttagattcccagttcacatagacatgactggaaatgaagtgccttcccagaacaggagcagaggtgtcctattttttcattcctttcttttaccccttgttgctggcatggctcactgttgcctgttaccctctcaagacagatagcttgtgtaacctattgccctgtgcctggccatcttgcttctgttacttgctgaaagaaatggctgtgataaatctatgtaccctgtttaacaagtgtttataaaccttgctaattcctgactattgacccaaacccagcatcagtgagtccacattgatacgatagtagggagagcaaaatcagtgaccagccaaagtgtccctgcacaaaacttctgtctttagctctctaagaagtcccaaaataagaattctactttttgactctgattttataccctttaaccaagtaggttgccag

SEQ ID NO: 92914 - DNA, 1149 bp, Homo sapiens
taagaacatgtactctgctctctgaattgaaatagtgaatgtcagatagtgaattcagtgttgaatgcatggctggatcgtcatctttcagaggtattctaaataaagtatataggaagttttactatgccaattggatagcagttctcaacaaaggggattcttctctctcccttttgcgccccccagggacatttagcaatgtctggacatatttttggttgtcacaacttaggggcaggtgtgtgttgccggcatctagtgggtagaggctggggatgccactaaacattctgcaatgcacaagacaaaccccctccactaacaaaaaattatcagacccaaagtgtcattgccaatattaagaaacctggtgatatacttttaaatcctttaaagattttagaatgagtactgactcatagaaggttcccatttaatttcatcttattcattgaagttaccattattcactttctgtaaattttttcattggtgatggtgctagtctttctgatgccaacaatgcttgaatggttataatgagtgaattagattgaccattttctcccattgttttttattaatagactgcagcagaagttggaataattgagagtattcacctaaaaaacttcatgtgtcattcaatgcttggaccttttaagtttggttctaatgtcaactttgttgttggcaacaatggaagtaagtgttttttcccttctcgtttgactttgagcagtactttgagattagagtacgttaactttttgaaataggtgactattagtgctaataagtattttttctatagatgtataacttgtggttatgaatattcttggtatttgctgccagtgtacacttaaagaaaatactgagttaactctaggtacattacttaagcaatagggataaacatttcctgcttatgtttttaatctatttatcttggaatctgtaccatagaagggtagacaagcgatcctcattgcaattgaggcagccttgtgtcttgccttactaaacattgtaagagcacaaatgaagtgacttggcaatccaaacataaaagtagttctcaccaggtggccaataaatgctttaagaggaggtggtatttgtgccagttcttgaatgaaaatt

SEQ ID NO: 92915 - DNA, 1106 bp, Homo sapiens
aatttcaggagtcaccatgccatctctatgaatagatttagaaaactagaaaccacaatttcacaaaatcttttaccttttgtgagtttagtagtcacaacatttaggtaggcttatactgataaaatcttggctatgaatacctctgaagtaaaatcaactagtatagaatatgcagatgttaaagcaatacaaacttactatcttacgcttctgtggattagaagtccaacacagatctcactgggctaaaatccagatgtcagtagggctatgttctgttttagggcctctaggggaaaatctatttccttgccttttccagcattttttgactcatgtccctcttccttagtgcaagatgcaagactaatttactttaatttttaaggtaaaaatggatggacatagtacctaaagtttaattagccttgttagatttattttgttgagtttaatatatatggaacttgatttacctcattgttactataaatatttgttcagacctgatggccaaaagaaaggaagaaaatttttcctctcctaaaaatgccaaaaggccaagacaagaagaattggaggattttgataaagatggtgacgaagacgaatgtaaaggtactactttggtaagcgaaaaattacaaaattatgctttttgatatgtttttcttgtaacattcatcatatcacattctgtgataacttaaaatcaagaaaaagtaatatgattttttaaaagttgaggtaaaatctgttctgggtaattttgaagcttatgttaattattagaaaaattaatagagaaaataaagaactgaatgtatagaaatgtgaataaaattgacaaacttttagtaagaccaagaaatgcaaaaagagaaaagacacaaattaccaatatcgggaataaaataagggctatccacagaccctgcagacatccaaagggtaaggaaatacagttagcaactctacacacataaatttgacaacttaggtgaagtggaccaatcctcaaaaaggaaaaattaccacaagtcacccagtacgaaatagatcatctgaatagccctataactactaaggagatttaattcata

SEQ ID NO: 92916 - DNA, 1024 bp, Homo sapiens
ttttataaagcacacccaaagttttgattgactttaatagtaacattagagaatcttttttttttttttttttttttttgagacagctgttcactcttgttgtccaggctggagggcagtgacatgatttcggctcactgcaacctctgcctctcaggttcaagtgattctcctgcctcaacctcctgagtagctgggattacaggcatgcgccaccaagcccagctaatttttttttgtatttttagtagagatggggtttcaccatgttggccaggctggtctcgaactcctgacctcaggtgatccgcctgccttggccttccaaagtactgagattgcaggcatgagccacccgcccagccaataatagaatcttttttttaagtttaatgaaggatagacgagatgaaggacagattaatagccaatttcactctctatgaataattaactgtcaaacttcagtttatgccagtaggaacctgggcgttaaagaggtttaactgggttttgacaaacctggatttggatctgagctctgctatgttagagctatagaagcctttgtatgttagaactaagttgtagctacataaattcaagtcatttacttgtgcctcagtctctccttttgtaaaaataagggcaatatttatctcataaagatgttggggatcaaaggaaatagaaagtgttcatctcaaaagctaagtatgtagttattcagcagatgttaattctactcacccatttgtactcaccaattctactaattcagtcttttaaatctcttgttttatctcttccctttgtccctgatattaccactgcttttgtttagcaactcatctcttctgctactattcttactttctgtttcatctatcttctatattgagccacaggatgttttcagtacagaaatctaagtgttcagattttattaactgaaatgctgtgctttatacttcccggttttgctgatcctgaaattttagatgggtggacttaatgaataagt

SEQ ID NO: 92917 - DNA, 1009 bp, Homo sapiens
caaccgccaggcccaggagcaccaggaagcgtttcgaatccagcgccgggcccgcgcggccccgcctcttccgggaagtgactgacccctttcccccaatggggcccgctcggctttcccttgccggctcccagccggcctagcggacgcatgcgtagaccagctgccgggggcgctcaattatctttcccttttacttaggcaaatcactcacctcccccgagtccggtcactgcggagccgcccgtgcctaccagcttcccccacccgctaaggggcacttccggcctctcagactccggcggcgcgaaaccccgcaactgcgcaggcgcgggcggagcccgaagggagggagggcggggcgcaggcgcggttagtaccgcggtgggcgccggggctcccgggaatctaccttctcctgcggccggcacgcggttcccagggggccagcggcggtcagccgaggtcgagacgcccgcagggtggccttagcggccggtcgtaccacggcagccccgccgatcaggttcctttgggagacttcgacttgttggcggtagggtgaaggcgcgcgctgtcgctttcccttgctccggggttcatcctccgcccgctgcccccttggctggcgacccccagccacccgggagaggcagggtcagctgagctgcggcggtgttcatggtcgtccttgcgggcccgggcgggagatgtccgttcctcgggcgggtcgggcggccggcggcaccttcgcgcgctctccgaggcggcaccggtctcctgagccgcgggaaacctggcgtctgctccgggccgtcccctcccaggcggccgtcccctcccaggcggccgtccccagactctcccgggctgtggcgaataactgtaaagcggggagaggtctggggaaagctggggtagggagtggctcttagcatgagtctgatgatatctcgcaggcggcaactggtgtgtttaaagggtgtatgcaaagatcactgaaatcgga

SEQ ID NO: 92918 - DNA, 1296 bp, Homo sapiens
gctcaaagccatcccgggagagccctccctggtccccataggcacagttgggtgttcccttttccgtgttaaccttgtatttcggatatagttctgttatagtaattactttaaggtattgtagttatttacaatcagtctttcccccacggtaacctagagtgtaaaccccctaaataaacgtcagaagtaatgaagtcttaacttccttggcttaggtttcagcgcccttctcaaccccacactcccgcttcagtctttacacaacccttcccatgaatatgctgacctaacaagtaacctacttttcatactccaaaatcttctcttctgtgtggggaaaataatgcattgactgccacctcactccacctccaaataaattgatgttgaaattctggcctccggtaatggaattctttacatcaaagtcactttttatttctaaaagtaatcacatatatattatattcctactgtggcccttgccatggatcaacgaaaaatatgacatagtcaaaatagaccaaaacatctggccttgttgtaaccaatgggaaacacggttgggaggtccctacttacatgtcacttgcttcaggaaccgttccttgattcctaagtgggggaccttttttcctaaatacaactatagcttgctttcttacctcttaagccctttttatctgcagtctcacttaccctactaaggtctttaaatgcagggcttgatcttccattattgtatctccagcacctataaagctttcctgttaaatagtagacatttaataagtatttattgataaacgtgaagtatgcctcaacgtttaggctaaattcatatgaaaataaaattgaaaaaataattttaaagaacagcattagttactgagattatgtggtaaatcccttaaaatataatcttgcattgaaatagttttcaccatttaccagtctttatatgaatatatactcatctaaatggaaattgggaaatttaagcattttctgcttttccgaagtaaattttctaatgtttttcttaaagctgaactaaattgcaaaacttgctttaataaagtgtgtatttttgcatcagttaagcccctgacctctttatgttctttaaatttgattcattagtgaaattaacaaggttctgtgtttttctcacctcattcagttttataattaaccaataaaagcttattagcttttaaggaagttttaggaacttaaattgatttatgggcaccatatggttacatcaaaggacttgtttttgttttaact

SEQ ID NO: 92919 - DNA, 1041 bp, Homo sapiens
gatagagaattagtcccattctctaagtatgtaaatcaaggagtgaattttcaagtagacaaaaatgatttacagcatccttgcattcgctaccgatctctgcttttgttagctcttgtttttagctgggaaaaagccaattaccgccattttaacgtttcaggtgttcttaattcattttgaaacgctgactgatgaaaaaaataaggaatatcctctatgaattatcctgaactggcttataatatattgtttgaattcctgttatgagcttctgtttctttaacaatattttgtaaagtgtgtttcacataacagcagataatcaccagaatgggagtgaatgacttgtggcaaattttggagcctgttaagcaacacatccccttgcgtaatcttggtgggaaaaccattgcagttgatctgagtctctgggtgtgtgaggcacagacagtcaaaaaaatgatgggcagcgtcatgaagccccacctcaggtatagtaaaagctcttacagtataaatgtatgatgtataaacagtcttggtatcttgattttgtttcacctttttttttcttttgttgttgttattcttttacattttgaggttttaagatctatttaacatgtctagattcaccatctttatattaaggactcacattcgtacctcttaccctttgagctccagactcacatagctatctcctacttaacgtatccactaggatgcttcagatactaaaagccggagatttgggagacattttctccctattttacttctctccacatctaatccgtcagtaagtcttgccagttctacctccaaaatatactttgtgttcacaaacttatctcagtgtccagaggcaccacctcagtctatgccaacctcatctctcatctatactcctgaagtgccatcttcactagtttcttgctcttggcctcccctaccccagactattttccacatagcaattagaataatcataaatctttcttgcttaaaaatattcagtggtttggccgcgtgcag

SEQ ID NO: 92920 - DNA, 1065 bp, Homo sapiens
ggctgagatgggcggattatttgagctcaggagttcaagaccagcctgggcaacatggtgaaaccccatctctacaaaaaatacagaaaattagccgggcatggtggcacacacctgtagtcccagctgcttggggactgaggcaggaagatcacttgagccaggagattgaggctgcactgagacaagatcatgccactgcactccagcctgggtgacagagtgagactctgtcaaagaaaaagaaaattcagtggttttccactctaattaaagcttaagtaaaatgttattacattaacgtttttgatactagtctaatgttcttgcctttgtgttatactattttgacttttactatcagtgtttgatgattaatgtattactaatttatatatttcaggaacttattttttcgtatctcatatttaacacaaatggatgtaaaactggtatttgttatggaaggggaaccaccaaagctgaaagctgatgtcataagcaagaggaatcagtctcggtatgggtcttctggaaaatcgtggtctcagaaaacagggagatcacattttaaatcagtcttaagagaggtgagcattcagatttgattcagtaattccgatttgaattaaagggtgcattttactcttaatagtttgtcatctttaatacttattaattttattgtgactagcagggatgtgcctagagaaaagagtttattttttagagtgaaattgacctgagtttcattcttggcactggtatgtagaaactctgagacactgagcaaaatttgtaacctatctctaccttgtatgttaccttgtgaaatgacaacagtaatactcagcagggatgtgataaaaataagagaaagtatatctaaagcaactagtacatggtaggaacttgatcatattaccttttataacaccttcaggacttaaagaagtcccagaatacatgagatctcattaattcgtacttcactcattcagaattcatgatagttcatatacagaatatatatttggcttcccttagggcttgtaattttaaaaa

SEQ ID NO: 92921 - DNA, 2714 bp, Homo sapiens
gattaatttctgctaatgcagatgtcagagaagcagtgtcggtgcactcacaagaacattggatgttaggaggcttgtctttgtaatatttagtgtgcaacaacaaagatatttaatatgcatttgtcttttaatagtaatgttaaacatttcatctatttttagtctccctttgggtaatggctatcatcatgtcctttacctacttacctcttgaggttttaatttttcttttgtgcaagttctttatgtattaaggatataagcttctatcatatttgctttgaatttgtttttctttttaattttagttaaaaaattatgccatttttctcctcttctgaaattttattttctactcacttttaaaaatagttttcaattagtgaatattccaccctaatgactatcagcagttgaagaaaatatctgtgctaagttctaattacttcttgtataatcaattcctggaaatattcatggtcctcaatcttagagtgttaaagaaccagcataaaacaaaaaaagagatgtccatctcttcttaagaaaattgctccattcctgtttctttattgctgcagtaattatggtgttcttaggcattttgtgtcagttcagtattgcctgttagtcatttttatatttctgtactcttcagttactaggccctgcttcctcctaatccactgctatcttttaggtattcgcatgaaaagcacaaattagtagtcctccaataccacctccaccccacatggtagagacatagagtgggaaaaattgcaacagccttataggaaattctgtgctggttctttgaaaaaatttgaagtggcaaatagtacaagaagttgaaataactgtattatgaaaggctattttttacctaggggtaaggtcgaagcaacactgtcacaaaactgtctctctaaaatcacggggccagcgtcctgaaaagtgatatttttcaacatagtactttgactttttgaaccttgtctgccttgggcaacatctgacagtggtagttattatgtaatgtggcgtggaagtgattaatcaaagcaagaaatggtatttattctgtcagtctctagaaactacaagtaagtagccttttctccccaccatactcagtagtccctgatagagaatgatacatgacaaaaaagaatggcgtattacaagaaagaatgaactaggctataaggccagactacaagctacccagcggggttaaattcataaaccagaggaaagtcacagcaaattatttgtgcatcagcaaaatgatgtaatcattctgcacaaacatttgatttcctaggaggacactgacagctgacttctccgcagtttcccacaatacgagagtttcattgtacagggaaggcaagatgagaaaaaaatgcaaacattaaaattcaagccaaaactgtatgatagcatcttctttggaagtacgcgtattgggttgaccatcatgtgagaaaaattattgaagtcttctagatgtaaatcttaatatgattaattattatttaaagatattttcagaatctgactataatagcaatgaaatgtgaatatggattactttgtaattaacattaaaatcttaattttttattacagaaaatttaaatcaacacaaaagtaacccatcactaatcttaaaccattatcttggctcatcttgtttcatctattcccctatccacacatcattttgaagcaaatcgtagacataatattgtatcattccctgtatttcatgttttctaaaagatgattcctaaaaaataaaaagaaacataaccacaatataatttttattagcacacgtaaaagtttggcagttcattccttaaagccctcaaatattcagtcattgttcaaatttccaagtgtttcttaaatatcgtaatttttaaaacaccaaaatagctactattaatatttgtaatacagaaataggtttaatagtaaataaatgagcagtgaaaacattctttaacatcttgcacctgctttttgttttcagtgcctccatatgctcgaatgcttaggaatcccctgggttcaggctgctggggaagctgaagccatgtgtgcttatctcaatgctggtggtcatgtcgatggctgcctcaccaatgatggagatactttcctttatggggcccagactgtttacaggaatttcactatgaatacaaaggtgtttattttctttctctttttcagcatttgtttacgaactaccttttttaaagggctgattaaatgaaatagtagatataaaatgcttactgtaatgccttgcacgtagcaattgctaattaaaatgcttactgttattaaaaatcattgccacatagttcattctcttcaaaatgtggatttatctcataagaacttgacttgtttgtttcacatggtttgattctaaatcattttcaaaaatacatcacgaattgcatatgaaaatgtgttgctttgatcctgaatttccagtttagtgtttcatcctcagaaatacctccaaatatgcaaagagagagatataaagatgttcaatgtagcattgttaataattacaaaaatttggcaagcagcccgagtgctcattgatagggacatggttaaatccttcacacttactggttcccagttggagagatactgctgggagacattttggttgcaac

SEQ ID NO: 92922 - DNA, 1536 bp, Homo sapiens
tgccaaccaaactaaaccttctgccagacatttctgctatccctcccgaaatgctaatattagcacccccattgagaaacactgtttcagagtccatatgatgtaatacagtgcagtcattgaaaaggctattattgacataaaagatatccagacatattaatggtggaaaatttctcaaaatagtatttttatataatcctacttttacttaaaaaacgtaattaacaataaatattcatatatatgtatcaaaggagatggttttttggaagaatatgcaccaagctattaatgatagctcaggcagtgcagttacggggaatgtttactttctataatatatatatatatatatgttacagtgttttattttgtaagatggaaatctacattttttagacaccagaaagcaataaaatggaaaaaattggctagcatagttatttttaagccatttttgaaactacaactttattttcatatattgaaatgtcagattctataaagattctgctgatcaggataattttcttatataaagtttttggaataattaaactttttttctttttttgagacgtagtctcactgtgtcacccaatctgaaatgcagtggtgtgatctcagctcactgcaacctcctcctcctggcttcaagtaattcttgtgcctcagcctcccaagtaactgggactacaggcacatgccaccacgcctggctaatttttttgtatttttagtagagatggggtttcaccatgttggccaggctggtctcaaactcctgacctcaagtgatacacccaccttggcctctcagagtgctgggattacaggcatgagccaccatgcccagcctggaataattaaacatttaaagataacattgacaaattatttttgtaatgtggtttaatgtataaatatgtactttttgaggattaaactaaatctgttctttctttaggacccacatgttgactgttacacaatgtcatctatcaagagtaaactaggtttggatagagatgctctggttggattagcaatacttcttggctgtgattatctcccaaaggtaagctgaaattgtcatatttatttgctattcataaagtctttttcgtactttatgtgctgtataaatatgaatataatatggctatatgattaaaaatcgaatttaaaatataatttcaggcataataagctattcagtgactaaaataatcggcatttcagatggcactaaaaagctgacttgtgacacttaatattataagcaagaatagaataatgtagtaccacagcttgaatctcagtaaactgttactctagattaagagattcacatttatgtttgactatctttttaaataaatataggagttattcttttcttgtattatgccattgtttctttcactcttttttctgttttttagttttcagtattctttgtgcacatgctcaatgctattactgttgctaagtcacgtgatcattgggataagccattcatatttccatgcc

SEQ ID NO: 92923 - DNA, 1075 bp, Homo sapiens
gttctctgtttatgtctgggttttggaatattaaatgttcatgtaattaaatgaacttgctttttcctgattacaaacataaagttaggttaaattaaaatattatccaaataattaacatagtaaatgaaagccctctaaaattatgaccctcccttccctaaaataaacaccatcagtggtttggtatataactcgctgaaatttttgtttacatagataacagtgtaattgtcatttactttacaaatcctgatcatatacactattgtgaagtttttgttttatgcatagcagtgtatcttgcatatcttttcctatctttattgaagagttacctcattctttcagctgctgactcttccgttcaattaatatacttttaaccattcctagtgattaacattggaattattttttttcccactttctgaaagggagtccctggagttggaaaagagcaagcattaaaacttatacagattttgaaagggcaaagtttacttcagaggtaactaataattactttctcttgtgacattgaacctttattcttgctgaacttaataacgaatagtacaggaaacaattgttttccaaaaaagggttttgtatttttaaactgacctatattttgtttgatttaagataatttatttttatttattttgaaattttccaaaggaaggatgagaatacatgttccaagccgtattgcatttttttttctttttttggagacaaggtctcactgtgtcgcctaggctgcagtgcagtggcgcaatcactgctcactgcaatctcaacctgccggagtcaagtgatcctcctacttcagcctcctgagtaactgggacaacagatatgcaccactgtgcccagccaccatactacatttaaaatatacatattatttatattaaacatgttaatatattaatttttaatttttttttttgtagagatagggtctccctatgttgcccaggttggtcttgaactcctgggctcaagtgatccccctgccttggtttcccaaagtgttaggattacaggcatgagccacggtgcccag

SEQ ID NO: 92924 - DNA, 1069 bp, Homo sapiens
ccatgggcattttgccactagctattttaaacccttttaccaaaaggtaaagataaacatgacattaaaataattttgtatttaatactttgatattgtattttctttctataaatgaaatgtctgtggcgtgttgtaaatatttaataataagcaacattaattgaaatcttactcgactggcctttgctttatagctacatatttaataataacattaattcgtttagtctctatagttggaggattcagaacaagatgcagattatatagaagttaacaaactatgctatttactatctcaaaaacacatgaattatatttgctgatgaaagcaatgttttataaaaattaatattaatgatgataggtatagaatcaataagaaaggaactaggacactgggaaacttaaaacagtcttggcctccagcaggttcgagatggcaagtgcctgaaaaaaatgttaagaggtaaaaatgaaaaaggaatgaccataaaaaatacatcaaatcactgtattctttcctatgatacttctcttttagctgtaaaactgttgataaatgtaagacttcagtaaatccattattgacatcagttattactgtgcccaagcaagaaaggaaaggtataatttggcctgggtgtgagttaaggaatcatttgggaattgtaaaaaataatataaagaaggaaaagcaagtgaatataacacctggctaactccaaaccattcttattgaaacagtttcagcaaataagcactgttgacacttgaaaataataaaattacatttattttataattatctattattctgttttatatactgacttttcctctcagttatttttaatttttgccgtgctattctttatctggaagcaattaatgctaatttttaacaggcttgtacttggtctttgtagtaaatgaattagaaattccagaagctaaatagtaactcttaagtaccagatactgcacaatgacctgaagagataatttagcttttataaaaacttcaacttgtttaagtagaggaacataattcagaacacatacg

SEQ ID NO: 92925 - DNA, 1032 bp, Homo sapiens
actgaatgcagccaagcactgccttttggtaaaaatgtggacacagtaacactagtagggggcagtgtgagggtgggagatgtgttttcagaagaaggaaactctagattagcatcacacaagggatcctaacgtggcatttgagctactggaaaaaaattgtgcttgcttaaatataatgtggtaactaatattcatctaatcacctaccacatttttggagcacccactttgagcaaggttcttaggcttttctatgtacaacagccagctggaggcccagtgagtttaaaatttttccaggtcacccaactagaaaaagttaaagctgggactagaactcagatctcctaattcatgagtgaaaacaattctctgtatttatgtttccatacatcattcagttcttgactcaaatatcacctcagagagtcctaatctttttatctcctgacattataaatgttgagttcagggttttttttttcattgtttcccaaactagaatgcagacttgatgagggcagggactaagtcctttctgttcacagaattctagaacagtgtttgacacagtaactactagatgcatgaatgacaattctccacaacgccccacccatggagcctgtaccagcagtggctgcacttaaccttgcggaatctggccttagtacttcagcatggctcacaaggctgaggcagcctggccccaacttgtctcttcagcttcatgcattcatagtcatgaaccttggctctagccacctaagaccatttgttattccctgcacggatgtctctgcctgaaatgcttgctgcttccttattggctagataaacctcatctattaaggaccagctcacatgtcataactttataatcccaagcagaattatttgctctatacgtgtccccaaagaaattacccatacattcatcagagtatttatcacattcattcattcgttccacaaatattagctgatgcctgccgtgtaggaggcacaatattccttacttaaaaatgc

SEQ ID NO: 92926 - DNA, 1062 bp, Homo sapiens
accaccactccttcacacttgcctctcaccctgtattattttctttacaacttattagatttttttctttgtctcctatcactagagtaacataacaagagaataaactttgctttactctttgttgtattcccagagctttgaacagtgcctaatatgcagtatgcatttaatacatacttgttcaatgaataaatcaagttagcttttcaacccaaatctatgtaaagacaaagcccaggctttgaccacgaacatgctgcaattttttattgaattcttaagatggattcagtcctgggacaggcatactgccaagtacatgggaaaacatctgcttcctcccttcaagatgtttataagttagttgtgatgccagactcatttattcttgagataacaaatacagtaagtgctgagtgaagggaaatgtatcagagggcaccagaatgtagaagagagtggtcagtgaagatacaggtggtccttatagggcctcctagagctgagaaacttgataggagccttttgtggtggatgccagttagggggagggtaagactgtcaggtcttggatgagacttagagaatcagtgagtttatccaggaaagagtcatcaatgacatgtgttttagggcattccagagagggacatttgctagatacttttttctggaaaaaagcctcactctttacttacaagtatagttttatgagaaaacgcgggcaagagaagaggaaaggaggaaagagaaagcaaggcagtgaggtttcttctttctcactctggccatggttgtggtaggggcaagatggatcgagactggcacacagtgagtgccagataattattggcccacttactcttgaaggtctcctctgtgggactttcctggaattccacgctctctccagaaataaatggccaactgtgggacctaggaggctacctctttagggccagcagtaaggcaaagctgccatgcagcataatctgcccaagtgattggactgcacagacccttggccattggaagagactgcaccatcccagagtttcc

SEQ ID NO: 92927 - DNA, 1067 bp, Homo sapiens
ttgatgtctccccccggttttgtctggggagaccgagccgaaagcttcactcgggtggcccgcagcaggggcagaggacagcaaagagctacctccacctgccaaaatgacccaggggccctggtttggtgccaaggcgtgaagtggggggaggggcggtaggtgttccttacgttcctgccggagagtagctttgtggttggcccggagccttcgttcgggttttttgtctttcaccctaccctctgaaaatactggagcagatgagtacaaacagttcagaagcctttcctgtttctttccctgtatttactcaagcgatttgcgtaaccattcacttggaactgtgtaagtcactcctagttgccccccttcttagactatttgcaaatacctgcccaggtaaacaggaagcacgcacctatctcttagctgaaggcatatgccctcgtgctttgtcttccctgcatatctggagccgaagaggtggctttgattctctagctgaacttggtgtaatgtgcaggctccacttcttacctgggtggtgaccttcttgaggagattgactcgttcagtatgcatttccaaccagcccgccatgggccaggccccaggatgcactcggggacagacagcaaatggatgatataatttctgcacccagtctagtctgttctttctttctcaccagcttcccttcttctcttgttctaatattatgtttgtcgtttctgaactaggaattgtcaatattgggatccggagaaggtcatatgaaggtgccatagaactctgaatccaaagcatgttgtgaatatactaaggagacttgcgggatcagtattaattgaatcttttgtctgacccataattgcctgaatagagccattgatgaatgcagctacgctaaggttttgctggtcaagtgtatgagggcaaattgggaggtcagaagcagtctttgttctgttctgaaatattataatattaaaaatccaaagctctggagcttgagtttgccagcaaagcaccaactgagtatcatcatcttcttttaagaagga

SEQ ID NO: 92928 - DNA, 1059 bp, Homo sapiens
ccagcattatagagggcagtctgctttactcaaagtctaccaatttatatgccagtctcttccaaaataccctcacagaaacactgagaataatgtttgaccaaatgtctgggcaccctgtgacccagccaagttaacacataaaattagccatcacatcacatttaacagaatatactggcctaaacatcaataatgaccgtcacagataacctgatggggcattaaagaaggatagagtatccagtgatcaatttgtagttgtagggaatgagagtataaatagggccatagagcctgggcaacagagcgagactccatgtcaaaaaaacaaatacaaacaaacaaacagggccatagaacggaaagttattccaaaaatcagtcaagtcatttgctgcctctggactttaggaatgctggcttaaatcctgacaaataattagtgtatagagataaaagaatgccagcagactaaatttggggcttcaacatgcttatatattttttacttttattctgctatgcactggattggctttcctaagtcctgatggacatgccatggtgaaccgaaaagcatttcctatgatttacttgagataaaaatgtaactggccaaagagatgggagaacttcatggttgaatactgttgtttgtagatttggattgagtggagatgttgtagcaaaggcatttcattattcttgtctttgagttcagacaaaacacttcttggaagtattttttttgtgggtttttaagatctgagttttctaagtatggtaccttcgtgaggccactgatgtaagaccccagtcttcccttggtgctcagatgttacgaagatgagattcagccctgaggctcaggcttgagcttccatgacagagcttgtctcctctgggatgaaagggtaaaaagaaaggaaagtaccatgtatggcagtgttcatctgggtgtccccatccatccgtccgtccatccatccatccatccatccatccatccatcccattcttccaccacccatttaaatgtccatccatccatccatc

SEQ ID NO: 92929 - DNA, 1003 bp, Homo sapiens
aagtgcggtattagggtgggagtgacctgattttccaggtgccatctgtcaccccttaccttagctaggaaagggaattccctgaccctttgttcttcccaggtgaggcaatgccttgccctgcttcggctcacactcggtaggctgcacccactgtcctgcccccactgtctgacgagccccagtgagatgaacccggtacctcagttggaaatgcagaaatcactcgtcttctgcgttgctcatgctgggagctgtagaccggagctgttcctattcagccatcttggaactgccccacctcgggttattgacattttagataggctaactgaggatgttcttgttgagaagatatcatttgagtgaagacttgagggaagtgagagggcaagccatgcagaagaaagagcattccaggcagagggttcagccactgcagaggccctgaattaggatatggctcacttggcatgataagcattagcaaggagaccaggatgacagatgggaatgatagagggtgagaggagtaggaggtaagatcagacaaatgaagttaggggagggtggatggtgggcactttgactctgagtaggatggaagccactggagggttgaacataggagggacatgatgtgatgcacattttaacaggatctctagctaaaggattcttaatccttccttttgccatgaacccctttgggagtctgagaaaccctatggaccccttttcagaatagcgtgtttaaacacaaaagatgaaacctacaggatgtaaaggaatccagttatgttgaaatgcaattaccaaaatagtaaaagcaatttatgagttagcaatatatttgcttattaattctttaaataaaatctagcagtaggtctataactactgtgattccaaagtaataatgagtataaatgatattttgagatctcttcaataactctgataggatatgaagctattcatacttctattggtgtgaagtcat

SEQ ID NO: 92930 - DNA, 1056 bp, Homo sapiens
ttgtagatgcatttcattgaaagaagggcattatcagatataggtaactctttgactcatcactcctcttaatgtttctatggcttcggagatggatataactaaacagggtttatggccacttttaaatctggaggtttattacatgcatgtgtgttaccccctgctcattaaaaaaaaatcttttctccaaaatgcatttttgatattggaataagtatagttttgaggcacagcaatagaatttgggatcttgttttatcaaagattttctaattagtggtgaagtaactgaagactccttatgtaataatagtaacagtagtagtaatagtaacaagaacagcaataatcatatgataatacgctaactgtgtaattgcatttatttattacaacatcccttgaagcaaaagtttgatactattcccattttaagatgaggaaactaaggtttgcagggaaggtggcttgcggaagttcaagagtcagtagtggggttgggctctggacccaggaggctgactccagggcctgtgcttttcactggcccctgctctgccgtgttagggagtggatttaaggaaacatcagaacacagtgcatctgaagggacaaagagccacaaacactgtcagactttgactttttaaggatgtgagctgaaaggggaaaatgctggcttatgtatcttccctttcctaatccagacatcagatacacttatttacagagacagttttctagaatgcccctcgaagctggaataggctctgagggtctgtccctgaggacactgcatggcagacacagcagaaactgtggctctgtaagagcctagaaatgccttcactggtgagaccaagtagagtaaggggagctttgacagttggacctgtgtaggaactgagtttctgcctgtgtctcatattaattgctggagagcggcttgctgtgtggcatgagtggtggtggtggcttccctctgggcttggccggctgcaaacccttcccccagccccttctcagcccggtccctgccatactcttcagtta

SEQ ID NO: 92931 - DNA, 1046 bp, Homo sapiens
aacccatgaaagcacaggaaatggctttgtgtagtaggtgtttgagtctaggcattctgttgacagaagtgggttctacccaggggttttgtgttaatgtaatcaaacacttcagagctgcagcctaacaagatcaagtccacccacctcagagtttatctttagctcatctggaagagtttattttaaacattgaacattgtttgctgctgttgaaatgaaagtgagagagttacaagctttcttccactgccatctggcaggtttactgatggatcgggttctttaatccatgtaaccctgtgtgtgggagctattgtctttgtgttgatcatgcagctggcttggctgaactttaaaaagcttacataaagctatcaaaagccatcctatagataaatgaagttgaggatgttgcaaaagtcactgaggcctttttggagaaggcttggatatatatttttcattcttcactgaacacatattttgcatgttctctttatgaactggaaaagaggaagataactgtatttggatattttgaaagaaataactgaagctaccaaaaaaaatgattattcttaattaagaaaagtattgtagcatagtagaaaggaaagaaacagcagattagggcgtccatatttcattaaagtaaatgtgggatgtaaaaagtcacatgtgtgtgctcttttctcggtggaggtttgtctggctttttcttcagcctacatatggcatagggatgttcaatgatacacttattacatacttaataattagctatagcatccttaggtatagtactacacagaatctcatgtagtatgctactaagtataataatttacaaccaactccagggcacagtttcaaccgtattctcaaatgcatacatacatctgcattaagagactgcatgcaaagagtagactatgtgtaagatagggtatcttgcaaaaatttttatattacatttgtaggaacataagacaaatggaacatgaaatatcttggatatggtcaattggtattcagttttcttt

SEQ ID NO: 92932 - DNA, 1046 bp, Homo sapiens; identical to SEQ ID NO: 92931

SEQ ID NO: 92933 - DNA, 1050 bp, Homo sapiens
cttggagactcattttcactttttcacaaaatcctattgtttcagtgagacaaatgacaaaagcagtaatacaaaagcaataatctgtccaaagaaacacagagaaaagaacatattattttatactgttttgcttatattgttttgctttttttttaacaaaaggaaacatggtattatcttgcagtttatgactaacatagtataatactcatttgctttttatgaagtgccacagaaatttctaacataaattgaagaaaatgtggatgttttgacaccaaaattttgtgtgtgtgtgtgtatttctgagctggcacagccatgtgcagcatttggtggtggttcttttcataggatgagctgttagccagcttcacagaaccttggatatcatgtagcctagttcctcctcttggtgctcccatctctcaacactgtttgctttcagttcgttcatgcaagttcaatgaaatcaccttaacttagattcttcttttgcatgttcatgatatcataataattattttaaaaaaccccaattgccctgtttttcttagctcttcacctgaaagactatgaagacatcatccctcctgtggagatctactctctgctagcactctgcgcatgcgccagcagagcctttgggacttgttcaaaagctttcattaaacttaaatctttagagaccctcagttcagaacagaaacagcagtatgaagaccttgctttagaaatcttcaccaaacatacttcaaaagataacagaaaacctgaattggacagccttatggaagggtaggctaattttaattagtggatgccattctatcttattagaagcttggatttctagatgtacaatgtttaatgtaggaattaaagcactgaattttgaagcaattcacattaacattataccctattttatttatttttacaagtgtattcatgctttattttgtcattgtaagaaaggttttttcttgaaataacttttttaaatgaaagtatttgatgttcatctcagaagttttattctttagg

SEQ ID NO: 92934 - DNA, 1058 bp, Homo sapiens
ctgtccaactagtcccaatgagatgaacctggtacctcagttggaaatgcggaaatcacccaccttctgcgtcaatcttgctgggagctgcagaccagagctgttcctattcgtccatcttgccagccaaggccaactttttttttttttttttttttagatggagtctcgctctgttgccctggctagagtgcagtggcataatctcagctcactgcacgctccacgaggtcaacttttttagatctcacatatgagtgagaacatgtgatatttgtcagaaacatctattttagaaatcacttatgtatctgtgtttctaaagatttgtagttttcttcttgctggctctaaaggtttatttttcagtttattcctagttttgttgtcattaatgaggttgtaaattttttttctaattggttattagttatatataaaaattatttttatgtttattttataactgaccttcatttagttttaactaatatgtgacataaattatacactgtttaaaatagctgtatcatattcaatttatacaccatttctagacttaaaagaacaattagatctttaacttgagatgcttcacctactaggtgaagatctctatatgcctcattttttttttttttgtcagtggtaagacgatctgaaacaatgtatgacctgtaaattattacccttgaacctatcatgctttggatatgaaattagaggatattgtttattgtaactgagtgattacattttatatacattttttctactacactttgttgtaaatacttgaccccagaaccagtttataggattctgattgtaaaacacatgaatatattgtttaaactggttttatgaagtttttgatatactataacaaagtatttttaagattccaaggtctagagaagaaaaagatacaaattggttataaatctaatattaaatcttaatattaaatctaatattaagtctgctttttttattatactttaagttctggggtacatgtacagaacgtgcaggcttgttacataggtatacatgtg

SEQ ID NO: 92935 - DNA, 1035 bp, Homo sapiens
acctttacgtgtcaagaagctctatgtactgtcagccttacttatagagcaataccatgaacagatgaagaatgcccagcgaggaaaagttaaaggaaaaagttcagaggtaaagtagcacgttaaataacattacatcattggaagtgtttaagaaaaaaaaaaaaagaaactattaaacttcttttatggataggtcatttaatttgcatgtctgcatttgtttccttaaatgatatgaagaaaaagaatgactgatttagaattagtattcaaattcagaaatttctacctagaaatattgaaattgtttttctgtaatactaatctgtagtctttgctttaatgtcttatttgttaaaaaattttacttacctgggaaatcttcctttctaatcagtgagttttaaaactttcctagatatattgttgtaatgcgtaaatgaatgtctgattaacttagaatctaattagttatattttaaaatttattcataccagtttaacaaactatgaattataataaaaaattaaatctgttttgggtgcagtgctcacaccagtgatctcagtgactagggaggcttaggtgggaggatcacttgagtccatgagtttgagactgcagtgagctatgaccacgcagctgcattccagcttgggtgacagagtaatacctcatctcttaaaaaaaaaagtctgtaatcatagttttgtaatgataaaatctgctcatttagatactttaatgactgttgttatttgggagttgacactgtgtgtgcgtttgtgctgacggaaagtgtgggctgactttactcgtaggccacttctgccttggctggtttgctggaagaagaagttctgtctacaacagatcgtttcacagataatgcatggagaggggcagaggcttaccacttctttatacttgcacagaggcagctctatgagggatgtgtggacactgcactgaagacaggtgggcatgtcacctaatgtgtatagtatgtctgaaaattataaattgagtat

SEQ ID NO: 92936 - DNA, 1039 bp, Homo sapiens
aaattaaactaaaagtacagcgttattatagaaactattgactattaatgtattcttttaatatttttcttattttttaaaaccccttttgctttataaaaataatttttaaatgtcaaatctgataggacattttcacaactgaaattgcatattttgttttactataacatataaacaagtgtatctttcttgcttgaagttttgtaagattagaattacaagattaatatgattataaactttgaaactttcattttcacatgtatttcttaagcaaatcagagtcttagagatcatttaatcattttgacttatgcttataggacttatgttgctgtgattttaaatgctatttttaaaacataccagtttttaattttgaaatagtgtttttactataaacttaaagctttcttgtgtgaattttatgatatatgtgactgtaaatacttgggtgactgaatggtgtaatttttctcctagtggaacaaagctgttgaattggctaaaaatcatagtatgaaagaaattggatctctgttagctaggtatgcatctcatttactggaaaagaataaaactcttgatgccatagaactctatcggaaagccaattacttttttgatgcagctaaactgatgtttaaggtaatgtaaaaatcttggtgaatagttgatttgttccagtcacaatattttaatatatgaaagagcatattctccattttctttggaaacaaatatttattacagcaaaaccactctggttttattgcttctgtatacattattttagtattattgccttttaccaacaaagatgtttattaatattagcaacttactaatacctaaacaattgtatgttgaatactggagttaacaaagagttaaagaaattactgagactgcaaagtacaaatttctacaacagggaattaaattttgttgataatagagttttaagttcttttaaatgtacaagttttaaatattacgctttacataatatttatttggagggaagataattagt

SEQ ID NO: 92937 - DNA, 1039 bp, Homo sapiens
agctctgttttgggtctagcttcctgaactgattaatggcagacttctctaggacatttctttatagaggtatttgagggctctgtgaatgtgagatttcccttaagtctctagttaataattagcactgagtataccaccaattgatataaaggcttttttcacccactggtgggggatttgttttggagcttgacatttctgtatactagctactgaactgagataagaaaggagtgcagtgtcttcagggcctcgttaaaaatcagatccacagcctgagccagtgaagctctggatttatagaagtgatgccttagcatccattctcatttgtaccctctgcccttgcgtctgtttacaagaaaaatctgtaactaccagtaaatttaatactcatacgtccctacggagttttgttaaattaaaatataagtaatttccttggtctgtgaaatctgatagtattgttttgtttgtacaggaaatagcacaaatgtttgtcagagttggaatgtgtgaacaagcagtgactgcatttttgaaatgtagtcaaccaaaggcagcagtagatacctgcgtacatctcaaccaagtaggaactgaaactttctgtctgtgcagcttattgtcttaggaatttttaagtcaaagcaaggttaaagtcaccctagtgatcttttaaagattattgccaatgtaagggttggagagcctgacgtgaattttatgaaaggagccaggcgggtattctcttaattgaggatgaagaaagttgcacttacctcttaaagtgctaccatgaggggtgacccacttataaccagctcagtatgggagcatgaacaaaccttgtgcttttagtctggcaagtttttgtctggaagtaatttcataattttctgcattttgttagggttgggttttgtttccaaagaaggaccagttaatggttggtcattgcctgaggaaggaattgagttactttatcaatatttattttggcaaatctgttttccttttcctttatagaaaacat

SEQ ID NO: 92938 - DNA, 1039 bp, Homo sapiens
tattaattgagaaaattggactgaatattacatgctattagggaattaacattaattatgtaaggtgtgatcatagtaatgtggccatgtaagagaaaattcttatgttttaaagatatgtactgcagtatttagggataaaatatcatgatgtccgtaatttactgtatttactttacaatacttcagccaagaagttaaaggaagcatatttaccataatgctaattatttaggttatgggtatatgggtgttaatgacattctctcttttgtttacctgaaaactctgataataaaatttaaaagcatgatttgttaaaagagaggaaattttgcataatgaaacataactttttttttgtctttaaaggaacccattcagacctctggatatatttgtaattttgaggatttagaaattaaatctgttcttttggatgagatattaaaggtaattcctaaaaagttacatttctgttgctagcttgacaggggattatttctggaccaggcggtgtagtatcctggttagcagtgtggacccaggagtcagatatatctcaggcccagccctgctctcttattgttcagcctttaggtgggtgccaccatctttttgagcttcactttactttcctgtaaaatgatgataaaaatgtataagtctcagttattgcctttataaaatacagataataatactacttataggattgttattatataagataatgtgtgaaaagcaattagcacaatgctacggccaagtgagagctaaaaaaaatgagtgctaattgttgtcattgtttttgtagtaataacgaggtactgaagaaatatttaagagtttagcctttttctagttctaagatacttgagtaacttttttttagagatctatctttccattttttccaggttttgtaaaataatccttttttctctttttaaattcaagacatgattttgaacccctgcattggcctacattgaccatcctttgagaattttttttctctaagaatatactgagagaa

SEQ ID NO: 92939 - DNA, 1182 bp, Homo sapiens
aaagcttttgcaagtcttaggatctttgtgattcttcgaccctgagaaatagttcaaaggaaaggcattcagattcagggctgctgcatttgacctgtaagcatgggcttctttcaagggtccaagggaaatttaatccttgccacaaaacaattgtgggaatttgacaggtaatccacaggataaccttgaggatgggagtagaatactttttgaatgttagagtctttttctatccttagccctgctcatactaaatcacaaatcatatgcctggagaagggagaatgtttgttgtatctggctgctcataatgtgtctatagcacacatggtcagtctggtaccaagtgaaatctttgcctggtggaaagagtttcttaagtagttttaacagaacagccttttaaaaacatactgttttttaatttgaatttgttttctggtttggcatgtagttcgatttctgttagatttagagctagatggatttcttaaaaccttcccactgtctggatttctttataaatgatgctgttctgttcttttcattcacaaggacactggcttactgtggtcgcagctggtttagctactctgctcatttgcttttctagctgcttattgatcatgtaagaacatgatctcttcaaagcagggaagatctgttttacatactattatatttaatagtatgttccttaaggacataatattctatattattatttaggagataagttattgtttgacagctaataacaatatatttttatccatttgagtgttgttaagaattctagattcatacctttatctaagctgtaaatcttcagattatttgagagaaaaagatgccatctgtgtgcaaagttttaattcactgataaagcacattttctttgagaattaggagatgaatatttaatgttgatattccctgcttgatcattttcatctccagtgaccctctgaaggtactgattgcgctgttttgttctttttcttggctcttccttctcattggcactacaatttcatttcatgtttctttcatatctcataatttcatcaatcagactcatttttgtacatttgcttctttttcaaacaaggggctcccaaacttttgaatatatgctcttatatatacatatttatttagaaattatttacatgacct

SEQ ID NO: 92940 - DNA, 1577 bp, Homo sapiens
aaaaacctagaccttcagtaacagctatatcatatgatcttctgttgatttttcatatacatatgtaatttaactcaacaagtactttgctttagcttttaatgtgccctgaatattaacctagataacaaatataaataactttagattttttttccttgtgatgtaagaatttgtgtattgccaaagtgctaggtttctgacttctttcttgaatattacatgaaaaaaaattagaatacttcagctgtttgaaaaaggtttaattaaattagtaggtaaatatgtacttaaggacatgattcattatcagaattgagaatttgctgtgacatcactttggttttaagacaaatgtatagacatatagagaaatagttgtagtttaatattattatgatacacgtatgcttaagtaatcaaaagtaatttccatagggtcgtgaatctggcaccattcagagatacagtctacctaatgttggtttgattcaaaaatattcccttaattgtcgagcctaccagttatccttgaattgcaactctaggtaagcctgaaaactctgctcatgtagatgttagacttagaaatgatcagttgggattgttagatttatatgtaataaatgtaaagatgggcgtgtctattatgaacttgtcttaaaattcagtatggttttattttatactgcatttggtttaaatgtttttaattgggcgtgtggaagtactagtataattttttactcttaaagcttaaaagcattgagactattttatatttcataccaattggttttgtctctggatacattttcctcagaagagagcaaaatagagagtagtccatatcttgtatcaaatttatttaacaaaattttaagccatttctactgtattccaggtttctgataatctgattttgaagaagaatggctataggtaattattctcatgattgctgatagtaattttatagttttttccttttctctaattgcattgtttttagccgtcttgctatcatagacatctcaggagttctgactttctttgacttggatgctcgagtaacggacagtacgggacagcaagtagttggagagttgttaaaattggaacgaagagatgtctgggatatgaagtgggccaaagataatcctgatttgtttgcaatgatggagaagacaagaatgtatgttttcagaaacttggatcctgaggtaaaaacaagaaatgagtgttaacagtctataaataatgagccaaatataaaaacctggatgattcccctttgtttctttaagaagtttgttgaatagcagtgccaacacggctgcatgaatttctgaaaataaataggaacatttctgtggattttaaaaatatttggtcttaggtgagaaaatacttatctattaaatattctctactttctctgaaaggtacttcctaggcatttatttatctgttctttttaaaaggtggagccatggtcactagtctttttttcccttgtcaaacttaagaaaacaaaatcagtagccttatttaccagaatttctgaaaagaaccta

SEQ ID NO: 92941 - DNA, 1009 bp, Homo sapiens
agaccagactgagaacatagtgaaaccttgtctctaaaaaaaaaaattacagtaaagttttgaatatcatcttatgggcaccccaagttttactgtacccttaatataagttcagtatgagaaataagaaagttttaaagctttcctcgctaataattaaccatttgcaaaaacagctatttatgaaagcagtacagggatgaccagccgagaagacagagtacacttacagtttctaacactgagtggaatgagccctgtggaagattgcatggtggtggggcagattgcatggtggtagtaggtattagaaagtttcctcctttgtgtagcccgatattttatgttggagaaagtgctttggctcagccactttcataagacttagaatgacgaggtaacatgtttgccagccagtaaaatagagaagcctatggcaaatttcagctgaatttttcaaatagaatcaatggcatagtgtcttttcttgagctctgagatttgaaaatattaattttagaaattaatgtttacttttatacagtaatgctgctggggttattgcatttgaattatgtaaacaaaaccttaatagtatatattctagttctagttacattcctcagccatgagctaattttatggggggaaaaatcttaagagcatagtatttctatagtattccctcctttctgataagccctcatgagactcatgctgcaaaagcagtggttctctgattaaaaagaagagagttaaagatcagctgtgtggaggcttccactttgtcccactgccatggcctgaggcagccaagggtttgaaacccacagttctctcatggcattatacttactgttgatatgtcaaccttaagatttgccctgagttgtgtacaaaattatatgctgctttattttttaaacttatttaaactaatattcatagtatccctgcattcagatcatctttccttttgctaaaaactagtatcagatagatgactata

SEQ ID NO: 92942 - DNA, 1057 bp, Homo sapiens
attgaagtcagacatagtaattgtaaattgtcatgcttgataactgtagtgtcttgattagtagaaatgttttttcaattaatttgattatctttaaaatttatgtgtttaaatttattaaaataaaagagaagtagaatggtttaataaagtccttagagataaagagtggaaagctgtgtttttataaggaaatggctgtcctcacttaccctccccaccagattagagttaatatgctatactaaaatatgattattcacttgagatcgaaggatctaactaagggtttattcctatacattagtggtataggttttcccaagagggtggggtgattccaatatcagtgaccagaggagaggcaggcctttagacacacatatggaagaagtctttaggtggggtgaactggggacttagcttctttttcttgccctggtttccaaggattctggagttggaattacttctagtaagtggggtgaaaagggctctgccacatagtagataggttagaagccaggatagagggattccccacagtaagtctgtaagtgaagaagcatttactgtgttttgtaagttatattgtctccattagtgatactctgtgtttgctgctcttctgttgttactctaagcctgtaagtaaagcattttgttgaatgttttaacctaaggattcttaatggggacacaggcctgtgttggtggaagtgagtggtacagtcatgacagaaatgctaggtgttttttcaaatcattatcctccctcacatccttgagatcttaaagcagactccccttgcctttcctttaagactcactcatgtgctaagatgggagatggatcctcagtaaaagtatgttgatgggaggctgaggcaggagaatggcgtgaacccgggaggcggagcttgcagtgagccgagatcccgccactgcactccagcctgggcgacagagcgagactccgtctcaaaaaaaaaaaaaaaaaaaaaaaaagtatgttgagtatgcgaattcatgtggaggcaggaaaaaaagattgaaa

SEQ ID NO: 92943 - DNA, 1034 bp, Homo sapiens
gacttgggagatttttcttttctaaattagagtagaaatataagatgtggccaggcggggtggctcatgcctgtaatcccagcactttgggaggctgaggcgggcagatggtgaggtcaagagatggagacaatctggccaacatggtgaaaccccgtctctactaaaaatacaaaaattagctgggcgtggtggtgcgtgcctgtagtttcagctactctggaggctgaggcaggagaattgcttgaacccgggaggcagaggttgcaatgagctgagatcacaccactgcactccagcctgggcgacagagtgagactctgaaccaggtagtaattggtagtggggatgggaggaaggactgggattttatttattcatttttcaattaatggttgtttgagttgtttctacttttgatcattataaataatgttgttatgaacatcagcatatgagtttttgtgtggacatgtttttatttttcttgggtacatacctaggagtggaattgctgaggcatatagtaactctgtatttaacattttgaggagttgctgaactgtttaccaaagtgaacacaccatattacattcccagatttctccataaccttgctaacacttgttattgtctgactgtttgattctagccatcctagtgggtgtgaggtggtatctcattgtggttttgatttgcacttcctgatggctaatgttgttgatcatctttttcatgtgcttattggccatttgtgtatcttcactgtagaaatgtctatttgtatccgttgctcacttttaaattgggctatttgtctttattattgagttgtaagagttctttatattttctagataaaatttcttttcagatacacgatttgcaaatattttctcccattctatgggttgtctttactttcttgatagtgtcctttgaagcccaaatgtttttaattttaatgaagtctaatttatctaatttttcttttgtcatttgtgtttttggtgtcatatctaagaagccaatta

SEQ ID NO: 92944 - DNA, 1026 bp, Homo sapiens
gactgcctattagcattacaaagttcagttaatgaaagcataattattttcttaaaaactttttttccaagctgggcatggtggctcactcctgtaatcccagcactttgggaggctgaggtgggtagatcacctgaggtcaggagttcaagaccagcctggccaaaatggcaaaaccccatctctactaaaaatacgaaaattagccagacatggtggcatgcacctgtaatcccagctacttgggaggctgtggcaggagaatcgcttgaacccaggaggcagaggttgcactgagcaaagatcgtgccacagctctccagcctgggtgacacagcaagacaccgtctcaaaaaaaaaaaaaatccaataacctttctagatatttcaaatttttttcttttcagatattgaacagtcaaaaagggcatggagggccttcatcttggctgtgttcttgtcctaaaacattgtatctgttaagattttgttttgcttttcctagaagcttagtctagatgggatgaatcttaataaagatctagcaaaatatgtatagataggattatctacccatatgaatttgctgaaattaccaccttactgattcaaaagaacatatttttcagatatatttctattttttgtagtaactgagaatttatatatggttttattataaaatcctatgtaggtgataaaagtgaaaagaacaatagcaaccatgtctaactaatacttcttaatccttagtgagggtcagtctgctctagtagttaagagcagtttctggagccagattgaccaggtttgtgtccagctctactactttctaactgtgtgatatgggcaaattcacatgcctcagtttctttatctgctaaatgaggacaataacgcctaccttatagggaagttgtgagttaatatgtgttatatatttagaacactgcctgtcatatttttaaacattcaataaatactgtcttttaaaagtattattggccgggcgcggtggctcacgcc

SEQ ID NO: 92945 - DNA, 1071 bp, Homo sapiens
tttagtaagaagccttgtggatctatttgatttttggaactactagcatgtataactgataaaaatgaaaaatatattaaaaatacaatttgtggtattttgtggcagtaaataagcttattttaagtagtggaagagtaaattatgattttttaaaatatgatttttattatttggtttatatttatgaaattaattcaatgagttctttttatttttttttaaatgttatgggtaatagtagacgtatgttatctatggggtacctgagatgttttgagtaattaaacaaattttaatcgaatgctgaaaaaagaaaaagtctgtgtaaatagcacataaagaactgctttatttgaaattgttgttctagtcaggaaaaacatctaagtagaatagtattcttagtacaagatacagaaacagagactaacagtaagaaaaatgaaatgatcactttaaaacaatgtgatgtaaaatgtgcattacgtttgattattttcctaatattggtcattgatgattatttgtatataagccactttcattaggttgagtcatgtcttttttgagttaactgaatttttctgaatttctcctgtcatttatatattgcttcaaaggaggagaacgagatggagacatttggtgcaacggtaacaaatgaaattagctcttatatagctgatcataggataaaaatgagttttgaggttatagctgatcagaaactgtagcaatatgaggggacttcagaaggttcatggaaaaatggaattaacagataaaaataaaaatagaaactttatttttcaacataagctccatcaaggtcaagacatttttgtaagcaatgataacagatatttagtccatccctaaagaactgagggtcctgggaatttaaccatgtcaatgcagtcttttttacattattaactaaagataaatgggtaccctttaaggattttttaagattaggaaacaaaaggaagtctggagccaaatcaggactgtaaagtggatggatgcctaatgatttcccgccaaaactctagcaaaattgccctt

SEQ ID NO: 92946 - DNA, 1099 bp, Homo sapiens
atatgctgtgtatttttttgccttcattctctttgtgatggtaactaatatgctgcatttaatatgcttgtaattattcattggagagtttatgtgcatatgtataaagttattgttacttggagtttttttaattggttatgatctgaaccatattgttcaagtgggaaaagttaggctttcagaaaaatcagtagttttagctctgaaaaagcaaatgaagtttaatttttaattgacagaaagaaagagagagggaaagaaagaaagaagaaacaaaggatgggcatttattatgttttctgtgataatctttgaagcagttatcagttaagcccaagttaatttttcattttgtttttgttggatttggaagttttatagtttaatgtctcaggttgtagaaaactttgcagttatttgtcccatggcgtactttatggaatgctttcaattcttaactactatttaatagatgtgaaagttttgacttgtaattttttaaatttgtgaaaacaggctcttggattgaggagatgatcaacaatcgaaataaatcagttgttcgcagtatgagctggaatgctgacggacagaagatctgcattgtatatgaagatggggctgtgatagttggttcagtggatggtaatgtattgattggacatagaactaagatcaatatctggctgacagttttcttctttagagatttaagttagttaccatatgttagcattctgattgaaaaatagacataaaagggaaactatttgatatacaatttgacgacattcaagaaccgttctttgattttaaccatctgtttttatgtatattcaaggaaatttttttatttcctacagtggcattgaaaaaattgaattaacttttcagcattattttaaacatgtctgcctcattatgtaatttctttttatattggttagtctgtacaaatatatagactttagtttcaaaaagtctgtggtcgtttttattggaactgaatatgtcattgttggttgtagtttatagccttaaaaacctgtatttttcaaattctagtaatagataaaactgggtcttctgagagtct

SEQ ID NO: 92947 - DNA, 1474 bp, Homo sapiens
agcctaatgtgtgtgtcagcaacatttattctatcttaattgacagatgattgcattgttaaactgtacatgtgtactcttgtgttaccaaaacaactgggtaattagaactagtgatttagaggaaattaggtatcttttcctgacaatgttttcagaataaaggatatttttcataatattttaagatacttgttatctgaaagtagaattttctttagcattggtataattcccattctcacaaattcttaagatcttcataacatttgtattttaaatgaaaattttaaatgctatgttttatgtgtaacagatttctaagccaagattaatttattgagatgacattttaatattctctgtaggatggttagtaaatttttaagacgtctttagaggttttcattgcactttggataaaatctaaaattcttatcattttctacaaatacttcatagtttttcttgtgcctatcactccagccttgtttgatgcaattttctcccctgttcatccacataggccttcttagagtttgtcaagggctctagttgtctacctcagagcctttatgttgctgtgtcctagcctggaatactccccttctttctctacctttcctggctatctccagtttacctctcagtctcagcttaaatatcagttcttctgatagccttccctggttccccatcaatctaaattaagtcacttctgctactctttcttattatgctttcacattcccagtttatagttacatttatgtgtatgtgagtatatatttaatattggtcccttagactgaaagctctgagaagaaaggggaaatgactgttttgttcaccattttatatgtagaaccttttgtaatgcatagcacagtgtacacatttcataaatatttgttaaatgaatgaataaatgagtgaatataagattctgtgtaatctagtaaaaacccattttcaaagtctatgctcttttgatcccttgtaagctgtagagttttcaatctgtaggccataaatatttctatttgtggtcttttggaaaggaataaaaagcagtgatgattattaatatatgtaatgtatgagtaaacaatcttcatttatatattttgctttattttaccagaatatctttgcaaggggtatgtgttattgttcatgtttataccatgagaaaaatatatcagaatggggcatacttagaaaaatgattaatactgcccaggaatacaaaaagagtcaaaatcttataatatgtcacttttacatatttatcatagtagtttgttttgttttgttttagatgatgcaaaattgaggggccttgcagcccccagtaacctttctatgaatcagactcttgaaggtcatagtggtgagtcattcaatttcttttaagtcatgtttgagtggtatttaggcatttagaaagtttctacttaatgcagaaatgtca

SEQ ID NO: 92948 - DNA, 1062 bp, Homo sapiens
gcaaattgtacaaggtatttacacatacaacttcatataactgagatgaatgtaattttgaactgtttaacactttttgttttttgcttattttgttggagtattattgaagatgtgatcaatagattgtaatacacatatctaaaaatagttaacacagatcaagtgaacattacattgccatttttaattcattctggtctttgaaagaaatgtactactaaagagcactagttgtgaatttagggtgttaaactttttaccaagtacaaaaatcccaaattcactttattattttgcttcaggatccaagtgacaaagttatatatttataaaattgctataaatcgacaaaatctaatgttgtctttttaatgttagtgatccacctgcctcagcctcccaaagtgctgggattacaggcttgaaagtctaacttttttttacttatatatttgatacatataattcttttggctttgaaacttgcaactttgagaacaaaacagtcctttaaattttgcactgctcaattctgtttttcgtttgcattgtctttaatataataaaagttattacctttacatattatcatgtctatttttgatgactcatcaattttgtctattaaagatatttctttaaattatactgaattaacagttattttgatattcaacagtttcttatcaaaagacagaagtttgattctcctcctatagtttaatctcacactcctgaggctaaaagtgtaagttcaggttcaaaagaaaggcttcaatataaaattatctaaatttggataaaataatgatgagctttacattaatataagctcctgagaagcaaatatatcctacagatgtaaatataaaatataaactttaaggaaggaacaaaaactaaatataccaaggaaatatataaagcatctcttacttttcaaaaattttgaaagggtatgacatagagctacagtagtattttccagacttttttgagcccaaaatcagtaatacatattaatataccacagagaaatggtggtatagaaggaataaa

SEQ ID NO: 92949 - DNA, 3382 bp, Homo sapiens
ttgcctgacattgtaaccagtgggtgtatttttgcccctgtctgatgagagttgagacaaacgattgacatttagaaaaataattttccccttgtagcattaaaatggcccagtttatctgtagaacttacacagaactgagcatctcctgagttaatgatgcaagtgacacagggactgatctccagtgccatataggcgatagtgtttttccaaaggccagaaagatggaaaatagtgaaaagtaaagagaaaacgagctaaatttagactttttggagcattgtgggttatcaaatgtactctaagtgattgttagcatgcattaatggtgataaggcttaaaatttaaaagcactttgaattaaattctgcttatacatttttattaaatatcacttttgactttggtgcctttgtattcttcagatgctcttcaggttatcagcaagtgctagtgcgatggctgacttgtaaatgtgtgtgtgtttctttaatagcctgattttccctacaaagatgacctcctggccttggactccagctgcctcctgttcattgttcttgtgttctttgccttattcatcatttttaaggtacgttgctgactaaatctttaggggtgactgagattgacactgtgaatctaaacctttttgctgcctttcaccttacaagtcacaggagattgaggatttgtggggacagtgtttattctggcacatgagcagagatagcttctagggaatggtttctgttgtgtttccaaggaatggttgtaactgtcaggatccttctctgagtgaaaggacctactttttatgtttttgaaaaggggttcatgatttgtattgaaaatctgttaaaattcccaaggttcacaaacccagaatttcttctgcagcacagtgggttgacctgaattgaagctccatctctggtttctctctgaaatgttggcgatgaaactcatgacacttaaatgagagcaagtagggaaagggcctggcctgtgctgggtccacacagaggtcagctcccttctacacagaggatgtgtggggaaagcattctaagtcactggcattttagagcaggtagtctgttgagtttctagcagatgtcaactttgtttttattcttccaggcttatctaattaactgtgtttggaactgctataaatacatcaacaaccgaaacgtgccggagattgctgtgtaccctgcctttgaagcacctcctcaggttagctactgttggatagagtaaaaggtcaccagtcactattgactgttccaggagaagaacctggagcttgactttctctttcatgctgtaacctatggtttgggcatgaaccctgggtacttttatgaacagcttaaaatccacaggattcaacattttccacttggaatcctgagtacctgggtcgcttgtctcatccagtttggctgttagatttactcattagaggtcctcattagtgtcatgtttgtaggggagatgacaggaaacagctgtgttaggcccatgtagcctggggcttctaaggatggggagttccattgactgaaacttgtgttgttttcagaaaacatccatatgatccaacgggggagctgacctgtctggggagatgaatacagtggtttcatgggtcttttggggaagcctacctttcacagccctctaattgctgctgtgctaccttcccaggttttcagcatataaaatatatgtggcccatctagggccaggctttcagacttggagtcacttcgattagaatgtcactcctccactgcataggtgtgcctgttaccctcgaagacatgatataagttcatgatcttctgactacaaactgattctgatgaaagtcaggatccaggagctagcgtcttattgggtgtttcctattgcatggtttaacccaactcctcaacacctgaagtgtaattggcactggcacttcatcggtcacactggaatgagggcagagcaatggcacccactgcctgcctgtctaggaatccttgtccagaagcaggactctctctccccacctccctctctccaccctccccttcgctagcaatcttggtaaaattccaggttattgaggcatctacttgggaacattttagctaacagtttcttcagctcttctttatggttttgtataaccctatttagggcataaagtctgaaagctgaattatctcacaaaggattttaaaggagaattaaatctgatacaattttttttctctctttagtacgttttgccaacctatgaaatggccgtgaaaatgcctgaaaaagaaccaccacctccttacttacctgcctgaagaaattctgcctttgacaataaatcctataccagctttttgtttgtttatgttacagaatgctgcaattcagggctcttcaaacttgtttgatataaaatatgttgtcttttgtttaagcatttattttcaaacactaaggagctttttgacatctgttaaacgtctttttgtttttttgttaagtcttttacattttaatagtttttgaagacaatctaggttaagcaagagcaaagtgccattgtttgcctttaattggggggtgggaagggaaagagggtacttgccacatagtttcctttttaactgcactttctttatataatcgtttgcattttgttacttgctaccctgagtactttcaggaagactgacttaaatattcggggtgagtaagtagttgggtataagatctgaacttttcatctgcagaggcaagaaaaatatttgacattgtgacttgactgtggaagatgatggttgcatgtttctagtttgtatatgtttccatctttgtgataagatgatttaataaatctctttaaatacttagggttgtcattgtttttaatccgttacttttttttaagataaaccctgacattttccattacagtgtattcagagtgccagtgtttattttttttttaactttgagaatacagttggcccttcgtatccatgggttctgtatccatgggttctatatccatggagttaatcgactgtggattgaaaatatttggggggaaaaatggatagttggatctgtactgaacatgtacagactttttattcttgtcgttgttctctaaaaaatacactataacaatttatgtagcattcacattatattagatattataagtaatctagagatcattttaaaaatatgggaggatatgcatgggtcatatgcaaatactataccattttattataagggacttgagcaactgtggatttgggtatctggagggagaacctgcaaccagtcccccatagataccaagggacaact

SEQ ID NO: 92950 - DNA, 2122 bp, Homo sapiens
agtattttttttcttttttcatttttaaaacatcttttgtgcatacagggtcttgctatattgcccaggttggtcttgaactcctggcctcaagtaattttcccaccttagtctctcagagtactgagattacaggtgtgggttgccgtgcccatcccccccagtttcttaatctctgcccagacggatcacctgatgttgggagtttagaccagcctggccaacatggtgaaacctcgtctctactagaaatacagaaattagctggatgtggtggtgcttgcctataattccagctacttgggaggctgaggcaagagaatcacatgaacctgggaggttgaggttgcagtgagccgagatcgcgccactgcactctagcctgggcgacagagcaagactctgtctcaggaaaagaaagaaaaaactgtccagagtcacagaatcaactacagatttgtgctaagaaattcagtaagtcaggcacggtttagaattgcttgagattacttggctgttttgtgaaaaaattagtgaacatggattaatggagagttggaacaacctgaggaagagttgagaaacgaagaagaaagtagtgtgtgttaacatagataccagggtgcaggaagcaatgaattttggtgtttgggaggttgggtggggaagtgaggttaatggcgaaatttgaatttcaggttatatttatctagagcaaagggtaatgtatgtagcattctgagtttaatacacttgtcttttaagcaattgccagccattccttccagctaaaccctactcataagacccatcttgtgtcatttcttcatattttttcctgatgcttcaggcaaagcaaattgtttctgcctctgttgtagcacttgacacattggattataatgatctgtttgcacatcttcagattcctgggctcataagggcacagggacctgtttctctagcagagaatgtggttcatgtgccatcctacacccatgtcagtgagtcgttggagcgatttaacaaataagtgctttgtgtgaatgtctcaaggttccttacttcatgctgagactttgattttttttttttttttttaccctcttggccttagatctttttatagccaattttgaaaatatttaaatttaatattttaaagctagctttaagtgaagttttgttctttttgttgtgtaagtagcttaattagatttttgtttttgttttcttagataatgcctgtgttctttttgccgtctctgttcttatgtttataatcagttcaatgctggtttatggagcaatttctgtaagtatactgtattttcatcttttagagtttgaccttaggggagcttagtaatttcctatatgtgatacaatgttatggttgttattttttctccagtatcaagtgggttggctgattccattcttctgttaccgactttttgacttcgtcctcagttgcctggttgctattagttctctcacctatttgccaagaatcaaagaatatctggatcaactagtaagtgtgtatgctcattaaacttatttttttttcattttgagtaaaatgtttacatttaaattctgaatcagccttaggtattatttttaactactccgcttgcttttgaaagtgtcttaaaataattatttctgctctcttagctactgtgacaaaactggcaagatgaaagtagagtaatttcttaccatccatttggataatgcagtattaagagttcctagaaatggatattatggaactagtagttcagcttttgtttttgagcatccaaaggtacagtaatttgactgtgtatggcactctttaagtgactagcttattgtctttacagacatctgtagcaagtattccagtgcctactatgtttttagccctttgctaggcactgttggtgaatggtgtggatataaagataactgcgaatattacagtttagcgagcaaactgtaatatttggggagtcaagatacatgaagatgttacctgtgataacaagcgggagctgtcacagcagcagcaaataaggaacttcgattaatgtcatatggaggggggcagggaaaactctgggctgggtgg

SEQ ID NO: 92951 - DNA, 1097 bp, Homo sapiens
agtatcttggtaagtctcttaagcatttgagtctagctctagaggaaatagtgagttctctgtcacctgatgagagatgctgtggaggggtttcgggcatctgatgaataaatataacagatgaacagtaacttcttcaaatccagaaattctgagattggtatatgaataaataggtagcttcgaacatgaaccatttgtaatgattctttagttttaatttttttctggtgtattggttaagcatcttatctctcaaatggttaatattacttatactttataaaatatttatttttaaattattctcatagtggtaattgcgtattgttttatctcacaggtagtctcccactattttatatctttgttacttcaagtaagacaatcttaaatatgagaggacatctagagattgtgctaagattgcgtcgtgatggtaattaatgtaactgatagaatgttatcttttccaggtagtaaacctattgatggcaattttgctgactgtggaagtgactcatccaaactccatgccagctgtcaacattcagtatgaagtcatcggtaattactattcgtctgagagaatggctggtatgtgtttaatagaaaaacaaaaaaatctcccctgctaatttttatatacagtcctgtgttgtttaatgatggggacacattctgagaaatgtcactgggtgatattgttgtgtgaacatcatagggtgtacttacacaaacctagatagcgtagcctactatacacctaggcgatgtggtagagactcctaggctaaaacctgtacagcaggttactgtaccgaatactgtaggcagttatcatacagtggcaaataggtgtgtatctaaagatggaaaaatatagtaatactgtaaatacactattacagtgttatggaaccctcatgatatatgcagtccattgttgaccaaaatgttgttggcccatgtctgtctgtctccacacacactggttatttaggggattgattagattatgcttaagttacatttcagaaagttaaaatggttacataataagggtaacaagttaaattatatttaagtcattcttg

SEQ ID NO: 92952 - DNA, 1740 bp, Homo sapiens
ccttgcctctgaacaatgcaaggaaagaggcttgctgctgaacatagacagtaaagtctaaacattttatagccttagataatggtttctttgggaaagaccttaaaataggagttactggggaatgtttattaataatcacgtagtgctgagaaggaggatgtcttaaaaaccagacttgtgtcctgattctcccatctgtcagctcagcaagcttaacacaagttatatagctttactgaatcttaagtttccccatctacacataggctttggtaatacttacttcacgggttgttgtgaggaataagtgaagtaatacacgtaaatacacatgtcataaagcatatcctcaataaatattggttgattccaaatttcatattgtggcattgtttagatcacctaccctaaaataaaacttgatctgcttatctagcggatgttagtgaaatgacttcagctgataaaaggaaaatgcatttcctgtgtgtttatcattcaaggtgaaacaggagagaagtatataatagtttgtttaaaatactatcgatagctggccgacacagtggctcacacctgtaatcccagcactttgggaggccaaggctggtggatcacttgaggtcaggagtttgagaccagcctggccaacgtggcgaaaccccacctctactaaaaatacaaaaattagccaggcttgaatggtgcacgcctgtagtcccagctactcgggaggctgaggtgtgagaatggcctgaacccaagaggtggaagctgcagtaagccgagatcgtgccactgcactccagcctgggtgacagagcgaggcttggtctcaaaaaaaaaaaaaaaaaaaaaggtcccagctacttgggaggctgaggtgtgagaattgcttgaacccaagaggtggaagctgcagtgagctgagattgcgccactgcactccagcttgggtgacagagcaaggcttggtctcaaaaaaaaaaaaagtcccagctaccccggggactgaggcaggagaatcgcttgaacccaggaggtggaggctgcagtgagccgagattgcgctactgcactccagcctgggcgacagagcgagactccatctcaaaaactaaataaattaaaatactactgataggaacttaacccttgaaaattccagatgttcacattttcacaaagggaaggagggcaaattctgtgaactttactatgctagataaggaagcctaactccaatcctacgtgagatttctgtcttgagtcgttaacaatactctttctgagtacttaaatgcagtgaagcctcctgggataccacagggattggccaacaactacaggcacaactcatttccttttaaaatggatttacaaccctgggagactaggaaaattcagatattataatgggatttcagcaggctgttcctctaaagagctaaacaattttattcagaagttgctagttaatgggaaggggcagcctctggcagctttgtcctcacctctgttctcttttgttagtaacttagatggaaatactgattacatgctgatcctaaattcaggaagttgagacagtaaatctgtagtgtgtcagaatccacatccagaaaatcttcataggcaagaatgtaataagatgaaactcaattacaggtatattaaggcctatgcttgggcctctgaatccaactgtacaggtgggagcttagcacaatcaagtgt

SEQ ID NO: 92953 - DNA, 1041 bp, Homo sapiens
agattacagttaattttatgtattttttgaaaagctaaacatgtaatttagaaatatcaactttaatcagagataagttgccagggcttacatgtgagcacaaggtaggcgttcgttggtgaatatctttaagatcaaaggatgccaggagcggtggctcgtgcctgtcatcctagcactttaggaggccaatgcagtaggatcacttgaggccaggagttcaagaccagactggacaacatagtgagactccatctctacaaaaaaaatttttttaagtcacaaggatgggttttccagtgtaatactttaagatgtaagttggggttctaatgaaatgatgtgatctaatggaatataattaactcaaagaagatttggaaaaagcttttaatgaagtagcattgaaatttatttcactgtttcttggtccttctgattggccctacgatttattttgtttaatatttagtggtatgacccacagtgaaattaaacttgaagtgtctctagtactaaaagaagataatagtggatgagcgtgtgacttatccatggaagagaagaaaagtgaagagttcttttgttttttaagagacagacttagtattgttgcctaggctggtctccagagctcaggcgatccttcccacctcagcctcccaagtagctgggactataggtgtgagatttttagaaatccttcatgtaataaaaatatttaagaagggaaaatagaactcctaaatgtttttggcatgtcattcccttcatttagtaattgggtttgcatgcttttcttgacaaaggaatttctgtaccgcagagagctttttcactgtgactatgctgtgtttagcaaagaagagtttgcctaattgatttcaaactgatttccatacacagaacatataacgttttagtagatatatctgatagttcagtaattaattcacctagttgtattagctcatactcatacaccacacacgctggccaaaacccattgcagcaaatgtgggcaacaaaaaaaatcagctt

SEQ ID NO: 92954 - DNA, 1378 bp, Homo sapiens
ggctgggcttggctctgtcccttccccgcaggccccgcccccagcccgcgcaataattgagctgcgcgcaaaggtcacgttatcagcctgtgacgcttcccatccagtacgtggcacacattgctcagaaaagccccttgtgcccgctttctgccatccgcgctgtctcgtgtctccctttttccattaaatgcctcttttcttgcgggtctcatctcgggaatagtgcactacggggacatacctatccccaactatcctaggcccgagaaccagcccttgccttcgcgtaacaggcggagactcgctgaggcgagttgcacttctaattgggcgtgaggtcttgtcaatccccaagttcttccaatcagaagtccggtccatccagccttccgctccccattggcctgtgtggaggaagaggggtgggtaagccgaagtcgctgcgctcagtgcgcaggcgcgaagaagctggcaggggcacgagccgggggcgggtttgaagacgcgtcgttgggttttggaggccgtgaaacagccgtttgagtttggctgcgggtggagaacgtttgtcaggggcccggccaagaaggaggcccgcctgttacgatggtgtccatgagtttcaagcggaaccgcagtgaccggttctacagcacccggtgctgcggctgttgccatgtccgcaccgggacgatcatcctggggacctggtacatggtaaggcgggcaggcgtggcgcgtatgtccggggggcctggggagcggggcctggtgcggagggggtgagactggaaacggggtgttgggtggggcggggacttggaggggcgctgctttttaaggcgcgccaactctggatgaagtccaaggactttgggaaagtaaccttgttcaggaatcggagtcgggggagcggggggcggtggtaagcatggggagattgttctttggcaagaatttgaggagagaagcgggcttgggagagcagaggctttgcaggcgaagggacgagggtggtaggatttggtgggaattcctctgttttggttcttgttgtatttctacgatctgaaaggcagcatctcccttcctcctatccagtgctccctggaattttttcctctaatgaaataattaggagcggaccttggtaaacgcagtctagtttcgacattggtcttcccgttgggaaagcgaaagatccagcggtaacccggttgtccgcgtttcttggactttgttttgtttcatgcctctcttgcatctccagaatcgcttgggggcgatagcttttgcctgagttgacgcctgaccagcttttgtcctggtgcagcctcctccctgcgcagtaggtgcttttcgtagccgaccggct

SEQ ID NO: 92955 - DNA, 1111 bp, Homo sapiens
cattcatttacatggagagattaagattgttctaaaatacttaccaaaacaacaaaaacattattattcaccttttgactttcaaaataagagttttatagttttttgatatataattgaaatacaataaactgaatatattgaaagtgtacaatctgatgagtttcaacgtaagtgaaatggccatcacaatcaaaataatgaacatatcctcacctccaaaagtttcctggctccccaactcggttctcaggcaagcactgatttgctctctgttactacagattaatttgcattttctagaattttatataagtggaatcatacagtatttacacattttgtctggtttctttcactctgcataattattttcagactcatttttattgctgcaggaattgatagttccctcctttttattgctgtgtaaaattccattgtatgatacagtgcaatttgtttatttaccagttgatgggcctttggttgtttccagtttttggctgctacaaataaagctgctatgaacgtttgtgtgcatgtctttgtgcggacatatgctttcatttctcttgggaaaatacctaggagtgtaatgtcggtgtcacctcatagatgtatttttattgttttaagaaattggctgttccaaaaagtagttgcaccattttatactcccactaacagggtgagttccagttgctccatatcttcaccaacacttaatatggccagtctatacttttaaccattctagtaggtgcatataaggtaatatggtttggatctgtgtccctgcccaaatctcatgttgaattgtagtgttggaagtggggcctactgggaaatgattggatcatggggctggtttccaacggtttagcaccatctccttggtgctgtcttgtgatagagttctcgtgaggtctagttgtttaaaagtgtgtagcacctccccctgcttcctcctgctccagccatgtaagatgtgcctgcttcccctttgccttccgccatgattgtaagtttcctgaggcctctccaggagcagatgctgccatgcttcctgtacagcctgcagaattgtcagccaattaaacatagtttc

SEQ ID NO: 92956 - DNA, 1357 bp, Homo sapiens
aggctgagacaggagaatcgcttgaacccgagaggcagaggttgcagtgagccgtgattgcaccactgcactccagcctggtgacagagcgagactctgtctcaaaataaataaataaaacaaaaaataaccggggctgggcatggtggcttatgcctgtaatcccagcactttgggaggccaaggcaggcagatcacaaggtcaggagatcgagaccagcctgaccaacatggtgacaccccatctctactaaaaatacaaaaaattagccaggcgtggtggtatgcacctgtaaccccagctactcaggaggctaaggcaggagaatcacttgaacccaggaggcaaaggttgcagtgagccacgaacctgccactgcactccagcctgggcaaaagagagaagctccatctcaaaataaataaataaataaataaataaataaataaataaataaccatcatgggtatgagtggaacactatgcagccattaaaaagaaaagtagctctgctaggcacggtggctcacgcctgtaatcccagcactttgggaggccgaggtgggtggatcacctgatgtgaggagttcaagaccagcctggccaacatggtgaaacccatctctactaaaaacacaaaaattagccaggcatggtggctggtgcctgtaattccagctacttgggaggctgaggcaggagattcgcttgaacctgggaggtggaggttgcagtgagctgagattgtgccactgcactccagcctgggagatagagcaagatttcatctcaaaaaaaaaagaaaggtagctctaaatgtactaagaacataatatatatctccaagataaattattattaaaaaagccagatatagaacagtatataaaatatgctaccattaaaaaattttttttaaataatacagtcatgcattgcttaatgatgggcatacattctgagaaatgtgtcattaggcaatttcattgttgcatgaacatcataggatatacttacacaaacttagatggtgtaacctactacacacctggctatatagtatagactatgctcctaggctataaacccatacagcatgttactgtactgaatactgtaggcaactgtaacataatagtaagtatttgtgtatctaaacatagctaaacatagaaaaggtacagtaaaaatatggtataaaagacaaaagatgctacatctgcataggacacttaacatggatggaggttacaagatgaaagttgctctgggtgtcagtgagagagtgctgagtgaatgggaaagtctaggacattatgccactgtagactttataaacactgtacgccagcagac

SEQ ID NO: 92957 - DNA, 1102 bp, Homo sapiens
gacagtcagagcacctgttataatcatgccaactagaggccctcaccatgtttcatgagtgtcaaataaggattcccttgtgatcctgaaaggaaaagtggtctcaaatatgacgtttcaggaagggaggggcttaaggcaaaattaggctgagctactggaaataaagtggtgtttcctgaagacctaaatgtggaccaggatttatactcactattcacttaaggtgaccagtggtcccagtttgcttagaactaagagatttctcaggacataggactttcaatgctaaaattgagaatgttctaggcaatctgggatgaattgtttaccctatttaaagttctttctacaaaatgataaacttacaaatgaagtcaggtcataactgtctcttaccatggccttggggctccgtggtgatccggatcctgcctcgtacttcatccagctctgcccggttccttcctatccagccaccctgcctccatcctgccttcagccgacctagtttattcctgtctcttaacctatcacctgtgattccttctgcctgcaccaccttcacccttttctcctgctctttcccaaggtcacctcccttccctcctgcagaggtcagctcagagaaacgatcccacaccttcctctctgaaatcgcttcctccacctcagccccagtctctctctggctgccataaccctctgtaatttactcgtggtactgatctcatgtgtgaattagcttgattgtgcacttgtctcttttccccttagcatggaagctccaggagggaaccctgtcctagactctggctcaggggtttacacaaagtcggtgttcaacagttgttgcctggctgattgcaaaaaaggctttgtttttttctctgttctttttcttattttactaaaaaaaaaaaaagcagtaagtaagcaggttaaattttttcaagattaacccttattttggtggagaaaaaaaaatcatttggcctggttagtgctggggtttagtagagtaacctttgttttcttcttcttgatgaacattgtggcccatttccctttcaaaattttctttctagtctctataacaaag

SEQ ID NO: 92958 - DNA, 2383 bp, Homo sapiens
tattcctcaccaggaagacagggcacaggggcccgccttcccctacccccagggcctcgcccagagcaggacagactaactatgagatcagagcagaagcacccttaaagatcacccaagagagggctccccaaactcacaatccaaacttgcagcccctgctgcaagagtgaacgttataccaagtccaattttttattttatagcttcgtgggaattttacgctttacactaaaataagtctgcttatttccatacaaaaatgtgtgctttgtatcactttttgtgatatccatgccatggtccagccagggtccggagttgatgtggcaagaaggcctggctttcgggccctgtgcgatcctggtttgggtgcatctgagtgggtggtggcaaagatcagggaggcaggagctgcttctgggtcttgtagtggagctggttgctgctgctggcggtgacctggccaacccaatctgcccctgccctcccacaggacttcacctttgaaacctcgggggagaatacggctgtagtggccgtggagcctgaccgccggaaccagtccccagtggatcagggggccacgggggcctcacagggcctcctggacaggaaagaggtgctgggaggtgagttttctttcaggggggtagtttggggtgaattgctgctgtggggtcagggtggggctgaccacagccaaggccactgctttggggagggtctgcagcagagcccaaggagccgctgagctgagctggccccgtctacctgccctaggggtcattgccggaggcctcgtggggctcatctttgctgtgtgcctggtgggtttcatgctgtaccgcatgaagaagaaggacgaaggcagctactccttggaggagccgaaacaagccaacggcggggcctaccagaagcccaccaaacaggaggaattctatgcctgacgcgggagccatgcgccccctccgccctgccactcactaggcccccacttgcctcttccttgaagaactgcaggccctggcctcccctgccaccaggccacctccccagcattccagcccctctggtcgctcctgcccacggagtcgtggggtgtgctgggagctccactctgcttctctgacttctgcctggagacttagggcaccaggggtttctcgcataggacctttccaccacagccagcacctggcatcgcaccattctgactcggtttctccaaactgaagcagcctctccccaggtccagctctggaggggagggggatccgactgctttggacctaaatggcctcatgtggctggaagatcctgcgggtggggcttggggctcacacacctgtagcacttactggtaggaccaagcatcttgggggggtggccgctgagtggcaggggacaggagtccactttgtttcgtggggaggtctaatctagatatcgacttgtttttgcacatgtttcctctagttctttgttcatagcccagtagaccttgttacttctgaggtaagttaagtaagttgattcggtatccccccatcttgcttccctaatctatggtcgggagacagcatcagggttaagaagactttttttttttttttttaaactaggagaaccaaatctggaagccaaaatgtaggcttagtttgtgtgttgtctcttgagtttgtcgctcatgtgtgcaacagggtatggactatctgtctggtggccccgtttctggtggtctgttggcaggctggccagtccaggctgccgtggggccgccgcctctttcaagcagtcgtgcctgtgtccatgcgctcagggccatgctgaggcctgggccgctgccacgttggagaagcccgtgtgagaagtgaatgctgggactcagccttcagacagagaggactgtagggagggcggcaggggcctggagatcctcctgcagaccacgcccgtcctgcctgtggcgccgtctccaggggctgcttcctcctggaaattgacgaggggtgtcttgggcagagctggctctgagcgcctccatccaaggccaggttctccgttagctcctgtggccccaccctgggccctgggctggaatcaggaatattttccaaagagtgatagtcttttgcttttggcaaaactctacttaatccaatgggtttttccctgtacagtagattttccaaatgtaataaactttaatataaagtagtcctgtgaatgccactgccttcgcttcttgcctctgtgctgtgtgtgacgtgaccggacttttctgcaaacaccaacatgttgggaaacttggctcgaatctctgtgccttcgtctttcccatggggagggattctggttccagggtccctctgtgtat

SEQ ID NO: 92959 - DNA, 1023 bp, Homo sapiens
agggctggccaggacaaggggctctgctgagacggaggttgccaaggagagtggccctctttacctctgttacgggagcgaaagctggcagttggcttgaggctgccttctggaagcttctctgccagctctctgcccacagacttcagatgtgctctttgtaatggctggcagccggtgatgatgactccccatccctggtggcacaggtcccgttctggtctacgccatttcctctccacctctcaaatgtgggctggtccctgggtagcgtcaccactggggcaggctcagcgactccagctcagtgaaactccatcccactgaggagccttagacaggttttccttaaaactgattgggtcaactggtagggctggggagagagaaggggatggcaggtgaggagagcagtgctgctgcacggggagttgtagtgtctgggcggccttgggcaagtccctcacctttcagagtctctagtccttatctgctagagacagtgatctcagccccgctgcctcatctgcaggggagttgtagggaagaaagaggaatgggtggaaagtgtttccagccttagagaaggccgcactccttcacactctctttcttgctgggtcagagccctgaccccaggattctctccagggtccccagggtatggccaggagaccagcatggctgagatggagatgggctgacctgacccttactcccttactccctgtccccagactccaggcagttgcctcttgatcccccagcccctaggcgagccaaaccttgggctttctaatcagtgagcttctagggtctgcgctgtgggtggggaaggggcaaggcatcccttgctttgaacaacagaatgagtggaagcctagatcttacctagcacaaagttgttgattcgttctatgaacagttggttttcctgggacttacagaggttaaaggctggttagcctgttgccttcctgggcagggcattaggtagtctccaagctgaggccacctgttcct

SEQ ID NO: 92960 - DNA, 1050 bp, Homo sapiens
ggaggagtttccctggggtcaggcctggaaagtccaggaagctcacccctgagtctcctcgggtgaatctgcagcagtgactggttgtcttgggctcagggaattgtagaaagggcatagagccccctgcctccctccccacctcccgtgaatgaggttcattcttagagatcttgtctggaggctgggcatgcagtgggcactctggcccacctgtcttccctgtgtaaggcagtcacctgagcctgaaggcctgggccttcctgcctttattgagtcctgagaccttggggcttcacagctgaggtgggaccgagaactagctggcgtggttagtcccggctcgggctggagtggagaggtgttgtggaggccaggaggagcacaggacacggagtctagcccacctggatcacatccggacttcattgcttcctccctgtgtcatcgtgagcacgattcttcacctaccccagcctcagtttcctcatctgtaaaatggagtttctcatatcctgccccagagggcttttgcagaggttccatgaaataccatatgtgatatgattggggccccttccttgcctagagcacagagaagcaagtctaggggagcactgaggctgacctgtgggaaggggtgcagtctgacccagcctgagcgtggagtcactctgtgtgaatggcctgctggtctgaccccagtgctgctgacgttaacagggcctgcaaacatggcttttgcccttctcagaaacatgagccttcactagcaggctagactttgctctcttccacccgagcctctgccaggggctgcctcctgacctgagaaggtacgggctgggttgcctcctgacctgagaaggtatgggctgggctggcagatgggagaggaggccaggcaaagccagacattggggcaccctggcaggggctcaggcctgctgggcaggacccctagcaatggggcacggtggcctgtccccagaacttcagactgatggctgtcctggagaaggagctgggttttctatggatgccgacaaa

SEQ ID NO: 92961 - DNA, 1119 bp, Homo sapiens
tccattggctgagacaggatttgtgtgtgtgtgtgcagtgtgtgtgtgtgtgcgcatgtgtatgggtatggtgtgaatacatcgcaagactgtcaagtctcccctgagaagcctggcatttgggggctggctgaaccctgcaaggctctactgggcatttgctggtccgtcctgaagaccatggatatgagcgttttgggctgagggggctgggccaggctgagctggcctgaacagtgccatcaggcaaacaacactgggttgggttcaactgatggcccctcagggacaggcgagagctcctcacaggaagtaaattgggacctgagagagcagggtgggaaccatgtggactgggtgtggaggggcctgtttggatggcgccctcaggccagaccccaggtggtgcccagcttgcaccatcttttaccttgggcgctggggaaacattcttggaattagcagattcttttgtaagcctgggaggcgggcagcatggcgcgggtggtggccagaacccaggactcctggctctggtgccacagtcacctcctggtcccctccaacaccaggtcctgctgggggtggggacagcccatgaggaactggtcattaggcgattgccgggcttcaactgttgcccgattgccttcttttcaccaaccagttttggaatcttgggttgaaagggcccctgaggccctgagagattcagggagtttgtggaaagagggctttggtgctgggatcctgtaccctgtcacttctctctcagctgttccagcagaggttgggttttggatgggagcatgtattctggaaccttccactgaatgggacatgcgtgccctgacaggctccaggggaaggctgatgtgtgtatgcccctcaccacaaggaggtatgtttggggtgcaggttgtagaggtgaggccgcagaggcaagaccctgggcttggggctacttcagcaactgtcttatccagctgcaggtggtcatggggcccacgccatcgcttcccctggaagagtgagctttacctgtgatgttactgcttttgcccgccctcaggaagctttcatttaggtggagagacagtgtgagaaggtccctggcat

SEQ ID NO: 92962 - DNA, 1424 bp, Homo sapiens
agatgtggagctcggggctgtaagaggcctttgggtgggatgcagcatccaccttcagcggggctgacgctccactaaagagggacgtggccgacaaagagcagcctgagggtccccagaaagtggctctcccgccccggccaccggccgctagcccgccttccccaatgggggcgctttgttctcggcccctgtaaccctttcctgggaacagccccgtaacgccggccttgacgggggctgggacctgggccgcagccaggtgtcagcgcgggccgcccggtgcccgagtctgccgcccgagttcgcctccccagcccccgcgcccggtgctggcgtcccggggtccctcctgcgggccggctcggccatccccagggatgcagaggggaggtgcggagccaggggcgcttccccttccggaagtggcggtgtctcgccactacatctggacagttcgacttccccagctctggcaaagggaggcacgtgggcagggaaggggcgggggcggggtgggcactcgggttctccactgctaatgtggcatctggacaagtctcagcagcgctgaccctccgtaagcgttgcctcgtgtagtagctgccagttattgagcgctttggttttttttttctttacagagtctgtctcatgggagatgaggtagggacagtcgtttctgagaccgatgtgtaaagcgccctccctgcttcccaggtgactcgtgcttccagacattttccggtccaggagaggtccctgtgcctattgaactgtgaatgggctggactgtgaggggtatctgggagcacggggagggccatgatttccgagctgggtctcatgcactcctggctttcaggtccaagaagctgctctctagggtggtggtttctgtggaactgagactgtgcttggagtcttcgctccgagtttggagaagagaatggagctgggtgccttacctccctggaccgctgggcatcacctcactgccccattctcgcacatgatggggcctcagcaggggcggctgaagttgggtcctccacctatttccggctggatttaggagggctgctggttcccttgcctgcctggggtaaagcagacattccagagccctgggatcccaccgcacccgttaatgctggggaggcaggtggagtttgggcttccccgtgaactgcctttcctggagttttctgtgggctggggcagatgctgcagtgtgaggcattatttcttgcccagaaacttggacatagggcccaggaggcaggagagtctcaaaaggggaaaggagggagactccctggagctgcagggagggaaggcttcctggaggaggtgcttgagctgagcctgaaagccccacctgagctttggggtcagactctggcttgaagcttaggtgttct

SEQ ID NO: 92963 - DNA, 1050 bp, Homo sapiens
ccacccagggagcagccgagctgaaaggccgggaaccgcggcttgcggggaccacagctcccgaaagcgacgttcggccaccggaggagcgggagccaagcaggcaagaaccttaggagcgggccgggggtggggcgttccgaaggggccgggaggggtggctggggggcggggtcctggggggtgtggactggggctggccgggagacctggcggagctgggggtggggggccagtttttgcaacggctaaggaagggcctgtgggtttattataaggcggagctcggcgggagaggtgcgggccgaatccgagccgagcggagaggaatccggcagtagagagcggactccagccggcggaccctgcagccctcgcctgggacagcggcgcgctgggcaggcgcccaagagagcatcgagcagcggaacccgcgaagccggcccgcagccgcgacccgcgcagcctgccgctctcccgccgccggtccgggcagcatgaggcgcgcggcgctctggctctggctgtgcgcgctggcgctgagcctgcagccggccctgccggtgagtgcggccggcggccaggcggggaggcggcgggaagccgggactggtcacccgcggatgccggcgggtgcacgtggagggggagggggagcgaagacttcccttcttcccgcgctagcccagcgggtcccgggacggtgagccccgagaccagggctccagccccaatttcctccgctgtcggtgggtgccgcaccggtcccgcgctggggagggtggggggccggggccccgcgctcaattatgtaaaacgtctccacatctgtcggagcccgccagcccacagcggcgcccggggtcgcccgttcccaccctcctcgccccggccaccgcggcggccgggcccccgtcggtgacccggggggatgcagtgaccgcggccacaacgccccccctgcagaccctaattcaaaccagacccgcgggcttgcgccccagcgccgccgagcccgggcgccccgccccttgcgccagggcaagtttg

SEQ ID NO: 92964 - DNA, 3919 bp, Homo sapiens
caatcttatttttaacagctgcgttagttatttaactggtatcatatttattatatttggatcctccctaattgtttaattgttataagtagtgctttgtacaaaagtctttttgtaatttttttggtggaataaattcctggatgtggaattactgggtaactttcttgctatgtttggggcctctgcctgtttccacgtgacatagttagatgtagtgttttattcattgaacaatttcgagaacagatgtttggagggattgagcagatcacaactgcttttgcaaaaagtagctttctttggatttaaattttttttaattgcagttattcctctaaattacccagaattgggggtgcttttttaagaaatcagaaactaaaatgacttagattttctaagcagattatttgtttttcagattcgacctcacattactactttgcgcaaatacacatacgggaagcatatactggccaagttggaaaagtattatttgaagaatagcccggacctaggacctattggaggaccaccaaatggaatgctgtaaattacaggagcaagagaaagaagataatttaaccatgtgaaaagaatttttttgtgtgtgaattatcaaaacacaactcaactatgaatcttcaatttttttttaaagcaaaactatttattgactttattcatccatttgtaaattttttaaggttcttgtgtatatttggggggtgggggatgaattataaattatattcagccctgagtggagacctatcagattggattgctggcaaagcacagaatgcctgtatatgatgtaactgtatcaaaaataaaaagctgtcacatattttgtaaatttttaccttgtaaagtcacaaaaatagtttttaaaggaaaaagtacagtattcttttaataaactggctcacagtctggtaggtctacaaccccatagcacaacaggtttatagagatgtatatagaattatagtccttatttttttcctttgcgtgaaaccttttataacagattaacaatcaactgcataaatattattaatattttaaaaagagttaagttgtattttgataattcacaaactatcatgcaaataacgagtaagtagacaagaataaagtggtttgagatgaaaagaacctaacattatttacagtagatgtggttttaatacaattactgccctaaaatgtctctggcaatgtacagaaatattgtatatacttacatatgtaattgttgtaagagttaaatacaaaatcatggtgacacttccaattaagtgcactaaatgaaaagttaagtcacttattaacttttcagtttggtttgcaatgagaaagagtggaaatttgtattttgttttgcttatagaattacagacatgttgaggaagtgttgagctttattttgctttttcatagaggcagaaagtaggaaccagatagagatgaaaaggggccactgaaaagtgaatttgatagctcagcatttaagcatgattacatattcagatagctctttttgctttctataaatatatgcattgtgtgtgtagtaatagatgtaagtttacactttgaaaggaaatcttgtttcaatgtttattataaaagccttgctaatttagtagtgatgctttccttggttgtacaggtgtacatttgtaaaccttcatgctgtaaatggaatttgttttatctctttgggatacatttgcattttagtgtacatttacgtccctgccctctttgacctggcaatatagtgttgtataatgtaaatttatttctccaaatcgagagtgattttttaaaaattttttatctttatatggtttcagaagtatgaaccagctttctttttattattgtgagatcattttgttttataacatagttgttgactgttaatatggacctgctagaatttggatcactttcaattgaagtcagggtattgtgcataatagaaagtattggactgagatatttggttaccatggaggccaatgcttttttcatcttattaaatgtgatgtgacttttttctttgtacagaagagtactgtatttttgaatagcctactcccaagtaagagcaaatctgtatgataacattttttcctctggacataagacataacagtaacacgatgtacatttacaagcggccttatgtacatttcccaacaatctttttaaggcaaaattgtgaccatatgtgtataattaaaatcgtttttaatcctttgcctatgaaaatattttggaaaaaaacttgctgtgtatattcagtttctgaaagataaagaaagtgctttgtattttgttgaagtcagtattttgtataaacatttatgttgacccacttatgttcagtgctgaaaactaaaatgaacatgctattctgtcagctgaatatggaagagatctttttttactagagatctgcagaagaaacgcaatcttctgagcacaatatggaatctaaaggttttatcacttagttgttcatattatgaacctaaaaataatggcataaagtttggggatgccaggcatactttttcatgtttggtgttgagttattttacttttctaacccaacattccttggtgagaccattaaatccaaacacttgtcaccgttccttctcatagtcactctgggtcatcagcatgtcccagtcactgcagcaacgccttgtgtttgtttcatttttttaaaacccacacaaagccgctgtctcactttttcctactttaccaacctcagagtatttcggcccgtatcgaacttttgttctcagtatcagcccatggtttcaggatcaaagctgtcatgttggagattggtaatggctttcctgtctttgtacagttgaattcctagtcttccttcatccttgccctctgttggcacaggcattatctctgcaattttagaaaatgacaagtagagaatactacattgagaaactaaaccctcttcttggggtcctgatactcattcccatttgtcccagtgctgacaacccaatcttcccaatactttcaggcctgctctacaaaagtacctgttcttgtagaaattttacagtctgccattttgggtgcccaccccaatttttaccttttagtaagttggcatgaaattttggtaaaatctgaaaatcacatttcagaataaaacaattgggcaaaactacctaggctttactcttgagtgtctccttttgatagggattgtttctggaccagtttgtctaagtcctggctcttattggttcatatgaaataatgttaacttcacttctttgtatattatgtataaattagaaaatgaaaaatgtgtgaataacattgtatgaaataaacctggtcttgtgtttttctctagataaaatacccctctgtacctcagttataacttaagattgattgcccattcaggtttactccgacgtaaagaaaacaaacatttttaacacatgggtgctgttctggagccactgattcctctgatggtattaattccatgctttgattagtatttaggacctataactgcatacttcataggataaaacttttagcccgttttcacatgaactcgaggaggcagtgttgtctaaaggtaaacaatttaagttcagatgtggatttaaagtttaccttatttacacaccttgtgaacttttctaaaccttgagcccttagtctgtatcaagggataatactacttaactcattagttttaacagtggagaatatacaaaaagatagttagaacctatttttttctttttaagagatggattcttgccttgttggtcaggttggtcttgaacttctggcctcaagtggtctttttactttggcctcccaaagt

SEQ ID NO: 92965 - DNA, 1049 bp, Homo sapiens
ttctgttataaaagtaattggctgggtacagtgtctcacacgtgtaatcccagccagcactttgggagatcaaggcaggaggatcagtcgagcccaggaattcgagatcagcctggacaacatagagggagatcctttctctacaaaaaattatccaggcgtggtggcgcatgcctgtagtctcagctatgggggaggctgaggtgggagaatcacttcagcaagggaggtcaaggctgcagtgagcggtgatagcatcactgcactccagcccgggtgacagaacaagaccctgtctcaaaaaaaaaaagaacaaaataaaataaaagtaatcataagacaagagaatcccatcctgacttctgttttattgttcattggagaagattctttctataagtcaaggaaattttgctgtgaagaaaaaaataacaaatctttgtttatctgctttaatttttagcaatgtagtagaaaagtgtgttactcatgcctcccgtgctgagagagctttactgattgacgaggtttgctgccagaatgatggtcctcacagtgccttatacaccatgatgaaggaccagtatgccaattacgtggttcaaaagatgattgatatggctgaacctgctcagagaaagataatcatgcacaaggtaatacagcatgtaacactcagataactgtttgtctttgtgtttaggctacacatttaacctccttgggctttcatttcctcccgtatgttataactggaggaaaaattaaaatcgatggatatcctttggcagatatattggtatggtttccatttttatgcttaaggttatcatggccaggcatgggggcttttgcccataattccagcagattgggaggctgaggtgacaagatcacttgagcccaggagtttgagaccagcctgagcaatgtggcaagaccctccctctacaaaaaaaaaaaaagaaaaacaattagacaagcatcatggtgcaaccctttagtcccagctacttgggaggctgtggtgggagaccacttgagcccag

SEQ ID NO: 92966 - DNA, 2234 bp, Homo sapiens
gctctggcacccaggctggactgcggtggtgcaatctctgctcactgcaacctccgtatcccgggttcaagcgattctcctgcctcagcctcctgagtagctgggattacaggtgcacgccaccgcgcccagctaatttttttttgtatttttagtagaggtgggatttcaccatgttggtcaggctggtctagacattgttccaggcaccaggtagctagcatgtaaattaattttatggctcttggattggagatggggctggggattcaaataaataatgcataatatgctatgtaataggaagttcaatgaaaaaaagtaaagctaggacagtagggacagaaagtgaaagaggaatgttctaacccaatttactctccaggatttgactgttttactgctctctgtccttgtagtccttttcgacctttaatacctccgtatagctttgcactgacagtgtatccttgggaccatctctaccctgtggcctggattgtatatatagtactactctgcatagattttgcatataataatagcatgatgctggtagtggattttgtttttctgaactctactaatgtgtattttacaactatctatacatttttcttttttaaaaggacactgtcaagtacttttaaactgttaattgtaattttaaaaatttcctgcatgtatttatttttatttctattgactgctctttgattttctttcttggaacggaatgtaagttaaaaatgttttttatttattgtaaatgataaggctctaggaataataactgctgtttattaatactattgtttgtgaaatagtggatttatgtcaaatatatatatatatatatatatatatatattttttttttttttttttttttttttttttttgagacagagtgttgctgtgtcacccaggctggagtgcagtagtgtgatcttggttcactgcaacctccgcctcccaggttcaagcgattctcctgcctcagcctcctgagtagctgggattacaggtgcccgccaccacgcctggctaatttttgtatttttagtagagacagggtttcaccacgttggccaggctggtctcaaactcctgacctcgtgatccgccctcctcgaccatccaaagtgctgggattacaggcatgagccacgacgcccaaccttatgtcaaatattttaaataaaaattttaaaatcttaaaatagtgtataatttagatttattacctaatattgtggctttttaaagttcataccatcagtggtatgatggtaagaattgatttatttttacatagaagtatatatgaccgaatgcaaaaactagagatttaacattcaatgttattgtgttaataatgctaatgaatttcagtctatttcagtggcttaaaatgtaagtttgctagcaatttaaacttgcttgttaatgtaactgaaaattttgttggtagtttcagtgttctgacatttatgagtgcatatgacactagatcatataattaagttttaaactaagctgctgaagaataaatacacacttatttttctcatgttttctagtctctttatcatatagccacatacatgaggtatatgggtgagattttcccctcccaattttaattttctgtcataacaagtaggaattagtggggggaaatatttctttattgactgaatttgtagctaaagtaaattttatttgaggaataactttgtcaaaaatacttgctgaccatagctgctttgttgtaggaggactgacaaatggtagtggtcgatatatctctgcagcacctggagcagaagcaaaatatcgaagtgcttcaagcacttccagtctatttagctccagcagccagctctttcctccttcccggcttcggtataataggtctgatattatgccttctggccgcagtagattattggaagatttcagaaacaaccgcttcccaaaccttcagcttagagacttgattggacatatagttgagttttctcaagaccagcatggttctaggtaggtgattatgatatttctcacttcatttttgctttgaaaattgctgccttataaaagcttaaatttttctggactttagtctgcattaaagttggaagcttttaagagctaaaattcaatatggattatatgttttttctttcatgttaggataaattataaaaatacgggttttaattttttat

SEQ ID NO: 92967 - DNA, 1708 bp, Homo sapiens
tgtcatcgagtttgtagctttgtggtaaatacagataaaaacagcagttacaatataatgattgtaatgttcttgtcttatttcactttatttcataatcttattctgtagaaacatagtgatttcattggaattattttcctttatgggttttttgaaccaaaattagcacacattggattataatggaattgtttctaggtttattttctccactagattagaaacaagaaagcccaggcctttttctacaactaaaaatactcagatttcattgaatgtttgggtaattgaatttgagtggttttgtttctttgttttattgatgaatttattattgagtaaggacacttcctttttaaaaattacttggtatcctacatagattactatattaaagcattatttggctgttctcaatcagtgttttctttgttcagtgtgccaagatcatactctttagaacattgcattatgaaaatgaagttttgacagtcagttgtggagtttttgttttgtgtgtgtgtgtgtttatttgttttttaccttcccagttcttcagccctcttcccaccaccacaatgaccccatcaagagagacaataaatgtacccataatgtttgtgtaggatcagaatttattccagtattcacagcttttgaagcaagctttaagattgcataaatccttagtaatcatggtttaagagaaacaatcccagctcctataatttttcttcactccaatcagaaaggcaactggccatgaaatctcagctggaatatttaaaaggaaattcagatatggcttgctcgtttgttaacttattaccaaatgtattaaccaaaggaaagaatttaggccaaatctgacagggtcatatgacatatgcagggaaaagccaacaggttcctattaggctactcgaactcatcctactactactactcttttgcggggttaggggtaggttttttaaaatgttcttgtgtccatcagtcacaagaggaggtagttttcactaaagataaaaaattgaggcaacttttggaactatacattacccccttttgatagggtaatggaaattgacagggtgggttattgatggaaatgatgtcataactagtctgaagactatgttatgttaactaagtatgttattacttagtctgtttaaattccccttgatgaatgagggaagattgttaaataccttgtatggtgatagtctgccctttatttttttaagtttaaccagtaaagactataataaaaggtaagatttttaaaaattgctgatagaaaagaatcacaagcaatagaaacggaaacaacagatttttattttgtattttagaacacttggcttgtaatttgcatctaatgtttgcttgcatattgtcataaaattaacagttttaaggtagtacgtttgacatgtgtgtatttttataacagcctattaaaatgatgtggaagattatacttttaaatatgcccactttgtttttttaaactcattgtagtcttagtctttcctccaataaaattgttgtgtctttatatggcaaatgtatagttattataagcattctcacgcatgtgatcccagcactttgggaggccaaggcaggtggatcacgaggtcaggagatcaagaccatcctgactaacatggtgaaaccctgtctctactaaaaataa

SEQ ID NO: 92968 - DNA, 1638 bp, Homo sapiens
ttataaagataccagctttcttctagttggtctaaagattgaacgctatcaataaaattaggttttaaaaagaaattgataagctgatgcaaaaaatgaaaatggaaaagcagaaccaaaagtagtgaagacagttttgaaaagcaaagttagaaaacttaatactgctggataccagaacttagaaagctacagtaactaaaactacggtattggcacaaggataaataaatagaacagcggaacagagtagtgcatccagaaatagacctactcatttagatacctaatgaccaagttgccactccagtgtatatgagaaaaacaggtgtttcagtgacttgggcaggagtagttgaatatccaaatgagggggaatgaactttgacttctgtttcacaccacacatacacatatgcacacaaacacgctttattctcaaagaaattacgtgacttatattcatgaagttagtaagaggcagaaccaaaattttgagcccacgtttatctggcttcttccagatgttgtactgcttctcaaaggatgcttttctatttatttatttatttattcattcattcattcattcattcattcattcatttgacgaagtcttgctctgccccccaggctggagtgcaatggtgcgatttcagctcactgcagcctgtctcccaggttcaagcgattctcctgcctcagcctcctgagtagtggggattacaggcgcctgccagcacgcccagctaatttctgtatttttagtagagacgggttttcaccatgttggtcaggctggtcttgaactcctgacctcaggtgatccacttgcctcggtctcccaaagtgctgggattacaggtgtgagccaccatgcctggtcaggatgcttttatttctaatacctatccgaataaattaaaaggaccatgtttcctatgtttcacatctttgtaaactttttataaaattgtagtaaaatataatttaacctattgtgactttgtggaaaaagtgagtttgaatgtcagtgttattggcttttttgggtttttcacttgctaacaattgatctttaatccaaattaaatgctatttactttaagggtcttttaaatatttcattactaattttaagttaaaactgatcatgtacagtggctcatgcttgtaatcccagcattttgggaggctgaggcgggagtattgcttgagctcaggagttcgagaccagcctgggcaatgtggcgaaaccccgtctctattaaaaatacaaaaattagccgggtgcggtgacatgtgcctgtagtcccagccacttgagaagctgaagtgggagaatcgcttgaacccaggagacggaggttgcagtaagccgacgttatgccactgcattccagcctgggcatgacagatcgagaccctgtctcagaaaaacagaaaagaatcttgtttgtaatactttaaaatactgtaaatagtatataaatagcaagttttgtttttatttctaattactgaaagtaattgctattttatcttttctatagttttattagactcctttttagaattatgtgattaaaattgttacttattcaatattgaatatctgtgttcaatacaatattgaag

SEQ ID NO: 92969 - DNA, 1494 bp, Homo sapiens
gtaatgtgggctttgaacccagtaaaatttattgaaaggggactatgaagtctgaagaatgtcatgtattcagcaggtaaacagctgtgctttagtttgctgtggattataaaatttcctaacctgtcttccagttacagaaaattttaataataggcaagatattataaatttttagaatcattctgtttaaattgctggcctttggcagacttagtcttgtgcttctcttatgataaaatattcagagaagtaaaattagtactgcaaagttgatagtaaggccacctgccatttttctgagtttcacatacagtcattaatgaaagcagaaaacaatatgaattattcgaagcattcactgaaaatactgttatcctttagcagttacagttctctgtaactgaatagcattcgatagttttttttcttaaagcaccttcatattcatatttcatttcatcctaattgttggcatagactgtcagagtggtttgttgattaaagatgaagaaattaaagatcagttgattaatagactttcccaaaccagtgaataacagaattaaggctagcatccagttctgactcgtgatactattcttcgtttttccattatgctattctataggaactgaacaattttacaaagtatataaataacttattctaattagcctctcagaatctaatgattacctcattatggtataagttatgcttttctttggttaaagtatgtataggattaccagctttttaggttcctttctcagtttagttattcttgagatttagataaaaatacttgtctaagcacatatgttatatttgtacttcttatttgtaataagaatacttgttaatctaaggcaggcaatttagggactgtgtatagagcagcacacccgactctcaacagaatcttacttacaggttctcatgttaatataaattgaaaaacagctacaaccctctggtagacctagaagtaatttatttgctgatgagtaggaaataatgttttgaagaaattacgttactagttgtatggaagaatttgtgatgtttggttttctgtataaaaatgtcttgatcttggttgtacttgttttagattactaattttttatttattatcctttaataacattatcagtgacattgtggttctaatgtctgagaaagttttcaccagttaatttacttagttaagataatcacaaactgaagactagaaaatacttgatcccatcctgtgttttggcatcagaatcactctggccacttgtttaaaatgcctcgtagtagacttcacaaggatgtgaacagtttgcaaatgtgcggcaacagggtttgctcgttacaatgattgtggggattctattggcattaaatgcctggtagccagatgttatactttgcatagtcagcacaaaaatagtttcgtcccactgaaattttcagtagcctccacatgaaaacactgacttg

SEQ ID NO: 92970 - DNA, 7053 bp, Homo sapiens
agcacaagctggtaagtgtaactgacatttttaggataatatttttctggtgttgagataccatttttaaaatacagaattttctgggtggtttaaagaagtatctgaaatttattttacagcagcagcagcagcagctggaggaactgcaagtagccttacaggcagcacaaatggtctgtttcggccaattggcactcagccaccacagcagcagcaacagcagccaagcactaatctgcaatctaattcattttatggaagcagttctttgactaatagctcccagagtagttctttattttctcatggacctggtcaacctggaagtacatctcttggctttggaagtggtaactctttgggtgctgctataggctcagccctcagtggatttggttcatcaggtaagtttgtttttacgatgagtgtactctgctaagtggaagaggtatatgagtgtgtttaacattaaaataagcaataatagcatgtaggataggaaggacaggaataaagtattggactactggtttaatttgtaggaaaaaaaaatcctgcaaatcttttcaacactcaccaatgtttaactcactataggcagcctgttctttactcatatataatacatttcctttttccctggctctaggaattgattactgtaatttttgttttagtagggtttatttgggtcaatatattattcactaattattagctcatcttcattcactacataatgtttgtggaggcaaatattttgccgtcttaaatttttggtattttaaagcagttatctttgtgtccttattagatggtttattcttattaaatgctggtagtttattacagtttttaaatttggcctaatataaaaaatacatatgtgtatgtataaatactgaaatgttctacacagaatcccctaagaagctaccagtatggttatcttttagattaaataagttagcctttgtcactaaaaattcacttaaaagggtatctattcatgtatcttagctttatataacacttaacaaatcaaaattttaaatagcttcactaaataattgacccactcaaactggttcctggatcctgtggtagaggaagaactaagtgaaatcagaagaggcccacgttgacttcttgttgatacacttggtgttttctgtgaggtttccacagtactcaggaaacattagggaaaaaacagctgacccagttctatcggtgcagctggcagcttttacttcatgaggataggactatttggacctcaagagattttctgtttctataacataacttgctacagtccttaatatctgtttctgatctcttttcttaccacatcaaattatattcttttctggtgtggaaaatggcagaactaacacatgccaggcattattaacaatgcttgccagttttctaagggagtgtcttctgaacttttatcattcatatatacaggaaggatggtctagaacagccacaaacttttagatggcagaatcttttttcatttattgtaatgaaatacaataagtggatgtcatattggactgacacaaaattatctgaagactgctcataagaatttctgagggaaaatccagtgaacatggggattgttaaatcttttcaattttgtacttgagttttttcattgcttttggagttgtgtatctctttgtccacctcacgcactcccataggactcattccttgtttctaacacaattgggacattttctccaaagaatcctaaatattctgaggaaaactggaagaacaagtaacataaaaaacaaacttgtggaaatagtttttaaattataaattgtaggccctaaataattcagaaaaaagagagcattgattaaaccccatgtttcctttctcacgtagtatgtcactgatcgtctggttcagatttctaggcccctactcaattctttcaaatttccatttgtttcttagttaaggctgttttccccctttcaggaattgattgacatgaacattttgtccactacagatgccctgtttccccaaaactaaccttcacacctccattatttacaagcatggcttacttaattctgactccaatctgtaagagcttcattttaccttgctttagagagcattagtgattgccacccctgaatgccagtaaagagtccatcgtatctctcctcttgggcattttgtgggagttttttcaagtgctatatatatggactcttacaagtttgcacactgccttttcacattatggcaattacatacttacatgagctctaaaacataatatggttgtgtgcctgtatacacatatacaagtaacatacacagtccttctcttacctctatgatgaaattattaatgtttaacagtgttaaataccccattttatgatatagttggccaagaagcctaaacatcgtaacatataatttaaatcatcttttctatgacctgttattttttaaagtgttgttacaattgaaagtttataatttagccttttttcacagtcgatgaatgattagcagtctgtctaccctcttagatattttaggtacactttgtttcatatctcatagtcatactgttggagataatttagacatatagtaaaacttaaagagccagcttctttatatttaaggttatttctgaattatttttaaatgtttggcttgacttttcctttttggaggaaaataatattgcatgtgtcaaaactggtttcttggattatttgtcaggggaataatgctgctcttattagagctgttgtcttttcattgtcagttaaattgttttctgaaataaataggaatttaaaatgtagccatattttagaaaaatcactttgacagtgtccttttaaattagcatagttaatgtagcatacattgccagttttaccaaaaccaactcaagaataactgtttattacatgtgcttataattcacttttgcaataaaaatgcatatagacacctagtattttcttactatgatatcttaaaatgtaaaatcttcaacaaaacatgatcagtctcagaaactgcattggctggtataaaaggttgaatagcattataatcttttgcctaatgtggtagcataagcctggtttttttacccctttatagaattttgaatttggcaaaaccaacgtaattaagttttccgtctgtattatactcttaccttggtctacccatgatgtactctccttaatttttttctttataccctgtatgacctatttatatatgacttgtgcttaaataagatttaatagaaacttagatcccttgaaaagcattgccatattggtccgaatatagagcttgtcatttaaaaatgtatttggcaggttcagaaatgtggtttgaaattttcttagatgtaaaagttattcagttaaaagaggctagtgcttagaaataggaaggaaacgtacttgaatatatgggctttaagtgagacttgagaactgagagtttggacagcccttagagatgcatgctgtggaatttgattatccagacaggtgttgattaacagccagatcttgattagctcttctgagcatgtatagctcaccagggcctacatgacctttattttctgcactataaaaggaaaaaggattagaaggataatagttacatttgatattaagtaaaaatttggtatgcattgtattaagggatgtaaagtaagagaaattgtgtattatcaaatgacaaaaacctgatcagccttgagtaaggggctcaggaggcagtagtactagcatcttaggagtagaagagtcctgtgggataagtgaaagtatgtctttggtttgataacagtgagagctattaattttagaaaagtcgagttactttgtaatgtagttaaagaacaagggagaatgcgtagtgtaaaaaatactgttgagttagctgctcactgtatttcacaactgatcaatattcgggccaatatggacttaaagggctatgttttgaacacagctagatgacaaattaaatatgaatggtgaaggaaatgtactaattatttattcatataatcttttcttggcattgagttaaagtctaagaagcaggtttcagagattaggatactatcagaatttaaacttaatggaatttaatctctagcatgtcctaatgcagacaacttgcaattccagggtttataaatcataccagggtattaaagcacagtaatcagatgtgtcagtggtaaatatgtgtgaaataatgaatcatatgactgctctgttaagtatttggttctttattggggtgcatttatacccttttatgattaataagttagtatatatagttatcacagtaattatcttctccaaaatgtttctaaaaataattattgtgatcacttctgttattgcccagcgagagttggggatagattttattcagttaacactgtatgtaattagggttttttttatttcttcttcagttggcagttctgcaagtagtagtgccacaaggagagagtctctatctactagctctgacttgtacaaaagatctagtagcagcctagcacccatagggcaaccattttacaatagtctgggattttcctcctctccaagtccaataggcatgcctctgccaagccaaactccaggacattcacttacgccaccgccatcactttcatcacatggatcctcatccagtttgcatttaggtaaaaaaaaaaccaaaaccctttttatttgtatgtatacatgtatgtgtgtttgtgtgtgtgtttataatatatgtaaaatatttaatgttggttaaaacatgccaaattgcttttgcttttagatattagtcttttgaaaaagttctactttcctgaaaattcaaagtgagggtctaatgtacaataaggtaaagacccccctattgtttcttatgttttttttatgaaatataatggtgtgttttttcttgtctgtgcttttgatttgtgtgttttagagcatctgaaaagtcaactatataaacataatagtgaaagagaaatttcactatcaaaagatttgcacaccataagaaaaacattagttacatagctactgaactaggttagtacactggtttttgctttggtctttctatgcctggccattttaccagataattatttcagtgaatttgaatttagtgtatttgtcacttaaggaagcttataggcttgggccatatacttcttttttggatatgttaaagaaaaaaaatgttttaggcttgttgtacccctgaagttggagcattgagaactttgtttatatttgtatattaaaattgttcccacccccaaattattaaattggtgattaccttttttccctctccaggaagtatttatccatgtagataatacgttttgaagggctttggatatcaggggctgtgtatgaatccctatcttgtcaaagaaattatttttttaaaactttattttgaatttttataattctagttattcagctgaaactgagggattctattgccagcttttatgtaattggaaagatttaaatcagcttgtgttttaaaaagtaatgttgctactgtaagcagatgtactgtaagttagtgattatgtttgaccaccccctccaattacatgggtatagctatttaaaagaaaaaaacaaaaacaagcaaaaaaacttactaatacaataaatgtccatgtaacaaaggtatctgttgcagtgttcattttgatttacattattgcacacacactgggctagatttcttttttaaagactctggtcttccaccccaaattctgggcctttgctcatttggggtattgatactgaacatatacagccaattaatgtattcaaatggagccctaagatccactttgcagtactagatgtgtagatttacctatctttagcctaatacctttcttcatttatcatgtattcttagtcgcaggagctgctcagctcctgatttctgttattactgcccaggcatcctcccttcataagacatgcctatgaaatggacacaaaaatttggaacacaacaaatctaagacttatcataatagttttttgttttattgttaagattttgtcatgtcctgtcatcttttcataggtaagtttcagatcagattcttgttcagctcttaactgctgtgttgtgctttagtgcctgtataaatggcagtaaataggttctacacagcttgcttagaaatcggatataaatgactttttagatgtctctatgattgaacagcaatctagatatgtgcttctctacctttctttaggttgtaaagaaagcagcctaatagatgcttagggaaggaattctggtcagttgtgggaaataatcaccactgggccagcattctgcattatagactaacatagcttcagcttgaaatctgatattttaatacacctctgattggaattagcaattacctgtgttattttctttttgtgacccccagtttcccatagttttagtggtggtatgactggcaacattgttaacaacaaatagacccatgccagactgaaaataacttgaaggatttcataaattttctttttgcatactattcatggaaataatctactctgcacttccctatgaatggatcatgatgcaaggctgtccaaaaaaaagaaaaatatttctttatgaatcaagtctcaaggctgatagtataaaagacttatggaaatggaatttgcatatttttaaagtaattttactgagctcacatatcaagaatatgaaatcatgagatagagataagttctctcaattctcattagaattggttggaattaattccagattatttttctgggagattttattttaagatgtgaatgttacaaccattacagttacctgtaaggcttgagatctgcatccccaaagtatgttcctttgttagtgttagttatttgagattcacagaaaatgccc

SEQ ID NO: 92971 - DNA, 1614 bp, Homo sapiens
tattttatttttacgatgtatccttttcattgttttatttttacggtgtaccctttttattatttttacaatgtatctttttattgttttatttttacaatgtaccctttttttggtaaactctattcggtgttttaatagtcctcatttcaggttcagcttacctggctatctgtagaaataaaagctttttattttagtgattcagtcaaatatactgggcttttttcccctttgaatgcaacgtgaaaccgagagtttgacttttaaaaatacattaatacaaataaagatgtcctaaaattccactgataacattttaggacatgtttgttatgtaagtcaggaatcatgacattttattcattactttaatggtgaagcttattgtgcataaaactatttactttctaggaatcaaatattatcttgaataaagtagactagagcaggaacaatttattcttattttcctagtttcccttctatttttctttctgcttatattatctagtgctttcttgtcttgactcagtttcattttcctaaccacataaatgctgacgtctcatttgttttcttataatttgcagttgttctgtgagaatcgtgactgaaatatgaaaaatattttaaaatttaaggttttcaactcaaataccattgtagcatgcttggtaccagaatgttccccagttttgtgttatagattggaaagtaaaatattttaaaagtatcttgtaatccatctcagtagtcaaaattctctgagagaaacgatgaatgagcatttaaaaaatcttagttttatggaatctgtgttccctgaatatattatctgtatagtgtcagacccaaaaattggcattcattaaatgttgaatagatggttaagtgtcctatcagtttattggtagccttgaggttggattccttgaggatggattctcatcttttccctttaagaccattgctgtcacccatcaatactttgtcttttattataaagacatgttcttctctaagtcttcttcctgcccccttttataatctgatgataggtagctaacctcatgtctatgtaaaatctagtaactttttattcgggggtcgggtgtggggtttaggtccagcagtggttccacctcagtattacggcgttccatggggggtgtatccagccaacttatttcagcagcaagctgcagctgcggcaaataacacagccagtcagcaagcagcatcacaagctcagcctggacagcaacaggtaggccttccttctattaagtaataccaagtattctttgaaattctttgagctcctaatgtttaagatttgtgtttttcgacttacgtttcctcactgtgtaacacgactcctggcatacagttgatacgcaagtatttatgcatgggattttatttttcctaatcagtattatatgaatttaaaagatttggttatattcagtttctgtgtttctgttattttgcgatcttgaaatctctagcagtttctaaatttcttttcatcacttcatgttagtgtgttaataatgttcctatcaaaataattattccttcatatttttccaggtatttaaattacaa

SEQ ID NO: 92972 - DNA, 1357 bp, Homo sapiens
cactgaatccctagctcataatgtgactttataagattgagtgaaaaactactatttaccagtagcagttctggctctcacatttattttatgccagtctcatgctaatacatactgtgcagtcatttctttttgaatttatatttttattttctataacatacctcgagacagtacagttatgtcataatcggtattacatttaattctcacagcaattctgcaaaacagctgtttcttaaatgaaaactaatttagagttagcggtacatgcccaaggtcacttagtaaaaatttgaaccattatgcacactctgctccccacccccacaccaccccagattcagagtagaaatgtttttatctaatgaaaaaaatcatactttacattgttgtttattatttctccccttttaaaatatagctggtgtattctcagcaggccttgctccagctgcatttgtgccaaatccatacattattagtgctgctcctccagggaccgatccgtatactgcagcaggattggctgcagcagctacattagcaggtaacatactatttgttcatctttattatggttgctttttaatgtatttagttttgggtgtaagctttatttttctctatttgggcaatttgaaattcctaagaaaaactgaaacattatccagaatgaactaaagtttccaggaagttagtactatttttcaactgtaatgctacagggaaaagcttaagcaataacttttcctcgtatacgtaattggcttacatttcagctttatagttttagaaatctatatagtcaaccatgaatctccattttaatgacaaaccccattacccgcagagacaatgcaaagtaaaattacttctcagaaaataaaatagaggtaggtggcctgcatacataggtcaggggtagaatagagtaagataaacagatacagtaattctgagaaaatatgtatctaaaatttcttgagcaatgctaaaatgtacaaacaaggtgggggacaaaaagtttggatcaagttggaaagaacgtactaaaaactgcccagcctgagactaccacccagaatctgaaataaaagccaaagctggccaggtgcagtggctcacacctgtaatcctagctctttgggatgccgaagcgcctggcctgggtgacagagtgagactgtctaaaaatgaaaacaacaacaaaaaagctgtatttattgtctgtgtaagtaaggaaaagttgtgtgctgatcaggcacagtcttatttgaacaaagcgatttgctgatcttagttggggttcttgggaagagtttgttttaggttgaggtggctacaaagacagaaa

SEQ ID NO: 92973 - DNA, 1248 bp, Homo sapiens
acggggattcaccctattgtccaggctggtctcgaactcctgggctcaagtaatccacctgactcagcctcccaaagtgctgggattatagacatgagccactgcgcccagccatttctttcttattttaatgccttagagtattttaataatattggacttacgtaatctttaaagatgtggcagaactttcatgtgtgagaaacctaatataaataaatttgaaaacctagaaagcatagtgtatcaaaattgaccccacattttaactcaattccacagttaagcaaattcattattgacaatcttttttatccaaatttgcctggtcacctcttagctggccaatagctcatttagaaaaggactagtcgatagaaatatgtataatatgtaccatataatttgcagttatttagtaatcacatttttaaaaattaaaaaataggtgaaattaatttgaatattttatttagctcatatccaaaatattgcaaaatgtagtcaatatggaacttactaatgagaatttttgcattcttttctttatattgtttttgaaatatagctgatctcaagtcagctttgaatatagctgatctcaaactagtcacattttaaatgcacagtgactatatgtggaaaatttttagagtgtgagttgacaaatgtcttctgtacaaaaggctgttgaatatttaaagctttgcataccatatgggtttggtcacgaccactccactgtgctggtaaagcatgaaaatggttattagatgatgcataaatattgctatgttccagtaaaactttacttatgggtgctgaaataggaatttcaaataattttcatgtgtttgaattttatttttttgaaccatttaaaaatattaaaactattcttagctagtttgtacaaaaataggtaagacgcaggcttaacccatgtacttggccagacagaaataatagataggatagaatgaaaacaaaaagacagggttatgtagttggttggagagttcctagagtacaaggagttgagggagaatccataggggggtaaattgggaataaagccaggtgacctacagatggctagaagaggaataaacaaacaaaaaggggcctatgcagttcaggctttgggggttgagttgtagtaaccatgtaagagctcccccagctactaataaaagacctggtttggagatttgaccctatagtatgtagtttaggcaataattctga

SEQ ID NO: 92974 - DNA, 1359 bp, Homo sapiens
gccagtttttctaatgtgtaaaattgcattatatctttatgttattcagattgaagggagtaatcattaataatatttttaaaatcctcaaatcatgccagctgttaagaggaaagttatattaaatagaaaaaaatgtgataaggtggcatagtgacccagaatgccttattcattgtgttttatgaccatttgtttttcatgatttttctattttcccatttcgctatttgacttgttacttttattcataatgcttttctattttctttatgtagtcgtactcctggaagtcgtcaagcctctccaactgaagtagttgagcgcttgggccccaatactaatccctcagaaggactggggcctcttcctaatcctacagctaataaaccacttgttgaagaattttcaaatcctgaaactcagaatctggatgccatggaacaagttggtctggaatccttacagtttgactatcctggtaatcaggtaccaatggactcttcaggagctactgtaggcctttttgactacaattcccagcagcaggtaaaagcatgttctttctttaagaaggtcctcttaactgtatactggtttagcctgaagtgctatgtggcattgaaaagaatggtaggggtttttgagtactaaatgttttattgattaaagtgtcctgtatttgagaaagtcctcccaaagaaaaaatgtttaaaatgttttattcagatttctaattagaaatgaaagattttgacactaatctttgtgttaaatattttccctaatagctctttcagaggactaatgcactaacagttcaacagttaactgcagctcaacagcagcaatatgcattagcagcagctcagcagccacatataggtgagtcttcatacgttctcattttgaccaaagtcttgttaaaatgtctaggatgtttcacttttcgtttactgattggtgaggttttgttactttttgaaacatctgagatcaacaagtaataggttgtatgacaaaggtgtttattaactagggaattgtttctgattattatttgcatcactggtttaattaaataaaaatctgtaattcgataaaagttattatcacataagtttttctccaatgtgaagttgagaaagtcagacacttggaaattcaaatttacttgtgtccattatcaagtcagtatgttcatttacatttttttgtaaaatatttttttccatgaagttatttggtctttgacttttaatctgctagaattcaagcttggtacatgatgttgtctgtactaggtctccccactacctcccacaataataatatgggaataacttccctatacccttt

SEQ ID NO: 92975 - DNA, 1320 bp, Homo sapiens
agcctttggtcttagattagacagtatatatttatctatatattagggagttgtttctttgtattgattttctgtagtatttcaataatgaggtgctttggagcttgtatctgaaaatgagttgtttctttgaggtcttatgaccatggaatcttacataaaaaagtattaggtatatggtgggtggtatacttttacatttattgccttcaaaagcaaagtaacaatgcttcttaaaaacagtgccatttctatctgttctgagtgcaaaaaagcatccaaaaccagtaaacctcttttaacaagaaatacatttaatgctattcagatttagaaatttatttcgagtttgttcttcactattacctaatctaagttttagtaaaggaaatgcatgtaaaattaagtagatgataaacccttcagagtatacatttataattgaagtgttaatacaccattaactatagcaagaaaatagcaccactgatagcattactttttttcctaatgtcctctatttttgctatatacgagttactttgtgtgagaggttatacgtctcccctgaaatattaatgtggactttacatttattagcattctaattttattccattaagtttttaggtatcttttaaattactaattattttagatacagtattagttactacttgacagtattaaaatgtgttaacacaatcaacagctgtggtcatacggtcactatgccagcacatcattaatttctacattaactaatatgtcatcaatatatacattattggagtagaacagaaatgagtaaaagaactattggacacttattttttaaagaaaaattggctgattttaaagaaaatgcttttagttttatcttttcattccatatgttccaaatgaaaaaagagcctttgggatgttcacgtacaaaattaggtgtggcttaaagggaaaggagtttgaaatcttctgattttgcaaggacaaaatggttgatgtttaagtgagtgtaagtttgcttacatatctacagagaacaattcttgtaatcaagaaattgctttgtaaactactctatatgttagcaaatttattccaattcagaccacctgaagttgggaagagttagctgtagcaactggcattaaaagccaggtagaacagttactgccatttacttaatgtactcaagtttgaatatcctgtgaatgcatagttactctgaacaataaactctttcttacaaaggaaaggatcctatataaaacatttatgtataagataagctataaatgaggattgataatgggctag

SEQ ID NO: 92976 - DNA, 1890 bp, Homo sapiens
agatgtgttatttctgaggcctctgttctgttccgttgatctatatatctgttttggtaccagtaccatgctgtcttggttactgtagccttgtagtatagtttgaaatcaagtagcgtgatgtctccaactttgttctttttgcttaggattgtcttggctatgcggactcttttttggttccatatgaaatttaaagtaattttatctaattctgtgaagaaagtcagtggtagcttgatggggatagcattgaatctgtaaattaccttgggtagtatggccattttcatgatattgattattcctatctatgagcatggaatgttcttccatttgtttgtgtcctatgaagagctttatataaagattatagtaataacattcaaaataaaacaatgtgctgatttttcttacttcagtatattaatttaactacattttgtttaacttaaaagtataagtatataattgtgttttttcttccaaacagaccattcaatgtcccagcctattatggtacagagaagatctggacagggttttcatggaaacagtgaagtaaatgcaatactgtctccgcgatcagaaagtggaggccttggtgtgagcatggtagaatatgtattaagttcttctcctgctgataaattggattctcgatttaggaagggaaattttgtaagtattttgaataaagaaatatttaatatttgcttgagagttatttggttacgttacttttatttttaattcaatttgtttttctgtgcccttcctatagctaagagaaattttgtaactattattgctattcttctgcttagccacttgaaaaacgtgaaatgatagaaccattggaaatatgtataatctgaaccatgttacaaaagtcaaatcatactaatttttaaacataatctgtaaaattaaaattgcttattcctggtagtgcttgatctgaaagtaactaaacaaaatcgtctacgcattaaagaaaattttaatctagtttgtggtgttaactgcttttccagcaccgctatagttaaggttgccttagcccttctgttataaatcactagtttgtacgcaattttttggcctttgataaattaattgactacgaaattaaataagattcaatgcttttattgtttacatgcactgtagtgtagtgttaggtcaccttatggtgccttttttttgtgttctattaaatattcagaatcaaacagattctttttcctcagggcactagagatgctgaaacagatggacctgagaaaggagatcaaaaaggcaaggcttctccatttgaggaggaccaaaacagagatcttaaacaaggagatgatgatgattctaaaataaatggcagaggtttgccaaatggaatggatgccgattgcaaagattttaagtaagattttaactttctcaagaagaaaagcgtatctttttagggattattactattagttgatgtgactgatttagacattttcatcatttaggtttatttcctttgaactttgtgttaatctggacaaattttagttttttactataaagaaaatttgtgattatgaaccattttaaaaaaataatcttcaaaccagcctctgaaacagtgcattctgttgaaggagtaatgttagaagctgtgcttacttttctggtaatataatagtctaaatttgaactttttcctctctgttaaattttagtgaactgtaggtttactctgatttttttttttcccctcttgggagtgcttttgagcacctttcagtggagttttcttccttctgagtatatatgccctgcctcccatttaacttttaagaggagacaaaattagcttaggagcagtaatctttcttaaaa

SEQ ID NO: 92977 - DNA, 1026 bp, Homo sapiens
caggagtttgagaccagctgggcaatatagtgagaccctgcaccttcccaccaaaaaaaaaaaaaaaaaagaagcacacttcctttggtggcattgatttgaagacttggaaggattgatgcccatctttcgtacttttgctttttttttttttccttaaattttactttttcctttaagctctgttagacttgaatgcccatctttcagatctcatagtatcatggattatatttttgttaaagcacttttttctattctaattgccttttattaaacctgtactcttgaggacaaactgtgttgttctcggattcctcatgtatagctcattgcttagcatacaagagaatgaatcaatatttcaactgtgtaatgaacggatacatgactgaaagaaaggatataatgactaatctcctggatgcacatactgaaatggaaatgttttgatttggtttaacaaacctggccatcatttcaaaattattacagttaataaaatgataactggctaccagtatgacatttcagcctcaatagtttaaatattgagtatttatacctgtcacaaacaagtcagaggtagctggtagcttaccggttctttcaaaaaagtttccagcaaaaactatttgaatgttgcctcaaatgtattactatatttgcattccattaactctcagatcttaaatactacctttacttttcattgcaaaagtatggagaaaaaatatatcaaatgaataattttgttttaaaataaattgaaaaattttaagatagaagataatttagtttttttttaaccaagaatagaaaattctgtggtattactgatttttctggacttactcatttgtgattatagcgttatagtcgtgagttctgatctatccagtgcgtaactgtgaacttgagaagtgtttctgccaaatcgaaagtttattttattttattgttattttaatttatttatttgcagtggggagcagggtctcatgtcacccaggctggagtgcagtg

SEQ ID NO: 92978 - DNA, 1025 bp, Homo sapiens
ccattacctttagcgaacacaggaacagaaaaccaaatactgaatgttctcacttatgacgagaacacagggacacaaagaggggaacaacagacataggggcctccttgagggtagagggtgggaggagggagaggatcagaaaaaatacccatcaggtactttttttagtacctgagtaatgaaataatctgtacaccaaacccctgtgacatgaatttacctatataacaaacctgcacatgtacccccccaatctagaataaaagtttaaaaataataaaattctgtattttcatttaaaatgggggatagattaatttaaccatagaaatttttagtcttaaattgtactaggtgatcgtgactgatttatctaattgcagctcagcctagctttattagatatttgccacacccaggaaggaagtagactgtcttggtaagatagagctcccagaaagggagcagatctttaaatgttttgatttcaacttcataagtagtggggagagacttaggtctaagaaactgttaagggaaaattaactggtgtataaggagtataacatgcaggagtgacagtgttggcaaattaaagatcatagttaaatgctttttttttttcctttttaagagggtgttgctctgttgcctaggctggtgtgcagtggcatgatcttagctcgctgcagtctcaagcttttgggctaaaaagatccttctgcctcctcttcctgagtagctaggactacaggctcacaccatcacatctggctaattttttttttttcccctgagacagagtctcgctctgtggcccaggctggagtgcagtggcccagtcttggctcactgcaacctccgcctcccaggttcaagtgattctcctgcctcagcctcctgagtagctgggataataggtgctcgctaccacagcctgctaattttcatatttttcgtaaagatggagtttcgccatgttagccaggctggtctcgaaatcttacctcaggtgatctgcc

SEQ ID NO: 92979 - DNA, 2712 bp, Homo sapiens
tagatttatgttttgttgaatatttacgtgaatcttttatgatgagatttttaaaatagaaggaatacaagttatagtttacttactgggatctttgttagagcagattattgtttaaaatgtctgctctttataaataccagtcatttacagcccagggccatcctagcatttaaaaactttttttaaaaaaatggagttttttttttaattaaaacatttaaacattttaattaacattttttaattaaaacatttagtttagcaaaatatatgtaattcaggaacatgctcaaattgaatttcttctcttccctttaaagctgcctctcctggtttgttgttgttttcctattgtggtcaatagcagtaccatttacctttttagctgtttaagttattaaacaggttattctttttagttatcttccccaccatttgtattcagatccttttgactccaaggtgtctcagatccattttattttctcagctttctctgctagtaccctcttttttgtttgtttgttttttgttttttgagacagtctcactctgtcacccaggctggagtgcagtggcgcaacctccacctcctgggttcaagcatttctctgcctcagcctcccaggtagctgggattacaggcactggcaaccacgcctggctaatttttgtatttttagtagagacaaggtttcaccgtcttggccaggctggtcttgaactcctgacctcgtgatccacctgtctaggcctcccaaagtgctgggattacaggtgtgagccacctctcctggcccagtaccctcttttagttcttgctctcttggccctcttattgtaaattgccaaaattcatctccttgttctttctatttgttattcttaaaacttacaacttgagttttttgtagtacatagtgtcacccttgctaactcttctctattccctgttgcttcagtagagcatctaacttccttagcatgtctttaagggtcttcataatctgatctgccagcatctgttagctttgctagcatgaacttttgaccttcccacatgtttcatcttacaccctattctacacactgcattttctcaagttttgcgtttattaatggtttactatgtcacacacacaaacacacacatcttatctcagaccaatttcaggtattactgagttatatttattatagtttatatgtttgtgagctctctaaaggtgagcagaccatgcccttaagaggtaaacatataggtaattgagtgtgataagtttaatagaagtatacacaggttttattgttagcactgaaaagactggacacctacttaagagttgagagtgatggtgtcttatgaatgcttctttaaaatgctaagttcacttctcagaaaaccagtctgttcttctcaaacaaacatatccaagttggccacctcctaagcgacagggacagtagggagatatgaatgaatattaaagaataagaattgtccaaaatgttcattttgagtaatcagtgaatgattgtatcaacacaatttttatgtgctatgcatgtcacagtataggatagagcacagggccttgagattgtttcttttctatgcatgttttctaccatccatagctttttgttatgggtttgacagatagtactcagcagctagtaagaggtgtgaatttcacttccattgaataactgagttaaaaatgaaaaagtattttctattctagaagatatgataggaggtggtctagggagaggacttggaagtgaagggaaaagttcagtcattcctatggatgtgcttattaaatctgttactgagtaaggaatttaataagccttttgaataaatttacattgtaataaaaatgtatgaaaagtgaagaaaagtcagaagtagattttgatttttgtttaaggtctagaattactagcaccagcacacaaaaataaatggggagttaatttactattaacaaaacagcttagaaaataggtcactctgaattttcattagcattgaaaactaatgtatacatagcagtgatatgtttgagacttcttatatattaattctttgtaattagaataaaatttaactgtaatttttcctccaaatagcttttgcctaccaaaaagttttgggaacctgatgattcaacaaaagatggacaaaaaggcatatttcttggggatgatgaatggagagagactgcatggggagcttctcgtaagttactggtatatgtgtgagaattgtgaatatatttagcattttataagtcataatgcacctttttttttagagtgagtctccaaatttttgcattttttgtatagttttgcgctattgcccaggctggtctcaaataactgagctcatgcaatcctcctgccttggcctcccaaagtgctgggatggtaggcgtgagccaccacacccagccctatgcacattttcttaatggcagctaagaaatgtaattttagaagtgtttgtcacagtaagattttatcaagggtttttttttaattgattgtaaaattctgtggctattattaaaaaataagatgctggtgaggttgtggtgaaaaaggaccacttatacactactagtggaaatgtaaattagttcagccattgtggaaagcattgtgtcaattcctcagagaagtaaaaacagaattacc

SEQ ID NO: 92980 - DNA, 1013 bp, Homo sapiens
attttatatttatttatttataattattttattttttaaaagagacagggtctcacagtgttggccaggctggtctctagctcctgggctcaaactatcttctcacctccctcagtgctgggattacaggcatgagtctctgctccctgttacaacttagttttgaggatctgttcttacctcttttgaacttccattataagtagagtgactttacattctgatttgcccaggacagctcagatctatatcttctcatggcatgattattaatagcatcttttttcactaaagtatcccatttgggatgataaattatataaataatttaaaacaatttacattttaaatccttttaagtcttgggattatgtttatttggttggtttaggggttttccataacaatttaaaaagtctgaagtataggtatactcatgtaaatgcctgagtgggagtttattttatttttttttttgatgcagcatgcctgggtgctgataggtttctttggaaatggggaaagcaagccatacatttgaaggaaaagacactgtatattccctcaaacactggagttaggatagaagagcagattgataagaaacactgagttgcctgaccttcttttagagtttgtgaagtagggaactaatatgaagtggtattggataacatattttatagatcttaacggtttcttaattttgttttctgtaatgttgtatggttgctctttctactacagtaaaagattctccaggggcaaatctcctatttttattgctgttctaatcaatgcattgtttaacctttttttttcctctttaactgtgttctatcctgaattgttgccttcccctacatttagttcactttaacctattattagtcaccagctagtagatcccctaaaagtatttgagtcagtatctaaactgtcagagcaaatagtttttagaatatcagtgaaggcctttggtagagtgttaatttcaactattaaattttcct

SEQ ID NO: 92981 - DNA, 1038 bp, Homo sapiens
actgagatttctgtctctgggttctctctcccacaagcctttctatctttcctcatctcacaggcagcaaggaaccttctgggatttccttctttgcctctctctctcaccagtcttctcctcctttcctgacaggtgaggtttttttgtttttgttatatcccagaattcattcattggaataaattaaaagcagccttgagtttctggctcttaagttttctaaaaatgcttttttttttttttaatgcaaaacggtttttaaaatagattacccttgtcttgactttctttaaaaatagtttttgcttactgttgtcttaagtgttgtaaatctctaatgtacaaagtgttacatctacatgtaggactaatttcaaatttactgtgttttgtagatcatgatgtctttactgagccatcatcagaaggcatccacaaataagagatttgtattcacctattcataaacttaccctctctgtttttacactgatagcatgtttctgtcgaaagacctactgatttgcattatgtcatgtggcttaaaaagagcaaaactaatctataggagattgaactctgctttattagtgtagtgttaagtcagacacactgcataggctcatacctattagcttctctaggttgttggggcacatatagctgggtttctgcttattttttaaataacaggaaagagggccctgtctgaaattcttcagaaaatccagaatctaactttaaatcactgaattaatatcttttattttgagaatatctttatagcttagtatgataagcagtgctctctcctgtctttccaacacaataatatataaagaaagcattaaagaaagcctgtgtactaagattctatgtagtgtggtgaagtggaagacttactaggtaggggaggaaggagacttgtgttttctcctagatctctccctagtgttatgaccttgagtaagactgactgactttaaaaataataataagaataaccttttgtatgaatcacatgtatctctgaaa

SEQ ID NO: 92982 - DNA, 2328 bp, Homo sapiens
cgtgtcctctctgggattccctttcttactttccagcagctctggttgctctagactgtgtcctttggtttcttcaggccattaaggctggattcttaaaggaatttaaggaccctacttccacatctaggccttccctcgggcagaaatgccatttaaaaaaaacaaacaaccaaacaaaaaaccttactctgtgctactcctttctttaaagtatagactgttctccagtttctgggctttaattgtttttcattgccttcacatagttgttggcacacagaataattcaagaacccttgacctaatgtttttctacaggttttaaggtagattgctgtcataaactgggaaaacctgtcttccctacagaaatcagtgcttccctttctcagatcatgctaatattagtcatagcagcaatataatataaaaatagttgaagaagtctgtttaaacatttctttgtactaatttttgtttttgttattcaacaggtttgatctgtggatgaaatgaatcatgattttcaagctcttgcattagaatctcggggaatgggagaggtaaatgtttgcaaatactaagaacttacacctcactttattttgagccattgtaacttattttttttttttaaccatctcccttcctggaaatagtggtcatatcttccaaactatatggaggggtttaaatttcagattgtacaattctgttgtgatttttagctttaaaaaaaaagcttttagcagtaatttttagtgtgattatttgtgtctaggtgatttgattgacttggtgagataatttcttatattttggtaatgaactataattagctttgcttgaaaaaaactctttagccttgttctgctgttttatatatgtatgctgtgtttgctttagccatacttgttttactattctcccttccaaaaatctcttgttcacccaaaactgtttacttaacaaacttctaatcttctacaagactcgactgggatgtatctattgtctagttgctatctgccatagaattaagcccttcatctggcttctagttcttcatacagacttttattatattgctggttagtttgttttacacttgtctcccctgtaaattattagctttgaatgcctagcatagtaggcacttcgcatttcttaatggattttatcattctcgttaatctatgattttctttggagcaccaaagttaacctcatcattatatattttaaggcatcaaatacttcatttttcatatagctaatgaatacttagagaactttgattatggaaactcttgtggtgacatctgtattttgtcatgttctgtactactaacgtagactttgataatagaagataacagtgaacagacctaagatgtgtaattaactgcttgctcctggagattattttaccttggtagaatagagaccttcatgagactcactccatccaatgctgtgctcttcagatgcagaaaagagtccaagtctctcctttgggccacaagagggcaccctgcagctagctaaccctccccttcttcagaacagcgttttccaaagagtatgtcattttcagaggactgatttaagggtgagttaaggtgcttaagcttaagtattgccaaaataaatttgttagaccagtgcataaggtaaaattctcaaccctaagaaaaattgaagaaattgaattttttttgtaaacaaaatctgtagcttcactgcagtgcaatatctggttaggcattatttatgctattggcaaataagaggcagatgaaaagggcttttgttctttcctggccactacttttctttgctctttaaaaagcagaataacatatattaaaagcagggttgaacagtgcttcaaccttcttgtctatgacaaacttgaacttgctgataattctttaagagcaagagagtcaggctgggcacagtggctcacacctgtaatcccagcactttgggagtccaaggtgggcggatcacaaggtcaggagatagagaccatcctggctaatacggtgaaaccccgtctctactaaaaatacaaaaaattagccgggcgtggcggcaggcgcctgtagtcccagctactcgggaggctgaggcaggagaatggcgtgaacccgggaggcggagcttgcagtgagccgagattgcaccactgctctctggcctgggggacaaaccgagactccgtctcaaaaaaaaaaaaaaagaacaagagagtcatactcctacattaattttagactccctttatcacttcttagatgtatattgtatatatgtttt

SEQ ID NO: 92983 - DNA, 1879 bp, Homo sapiens
ctgtaggaagaaaaaaatgtggattgtattgtatgatttttataaataccaaaaatgtatacagattggaactacttgtatcttccattttcttgaccatgtcatttttaagttagtttattaagaacatctccatagtagcttatcggtagttttagcatgattacatgcaaaaacattcagttatctatgataaaacttgaatctttaaaaccaattcaacatgaacagaattatgttttgaagttgagaggatagtggctccaggttttgcctataggtgttttcttggaccacctttcaatggaagtgtaatttattactttttttccaaaggagagtcttaggtgccctcgtcttaatatctaaattatgtgcatcctacactagcaagaataggagtgctctacgctcttgctaaaggtaaattgtttgccagttctttcagaatcgtggttgagaaaatattcatggagtatggacattcagtccatttgtagtctgaatattaaaattgtgtcttttcatcacgctaaaatacctgcacaagttttttggagacagagtttcgctcttgttgcccaggctggagtacaatggcgtgatctcggctcactgcaacctccgcctcccaggttcaaccgattctcctgcctcagcctcccaagaagctgggattacaggcgcccaccaccatgcccggctaatttttgtatttttggaagagatggggtttcactgttggccaggctggtcttgaactcctgacctcaagtgatccacctgcttcatcctcccaaaatgctgggattacaggcgtgagccactgtgcctcgccccacacattttttttttgagcgttgcagatgtatcgtgccacactgtccttagatgctggtgatacggtgatatgtggtccttgtttttaagacctttataggaaagtggagagaagattaaacttgtgattacagtgcagcatgctagcctgccactgaggtggtattataaaagtgctgtggtgtgggcacgtggcccatgcctgtaatctcaacactttgggagactgaggcgggacgatcacttgagtccaggaattcaagaccagcctggccagcatagggagaccttgtctctaaaaaaattaaaaaattagtctggcatggtggcacgcacttacagtccaagctatttgggaggctgaggtgggaatgaggtgggaaggtcacttgaatccaggagactgaggctgcagtgagttgtgatcgtgccgctgcactccagactgggcgacagagggaggccctgtctccccggccccgccgcaaaaaaaaaaaaaagaaaaaagtgctgtggacacatgtaggtagagactgcagggacaggaaaagctttccacaagaggtaaagcggaatcttcttttcttttttttttttttttttttttgagacagagtctccctccgttgctctggctggagtgcagtggcactatcacaactcactgcaagctccgcctcccgggttcacgcccttctcctgcctcagcctcctgagtagctgggactacaggcgcccgccacgaagccctgctattttttttgtatttttagtagagacggggtttcaccatgttagccaggatggtctccatctcctgacctcgtgatccgccggcctcagcctcccaaagtgctgggattacaggtgtgagccactgtgcccagctgcggaatcttaaaatgttatagaagttaatttagtcccgagatgggtgaggtggcattcagccagagggattaatagccgtagtaatcctgatagggtagaatgacaagagtttaaggtgcagttatagggaggagggtgacaaaagaga

SEQ ID NO: 92984 - DNA, 1037 bp, Homo sapiens
gtcactttagaataaattctcaggcattacaaatactgtatataaattaccaaataatacttggattttgtttctctcaagcattccatacttgtttatgaatctttttttcttgtttgagacagggtctggttctgtcgcccagactgcagtgcaggtggtgagatctgggctcactgcagcctccgcgtcccgggctgcaactgttcttccacctgagccttccgagtaactgtagctgggggtacaggcgcacgccaccacgcccggctaatttttgcattttttgtagagacagggtctcactgtgtttcctgggctgaactccgatctcaagcgatcctcccgcctcgccctcccagagtgccgggattacaggcgtgagccaccacacccggcttgtttataaacctttctggtgtggaaagataatttgccttccggagtaggtacttatcttagttaacaaaagtaattatgaccagagatttgggccaggtgtgaaatccacagccaattttctcagtgaccaagctgtctcctttttatagaccctaacatgatctgcatagttttaagtggaggttgattcctgtctcctaaactcaagttctacatacgtcctaacttaaataccttgttgggtttccaggatatggaaatacttgtattttttcatattcttaaaatttacagatatttaaaatatccgaatatttgagtctcacatggctttgtctacatggctgcaatcacagcttgagaccattttactaacaggtgtgattaagataaaaattacacttatagccaggtaaattggtctgtggcatattaagatttcttgctttttttctttattattattattattattattaatttttaatataggtgaggtcttgctgtgttgcccaggctggtctcaaactcctgggctcaagcagttctcccgccttggcctcccaaaatgttggtattaaaagcatgagccccggtgccagacccttgctgtttttaggaaatgcattaaaata

SEQ ID NO: 92985 - DNA, 1986 bp, Homo sapiens
gtccggctcttgtgggcgccagcactctggaagcgaaatgccaggagtaccccacggtgggcggcgcgggcgcagacacccgcacacccagttgggggaaaacagtgagcaaccgggtaggaagccgagggtaagaagattcagaaggcgaggccccacgcgggaagacagtcgaacacagcgtttggcaacagtacgcctgcgctctccgagcccgccgcggcggagcccaggagggaagcgcgagcccgcaaggtgagggcgggggagggcacgccggagaggcggccaaacacgtgagagcgcggagaacgtgcgcacgcgcagggcgcccccggcccgcgcggcggcagcgcgggagcagggacgcaaggcattaaaaggagccgcgccttggtgagcgctccccctcccctttctcccggggtgcactgcgcgcgcccggtgggcgggggggaggggagggcaggcggcggtggcagccatgttgttgtgagtctctgtgtctcaccctcggtacttcggtggttcggaggaggagggggaggagaaggaggaggtggggtggggggggagggtggtaggtggagaaagaagacattgccgccaccgaaggcggaggagggggaggaccgccaagagcgacgccgccgtgtgcccaacggtcggtgtccccggctgaggcagcgcggccgcagcagccctgtaagtcagtccgcgttcgctctttctccggtcctttggcgccgtcgaggatggctccccaggctttgtgcggcggcctcggcgggagccgatcgccagcgggagggcggatagggcctgctgagtgcccgggccggtgcggcctggggcccgctcgcacaatgcagggggaggggtgccggaagggggtgtgcgcgtgcgggggagggggcgccgcgccggccgctttcccgcttccttccctctgcggggccgccgcctcgggggcgtggggcgccgacccggttctccctccgattcggcgcgctggaggttagagaccgagctgtcggccctagggttcggaaagaggggagaggccgggtggccccagagaagcatgcggattgcaagtgggtgaagaggaaggagtgggtttatgaaaacaagtgtgggcattttcaaaggcccgagtgtgtccgggaaaagcttgccgtggacagatgtgggtatgaagcagtgacttggattcgccttgtttaggttataggaacggatttcgatattcagaaaaatatgtaaattaaaaccaaagacaagattagcggcttctactatttgagcagtagttttgtatctgaattgggtcaggttttggggaaaatgtttaaagtttcatgcccaaacacgtgtaaaagttagtgttgtttctgaaaacacagccagagaaaacctacttaacttagctttttattctaacatacgtaaacttttgaagagaggaatgtattgccagcatattaggtgcaataagacatcatgttaggacttagtactttgagatttttacttgttgagaaaacggggcagatgttttggtgaaggaaaacatgagaaaaatgcttgtaaacggtgaagagaaatgtaatacctgtaaaggtactgtatgtcaagaaaacaattttaataaagggagttaccgaaggattttaaaagcttgtttaatggttagatttcgtgtttaacaggtgactcttcaccatgtgacctggagtattggaagatgacttaaggaatcctgtaaataaaaaaaaaaaaacaaaaatgagtattttcaacttgtttctcttcctagcctccttttaaacaatgatttacttcatttgctcaatcattatgaataaaaatgatggcattttccgtgctgcaagaatttctttaaaattccgatttttggtgaaattgcattgtgtagaattttcttggtgtgcatgagggcagtttttgtatgcagaaaaggtt

SEQ ID NO: 92986 - DNA, 1036 bp, Homo sapiens
ctcaggtttaatgcacttttcattcattcctcagaatgaactgaatgtctgttcaatacatttattgggggactctaggtcagctgggggctgaggctgcaacagtgtgaaccgatccaagtgcccaaaacctctgtgtctagacccttccctgcctatcttctccattgggcctcacccatgcagaggccgagcagtgaggagtcccattttacagacccccagtgattccccatttccagttgcagaagccaagggttgcagtagaagccccagtgtagtggccctcagtctgggccagagtcctgagaacccaggaactaggcagggttggggcagtgggtcctgaaatactccagctggattgatcagggagtagcagactaatgagatctttaacttctctgcctcctgtctgtggttgctcctgctgagaattcttctccttcctagctacctgaatctcttccattcttcaaggagagcccagcttctggtcctcctcattccagaagctttggtgatcactccactcttctcccagccctgccagcccccttgtacctctgctgctctgattctaattaatgaccctcacagcctcccagcccatctgcctgaatgagtgtctaggctgtggggggggggggggggcgtgagctcaggaggaggggcacctggcctgactcatcccccagggcgtggcacaactccttgctgctgggatgagctcaccactgtgctgtggagcttgtcctggtcacctgagcaatgcctccctggctaacatgtgcccccttctccctgaccctgcagcagaacctggtgtgggcactagtgagggccatcccccctggtcaccagcctgtatatcctggtcaacctcagttacctgctagtgctatcacccagtgagaccctctctgctgacgctatggctgtgaactgggggtgactgcatcacacggtgtgtcctttggacaccgagcagactttccaggctggggaaggaaagtgctccctgtgtatttaaact

SEQ ID NO: 92987 - DNA, 1990 bp, Homo sapiens
agctgttgtcttgtatgctcagcgaggcccggagagacccgggagagagctaggccgagtccaccgcccgagtctgctgcccgagcccgcgttacgcacaaagccgccgatccccggcctggggtgagcagagcgaccaccgcccgggagcagcgcggcgagacgcacggtgcgccctatgcccccgcgcccccaccgcccccgccgcggcagccgaagcgcagcgagagaacgcgccaccgcggggcccgggtgcagctagcgaccctctcgccacctgcgcgcagcccgaggtgagcagtgagcggcgagcgggagggcagcgaggcgttcgcgggccccctcctgctgcccgggcccggcccgctcatggcggccatccgcaagaagctggtggtggtgggcgacggcgcgtgtggcaagacgtgcctgctgatcgtgttcagtaaggacgagttccccgaggtgtacgtgcccaccgtcttcgagaactatgtggccgacattgaggtggacggcaagcaggtggagctggcgctgtgggacacggcgggccaggaggactacgaccgcctgcggccgctctcctacccggacaccgacgtcattctcatgtgcttctcggtggacagcccggactcgctggagaacatccccgagaagtgggtccccgaggtgaagcacttctgtcccaatgtgcccatcatcctggtggccaacaaaaaagacctgcgcagcgacgagcatgtccgcacagagctggcccgcatgaagcaggaacccgtgcgcacggatgacggccgcgccatggccgtgcgcatccaagcctacgactacctcgagtgctctgccaagaccaaggaaggcgtgcgcgaggtcttcgagacggccacgcgcgccgcgctgcagaagcgctacggctcccagaacggctgcatcaactgctgcaaggtgctatgagggccgcgcccgtcgcgcctgcccctgccggcacggctccccctcctggaccagtcccccgcgagcccggagaaggggagacccgtgtcccacaaggaccccaccggcctgcctggcatctgtctgctgacgcctctggcttgcgccaggacttggcgtgggcaccgggcgcccccatcccagtgtctgtgtgcgtccagctgtgttgcacaggcctgggctccccactgagtgccaagggtcccctgagcatgcttttctgaagagccgggcctcagagtgtgtggctgtgtgtctgttcgactcccctcgccccattttcaccccacccccgcctctgatccccgggggcgagattggcgcgggagtgtggccgcgccccatcagatgttcgcccttcaccagcgggagcttgatatcccttgtctgtaacatagaccccgggtactgcgggaggggagggctgctggggaggatggggggatgttatataaatatagatataattttattttcggagctaagatggtgttatttaagggtggtgatgggtgagcgctctggcccaggctgggccagactcccgcccaagcatgaacaggacttgaccatctttccaacccctggggaagacatttgcaactgacttggggaggacacagcttcagcacagcctctcctgcgggccagcccgctgcgaaccctccaccagctaccggagggaggagggaggatgcgctgtggggttgtttttgccataagcgaactttgtgcctgtcctagaagtgaaaattgttcagtccaagaaactgatgttatttgatttatttaaaggctaaaatttgtttttttattctttgcacaattgtttcattgtttgacacttaatgcactcgtcatttgcatacgacagtagcattctgaccacacttgtacgctgtaacctcatctacttctgatgtttttaaaaaatgacttttaacaaggagagggaaaagaaacccactaaattttgctttgtttccttgaa

SEQ ID NO: 92988 - DNA, 1029 bp, Homo sapiens
caagtgtcagaggaagctgggaagttttggatcctggattgagaaactggcctgtgtttttaactctaggagtcatgatctgaatgtgaaattccaagggctacaaacacagaccatgggcttttatgactctgggtgacctctatcctctggctgtcatttggggatatttttcttctccttttaatcctgaaaaggaaagaaaaaatgttacaagaagcaagttactcatcactttgttaaggattgattccatttaattccagagcttgtttgacccttggataaacaattgaaaccttctggaggtacctaaaaggaatgcaagaatgcatttgccatttaatggtagaaaaattttaaatgggattctgatagtataaaaaatagtatttgtataagtgcttaaaaaatcacttgtaaaatatacgctcttcaataatggccaaatatgggaaactctgatgtttggtcacataaccaggctgattttgcaaatgggaagatccatctatccccatttacttaggttgagcaatcttctggctacaaatttcctccaaagatgtctagaatcattggccaaatggagatccagactaaatgcataagatagcaccaacataagttagccagcttgggttctctgaggtgggtttagccatgccaaaggagaattgttcaaagttttaactttatgggtaatggtagaagttacggattatatagtttgtcacctgccaaatctgcaagaacaaataaagatgaaatgcaatgaatgtataaacaactcaaagggaaaaagtgctaaccaggtttagaaagccaagagtttcctagcaggctgatatgacctaatctctttccatgacatactgaccaactggtgagtaatttcaccagtaaactaagaagtcagaatgtcaagcacgaccatgaagggggtaactggaggcagaagcagctgagccccagattcaccctgggcctctgcaaccttctcatccccagctaggtaatagaagagat

SEQ ID NO: 92989 - DNA, 1968 bp, Homo sapiens
ctggcattgcctggggtcttgttcctgtcacggggtggcagtgttatgctcagggttcctccctgtggttccctagagttgaagaggacttggaccagattctgaacctgggagctgagcccaaacccaagccccagcttaagcccaagccaccagtggcagctaagccggtgatacccagaaaaccagctgttccccccaaagcgggcccggctgaagctgtggctgggcagcagaagccgcaggagcagatccaagccatggacgagatggacatcttgcagtacatccaggaccacgatacaccagcccaggccgcccccagcctcttctgacccttccatgctggcccctggcccagcaggcctgtctgtggggacatcggtgtgaagggaagggactgggccctgcagggtcagaacctccccacccccaggggaggccaggcagaagcctgggtcacagcacccagaactgcatggttccattttctccggggctgtggggccaaagtagaagcctgcgggctgcgggagcggctctcaccctaggagccagagcccaatgtgtcttattccccgtggacatgaaggggagggagggtgtggggatgccttgccaaccagaagcccagccccaaggatgaagcaagacatgtggggccgtagcgaggtgtcacatggggcagggaagcttcatgcccacgggttctgccagccccagcacagacccaaactggggctgggcctctatccctcctctgcctctgttcgcatagtaagaaggagtgaccggtatcctccccttcccctaccctaagctgtagcctgggtgactgactggcctgggcctggggtggggacgtccccaagccaaattactccagggcctctgctcctcgtggctgccaggggcctgcagggtctgggtgggtctcccaggagaggaatactgagtgggagatcggctgtctggagtgttctgatgcaagtctctctctcctgagcctcctcttgatgcaagctctaaagggagaagtcaggccctgcctctccagggtatagacggccctgctaggccccagttcttcctccttccccctttcccaggaaaggccagcccagtccatggccttcttgggcctctgggcacagagccaatgttcgtcattgcagctctcagcaaactgggtcatagctttccccacagctcagcctggggcctgggcagggctcccagcctgcaccgcctcccactgccagtggggcatgattctctcaggcttctgccccgaggccttcgtcgtcctcagggtctggacttggtcagtggcctttcaccagtggagctgccttcccagggagaaggagccgtgcgccagggcagggcccgtgccttagacttctcccgacccccagagcgctggtacacaggtctaggcaccacacagtgctttggaaattctcagtgaatgatgtttaataaagcaaaaaatgtcaaggtgtctttcttggatataattcttcatgttcagagctagttttttgttttgttttgttttgttttttaatgaaacagtagttttaaaggaaatgcaaccactattgctccttggccctgtcctgcctggcagaagcattgagcgggtgggactaggacctcagacccttttctgatagacaccaaagccagccctgagggagcccccggctgatggtgcgggtggtttgcagccatcagtgttgagtgtctcagctcctggcccgtgccaggacctgtctgctctgtcctgcatctgatcacgtccctctccagctgtggcgccctgtcctgagcagcttcccctccaccagtgctagagtgagaggaaacaggtggttttggggtcgagagctgactccctcctcctccgtcttaacccaggctcagagggtcagctccctccccagggctctgagccagctctgg

SEQ ID NO: 92990 - DNA, 1011 bp, Homo sapiens
tggggtttgtgccccatcacaggaggttgagccaggaagcaggcagggtgtccggagctccttccacagctggctccaggcaggcatccacccctgggggtgctgtgctggacacctccatactcacacaggctctctggtagtgccaggagttgtcctgatcagaggtatcgcctctctatccccacccctgcccggccctgccccagggcaagaagccgctgctcatgagcctgcctggttcttcctgttcattctcattcccacctccagacctctgctgtctgctcccttcttcagaattctctcccctattcatgccaggctcacccttctgaaaagacccaccttcccaggaggccttcccagcctgctctggcccaagggctcactcccttctctggacttcaacaccttctttccaggcctttgcaattatgtggcccctgtctgactgggctggggggtgtccctcattgtaggtggaggcactgcttttctgtgtcttatgcccacttgctcagcccctgtggctgtcagtagacatcagtacatacagccttcctgtacatttggaaactactttccttgtgttgtcttatttgatccttgtaagaatccctgtgaggatggtagagcaagtacaatcccactttatagaagagactgaggaccagggaggaggagtggcctgaggctgcctgatggaggagttgcagggtgaggaacggaagccagttctcctcctgcagtgctgtgcttctgtgtacagttccgtgcagcagtgccagtgacactgttactcctgcttgtagatgaggaagccgaagcttgtagagaccaagtgggtgctacaggtcttctgccttcactcacctgattccagcatggctgagcgatagacgtagagatgcccgttagcacaagggaaaacctcgccgtgacactggagtctaggtgccccagccaggggaacacaccccagagaaccagccacatgcaggccaagtc

SEQ ID NO: 92991 - DNA, 1044 bp, Homo sapiens
tcattgcccagtctcagccccagcctcctctgaggggaggaccccaggcctgtgaaaagtagaagcctgtgggtgcacattgggtgagaggcggtgaagggggctgagggggaggatccgcagcccagggctgctcagctagttccagaaagagagaactttgtgtgcacaaccagtctttcttttcacaatcatattttaacagtttatgtaaagaataattaaattatataattgcaagagcaggtataactggcataagcaagtttgggaacaaattaaacggactcatggcagcatgcagcccacccagcgagggggcaaagtgcagatgtcttggtgatggcctctctgccggagggcccggtcggcagctttcacagaaggaagggagaatgaggcctcagctgtcacatggaggtcaattggcagaacctgtgccggtgacagctcctatttcctgagtccttgctgtgtacgcagtaagccagactccttacacgctctcttatgtaatcttcacgacagccccctaaggtggatgctattttctccatattataagaaatcaagtgtgggacgccacctggctaagacccctgctctgcccctggcctggcctctccacttcatcagggactgtctgagcacttggctgggtgatctgcctccccacccagccccccagttctccccaggcctttacctccactggccacattctcagcagactcagtgttgtgcgtgtctccagctcccactccatgctccaggacacaggactgtgcctgggattcagaggaagccaggccgcctctttccaggaacggcttatgtgacaccaaggcatgcaggccctggaggctgtcatctgtacccctcattagcagcctcgggctattagacagccctgcaagtgcccgccaagcctgagtcaccgtgacggcttctggtatttacatgtccccaaggcccctggcatctgttcactctcatcctgtgtcctcgctcctgacatcccagcgggctggaagaaaccaggat

SEQ ID NO: 92992 - DNA, 1131 bp, Homo sapiens
acgatgaactgagttatgtaaatttagcaatcagctaccatcatggccccatctttcagtggaatcagaccaggccaggggtgctgtcctccccgctctctaccacaacgaatgtctcttagccgtttaccaaagccctcgggcgccagatgagtgtaggtcctgccgcagaaaggaattagagcccagtagaaattaggcagaagcaagttcaacttcatcagcatgtagaattctctcctaaaatcacagcccactctggaaaggccttcttcgtggggagggttatgggagggtgggctgcagggtggccatgagaccagcgtccaggggtgaggatttgcactgggaaagggtacgcggcgctcagggagctgcagcagaaacaggcctgagatctggggtcctgcggcacctgggcacagcaagtgccctgcagtcgctcctcctggccctccgtggctggccttgtccctgagtggggtcagcggccctgagggagaggcagccagagtagtgggtgatatggggacaagcctgtaatagtcactccttatcagcctggcccaacgcggcaggcctttcttgggctttattttggtaagggtgaggctttgtttgaactcacattctctgttgttctgagtaaccacacgtagtgccaaaccgagatggactttggtggtctgtgccaacctttggctgaagaacacacttagccgagcggctccttttttgggtaggaaaatgttctttgtggctggcaagtgctgccttgaacttcctacttacttcattagcagattgtcaggggagatgtgtcagctatcctgggaccccttggcggggcggggggggcgggggcagccccctccccagctctgtactctggggccctcacccctgaatcctgggaaagcttagcacctaagagtaatcctgccggcttaagaccctcccctgctggggtttctttttaaggacccgtgtgacaaggtgctgatgaatcaacgttatcacctctgtcaggaataataagtaaattttttgagagtttatgaaatgctgggaactaagttagcatttgcttgcatgatctcattatatctgtaagacagcatttctgaaact

SEQ ID NO: 92993 - DNA, 1044 bp, Homo sapiens
tcccagcccctctctggtggagaggcaggatagaaacacaagctgctctatgcctcactttgctcatctgcaagatggatgtacagtagggatctctctcatagggcttttgtgatgtttaaatgtaagatgcttatgacatgaaattgaaggtttgggagattttgaatggcttttcacatttgtccaagtaaaataacagagcatcacataatacgatatcgtcattatcactcagtgcatcctgtatgccagacactctctaagttctttacctacaaggtgattttattaaaagtcagttgttttaaactacccagtaagcacttggatagaaatgaacaaatagtctgagcccacgcttctcaaactatctgtggcaagggctagctcttttattcccagcctgtcacagatggatactttcacaaatacaaaagcacacttgggtattgtgatgatggcagcatgctatgaagtttctggatgcttgctctccctttctctacttacctcattgtggtcacacagggggcattctctgtctgaagaccacacttcaagaagcgctcatctaagccagtttgtaatggagtgattaccgtttgttctggaatcttccacatgcttaccctgggcacccatccagtccacagtccaggtgcccagactctcggggcaggtctctgtctgcagagttccttgccgtgcctccaactgtaaatggttctggctgtactggttctttttgaatcaccctgtgccctggctgttgtatcccaccgctcacccgggaggagggtgcagccatccctgcggcgcacacaggctctgggccttgggttcaggaaccgctgcccctgtcttgctctgaagctcccacttgtgaccactccactccaggcttccttggtgcccgtcagcccttggggggctgcagcaggcacttggctgcccccgaaacggaggtcaccttccatccacccagactcgccatcctgcttaggtcccaggagggacgagtttggtcccaggaggctgcag

SEQ ID NO: 92994 - DNA, 1036 bp, Homo sapiens
agcctggatatgctgggtctgtggtctgagcctgaggggagcagtcgggccagcagggggcgcccggcccccaccgtggcctgctctgcgggccgggctggagtcacagctgctgtcggagcctgtgttagcaatcgctctgggaaggggtccgtgtgcctttccctgagggctgttttcaggaaagtctggagccaggctcttgtgctgacaactgcaagcagcacctgtcccaggtgactccccactggaggttctgaaatccccccagctgcctcctggtatcttgacccttcacaggctgggcattctgggtggtgttgctggagccaaggatgtgtgttccagacacaccctgcaccaagggatctccccgagcccgagggcgtcagatgcccgcagcccctgcacgccagcactccagtggcacactgtgggcacagtccgggcctgggagcataagagtgagtgacccacacttcagtcgggggagacaggcccagtctatggggaaagcacagaggagcgaggagtgagggtaggtgccaggatgatggtgtgtgcatacagcaggtgatagaggagctaggagtgagggtaggtgccaggccgatggtgtgtgtatacagcaggtgacttcgctgagcacccacatggttacagacacggcgatggcactgaaaccactgtgagactgagagcctgctggggtgtctctgtacagagtgaacatgcagcaagagctccgtgagtgaaggggtgaaggcttagctgcccaggagctgtggggagaggccaaggaggcagcgggagtcagccgctggccccacgggaagctgagtgctgccctctctgagtcagatggtgctcaaggctgccttctgatgacagcaagagtcctggcctgcttgactcgggtgcctgcgtgcagagaggtcctgcctgacgcagggcagagaacaagccttggaaatatctgtctccactgcttgcattggctggcccgccgaaggccacactggttcacgggagaatg

SEQ ID NO: 92995 - DNA, 1054 bp, Homo sapiens
gacctgttgaaagagacactaaattttaagagaaatttacagcacaaatgtttcctttttttaagagataggatctccctctgttccccagactggagtgcagtagtgtgatcatagctcagtgcagcctggaactcctgggctcaagcaatcctcctgcctcagcctcctaagtatctaggactacaggcacacaccaccatgcccagctttttcttttttaatttttttggtagacatagtgtcttgttatgttgtccaggctggtctcaaactcctcaagctgggcttaagcaatcctcctgcctcagcctcccaaagtgctgggattacaggtgtgaacccccacgcccagccacacaattttaagggacattcaacaacgtcatgagaagcgtctagaatagcaatgctgtttttcatttgattgctcctgtggccgactcttggtgagaagcaacgtgtgatgtcaggggtgattctgggcctgcattgctctgagagtgaatctgctttacagggtgctttgcagctcctggtaatttgacttgatccaggttggagctcaatgcacccacattttcagagacaggagcagaagaggagagtatttgagcttgatgttgcggggcatgaaggagggagcattctgggaagcttgggcttcagccgcccagcccacttggttctgtgcagagggccggccttacatgcaaggtgtacatgagggtgttttaacacctccatgaatcacactagtgccactttttcctaggcagtgacgcccactcctcgtggagtgtgtgcgtgcaggggcttgtcagacatttgaaagtacttgcgagggcaaagaactcctttactccccatgggatctcaggatggagcctaaagttacatacccccaagcctgaagtctctttgatgtttcatgaattaactcaaagaattaatgagcattttgtatctacttaaaagggcatatgtgttttaatataaacgtgtactgatttgctgaccatggagtaaaacagccgcaggagggggcaccgca

SEQ ID NO: 92996 - DNA, 1082 bp, Homo sapiens
ccgaaaatctagttccccatcctttcagagctccctgagtcccaggcccggtgctgggcactggggacagaggcgaatcagacaagctcgccctgcagggggctgcagcggagagggggtgatgccagcagcgggtagtaagctcaggttgccatgggaacacagtacagggcaggaacccggtttctgggaggatgagtttgatgagagaccagggagaggtcgttgctgcttgcgaggcagctcaggagagcgcaagttacagcaaaagccttggaggggtccaggcggaggatgcagaatgggtcggccctgatcgagacctggaggacccagcccaaggtggatcctggcaaggctgggaggcacgtgcttttacttctttccgcctttaaaacgctgtaaagtgatttacttcaaatattttcatacacttcacccttgctctccctacacaaagtcttaggctaagatgccaatttatgacataaatgaacgtgttacccagccaactgttgatcttccagttgtaatcaggaattccccgtgacttcaggtctagaaaggtatgattccttttgtaaaccctgatgtcggaggctgcttggtctttcatgatcaagtgtggttacagttgtatcttcatgggcagaagaggtttccctactgccacttacgtcacctcctctcaccaagcctcagtttccttttctgtgaattggaggtttcagattggcaggcatgagcaacgtcagtagtatatgcccctcagccatgtgcagatggatggggtgtgactttggtgctgggtgcttgggatggggtgggtggcttccctccctgccccgctgcacagcctggacgtggcttgttaacagatgtgggggcgctggcggtggtaaggccacatgagtcaggctcatttcttgctgagggcaccagcacacccaaggatcttgcctgcagggtgagtccaaacgccttagcccagcagcaaggccggcccttcccagtcgcaccccagctcctctttccagcccgatctcctcccacatgtcattgccacatgcactcaagcttga

SEQ ID NO: 92997 - DNA, 1039 bp, Homo sapiens
catgaacccagcttctctgttgcaacccccagctggaatctccagtcaccatggatgggagaactgacaggcagggagaaagcatgtcaagactgtgaggaaaggctgtcccctcaaccccaacctgaggtcaccaaagtctccctcctaaagtaaacagaattttccattttgtagggagaattgtgcactactagttgacatcacttgaaccaggatttcctgctagtgagtaggatttggcatccctacttagggagctcgggacaggccagctggggcccaacgggggctggtgctgggtctgtcaaacacaatgatagcctggtcactgctgcttgaaaccagggctttcgtattaaggaggatcacccacactggcaggcgggcatttccactgattcccaaacacacttgccttgttgaattctgactttccaaacagccgcactgggtcttccagagaaggtggcaggctttgctgtgttagcttggggaagccaggcttgagctgtgctcagtcattgtatccatgctccccttcaccataccctcctggcaacgatatgaggtgtggattgtgtgatagaagaatccagactccacgaagccaaggacagtcacttctccctggcagctctcatggtgtcggcaggagtgggcgcctcaccttgggtactgaagagagtaccgataatcccgtggatggaacaggagggagtgtaattcaatccctacacattgtatatgctgttggcaatttcatttaaactcacagcagaaaacaaccaggatttgtagactgattttcttcttagagcagggagaaaaattacgttctttccaagagcagctcgtgcacagataaggtcagacttttcctgtgcttgaatctggtctccaggaaatccagtggcaggaagagagtgtcctgaggctgcctctgggggcacagaatcactgggcctcgctgattctcatgagaacctgtcatctcagtgagacaggcctcccactggccctcagtgggccataggcc

SEQ ID NO: 92998 - DNA, 1038 bp, Homo sapiens
caagtataacctaaaattcaggaatgaaggaaaaggtttttttgtttgtttttgtttttgtttttcggtcagtgttaggatttaggacaagaggtgattagtgtggtactaggatataatctctggtttagaagttaatagcgcaatgaatatcttattttttctaaagaaatttttatatttcaaaattaacgccagtctaaaaagttgcattattttttaaaatcatacaacacctccagttgtttttcactttggtgaactcagtgtcgcttaggtaagattatctgtttgcagactaaattgattatcgtaatgaccacagtcctggcttatagagaaatacataataaactatgttgactacgaaacatttctccaaattatgcagaaagtttagaatgggagaattatttttttaggtctagttttcactttgttgcaacttggcaccattggaaaggtggaaaacaacctggaaataaataaataaccgctgaagaattttcccttggaagaaggtttcatctgggtttctaagactatctggtcctacttaaccttttgacaaaccctgctggtatagcctttctgagtacccagccttactctgcctacagctgtgttggcatgtggggctgctcatgtctccagaatcttctagtcttgcagctcgtcctcaaccctaaattttgttcccacacagccctgcttgacttgaaccttcctaacttccctacactcagcacatcttgccagcctcaggaatagtcagaatatgtgctaggaggagctttcctgtgaaaggctctttttcagtcagctcctaccctgcctcctctcaggcaagccctggatatgtgcagatgccactttctcccccactcaagtaccagagcctgataggcagttaagcacatcagcccttgtgctgtgaccaaaaacacccagaatattcaaaggccctatttctattcacttttatcatctgggattgagtttgactatagataacagaaaaccaaattacagtggcct

SEQ ID NO: 92999 - DNA, 1770 bp, Homo sapiens
tacaatttcgtctgattcttcattgtcttttcctctgagttttatatttgttgtgctgtctttcatgttagaggctttacctaatatctgtcaatctgttgtttctttatagtaaggaagtttttccccctgaaatcaatggatgaatgggaattatatttttaagttattagaataagttaaaaatgtgtaaatagaataaatgcatttgcagggcatttactctcataagactgagggagagcatatgtgtgtattgtggcttattgttacaactatctcctagattcattgaagatagaagttacgtttgtttcatagtctcctcattggcttgtagcaatttttcaaaagaaggaaggaaacatttttaccttacaataaaagtctgaaaccacatattttatggtgatctataggaggactaactggaaccagtcacagggtactgtccctaacagaatgtgcatctttcatgcagtaattatattttactagtggaaactacattccaggaaacctttacataaaggttttacaatgttgaaaataaaagatatgctttttacctttaaaaagaaaggtggaacttaattgagaatattatagaattatttcaaaatcagactgcttttaaaaaaacttcaacttttattttagataccgggggtacatgtgcaggtttgtcaaacgggaatattgcatgatgttgaggtttgcgatacagatcctgtgacccaggtagtgagcatagtacccaataggtagtttttcaatccccccatcctcaagtggtccatagtgtttattgttcccatatttatgtccatatgtgctcaatgtttaacttccttttgcaggtgagaacatgcagcatttggttttctgttcctgcattaatttggttaggataatggcctccagctccatccatgttgctgcaaaggacatgatttcattcttttttatggctgcatagtagtccatggagtatatgtaccatattttctttatccagtctaccactgatgggcatgtgggttgtttccatgcctttgttattgtgaatagcacaacaatgaacataagtgcatgtgtctttttggtagaatgacaaagttagtctttgatttaatggtgacaaatgtgcttaattacttaatgcaaactttgctgtatgcatttgaaaagcgtcagttagttctatcaattggaaatattagctgtacttactgaacaactgtctagagccattgagttaggtgaatttcttggttactgactaacacagagtatatgatcctcagtttcatcatagagcatattcagataccgtggaggcacttttgatggacaaaggctatcagcaatgctatccagtcccattagggaagttaagagtctccccagagtctgttgtcctttctctgagctctgcagaagctgagacctcagaagtttagtaaggcagcccgggcacagtggctcacgcctgtaatcccaacactttgggaggctgaggcaggtggatcacctgaggtcaggagttcgaaaccagcctagcctatgtggtgaaaccccgtctctactaaaagtacaaaaatcagctgggtgtgatggcatgtgcctgcaatcccagctactacggaggatgaggtggaagaattgcctgaacccaggaggtggtggttgcagtgagctgagattgcaccatggcactccagtctgggcgacagaatgagactttgtttcaaaaaaaaaaaaaaaaaa

SEQ ID NO: 93000 - DNA, 1050 bp, Homo sapiens
ctcttatcaaccctctatatgttaaaaatgtgtcacctgattttgccagtaaatctttttcataaagttcaagtttgggagttgagttgaaagcccttgattcttcactgagtcttggggtgaactttaattaatataactttaattttcctctaagaatttatataacctttaatgataacatgttctcctcttcgaaggatatcagatccttcacaaacttaattttttatattatttggccttctgtgcataataacacagagtttcctttgtcttctggttagcaaaaatgtcttctctctgaatgaaatttctggattacttaaactcactctcttaagtaccagactattttacccaactggataaaaatttgtctaaaatatattacttacttatctgccttcagcaatgcatattgactatagaggaattttttcttagtgatttaagggcagtggtaataacactattattttgatagtgttatgctagaataaaatgtaatcaaaaggaatgtgcctgtgtcctgaaatttcttaggtgataatgctttttcattttttaaaaaaaatgtttcatgtatgtctattttagtttttctatctcctctctcagtgttaagtacttcttctcttccctacttctaatttattgctactaatttgctgtgggcagagaaaaccagtaactacattataatttttttcagtaggaatgaacaggtcctaaatagataaaggagtaaaattgacagcattaaatgtgtggacattgttatcactcagcctttttttctcttcttttgagatcctcaaaaaggatgttttggggcattttaagtactcaaaattttagagactcaacatacaactatagctgagaagtttgcaaaactttactaaaagaattagaataacatgttagatcatatatgttttgattcaggaatatacctcatccatactaaggaaaaaatagcttcagtgttctccaacaatgagattattgagactgtggtttacttacactattctgctgagcctt

SEQ ID NO: 93001 - DNA, 1022 bp, Homo sapiens
gagggaggatatttcaggtcaggactgctgattatttaaaagggacagtttttaacatttctacctaagtttttcgatctggattctttaaataaataaagattatctaaaataattaagtcatgtcatggactttcttagttgtctattagtaatataaattagcctaagcagctggttctcaatgtgtggtactgggacccagtgcatcaacatctcctggaaacttggaaatgcaacttctcaggccccagcctagacctactgaaacagaaaccctggggtgtggagcccagcaatatgttttaacaagcctttaaggggattctgatgtatgctcaagtttgagaaccactggcctaagctaacagtaatacacagaattattgaaagttcatggactttgaggatttggagacctgaatttgaatctcacctctcccacttaataagtttgtgactattaatctgtcacctaatatctatgagcattgggattttcacctatcaagtgaaggttataatgtttccttcccaaaattgttgtgaaaattagttaatataatgaatgcctaatattatcactggcacactgtaggctttcgataaatggtaactgctttttatcatgattgttatctttttcttgatcttttttcagtgattacttttacttaatgaaaacgtgctcatatttttgcttttagattcaaacgctcaagaaattaaggacatttatggactaaatggacaaatagagcacaaactagctttcctgagaactcatgtgccaaaggacatgaaacttgtgctcattggccattcaataggcagctatttcacacttcagatgctgaagcgagtccctgagctcccggtaagtaggtctccagaggtaactgtgggtgctggactgtgtgcctgcacaaatcctcctcacctttcctatgttcttttgtctcttgttcagttgataaatagaacagagagagggatatttgctttctgcctttatccttatc

SEQ ID NO: 93002 - DNA, 1081 bp, Homo sapiens
gcctgctgccatccatgtaagatgtgacttgctactccttgccttccaccatgattgtgaagtgtcctcagccatgtggaactgtgagtccatgaaacctcttctttgtgtgtgagttgcccagtttcgggtatgtctttatcagcagcatgaaaacagactaatacatttctcttctattttctgaaagagtttttatacactgggcatttttcttccttaaatgtttgatagaattcaccagtgaagctgtgtgggcctggattttctttgtgggaagatttttaacttaaattctaattaatccaatcaatttagggctatttaggttatctgtttcttcttgagtgaactttgatagtttctgtctttctaaaagtttattttatctaagttgctaaatgtattgctatgaaaattttcatatttttcctaattactcttttaagatagaagactttttttaaatttaaatctgattatgccttaaccctgctcaatctcttttaatgttacttagattaaaagccaaattacttatcatggcccaaaaggtatcacatgattgtatttctcttcctcttcaacctgatctcatacaagatttgatatctcttgttatgctttagccacactgatagattagatgcaaagggaagaaccaaggattatggactgtcttccatttcttcaagagctaagatctttatttcttgagggcctttgaattagctcttcaagagctaagatctttatttcttgagggccttctccctccttagtatttattctcttccctcaaattttcacaaggcttatttcttgtcattttggggtcttagctaaatgtcacctcctcagacctttttttcactctattctcttcccttctctatcatgtgaccctgtttattccttttataggagttctcacactctttatctcacctatttagttatgtgttgtatattctcccactagtacataaattccaaaaaggccctcatctgtcttttgcctgacatagtgactttcatacagtaagtgctcaataaataattgagggctaaaagaagctgt

SEQ ID NO: 93003 - DNA, 1091 bp, Homo sapiens
caccttgacattgcaggatccttagaaggacacctaaggttcctcaaaaatatcatcctaccagtctatgacaagagcttatgggatttcctaaagctggatgtaaccaccagcattggtaggagacagcatcttcgtgtttcaactgcctttgtgtacaccaaaaaccccaatggctattcattctccatccctgtaaaagttttggctgataaattcattattcctgggctgaaactaaatgatctaaattcagttcttgtcatgcctacgttccatgtcccatttacagatcttcaggttccatcgtgcaaacttgacttcagagaaatacaaatctataagaagctgagaacttcatcatttgccctcaacctaccaacactccccgaggtaaaattccctgaagttgatgtgttaacaaaatattctcaaccagaagactccttgattcccttttttgagataaccgtgcctgaatctcagttaactgtgtcccagttcacgcttccaaaaagtgtttcagatggcattgctgctttggatctaaatgcagtagccaacaagatcgcagactttgagttgcccaccatcatcgtgcctgagcagaccattgagattccctccattaagttctctgtacctgctggaattgtcattccttcctttcaagcactgactgcacgctttgaggtagactctcccgtgtataatgccacttggagtgccagtttgaaaaacaaagcagattatgttgaaacagtcctggattccacatgcagctcaaccgtacagttcctagaatatgaactaaatggtaagaaatatcctgcctcctctcctagatactgtatattttcaatgagagttatgagtaaataattatgtatttagttgtgagtagatgtacaattactcaatgtcacaaaattttaagtaagaaaagagatacatgtataccctacacgtaaaaaccaaactgtagaaaatctagtgtcattcaagacaaacagctttaaagaaaatggatttttctgtaattattttaggactaacaatgtcttttaactatttattttaaaataagtgtg

SEQ ID NO: 93004 - DNA, 1009 bp, Homo sapiens
acaagatggatatgaccttctctaagcaaaatgcactgctgcgttctgaatatcaggctgattacgagtcattgaggttcttcagcctgctttctggatcactaaattcccatggtcttgagttaaatgctgacatcttaggcactgacaaaattaatagtggtgctcacaaggcgacactaaggattggccaagatggaatatctaccagtgcaacgaccaacttgaagtgtagtctcctggtgctggagaatgagctgaatgcagagcttggcctctctggggcatctatgaaattaacaacaaatggccgcttcagggaacacaatgcaaaattcagtctggatgggaaagccgccctcacagagctatcactgggaagtgcttatcaggccatgattctgggtgtcgacagcaaaaacattttcaacttcaaggtcagtcaagaaggacttaagctctcaaatgacatgatgggctcatatgctgaaatgaaatttgaccacacaaacagtctgaacattgcaggcttatcactggacttctcttcaaaacttgacaacatttacagctctgacaagttttataagcaaactgttaatttacagctacagccctattctctggtaactactttaaacagtgacctgaaatacaatgctctggatctcaccaacaatgggaaactacggctagaacccctgaagctgcatgtggctggtaacctaaaaggagcctaccaaaataatgaaataaaacacatctatgccatctcttctgctgccttatcagcaagctataaagcagacactgttgctaaggttcagggtgtggagtttagccatcggctcaacacagacatcgctgggctggcttcagccattgacatgagcacaaactataattcagactcactgcatttcagcaatgtcttccgttctgtaatggccccgtttaccatgaccatcgatgcacatacaaatggcaatgggaaactcgctctctgggg

SEQ ID NO: 93005 - DNA, 1041 bp, Homo sapiens
tttttcccaatgcctgggcatccatctctgagattcttcttctctctgagaagaacttgtctaggatcaagtgtttttcaaacttctggtgaatttatataacagctacattttcttaagaaacaccttgtagtcttcactggtcaaagaagagaaggctaagcagggaacgggtgggggatagaggatcttctaatcttgaggatcctggcatactggagaatagggacccctcctctcatcccaccacatcttactatgtctacagattttttaattaagaatagctttaggagtgccactatccctgacaagaccttagttctttaatctctgcttagaggaattagcctggacttcagtgtctccctgttcctcacctggagcattttttaggcccatcctggctgcatcagacaggtcccacattgggaactgaaaggtgtttgacattgctgacatctcactggccattttattactaaactctcaggatatggtaaatggaataatgctcagtgttgagaagctgattaaagatttgaaatccaaagaagtcccggaagccagagcctacctccgcatcttgggagaggagcttggttttgccagtctccatgacctccagctcctgggaaagctgcttctgatgggtgcccgcactctgcaggggatcccccagatggtaagtcagcaggccccactgggggcccatgagaccagacgttggtttttttttagatcgcccagactcccttacgatcccagctgcacaagcccgaaaagatgcttgtactttcttcagagatggaggtttgccttgaatttcactgaagatgactcttggatcacatggaaatgttaacatttagaaattaagctattcataatgttagctgtatttttaagagcattaatttattcatctggaaaacaatgttcggtataccttcctctacctttgctgaaggtccttttatttttatttttatttttttaattttttgagatggagtcttgctcccaggctggagtgcagtg

SEQ ID NO: 93006 - DNA, 1100 bp, Homo sapiens
gtcagctgggcgtggtggcgcatgcctgtaatcccagctactcgggaggctgaggcaggagaattgcttgattctgggaggcggaagttgcagtgatccgagattgtgccattgcactccagcctgggcaacaagagtgaaactccacctcaagaaaaaaaaaaaaaagagttaacatcagcattcagcattttctgtttcttagtttgtctagtccaactatatgctaaggacctgggaaaaggaccgtaggatgcgtccattatcatactgagctgtctgcaagactgatttgtatctgaactccatttatctgtgactagtttacaatagtaactttctggattcctagggtttaacatttacttaatgtgcaacagttgcctaaagatctaggcatttccctacccctaatggcctcaggtgcccttggggaaaattaggaagaggagttatggaatgtactacaggtagctaacctccctttcatttaagaagctctgggtctgtgaactaactcagacctaagtattatgtgaaaggctgtgtctctattttggtgactcacgtcaggcctgtttaacagatccagaggtttttgagttatacaaatcatatagaacttccgaaggctgcctatttctctcaggcctctcatcaattatttaataccaaaagtcactactactcagaacatcctggctaccactcaacaataattatgccctcttttctttttggtggtgaagttcagcccctaggctgataccgtcctgagatctaatcattccaatagaatcatcatccttgtgtctcttgtggccaccaccaccagcatcctgctctacagagaacagacactatgacacttttcacagatgctggtacccgcctcaaccaaggtatttctaaattacttaattagagaatgtcttctaggttttcttgggagacaaaggaggatgagtgagtgagccattcatgataaatgaacttcagccttactatctccccaaattgctggatacctttcaatgcattataccaaggatttcctgacagacccttcgacttcatttaatgtagtgacattgagaaga

SEQ ID NO: 93007 - DNA, 1120 bp, Homo sapiens
tttttctttaacaaaaagagtaagggttaaaccttgtgttgcatatagagaagttggaattctgagatatttgtctgagaaaatgtaaggtgtcaactccttttgttggggcttcagtgtaattaaatgtctaaacactcttagtttatagtaagagttatgctggatcatgcaaacatattctggttttagacctgacactaaagtctgaagtgtcaatgacttttcagttttgaccatagttagaatgatcttagttatccctctaaccaataaaatgcctgtgaccaactccttcagttgtccaggacttagggagctctcaggatgtgatactttcaatgcttaatctgggaaagacctgggtaaactatgataacttggtcacccatgtcattctaagtttttcttttttttaatctttttttcatgttccttgtaatgattaacacattctcttctgtgtgattgattaaaaaagacaattcttatttgaatcattgagcatatagctctaccctcaagattgttcaaatgcagtagagattattttcatattgctggtggtatgccttttaattgctaaaaaatctccagggaccatttgcacatgtttgtagacaccactataatcatgtagttgccctggtctaaatataccatgtttcatagtttctgggtaggagatacatgaagatattcattattgaaatattactaacccttatttttcatttctggcataaaatgataccaacagaatttctagcaatcaaaaaataaatataggggtctttattcatttaatatatcaataataacttcatttcaccctgtgctggaacactggatgatatatagggactaaattatctataaaaaatggctctggcccagaatcttactaaagatagaaggtgtttcttttgctttgccttctatagaatatgtctttttggtattcttcttagggtttttgtttcttctagtcctttagtccagttataggtggagcaataggaacgtgtctgaagggggagagatggaatgagaaagcatgagtaaacaccgaagacttgagactaaaaggaaaatagtgattcaatccaaaggttgaact

SEQ ID NO: 93008 - DNA, 1052 bp, Homo sapiens
ggagttcacaattttattgaacttaaatagcaggtagagacaactaaacaacaagcttatattgaatacttcctctgtggccagcataataatgggattgtagtcatatgacatgctctcttaagtaaaagagattataccctagatcaggaaactaacgtatatacctaatcaaagtatttaagcattacttttattgttgctattatttaaatctttccttgaatttttaattggcaaataataattgtgtatatttatggggtaaaatggaaagttttgattgttgtatacattatagaaagattcaattaagctaattaacacaaccacgaacttattattttgtaatgagaacattaaaattctactcttttagcaattttgaaatttacaatacagtattattaactatggtcattatgcagtgaaatagatcactaagccttattcctccagtccaactgaaacgttgtaccctttgatcaatgcctccccttcccgcatcactcactcttccacccccgagcctctggtaaccgcctttctattctgtttctatgagatccacttttttagattctacacttgagtgagatcatacagtattggtctttctgtgcctggcttatttcacttagcataatgtttgaaagttgtccaacaaatggttcaaacaaagtgttgcaggagctcagatgagggagtagatagaaaagtgctgagaaacaaagtgagggatctcggggagacttcacatagaacatgggacttcaatagggttctgaagtatgagtagtgggtttcaacacagagacaacttcgtggtacagtcagtcacgtcaaagagttggaactagtttggcacttgatacagtttcacttctcttcttgtcagtccctacagaaaggcaagaagcctgaagtgtcagacaaatgaacaaaattgtgaagggagcctatttataaggtataaatatgaaatcaagacatttggctatagtagagataattttcaaacaaatctatgcacttactccattggcatagct

SEQ ID NO: 93009 - DNA, 1003 bp, Homo sapiens
gagagcaggcaagggagggaatgaccagcaagaggcagagagaagtctgggaggcatcattaccccacttcccccaaaggaaaaggagaaaacctctaagaactggctgctcttgtgggaaaatgcagtctgtgcaattgctcaggttttttttttttttttttttttttttgccatcactgagctattcagcactatccaggagcagagaagtttcaacatgctgttgacagctaagctatccttgtttcaaaaaaactccctgtccaaaatgtctacataagagacatcgtttatgagagataaaaatgcctagattgatatttggagatccccaactcatggttgttcgaaataatgactttaacacaaaaatagaagatgaaaagattattttccatggcgaactcactttcatgaaagtgtttatgttacgtatttgagggagataaaggatttaaactgtcaggttttctgggcagaatgcaagcaagtggtgcttgaactgggccactgaaactggatggttttgtggtgttaactcctctagccctccacctccttaggctctgtttcacctggcagcatgctgagcatagagcaatgctcagcggatgcactgcttgatggagtgagctccacttgaggatggggactgcctgctctttcctccagccccatgggaggccttgaagacaaaactataggggaagtggcagggcagaccaatctctagtcccaagacgactttcctttgcatattttgttgttctcttgtccacctatgtcacctttgactttccaagtgtttcccattgttcaagatcagcttaaagcatttttagacatcttttatcatggtctttcattgtctgaaatgctacagcccctggagctggcatcccacaattaacaattatattgtcgatggttatatgtgattctgtggtggctccagatgtgaaatcctgtttccttaatgacactataactgtctccagca

SEQ ID NO: 93010 - DNA, 1046 bp, Homo sapiens
gaatccaccaaaatgggttagggtgacagttgaggaactgtgtcttatttatgttttgtatgtatgcaaatcaatgatgtttactgaatttatggaattgtgcaactgtcaccataatccagttatagaatttttatcagtctcagaaacttctcttgagctcatttgtagtcagtctccactgtaacttcacccacctccactgccagagacatcttcttatctgctttctatctctgctttttttttttcctggacattttatataaatataatcatacagtatgtagtcttctgtgtctggcttctttcacttagtgtattgtttttgaggttcatatatattgtagtttgtatcaatgtttcattcctttataatgctgaataattcattgtatggatatagaacacatttggtcatattatccatttatcatctgctatttggattgtttagtttttggctattaataaatgtgctttatgatcattcgtgttaaaatcgttgtgtggacacattttcatttctcttgggcagattactgagggcaaaattgctgggtcatatggtaagtttacattttactttttaagaaactgtcaacctgttttccaaagtggctacaccactttacatttctaccagcaatgtgtggtggttctattttctccacaaccctgccaaaattaagtatggtcagactttttgattataatcattctagtgggtttgtaatgtacctcgtgtgtttaatgacattttctcagtgacataacgtatggtagctttccatgtgcttattatccatttgtgccttctttggtgaagccatgtgtacatcgttcttggaatacacaagctttgccaattttaagaaaattggtcatttgtcttttcagttttgaatgatcatatgtatcatataatactattttatggtattatatgatgctattaaattatatattacatactatgctttataatatatattgtggaggaaagtcctttatcagatatatattttccaaatatttttcctcag

SEQ ID NO: 93011 - DNA, 1431 bp, Homo sapiens
tgggagcatctatcaccatactgtactcatagaaacagactttttacccctaaagttgtttttgggttctacttcttagggtaggggtgttacaacagggatctgaacatatcttttttttttttaatcaagttatctgtctgccatctcagagtgacttttgtagaacatatacatcttggctgcacatttttttttctaaatgagtaattctaaaatcagtccctagtagataataggtggaattcaatgtttctcatttcagtgttggggaatgctagacaaaaataaattttgtagttttggtctagctgttaaaataataaaatacttcgttgttctaattgtttctctttacattagtagtcagaagaataaggtaaattctgaaaaacagataattaatatcctaatccattaaataaatatttgttactatataaagaccatatgtaaggtgttggtcttcaaagatagaatggataagaacaaaggtttagtaaagaagaaaaacattcaaatatataatcataatataatgtgttaaattctttttttttcttttttttctttttttttttttttgagatggagtctcgctctgtcacccagcctggagtgcagtggcgcgatcttggctcactgcaagctctgcctcctgggttcacgccattctcctgcctcagcttcccgagtagctgggaccacaggcgcctgccaccacgcccggctaattttttgtatttttagtagagatggggtttcatcatgttagccagaatggtctcgatctcctgacctcatgatccgcccatcttggcctcccaaagtgctgggattacaggctgaaccgctgcgcccggcctataatgtgtttaattcctaaataatagtctgtatggtgaaattatgaatggtctactagaagattctcgattttctttgtcctgaccaataaccatgcttgcaatatatctaaaagataaatcatattatttaaggatatgttaatgtgttatggatttgagggaaaatcctcactatattactttataattacatgcacacagtcaatgcactattatttctcaggctgattctgcgagatatataaacatacaatccttaaagctacactaatatcctgggaactatgactaacagctcatgtaatatccttttccttaaatcctacgtcaaggtagtcatactgccaataatcaatatatagacatacatggtatatttagcaaatgcacaaatatatatatatataatattgattatttattgaatgacctttatagaaagtatttggatattcattattgttttccactacttttgttttaaattcaccttcaagtatgtacagggaacactgtgacaatcaaaagctcattaagagattgaatatggattatgtaagtt

SEQ ID NO: 93012 - DNA, 1060 bp, Homo sapiens
catgcctctcccagaaaaagagcgtgtgtgcgtgtgtgtgcatatgtgtttgcatttgaggagggaggcctggccagaagaggtggggggtagctgtgggcagagccctcccaagaattctggagactttgcatcctttctcaggagcaatcctcgatgcctttgactgcctacttctctgcagcggtggttccatgatagtctccttggcagcctgccagaggctgtaagtgtacagagaattgtgttttaatagaaggctttacctctgatacagatttaaaatgaggaagaaactttctgttcctcagccagaacgaaatgcgttttgcttcctgtgaaatgctggtgattacaagctcatcttacataattttattattttcaattgctgcccgtcaatctcaggtgatggttccctgggagcagaaaaagaggcagattctgggcgatgactattaaaaaaaaaatcactcagtcattagcaaatcgtacaaaaatttagaaaggagaataattatctttgtgatgatgctgtttaagataatcagaacttgcattgctaagttagacacgccgaagtgaattgaggactgtttaatggcctcttagaaaatgtatttttgctttaacaaagcattgatgtttgagatttaaaaaaaagaaatcctttaaatctcgtgaaggaattctctggaataaccacattttcagaaatccgtgacatgatcgaggtggtccactgtcacgcccacaagagggcattttctcatcaactactgtaaaaacgatttgttttctaaagggaagctgagaggcctgggggaaggagagtgttctgcagagcaggaagtggagagctgcttgcaattgagttgtatgtatgcttccacttaatacgtcctgccgagcctgtaagccaacacttccggccaggaatctgccctctgtgtttacctactctctttttatgtcttattcccagaatgactggggaccaaaggaatcctttgcaggagttttctccagacagacagttccacatgctagtatattgtcg

SEQ ID NO: 93013 - DNA, 1032 bp, Homo sapiens
ctgctgcttgtgacgacactctgacttccaaagacagtacttcccaggtgtggaggagggcattgcatttcctgtgtatcctccaccatgtgctggctgagtcaagaatggaggtaataaaagagacgtaaacacgggaaaccacacgtctaaagcgtcccatctgtaaactcttgcttactctccagactcacaggccccatccttcagagtgagtctcttgagtacagagatggaacttggaagtctctcctgctccctccctcctctgaccagagccttcccttcctcccccagcccctcatttctgaacaatgagccttcaaataccttgccccttaaattacgtgcttaaatttaagatcatttatctaattattcatgtaataaatgtttattaagcacctgctctgtgccaggcacagtggcatggataaagatggtggaggcacaagatggggttataatgtcgatatgacaaatgttgaaatatagggatgtccaaatctcctgtgaggccaggtgagggaggggcagttcaagggagtgagagaaggcctagggatttgtgacatgtagcaaaggttgaggacagggtagtgagaacatttggggcagaataaacagatgtgtcagaggaagtgttgtgggaatgtgaagtagttcccatgcctggagtatattgggtatgtatgttgcaaaaattgtgtgtgtgtgtgtgtgtgtgtgtgtgtgtgtgtgtgtgtgtgtggtcaaggtaggatggaagggcgaggtaatgggtcatgggggtagagagagggagatgggttatgacctctaagctgccaaggtaggtaacatccaaataaggcaggacctcgagaagagagttgtgaggtcggccagatttccttctgttgtgtgtgtgccgcaagagttttctcagcctcatccattcccgctgtcgggagatgagacaaaaatatccttattcttcttgcattgggaaatgcaagcttgcactggaatcttaacaggtactgctggttc

SEQ ID NO: 93014 - DNA, 1070 bp, Homo sapiens
tctgtttgactgcttccaagtcacctttcatgttgtaaaccactgcttgtcactttgccaaattcctatgctcttacttaagtgtgattcaagcactagatgtttttgacatttgaagattacttggttctttgggcaattttctcgtttgccttcaaaaaaatgcctgcagttctctatttcatccggtggaaaggtgaggcccaggatgcatgtaatgaactgatggcactgtgaggcactgggcccggtgaactcgcagggtgtagctgagatacaaggtgttttctactaaaaggatcaaggcagctcctcgacctcacattggggatcatttgtactgaagataattcttcagcggagtcgtgctggcactgagttagccagatgagctgatctccatgctgaagccaaccatggggccagccatttccatcctgactgcccacatgctgtgtgatccattttctttgtggcagagggctggtcactgcagacccatggacacgggtgtcaccatatggtcactccagacatggacgtgggtttcataatatcatcctttctactccactgagccaggactgccatcaccgggcagaggttaattgaaaattcatgtaactatccgctcatttattaagacccacctccttttcttccctctcccaatgcctctctaatgccaaaatgagtctccacccctggggagagacgggagaaagaacaacctgctccccaccttgaaagaaaccattgacttcatggaaaaaaccacagattcatggccctgcagtgtttgtcttggaatgtttgttcattttcccatttgttccctttgtaagctgtgcatctgtccccaccaagcccggtgctctgaaggtggcatcgatggccctgagtttgtccctagctcccgcccttcctttgtaatgtgtcccttcttcccccacgggtgcggtgggaggcccgtgcaccctgctgtggggtaaggtggcatcaggcacagagagagtgacccggggttgtctttggtcactcacaaggtaatttcacttggcaaatgattg

SEQ ID NO: 93015 - DNA, 1058 bp, Homo sapiens
gtattagtatactaatactttgtatactaaggacttccccattcctggaagatccacaggacgtgtgagaagactaggaaagaggttcccaaatcagaatatactagatgtccccagtccccagagtttgtcaattgcaggtgctctgacaccagcaggtttctggatttacaaatctaagaataataagatttgaaacactttccttattccaggcactgttctaagtgctcagtatgggtaatctaatcagatccttgtgacaaccctttgaggcagttgatatcaccatcccttaaaccatgaggaaactgaggtccatgcaggttaagtgaatccatatcagttcagatgcccgaaaacacaaacctcaccagctatttaagaaaagattaatagaggggattgggagtttccagaattagaagggcctagaggagcaggatggaggctcagcttccaggagtgattctcaacaggacactgcatggctggaccctcaagattgctgcttccacagtcaggaaagttgagaatcaggactctattgcaggaactgtcaaccccaggaacacccactcaaccaccttctggggaccaggagaggtgaccatgactgtttgcttcagagttggcatgccttttgctgcacctgcaatctgcttttcagcacacctgcaaaactggtgactggtctccttgcctgtgcttgccagagaacggcagaatctaccaccgtatggcctccacctcatttccttagcttctcaaagcatatgcaaacacgtctgcttggtagaatcttaaacacatctagaacctggaggtgcaaaggaataggtcgttgtcattttgccaactttggcatacagcaaggcacatggggaggaaggtccaatggatgttgattgagccagtctgcagacccacacattaaataacttcccagagcttacacaggaagtggtggatccaggatttgaagccaggctgtgtgttcccagcatctaagctctgtgaagtgtactgcctcacaggaatcccgtgagctcatgctt

SEQ ID NO: 93016 - DNA, 1052 bp, Homo sapiens
ccatcagagaatctctgtgacagttccttgcttacctgggtcttggctttccccaggaggttagatctagggatggccagcaactagatgacctttaacctccttaaaaactgtaattaagttttataattaagttttggtattaaaatgtattattaaatatcatgaaaatattatttattcattataaagggattttaaaggatagtagctaaaagtatataaatgacttataatcctgttccccagagataaccattttagtgtttctttccaagctttttcttatgcacatacgtaaacagtgcacacaggatctgactgtgggtactgttcggggggcatgttatttagattccacaatgtatcaagccatttcgtatgtcggtaaatagaaatctatatcaccatttttacagactgtctactctgtggatataatagcatacatgattcacttaatgccctaacgatggacatttagcatattttaaatatttcactattacaaataacagcacaacaaacattgttgcatatgtatctgcatagtcatttgattacttctttggcttaaatttttagagtcctagcttaaacttttgactccaggttctccaagcaggatcaggcagccagaaatgccggggaacctggcctgccttgggagggcacaatcttatgaacagaatccgtgatctgggatctgctttagcccccaccaggcaggccaggaatgtgcctgcagaggcaaggaggcctggagctggagttgacaacgttcaccacatttcatgctactgaagggacaggagctgggcctggaatgaagcaggctggagggcagaggagtgggctctcggatccaggacagtggaggcccagctggcccagccttgtatgtccttgtgggacttgagcctttagaagtacaggctgcgtctgcataacacacagggcctagtgctgggtgagcacaggccatagcagccccgggactgctgtattctcagccgcccaccctcatgccttctgaccggtggcctcctggc

SEQ ID NO: 93017 - DNA, 1101 bp, Homo sapiens
cgtcctgagctctggcaatcatgtactttaggatggggagggactttgagggcagtttcaccaggcatagctggtcagatgcaccctatgtgggcctctatctctgtgcccccagaccagggtccctgttgtgaactcaagtctgtcttccctagcactcggccagttcctggaggatgggaatcatacctgatctgtctctgtgttccgctccctctgccactcataccagtacctgatgagctctcagtaaacaaatcactacgtgcagctgggactgtgcctgggagtgtccgcaacatgcagcctggtgctggctgtgccctcccctcacatgcaggagtcccattgatttccaagatgataggaaggttccgaggcccctagatggttctgtgacccctggggatcagtggaagcagctatcagtttactgtggaaactgggccagctcacagggtcctgtgtaacctgctacaaaacaggccagttcaagagccatgtgtggagggctgcgctctgcttttctgtggtttggtggaaatcacccaaataagtaagaaggccatactggaaccagctaggaggagtgaaatctgatacctgcactgcaggaaagaggggtggggggagttgagccgaggactcagtttgcgcagagcccaaggctgagccaagaatggcattagcagacacctcgggctctggaggtggtgaagggcagtgctgatcgtcactggtgctggagccaccctgggcagcatcccctgcctccatcattgaggccgtctcagtactgtctgtccaggccgtttgtccccctgccctcagcaaacgaaatgccctagatgccgcctgtgtcttcggaggaggttgcaaatgtctccagagctaacggcagttagagaacaccatgggccatgtcctgggcttccacaccccccgcctttacttcccccagtccatcctgcaggcgtcctctctgaccgcactcccctgcccgctgcctgccttccctccctcgtgccatggacagccttacttcctgagctctccccttgtccactcccctcttggcctccgtggtgtccacctcaagga

SEQ ID NO: 93018 - DNA, 1030 bp, Homo sapiens
gaggcctttcaaatgaaaaaaaaatgaattactgaatgcaaaaacagtcttatatctgtggcatccttccttcagttgtgatttaatatgtgcacggtgcaatacagaaatacaaagcagcttgggaaaaagtctcagccctaagaatcttatagtattaaaactcgagtaatcctacacaagagaaaaatacagcaaagcctgagcttggcccctgcaaaccagtgcactccacccgctgtgacccggggggtggtgggaggcctctggagagcggctgggtgctgcttttgacagctgaattttattaactgttttttcattcctcctgacggacctggcaatgaactcttatcagtgtattgtggcgagtacaagtcaattaatttcttttaaataacttcaactgaaattctatttgatttatattccaaaaaagatttccattccatcattccttcctgagattatggtcccggcagagttaatcacactggctacacagtcacccataccccagggagaaaacaggatcaaggagaggaggaaatgagacggaggtggagctgagagcatcctaaagaccctttattcagtgtgaggccatgtgctcagtgacaggggagtttgctgaaatcttgccctcagaagagcttatttctagtggttatggcaggggatggattggggagtgacaggaaatgtctggaagatgggggagacttaaccaagaagcatgactgggggcaccagggccgctgaggtttgctgctgagccacctcctcatttagtatccagtttctagggctggcatcccaggacaccctcccttagctcagccccagttgtgagcacctgacccttctatggcctgctgtgtggggccaccccagccatggtggtggtgatggtgagctgtccctgtgagcaagcctcaacaggctttgctgtgggtctgtccatcccttaaacacaggctgggacaagcagagctgcccccttcctgagggtctgcccacagggtccccc

SEQ ID NO: 93019 - DNA, 1037 bp, Homo sapiens
ctgccccatgttagaccctcctcagtccttgcctgggccatttgccttcatgtcccccaggatcttctgtgtccaggctcccgtcctgcaatcccgccccctggtacctgcccagccccccagaagtggtcactttccctcacacttcctctgccggggccgtggtccacacctgcactgtccaatacagtagccactagccagtatttgtatcaattacaattaaataaaatgtaaacttcagttcctcgatcatgctggccaattgtcaagtgccaacagccccagggggcttctagcttccatattggacaacacagatcatagaagcgtttccaccattgcagaaaatcgtactggctagtgctggtccacattgtcctttcctcttgagcatctttctttcctctccttctctccaaatcctccctctttcccaaagagtcacatagacacatccttacatcccaaacctcatcttcagtagcgcagaacttggcacttctctgagggtacactggaacatagaactcttttggttgcagtagatgggaacccaactcaaactaactgaagcacaaaagaaaatgtgttaactcttgtaatggagaggcacaactcaggcttcagcacagccagattcagtcactcatgtactgttggacctcgtccatccctcctccactgccctctgtggccagcttcatgctctgtcctacagaccgtcccctccccatgaccagagaggacggccaggagtaggccctgcttacatcttttctgggcatgatcctgaaggaagagagacctttgtttttggagttcatatatcgtatctatgggatttgggtctgtttgggtcatggaccctgattcaatccttatggccagggggatagaacaccctgatttgcctggcctggtcacgtgcttaccccaggggtggggcacaacacccagccatagctaatgggctccctgtgggaaagaaagatcctactatcagataaaggagggaatggatcagacaaaatgca

SEQ ID NO: 93020 - DNA, 1065 bp, Homo sapiens
attcattttaagtgggttttgggtgggagtaaagcgtccttggtagtgaaatgtctgtattcagtgacttcaagctgggcttgtgaatttatatgaataatttgttaatggcagttacaggagttgaagtaatttacgtggtcataagggagtaaaattctgccctggaatgtgcatgtgtattcaagcctccccctctgtggtttgccacaggaaagcatggcaggtctgaggtctttggaagccttgctcatgattgcaaacgagaccaggccagggtctgtgagagcttagccatgcacccaacctcattgtgatgtcctgacatcttctagattgcaaacatcaacgtgttcctttgcatgagaccactggggtgggagggttactcttagctctgagatacccagtgagaagcgtgagggcaccttccccactcagtagtgcatctgaggttggtaggttcccaggctagcccaccacactgactgacatgatcttgtctgatggagacccaggggtttccatcccacatccgagcatgttgttattcatgccccagcctttgcacagggccgtgctgtttgcacaccaagccctccgcagtgtgggggtggtagtggagggctcagttaatagctgctgctttgatatcaggctgtgaaggacactcttggggctctggagccaggggaggacaattgacgggggctgaggcagggcagagggagcagaatccagtggctatggcagtcactgccctggagaaactcacgaaggggcaggggacacagcaagggtcccccagtgcatccctggtccccctgtgccatgacgagcacagagtatccactgctcattttccccagaatttggagacagccagagtgtagggccttttcatcctaacacacagagacagcccgtgcccgtcggcaagacatgacgtcgttcctgtgcctcccagagcatctcctgagtcatccgtcccagcacccccctgccccagggcctgcccaaagcaggcgtattgtgttaccctttctccttgcgcttttcttggta

SEQ ID NO: 93021 - DNA, 1038 bp, Homo sapiens
ctaagactgtgaacagtctggttctgcccacaggcctctcactaccttgccctcccctcttgcaaatgacctctcggtgtcattgcttaatgcctcagaccaaggtctacacacaatgccggtgtgtattcgtttttcaccaacatcagcaaagtcaacgccatggctacatcttagtctgctagggcgtgtcttccctggtcatgctccagcctgtcaagtgccttttaaaggaacaccaggtgacaggcaaggtggcccagggagagggattgtcacctccttggtcttgagcatcacactgtagatattctgacttttcattttgtgctgccatcacaaaatgccacaaattgggtggcttaaacaacagaaatgtattttctcacagttttgcaggctggaagtccaacataaaggtgcaggcagggttggcttctggtgaggcctcgattcttggcttgcaaacagccgccttctcactgtatcctcacgtggcctttcctctgtgcatgaacactcctggtgtctcttcctcttcttagaaggacagcagtccgactgggttagggacccaccctatgacctcatttaaccttaatttcctctttaaaggccctttctccagatacaatcacattggggattagggcttcaacacaggaatttggggtaggaggggacacatttcagtccgtaacagtctacaagtctgtctagttggcaaatggaaagggtagcccctcacaaggcacagttcccatgtagttacaatgtctgccttctacctgtgggtgttttcagtgattcgcttgaacattttcataaatgcacttttgccatttttatcctggtttagctacaggctgctccctctgctttgttaactaagcattggatatatttcccatgattagcatcatccatacttggggttaattgtttttccatagaactttcatgctgggagggaacctaccgtcaccactgggaactaagcaggaaccaccgatcgctagacagtttgtcctgttaaat

SEQ ID NO: 93022 - DNA, 1049 bp, Homo sapiens
tggacatggtcagctgctccagggcaccctcgaacccctatagagctcccctggcattctgccctgaccccagggcactcagagctctccaaggtgctgaacttgtctcttgcctctggccccaactatctatcctggcttcttcaatccctccagccaagaaccaccccatcttccaagagcctacctccagtggaaaagcagcagcacctctgaataaataacactgtagacaaaacacagttcttccacatgaagacatggagggctatgagcacaggaggaggagtgagacccacccaccctcacccccaccccagacattggattcagttcagtttctggggccagactcgagtctctcttctggccctgaggaccaaggcacctcaggacaccccactccctggtaacaagttctaacccctggtggggccaactacctcataaaaggacggtagggccaccctgcccctaaatgcctccccctctgtctgctcccatctgccttggccctcacctggccctcccccagcccaccttcaggcttccagtccccacagagctcttccaggtcctgccttgactcccctggatgtttaattccccacacaaagtcctctccacctctggctctggccactccagagctcttcacaccactggccttgaccctgtttctcacccaagtctcccaagccctggccttctcccaaggtctctcggccctgcccgcaccccatgacatgttcttcctctcccgctcggaatattcccatcacccctcggcctccatcctccaagcaggggaaggagccaagtagcaacctttttgctggaggcaggagggactacgtgctgctagtgtcaaccaaaccaggcacttactccagctgcagccatggaatttgcccatggccttccctgctcagcccaggacccacccccacctctgcaatgcccaccctctggccaggttccttgggctgggatggggtcctgacactctgccccctgtcctcctccgttccttcctaaacaagagactg

SEQ ID NO: 93023 - DNA, 1050 bp, Homo sapiens
tgcgtcccggactctggcctctcctgggcacccccacgcccagaagtaggtgactccaggaagctctggtcttctgacagaccccatggggcctgtgtggctggggagcaccagcctgccctcactctataccccacccccctgcgtcagcttcatagagagggttagtgctgcccgtctgccctgctgcagtccctccaaagccacatcatgacctgatgggccagcagcaccccaagccattcactccatggggcccggtaggacaggacaagaaatggcttggggcagggacagaacagccacctgtggaggacgcagccctcgtcagcgaccagggtcacccatcacgggggtgtcccctctggggtccctgttcagagagaagaggcctaaggagcactggggtccagtcccaagacagtctgatgtccagggatacagaggcgcccccaccccctcacagctctgcaggccatgcacgaaggcctgtgtggatgagaaccgtgtgtgttggtaagaggcacagccctcgccctctggggcctcgcctcctctttgaactcagattctgaaagagcccccatcacattcccctgtgcctctgcggcctttccctgcagatcatctgcccagcggccccctccaccccacaggtgaccctcacaaggggccaggaggaacagagccacagccatgcctcctgtggccaggggtcctcctcagtctagacagcacctgcgatgctccacggcacctgtgtccctcctcctgtgcctggtggccaggacccactccctggctcagactgtgggcaagacaggcagcacccctcagggcagccatgtgagtcccatcgcacctgtcactcagccatggactgtccgtctgcccagcacccctccccaccgggggacttcacggctcttagggtcagtgcatatgtgtgcgtgtgcatgtgctcgcacatcctgaagtccccctgggctcagcccttcactggctttgagctcctctgcctgaggactcctgggtggacaagtgggctgg

SEQ ID NO: 93024 - DNA, 1040 bp, Homo sapiens
gggcattttccagcctctgtcacaaaatctccaagggaattcagacctcatctagttccatcctcttattttgcagaagaggaggctgagggcccgggagaccaaggctgcccacctgtgggtggcagagcccaggcacccagtgcccccagctccctgccccctgctctttccgcccacccacacacccagcagctggcctctctgcggccagcctgctcgcttgctggacacctcgacagccccaccgccagccgcaggtgcgcgcaagggacccgtcacaagcatcttgccctgtggcctcctgagaagcgagtgagtggaccacagaggtcatttcccagccacgtggccaggcccagcccgaggcaggaccgggctcagggtgggaagcagggctactcagaggagccaggatggggcggccaagccgacggcctgcggggccgcctccggactcctaacgcggcaggtgtttttactcctgctgtcacttatgtatcagtgtcactcttgcttcatcttatctgtttccttccaggtccagctttaggggcagctgccaggccttaggagcctttgcaatggttttgtattcctgtagacaccagatataaacagatttatatatttgtgtccctcccctgctccccccagttccccagcccgacgcacactctacacgcaggccactctgacctctgaccccgtgttccatgtggcaggagggcccgccccgggccaggccccaggtcatggctgctggctgtctgtggcggaagtccttggttgtttcctctcccctcctcccggctctcaccattctgtccgtctatctcgtcttgtcctcagtttcaaagcaatgtcacgaagggcttccttttcatgcctaaaaggaaacaatatgtttttggaaagaggtggggttggagcgggttctggggcaacttggggccctcggtcctggggcgatcagaggatatctctggattggctggcatcacagccagttgggagcctcccaagcctgggtcacgttg

SEQ ID NO: 93025 - DNA, 1050 bp, Homo sapiens
ccctgcaaggacagttggcagactctggtgggctgaggaagggctcagggcccttcagggcacccttttgtccttcatctcttggggttcccggggtggtctcgctcacactgtgcccatgctgaactttcacagccagaaggagggccttgccccccagggaaggcccatacaggcaacccctggtcttggagaactgctccaggaccctggaagagtagagcttgtctcactgcttagttggtgcatttgatccttgaacaaatccctatatttatcaacagtataagtttgcaaaatgagtaatcagtgtcttaggagattaaaaatagccgacaaaagcaagacagaatgacggatccagttcagtttactcctacagagaaaatgtctcatttttcatgtgtttgtttattattggatgacaaatgatcggaagccgatgcttccagaatgcttggggtatgcatagctgggcagtgggtcacactgaaggctgccagcaccggggccaacccagctccagcaactgcggtaatatcctcattttcacgtggcaatgcccatgattgccagatcaatatgataactaaatgttgttactgagccatctctgggctctacttgggggaggagttaaaagcccacaatgagcattcagagcctgcctcactctgcaaccgtctttgctgtaacatttgtcaagtgtccaattagccaccaagggggaaaaatacaaattgaggggtatgtgtggcttcataggcaacatgatgtcccacgggaagatgtgctttctggtgacacatggcggtgggggtggtgggctcaggtgcaggaggggctctggcaatcttagctgtctcccctgggttgtgctttgggccaggtcagcctgacgggttaccctccaggcactagtttctccaaaagcaggactaagcctccgttctgctgcctgacaaagcttcctgagcttttcccccaggcatctgttctctgtaagaaagaacagtctccctggctcaagggaaaaggattttgtattct

SEQ ID NO: 93026 - DNA, 4549 bp, Homo sapiens
tgggagttagtgaaatataatgaggaaggaagggctcagtctctggagtgaggctgcctgtattcaaatcctgactgccacctgttagctgtcaaattatttatcccctctgtgcctcagtttctttatctgtaaaatggacctgatagtaatacgtttgttcaatcttcaatgttatgggagttaaaactatatatataaattatatatatatgcatacatataaatataaatatttacttatatttatgtattttatatatagaaatctcttagtaaatatctggcataataacttactcattaagtgttgctatcatcatccttatattcatattactcatatcatacctcatactgatattactggcataataagttagttatttgttgagtgtgaccatcatcatcatccttattggcctaaatataaaataggaggtacttggaagtatctaggggagatagtcttaattacctatggtattataatcaggaaaatattcaaagtttaacctgtatctcaaattcattccctaaaaatttaaagtgaattcttccgtaatgaggaacacttttgtctttcccttaatagataacatgcattttttttccttttataggagatggaaagaacagttcatatgtttgagacattcctatgaacttttcaagatgagtggtttatcctctccaatctgctcctcacagagcagtcttctgagccattcaatttcaaattgcaccaattatgtgcagagccttggtgtaaagtgctctctcactcattctttctctctgttgaatttggtgctattgtctcaggtacctgaaaccaaccagcctacaagaaccaaacagaacttcagaaacatgttgtattttccacaaataaaaaatacaaccccacagcttggagattttggtgctacagaaactgctctcgcttctgctcctctttttgtgcactctcttttggagactcctctcttagggagcagaccagcaaacaggaggaaactggatgggggcagttctaactgtgttgaattgtttaaacagtgggcaacttgttatttttttttcctccattttacccctttaatcatatttttcccccatctgggtaatggactgaaacctgttttagagttggctatggtctgttctggtgggaagctgaagaaactggatgaaattaggtcaggctctttagaactgcctttaacgtgcctttttattcatttgaggaagataaggctaaaaggatgggctgtttgaagcaaataaattagaaatatttctttggtcacaaccttgaaaataagttttgatactctatgtcattaagagacaaccagtgtttgggtatgaaatgcctgtcttattctcaaagctcaatcaagacacccagtaagccacataatatactaaaatggtaagttttcttgtaaggtctgttttggtttaagaaacatgaataacaacaaagaataatacacagtccacacacaaaaaaacaaaaaacaaaactgcacacgttttggtattgccaacaatgatgactagaaaataaatagatagtggccattttttcttctgtcagtggcaatttaatagttattcatgtttgagttcccagagaaaaatggttttcatatgtagtaaattgttgttttgttttaaagccaggacttgccaaatggacagaaaagagaggaattcatcagaagctccataaaattcattttctgtatgcttaattgcaaacgagctctggtatggtccttgaataacagtattaatgtttaaatcccatctcctaagcttaccttcacaactcttctttttgattggaaaccattttgaatcttgttgagtgatttctgtgaattgtatgtatctgaaattaattatgggttactagttttacaaaaactttctacaaatttggagacacagtctaggcagttgcaatgaggcaaaggatgcagtgactttttttatcagatgatttttaaacaaaaagaaaattttgccagcaagttggcttggtatcttcattcattgtagccgttagctgcaggtgtgtctttccaatatatgcaacacatgtagtttgggttttaattagggcgaatggtcttggactactgcagagattctgagctacctcagctttttgtattttagttaccaacagtgtttacagagtcttgtaatcactttgccaccgtttacatcctgaagctaaggtacttgtctccttgtctttggctctttgtagtgtgcagaaagcatactttggccatagcctactgcagtaatccaaagtgcttctttgcatttacatttacatctaacgccttctaattctagcttaatttttttttaaatgccacgtgttttctttgtacctagtctgtgaagtttctgtaatatccagttagtcatacaagtcaagatgctacccatgtagacacactgtatttttaaggtgggcaagtgcgattaacgatgaaccattttaaaggggaggttatttgaaacctctaatttgattattgggaggattttcatgctttctttagtatttattaccatcataccgattcaaactattttattgtctaatacattagcattttgtattttgatggaaattgttacagaatttaaagatttgatgaaataagatgtagcagattttttgtagcaagtttctggtaaaagggttttttgcaagtctcaggttcttgctgcactatttttttttaaatatttattccagttattctaattcagaagcattcttttcaagtaacagcagcacttgtgaaaggaaaaaaaaatgcacatgtttcttagtaggttactaaatttgtacaattaattaagattttagccatcagtgagtttgaaaagggaaatgtatttattttcagcattaaaatgcttccaaaagatcaagttgcttttgtttgtttgtttttttaaccgtaatgtagatggagaaattggaggcaacctcagtataggaactgccactttgaacagtttaggtcttaaagagaaagtcaatctaatgccaaggggagaacaatgagctgaaattgtaccaactcctctggccctccttccctcaattaaaaaaacacacttaccagttttgcttattttacagatatctggtggttctatagtttaaagcagcttgtgaaattaaaaaagtggactcaattttgtttacctttctgtaagtttttcatttttgctgtatagcattggcaaaaatatgtacaaattgacctctgttcttatttcctattgtgagcattataaagataagctcctatgtaaaaccttgctctcagatgagtaaaatatgtatcacagcatagctcagcaataattcatgctcagctgtggggaccctgggggctttttgaagatgatggaaccgcactagggttgaaactgatggctgtggagttaattgtgttttcgagcttgaatctcacctgtgattttttttttttaatgttgtttcatgacttgatttttctcataagccaatgtatttgtaggtttactggattttatttttagggagtgggtaatttcttcccttttttgattaagttggttcagctatggtgctattcagtaggtatcttcagtgtcaggtcccgtagctgaatgccattgttattataattattatttgtaatcacattgtaagcttgaatttgggcttgtacctgcatcttttgtattctgtacatctggttacttagactttgggagtccaatttggtttcagtcatgtatgtctactttgtagtttaagtagacttcatcaactatggtctattttgggtttgtagttttaatttagaattgtgttaaattgatgttttgcatttgacttcatttgacattagttgaagtaaattatttaatttttgaattctggaatttgaacatttactgtaatttgtaatataactgctgtgaaatacttgaataaagatgacaagaaaaacatgtctttctttagcttaattatgatcactgttggctacaaatgcagtgctacttttctagctgatttagactgttttagagagaggcatattgctggttattaagcacccaaaaagtcgtgttatatgttccttttagattttaagtacacctcacgattttttagctgaaagctttttatgttgagaaagcgtggttttagttttagttgaagattgtctaaaatatgttgtatagaagcaaatggattacttctgagatttgtttttctagctggaagactatacgataacatatgatcaggtcatatggttcattagtttaaaatgttttcctttttatcgggttgttatcagtatactttgtacagtatagcacataatatggacagagatttcataccagagttttgaagggcttacttcaagtgagtagaatgttcttggcttcagaatacctatttttcctgtgtgccttgagacaccttttcatgttcctgtag

SEQ ID NO: 93027 - DNA, 1050 bp, Homo sapiens
gacaaaaatcattaagagttacagtttgaagaataaagcctttctgtaccattttgtctctggaaagaagtaatctggggttccttttttttgtcaaaacacagaaatccatggttctagggtggtaaatatacagaaatagtatgtcacaattctctccctacttgcttataactgacgtgccaattgagcctgtcacttgggcttgtcggatgtggtcatggccccacactccttatcactgcttcctaggtagccactgctgatataaaggcgttggcatgggtagtgagacctatttgccattaatggttggaagataactcaaaagtcatcttattttggtcaaatctagtcctataaattagccatatgaaggagcgactgtccttttgctgagatacttttagagatgagacattccctttctagacaactctaaaccaagggaaattcttcctgtataaatatgagcttctatctttgtttatataatttccatcattaaaccacacttctgccttttcaggtcatctgagcaaatgtaatcactcatctacccacaaaatggctaaatgacttaattcaactccctttgttgatttgcctgttagtttgtttatctggtggtctatctattaaatgtttattgagtacctgcagtgccagatgctgtgctgggtgtttggaatgcaaaaaatgagtaagacaaagtctctgctctcaaagaatatttttagtatattaaagatttatatgtaaaggatatagttatttttcatgtgtaattttcttttcttatttggcaatatatgataaaacatttagcaggagtgatttttgttggccacatggaagaacttgttgatcggatgatgatctgttaatacagcctgttagttttgcagagatgtagaatagaatttctttggagctgtttaaagggaaggaaaaaatgcaagtgtcttagatgtatttgacatttgcccacctgaataaaatgtgcggggtagagttattcacattttttttaattctagaacttctttg

SEQ ID NO: 93028 - DNA, 1001 bp, Homo sapiens
tgcaccaaattttgctttaagtttcagagggtgtatcgtttcgagtgcattgctttactggccgcttactcttctgcctcctgcctgattatcacccctagcctcagggatttatgactgaaagctgagtaaatccacaggtgttaagaagatggaattccaagaagaattattggcatgggctgggtgtgggcagagaagacttagtgataatagcagtatgatatattcggaagagtaatatagacctagattaaattaccactcttgttcattataatcatgtgactttcagctcattatttacactctccaagcctatttattcatctaggaaattcaacttcagaatggtgttgcaaggattaaataagtcgtgtattttaattgcctctcgtggtaactggcacatactaaggtatattcattccaggaagtcattgttaattgaatccaagggctgttcagtctaaaagccttcattgctttataagtccaatagtgggggaaagaagcagagcaatcattgtcaagtttaccttgttctcagggaatcagagtactctcccagcttctgacttcttatggctacatgattcatttaagaagcagcagaaagagggagttaagggtttctagcctgtctttatcattattctttagcccatagcagggtctgggatgagttgatatctaccctgctcaatatacatttccttcctggataggtactcttataggaggctatcctaaaattatattattttctctaaattgtgtggagtggagaacacagcttcagcctgggatttgggctatgtgggaaaattttttttttttctgccagtattttaagtcctttagcagagttaggaagcaggaaaatattattcaaagtctaagaattcctttaatggataaagagaaatttactgttcttaaatgctacctgttaaacatttgtcttattcttcaatatttaatactaaaatagttttcag

SEQ ID NO: 93029 - DNA, 1040 bp, Homo sapiens
gaatgtgtagattagagtaagaagaaaagtggttacagagagaacctggagaaaaaccaacttaaggaccacatagaagaaataaatctctagtgaagaaaattaagatagaatgattagtcttaggaatataatgcaggacaaccaaactgactgcagtgtggtgcgacaggaagcaaatagcattttgaaacagttcacgggaatggggtttagtagcccagtagactgttgtacattctaagatggcagaggtcattatttttggataatatataatcttattgttccacagtcataataatgtaaaatgtgcctctttgtgaattaaaatgaataaaaatagggcccctttggggattaagtgtaaacatggcctgccagattgttttatttttatgattttatatctaagtttcttacccatcttaaaacaaaagacactgctttcattggaactgcaaactgccctagtataattaatgactttaaaactcagttttgtatttgagatttttttaaaaaccttttggtttatgtagctgggaatatttaaagaggtattgcttatcttctgcttgcaggcttatcagtaacatcagaacaaataaatcctcatagtactggagctcggaagacagaaactagagtcgaagaggcatttcggcacaaacaaagaaatccaatggatgtgtggcacaactctgcaaataaatgtgcatgtgagtatttcagctcatgttatccagtagtgagaacaactgagaatgatgtagatatgttaggaattgggtacaaaacaaagtgccgctcttttcccatagctcttttaatctcttttcagaggtgaagaagagcttgtgaggtaaatgctgaatcagaaatatatttctttaactttatttgttattttctatccctattcaatattatttgctatgacaattgaactaggcttgaatattttcagttttaaactttggtttttggatagccatgtggagccagtagaatttttatatgcccctgtccttatcctc

SEQ ID NO: 93030 - DNA, 2052 bp, Homo sapiens
gaagttaagtttaaaagtagaaggcaaagaattgaacatactgacatattgattctttgaaaagaaatttagaactcataacactacactggctgcatttcagtttcttgaaatctccaaactctttacagcaggattttctcacatggtattttctgaacctgcactagttgtttttttttttttccccccttactctttcagtagctactccagtctgtgcttcaagtgtcagtttaaatgcctgttcttcagagagtcttcttcctgacttgctcaatctaaattggaacccacaccagtaccctgtaggttttcttcatagctgtttttcagggtgttttgcttttgggttttttcttttttggagggaggaggtgttaatttggatgtatgagagatgatttgttcctgtagtggtctgaaaaagtccttgaaagttgatatcatgtatgttttgttcactgctgtgggtggccaccatccagctttccctggtgcagtcgacaacatttgttgagtgaatgtttagagaaaatgtgttggaagtaaatatcagtggtgcctttgagtggtgcatgtttggttttgtaagattaccacaatgagccataataactttcaaatcagaaaagttataaagtgtctctgtaactttgtctatactgtttgcccttactagagaggaaaaagcaaatgttgttttgcaactctggattcttgctcttgatactgttagaatattagttaccttgatatattacttgccttttcatatttctgagttgcacagatctagggggcactgtttatattgtattgtttatgaatgggaacttctggattagtgtgaagcagaggctcctcttttagtaccatttttaggcatagtttacctggaaccatgtttatgcttctctcctggatctacctacaatgtatacaccatcttgtgccctttagcttagaaagtctttctgtatttctctgtttttgtcacatttaaaaaaaaataagtcacctttaaaatatattgtattctttagcatagttttgaccaatgtcaacttaggagaaatttaagatttttttgaattcctaatattaatctctgacaactctggggctgggcatttggtgaatatcctctaaatactttttaaatttttactgaaaatcacatatttctgttttcagaaatttgaaaccatgtatctttttcttgtaattctccagactgcttcagaaatggtaataggtttagtcctttgaggttcttaaagtataattttcagagaattactaacttgactgagtagcttagtatatttatttttttacccatactttaaataaactttttctcacctagcaatgctttttataattttgtttgtattcttttactttttaagatgtcctttgttaatgttattttatttgtttctataataaatatataccaacttttttaacagataaaataattaggcacagggcttgtaccctgaaggacactgcacatgctatcattgcagctgaattagatccagaatttaataaactttgtgaggaaattaaggaagcaagaataaaaagaggtaagttgtagaaataaacttggtactgaagcctagtgtgctctgttcaggccaagagtacttgaacgctgtttctttaggattgctggtattatgaaagtaatgtatttaatgtatttatttaatttctgatactaatgtgttatgtaaattctcaaagatattttacaactttacctactgtgaaagttttagtgtgatagtgtgtattacagaaataaagtgtttcttattgaaatttgttttgtaggagtatatcttttttaagaattgatttctaaatggatttagatattagatatgaaaaggttttatttttcatcagtttactttctggtactttaaaaacatgtttaggtatactgtttttcccaccctagtgaaatttatatgcaattttgttattagaaacacagaattagcaattgtggtttgtcaattcagtttataa

SEQ ID NO: 93031 - DNA, 1037 bp, Homo sapiens
gtggtggtgggcgcctatagtcacagctactcaggaggctgaggcaggggaatagcatgaacccgggaggcggagcttgcagtgagctgagatcacgccactgcactccagcctgggagacagagcgagactctgtctcaaaaaaaaaaaaaaaaaaagaaaagaaaaaaaaaattataccaacagcatcagggtcactgttagccactatagcaatttttggtaagtaagagaaccttcttcagttggatgccatcctgtaacaggatggatagtaaagcatgggctggatgtcggccccatttcactcccttcccttgctggggtcctatgtgagggtacaacccgtacaactgtatatgtagtggttttgagcagtgtgtgagagtgcttgtgtgcctataccttcagcctggttttcaagacgcagagactgctgttattgtgtaatatgtaatgagaatatgggctttggattcagacctaggctttagtcccatttctcctatttcctagctctttaactttgatcaaattaagccttctgaattttagtttcctcatctgtaaaatggggatgataacaacattcttaaatgggatggttgtaagaattaaatgagcaagtgtattaggttgaaccttatgaaattgccattttcatatggttcatcctaaatatcttaagcctttagcagagtagctgggacatgataagagttccataaaggttagctgtttgtgtttgtattcttatgatcattatttaaattgtgctttaatttttttataagttggtttcttagtgggtacctgcatatttgctctagaatgaccctttatactttgtgcttattacattccctggaccatactttaaatgtaattctattttgaaacaaatctaagggctggtagtgaaaatgaatttaagtgcttagaaaaagccagttgagaagatcaatccatatttttcccttctcagtaattaattataaccacattgatattaatattttaaggaagaagtaatggtt

SEQ ID NO: 93032 - DNA, 1127 bp, Homo sapiens
aggaaaactcttttctttctaatcaaagaagatttgtcagattttcaaatgccatctgtaatagttttataaatgacggtaaggggatagaaaatgttggtcagataaatattttatttagggttgtatttctcttcttttctcctttatctttcttcttaggttcgttctgctcttaagctgagaacataggagtctctgggaaggatagagaggggaaaacaagataacctaaaacaaaagtttttatttaactaatgaatttaaaatgtctgaaaactttatcaaattccaaagcagactgcagagaaagcaaaactttagaaaataaatgttaaatttaaaattaagcatagagtggtaacatttatagtctttaataatatacattttatagtgctttttagtttataaaacagtttccacttatacacaggcatttatgtcaaataccagaagcaggaatccagctaatatcttctgaggtagtttgtttcagtataactctgctacctcccttatagggagattgactggtttttcagttcctaaaaggtgaaaaataaagcacacatacacttctacttaatattttttataagtaatcctaaacattaaaaaacatataaattacatatatgtgcgtgtgtgtgtgaatgtgtaaatttaaaaataatggtatcgatgccatctgaaacttcatagagcagaacttaaccatctccccagaaatctttcctggactaattttagacattactgctaagactgctgttatagcaaacctatttacttgatttgagatttgcattggggaaggcagtagatacataagttgctaacactttcttgttggtcagggatactcaatttattgggcaaatcatgacgtaatatctcctgtttagggttatctcacagaaaatcagcacagaaagcagcatgtttgtttgtttgtagatttctttatacttagggacaaatccagcagatctcgtactggttaggaaaactatacttaattttcttatataattgactctaaatgtttgtgatgactccaaaggagtggaaaatactttccatgaaatagttcactctagaaaactgaaaaagaaaatttttgt

SEQ ID NO: 93033 - DNA, 1020 bp, Homo sapiens
taaccaatcaataccagttaatactggcatttcccaaattatgtatacctcatcaaaagaggtagctaaaaacctgaaatttctttgtctttcatattttggaaatgcctgtggctgggatgctgtttgaagttaaaacatatcccgtgcaactaaattatttttctttctaaggattttctctgctcccagtggaaaatttctcactttatatgtgtattattttgtgtgcttgtgggagcatggtttgtgatgatgagaaaagaaattttccatttgggaatctaatactatcaactacatttttggtttttgttttatcctgggataatgtagtgtgtggatgaacacaatgtaatctttactggcctctttcttatagttcagactccatgtttgaacagctttggtgtttttagtttttattcatttctttttttaaaaaaatgaattatgggtgattcagggtttaatgttgtatcctaattgtgaaatctgtgcttttggacctgagcagatacctttgaaaccattacctcatctgttactaggaagaatgagctagcatttacattcctcccccctggcaagtctgaaaagaaatactttcccccctttttggaatgaagagactatctataattttatttgtacctttatccacaatacactgttttttccatttgatcctcttatcaaccttgtaggatcattattattattcttactttgcagttgaggaaacagacttgttggcaagtgacatagccaagacttgaaagttttttaaaattcaaagcccacattcattatcatagctactttatatctttccactgggataacaggacatgcctaattggctttttaaattaataaatatcagtttatattgctgggtcatccccccccccatagtgtttttaaataattttaaaactatcagccgattaaaaaattattttaaataaatgtgatatgtgtgtgtgccctttcttccactcccctatttggtatatt

SEQ ID NO: 93034 - DNA, 2649 bp, Homo sapiens
gaaataccctttcttggagtcagtttattttagccctttcttcttggaagtgaggacagtttgtcaggttctgtttatctttagatgacgtgtggaagtgtccattgtgttcacctgacttgagattgggaagtatagccttgttaaagctttgctaaacaggacttcttcttatgacttcaaccacatcctgtggtagatgtcacattatggggctcaaaaagtcatagaaaaaagtcttcagttctcctctgttttagtcacagtaagtacccaggagttgaactggcaggttgtgaacaccaggtgttgtgctcattactttttgggccatgatagatttgatgggctaatagctgcttagaacatttgccatttctagtttatttattgattgacttttcaaatacttatttaggaccccttacatttaacgttgtattctagccatttgaaaatctatcctgcctttgttttaagtgttagatttttcttgggtttggactcaataattttggactcaagaattgagcttaagaggtacctcaagaatttctcagatttcagttccttgacatagtaagggctgcattctaagtcattcaaaagagattttcttttcctaatcttaaagatgtgtaaaggataagatctacctgcttaatctttcagcctcttctaggaagtagcaatcctgtttggtaaaaatttttaagcctctttacccttgttccatcttttatgtttcttagagcccttcttgtaggatactcaatacatttcccatccctgccaagtccttatttttccatattctttttactttgtttgtttttcattggttatattatgtaacattttaataattttattgttctttagtggctcctttccaaattttattggtgttttaaaaatgaacccctgtcaaattgctgtagttatggttttttccctcccaaaaccttgggaaattgaatatgtaaattataccttatttatgtttattttgttgcttcctgttaatctaaatatttcattatgaaaatgatttatttcaatctttcatgcttctagatatattttaatctcatagatctgaattttctatgtttacgattgatataattctttttcagttgcttctgttgactttcacttttcatcttaggagctatttaaaaatcagtgaaaaattcttagaattttaattctgagctgtagtgtgatatcaggggaaatcttttaaaattagagaacgttgtaattaggaaagttaatactttaccttttaagaagattttttgtttttcttaggatagatagtgagtaccatggattttacatatgacacttaggactggttttccatctccttcatgactgtggaattctttttttagttcctttttttttttttccctcccttcctgcaggtgccattcactatccgtactctgttgtactcagaatacgagggcaggagacctgcctaaaatcagaattcttttggggataggaaggttcaaatattacttgcccattatactttttatgcatttaaggtaataccattttaagaagcagtttttaaacaaggttgacttaagaaaatcagtgtgtaatactttactgggagatatttgtgttgaactatttctcgtaagttatatataaataatatttcaaaatcaaattattttgttttttaaaggggtcctgttgtgagttattttataaagtgaagctattccctttttgtttctgtgcaaatttttacttgctggatttgcatgtttcacacatatagtcatgcgctgcataatgacgttttggtcaacgatggactgcatatacgatggtggcctcataaaagtataatactgtatttttactataccttttctatgttcagatacagaaatacgactgtgctacagttgcctacagtattcagtatagtcacatgctgtccaggtttgtagcctaggagcaataagctttaccatatagcctaggtatgtcataggctataccatctaggtttgtgcaggtatactcttatgatgttcacacaatgacaaaattgcctaactgcacatttcttagaatgtatccctgttgttaagcaacacatgactgtatttgtaattcttttctttaaagaacattttgagagaatgccaaaaaagggtcctggcccacgacgttggaatcttaacattttcttctgttttctctagctctttgtgctatggaagtgcttcctcttgcactaccttctccacctcgtcaattatcagaatcagaaaaaagtcgaatggaggaccaggaggaaaatactttaagagagttgcggttgtttctcagggatgtaaccaagaggctggccacagataaacgctttaacatcttcagcaaaccggtggatattgaagaggtcttgtttcagtagtgtgcaaacagtgaagttgaactggctaaaagaaaaaaatattgacatctttttttggaaggaaaaaaaagcaaaggcatggatgaatattacccctagcctataaaattttaatccatgtgataactaccgatgtcatcagcaaacatctggtgacttttggatgaaattagcgaccaatttatattggcctc

SEQ ID NO: 93035 - DNA, 1065 bp, Homo sapiens
cagtttccccatctgtaaaatgaggaaataatacttacctcattgttatgaaggtagaatgatatcatatttatggaatttttaagggttcatttcataggtttaatccagtaagtggttagaaatgacaaactgaatgaattattcaaattttaccacaaatgtgtggctaaatttgggcaggaatatgatgtctttgattctaatccatattttcacagtgtcatggttggtctatctttccatactggtgactttctccctttttttatttgcagtttcctgtttgatttgggctgggtaacaaaaatcacaaggttaactctttcagtacatacttattaggcattgctaaataccaggcactgggataggtatagaaaaataggtgaataagaagtggtctctgttctcagggagtttggtgtctagaaggtagaaggtagacattctagaaaaaccataaaaattaaatacagtgtttaatgccatagtagacaaatttggatgaggtaaagagcatttaaacagcatatcttggaaggtggacacctggggtcaaagtctgagtaggtaaacagaagaggtgagtaatcaccaagtggatggagctgaaggatatgagaataattggcttaatttttttggagtgtgtcatggagcataaactagactagaggtatagtttctttgcagtggaaccaggattccagagattacagtgaaatagacttggtagggaaagagcacagtaagggaagtcaatggatagggagtacaaagaaatacgaggataagagatggcaatgttaacattcttccagctgtactattatagattcgaagtaattacttttcccctcttaatgtaaaagcctttgagattgttgccatctgttacaaccagctatcctttttgctattatctgatgactcttactagatatgtagtatcattcattaatgacttgggtaactggacattcttccattcctgtttagcccatgcggttgaacccttcaacagcatagcctaggactaggttaactataaccccatgtgaa

SEQ ID NO: 93036 - DNA, 1268 bp, Homo sapiens
tattttacagtggtgttttgctttattatctttacatgctagataagtggagcaatttgataccttccactgttaatatatactgaataggaataattaaagggcaaaacatacttttttttttgatagggcaaaacatactttttttttttttggtggggcaagggtagattgaagctgtgtaaggcttgtgcatcatatcttgaacttaaattttgaggctgaaactaatgaccataataggcctgacatatttcatgtatttggagattactgggtagactttagaataatcaatttgagttgtttaatgttggtttttttccttaattagatttttcgtgaagctcgaagaacagtacctagtattgtttacatgcctcacattggggattggtgggaagctgtcagtgaaactgtgagagcaacttttctgacattgctacaagatataccatcattttcacctatatttttattgtctacctctgaaaccatgtacagtgaactgcctgaagaggtaagaactgattaaatatttatctttccttattatattgttctaaaatagttgactctgtaaattggacaccttttaattattataaaattaatactgccagggtttatatcctgggtgtaactgcctattagctgtatgatgtaggtaagttatttaagttttagtttcttttttggtatagtggtattccacagtgttgttataaagattgagataatttatgcttagaacaaaacctgaattatatatatacagattcagcatctctaattcaaaaattcaaaacctgaaacttctttgagtgctgacatgaagccactagtggaaaatttgacacctcacgtgatgggttgcagtcaaaactttgtttcttgcacaaaattattaaaaacattgtataaaattaccttcaggttatgtgtataaggtttttataaaacttaaatgaattttgtttagacttggatcccatccccaagataatctcgttatatatatatgcacatattttaaaatctgaaaaggtttgaaatctgaaacacatctggtctcaggcattttggaaaagggatactcagctttctaagaaaattgtggctatatcactatcagttatatccttttcatccttatcatctgtggggtcatttgatgagatttgacctttcagccctttcattgatagcaccatgttaacttgaatgttattactaatacacgtatttttcaaatctgaagtctaact

SEQ ID NO: 93037 - DNA, 1051 bp, Homo sapiens
tggtggctgggactacaggtgcacaccaccacacctggctaaatttttttttttttttaattttttgtagagatggggttttgccatgttgcccaggcttgtctcagaacacttgggctcaaatgatccccccaccgcagtctcccaagtgctgggattacaggtgtgagccactgtgctgccctcatttattttttatgattcttttcttagatgaaattgtttcatgtaagaaaatataaattcttatacattttatacatttatattcctataaacttatatattataattcatattattttataatatattataaaataacaacataatttatatgacttataaatattttataattcatataatttttataaacatatgcatataaattatttcattgtatatgaaattctttcatatagtgattacaattaatcatttcctaggctgccttttatgtttgtctgtttctttgatatattctacattctattaattgttattctataatatgtttcagtataaagtaggacacatcttaacatagtgggttcagaacctgagctttgcagtcaaatgggcttgaatgacaatttgaactcttccacctggttatacaactttgtagttaacctccacgagccctggtttcttatctgtttaataaaatgaaactatgtgtttcacagaattgttaagaaaattgaacaagaaatctctatcaagtgcttgttactaaaacatgtttgaatgcattaaaattggtagcatttttttttttttttttgagactgagtctcactctgttgcagtggtgagatcttggctcactgcaacctctgcctcccaggttcaaatgattctcctgcctctatcttctgagtagctgggactacaggcacgtgccaccacgcccagctaattttttgtatttttagtagagacgggggtttcaccgtgttagccaggatggccttcatctcctgaccttgtgatccgccagcctcagtctcccaaagtgctgggattacaggcgtgagccactgtg

SEQ ID NO: 93038 - DNA, 1040 bp, Homo sapiens
ctaaaatgggcagaaatgaaatatttgccatgatctggaatactttaatttgtaataaactttagatgatcatttaggtctctaaggctgctaaagagatttcgatttagaaattgttcagtaattaaataactttttgattttctagaaacattatacttgcataatttggattttatgatttttcaatttacatttacccttttattatctgtgttaaagcaagttttgctgtgcactataataggtaaacacttttagtgcaaatgtaattttaaattaagaggccaaatagttttcaaatactaacagcatctttacttgcatttacataattagccccatagttgaaggaccataaagcttcagtcaggtagatctaatagcacttctattagaagaggccggattgtgtgtacttttaatattttgaacaaatttaagtctccaacttgaagttttcccatgtagattttggtgaaatgttgatttgattatttgcattgataaccctttcttgtttttcatttttaaaaatgagcctaaattactttcatctcctctttttttcttcatatgttctttaatagcaaactctttgtaagtttttttcttcttctccagatcctttcttttatgctcttggggaagtttttttataggctattccagcattttacagatttgttttattgatagttatgggaaagccaatttttttttttttttttttttttttgcttttcacctggctagcctgtgcgtctgtgtctctctgtctctctctctttctctctctctctctcccccctccctctcttcttccctccctccctccgtctccctctcttcttccctccctccctccctctcttcttccctccctccctctccctctcttcttccctccctccgtctctccctctccctctcttcttccctccctccttctctctctctgtgtgtgtgtgtgtgtgtaatgtgtgtgtgtgtgtgtgtgtgtgtaatgtgtgtgtgtgtgtgtttatgtgtgtttgaca

SEQ ID NO: 93039 - DNA, 1130 bp, Homo sapiens
tctaatcagagtataaagctcataaactttgaagggaaagtaatgtcttttgattatcttaatttctgcagttcctagcaccttgtctggaatgcagtctgcaccaaatagaaaattattcagagaattatactaacattaaaaatatatatagtaaaaattatgaatattgttcaatgaattcttctgtcataaatatatttttcagaaactttaattgtttagtgacagactcacataagataccacatggaatacctgatttcttaaatttggcagacagaggggaatgaatattttactgaatatctgtgagccaggcacgatgccatgatttgtgtattttttatttctgaatttcataactggaaatgtatttcatatatatgttatgtaccaaaacgtcccaaaaaacttacgtcacctttagaaaatcataaaaacctcatctttcctttggagagattatcatagctttttatctccatttgtgaattaccattttatagcattattatctatgttttcttatagctttttttgtgtgtaaatataaagtatgctttagttccagttggtagaactagttgccatgaaccagtggagaagagcaaccaaattttatttgattatcaataattggtttttagctatttagtcatatttattctggcttgttttgacctttaatatttttcttagataaatatttccttgtgtatgaaattatcactcaaaagatactcagttatttcccagattaaactatgacttgtactaaatatttagctttttttttgttttgagacggagtctggctctgtcaccaaggctggagtgcagtggcgcaatcttggctcactgcaagctccgcctcctgggttcacaccattcttctgcctcagcctcccgagtagctgggactacgaggcgcctgccaccacgcccggctaatttttttgtatttttagtagagacaagagtttcaccatgttagccaggatggtctcgattaaatgtttagcttttaaaagccacttgagatctctatctgctagcataatttagcatctcattttagaatgcatctgtatattttttattttgaaaggatatgatttctcttaatc

SEQ ID NO: 93040 - DNA, 1119 bp, Homo sapiens
tatttaagatacatagcttgttttgttttaatattgttagcttatgttttttttaattaaaaatattcaaaacatttttaatcttaatgtaagtattcagccctttattcaaagttttgtttggtgattttaaatggctagttttcattttgctggtaaaattgcacatagttattgatttagtattgattatgactttagctaaagatgtgtatatttacaaaacatagttggtgcatggaataatgaatgtacctttgctatccttctccttttgtgtattaggctactgtggagccgatatcaaggccctgtgcactgaagccgccctgattgcactgcggaggcgttatccccagatctatgctagcagtcataaactgcagctggatgtttcctcaatagtgcttagtgcccaagatttttaccatgcaatgcagaatatcgtgcctgcttcccaacgtgctgtgatgtcttcagggcatgcactatcccccatcataagaccactgctggaaagaagcttcaacaacatcctagcagtcttgcaaaaagtgtttcctcatgctgaaattagccagagtgacaaaaaagaaggtactctaaactacttttttatattgttaagatgaaacaaatacaggaataaataaatatagtttcctcataagattatttatgtgtcacttttgtaatatatctgtttattcagtactatatattccaggcctggcatattgcctggcatatggtagttgcctggtgaatgtttttaagacaaatgaatgaatgttcacttttgggacattctgatcatcttaatgtagggctattactatctttagaaagttgactgtaataataataataataggttaacctttaaagcccctaaatcatcacttactaatccttttttttttttttttttttttttgagatggagtttcgctcttgttgcccaggctggagtgtaatggcgcagtcttggcttactgcaacctccgcctcccgggtacagcgattctcctgcctcagcctcctgagtagctgggatttcaggcacctgccaccacgcccggctaatttttttgtatttttagtagagatagggtttca

SEQ ID NO: 93041 - DNA, 1115 bp, Homo sapiens
gttcagttcattgaaatttatgcctcatagagtatgatgaacagctgtgaagatagctgaccttttgttagaggttatggatttggtaacttttaccttgaaattcccaagttcttagaggtttttgcatgcatattgggtgtgatttttgcatagtgaaaaactcaacatacattgatatcaggaacatttgcataaatagtaggaaacttatgattaatgaaacactcaactctaatcatatttttctattccattttcaatgagagggctaaaacaatgaaagagtctcaatgaagtgacttatcttgtgggccttcattatgtgtgatgctgtacttaaaactttataaaattttgttatgaccttgtttctagtctaacctctttagtagctgtattttcagtctttttagaacaatttctagcttaatagcagtattcaggaatgctctttatttgataactaaatgtgttcacagagtattagaattgtaatggtagatttagtatggttatgaaagggatgtttataatttctttaatattaacttttaacgcctaaaaggctgtagtatattttcagtattactagaatgatcatattatttattttctaaacaaggacgctttgagagtgaaaagatgtgctattatgacaggacaagaggcctaaccagcacatgtggttaccctaagtataacccatttagccatggttatgatgcaattttaaagttttagaaggaagtatgttaaatcagtagttctcaattttgtgtgtatcagagtcacttctaaagctttcttgaaatgcacatatgatttcaagcccccagagattctgattcactgggtttattgtggggcttgggaatctgtttttttttgtttcagtttcagtgtttattcagatggataatcaaggtgagaaccacagatataaactggtaattcttacttataagcgaatgtaaaaaaatttccttctttataagtctgttggttataataattaatgtgaaaatctacttcattaaatggggtctattgatcatttctttgtctggaataaatcaataaataatacattgctgttatatatgtaattaaca

SEQ ID NO: 93042 - DNA, 1383 bp, Homo sapiens
ctacagttattttgttagcattaaagactgataagccgggtaccatggctcacgtccgtaatcccagcactttgcgaggccgaggcaggtggattgcctgaggtcaggagttcgagaccagcctgaccaatatagcgaaaccccatctctactaaaaatacaaaaattagctgggcgtggtggcgtgcgcctgtagtcccagctacttgggaggctgaggcaggagaattgcttgaacccgggaggcggagattgcagtgagccgagattgcaccactgccctccagcctgggcaacggaatgacactccatctcaaaaaaaaaaaaaaaaaaaaaaaaaaagaaagactgataaacgttattgtaagcagcagtgtttacaattcttttaattttgcctgaaaattattttacagctctatagtatcaaccctccttgctcttatggatggattagataataggggtgaaattgttgttattggtgctacaaacagacttgactctatagatcctgcactcaggagacctggtcgttttgacagagaattcctcttcaacctgcctgatcaaaaggtaagagtttttgttttcaatatgttaacatttatatgtaattctactataaggcatatgttctgagggtgatattttatgaattttcattgttcagattttctgcttaaggatatcttagctaatgctttaaaaacctatgtaattatggaacagtttttttctattaacaattataagaaagtttgtgatttttaggcagcaagaggaaagctcttgatagatcactgtagatgcttacttgtgctttagttctccagattgtagtaattgtcctgtatggcagtttctgtgtccctagttagccaaagtaactttattctcataaaataatgtttttatagagtattagtgggtttatgaataaggactcagtacctgaattttcatagaaattgctatatttaattaaaagcaacaaactttattcattatggtataaagtttttttaaaagaatgtactaataatacagggtaatgtttatcattgattctgtaaatgttatatgatatacaaatttttttttcccaattcaacttcaaacttttaatattattcttggtttgactagtataatctgactggcttttcattagaaactcaaatttgagaggaagagatacatgcaaaggaggtactgtatgtgaatatgtatagctttgtttttggacctctatgtgaaatgcctggtttacatacctagttgtgaaagtcttaagtgattcggactgtatggaagaccatagagaaacaaaggcaatggcttccctgtgtagagcagttcatacctcagtttgacatcagt

SEQ ID NO: 93043 - DNA, 1062 bp, Homo sapiens
ttgtgtcaaatagtttggacttttaatttccctacataataggagttgctaaaggattttgatccaagggttggccattcagattttttttttttaaagacaacttttggtataatttaagttagattgtaattctgtttctggccatgtctgagactttatcgtctgaagacttttcagttacaagacacttaaaaatgcagataaattccaacaaacacttgaaatgacaatctgtaattggaagataccaaggaaagattggaggttaaatatgaatttatatttgaggctacttatattccccaccccctttatatcttgaatgagaaacctaggtcactaattttcagttattcattttgaaaagaagaatcacacatccttccttcacacatacactgggtatctagcattttgattccgcttatagattttggaaacacagctagagcagtgtgtttgggaaggagaatgatttctttaacatgttgaacatattggagaagttattttaggcaggtgttagcaataagagtaaaggaatagaaatgagagcagttggaaaacactagaaagaacattgttactagaactacagtttctgttataattaggcatgaaacacttatattcagaaatgtttaagtcatactttttaaaaactactctaaaatatgcagaaaataattttgagttgaacataaagtggtagccattctaaagaaattgtccaaaggtgtaacgataatgtaaatctaatataatagaaactaaagcgtcatatacatttccagacatttaaaaaccccctagattgctatctattaaaaacaaactactgtattttttctttttaagaaaaacagctttattgagatacagttcacagtgatggcagcggcaggccatctggagtggccaccatcatcatgcctgctgtattggggaggtgtagccggggctgcacattccacggagcttttggaaactggggacaagtgggaatcccaccccttttgagtcggtgggatgggagctccctgggtgcagctgcagccg

SEQ ID NO: 93044 - DNA, 1114 bp, Homo sapiens
cgtctcagaaaaaaaaaaaaagaatattcagaagatacacatataggctgttagatttaaactgataaatgtctgttttctttaaggaggcactttttattcagattttgttctaatttatttttcacgtttttaaggatatggaaaatcttattaaagagtcatttgaatctatctatcattccttttgagtatttctacattatttattctaaagatgtgaaatttctgggtcattgggaaacacatttaaaatttctatatatcttgccaaattactctgtactttatttcttgtctgccaaagcttggtgatttaaggacttagcaaagtaaaacttttgtctatatcctggaaaaagctttatcaatgtctaataattatacttcaatacaaaattatatggaagggggggacattttttaaaattggttatcagcagtgatgataatataatttacacttcttgatttttttattcttctaggggctgtttgttttatggccctcctggcacaggtaaaaccttggttgccagagcattagctaatgaatgcagccaaggagacaaaaaagtggctttttttatgcgaaaaggagcagattgtttgagcaagtgggttggtgaatctgaaaggcaacttaggcttctttttgatcaggtaagagaaatcatctaattcaagagtcttttctgttctgttctgttcttttctttctttgtttttttgagacagggcctctctctgttacccaggctggagtgagtgcaatagcgtgatctcgtctcactactgtcttgacatccagggctctagcaattctcctgcatcagtccttgccccagtagcctgaactacaggtgtgcatcaccacgcctggctgatttttgtattttttatagaggtgggatttcaccacgttggccagctggtctcgaactcctgggctcaagcaatctgcctgctgagaatattttctttagaatatttaatacgtttaatctgcaaatacaaactgtttatgaggaagcatattttccatccaatatgttatattcaggattagtaatctgtgattgtatgccttagaggcatttaatggcagtttcac

SEQ ID NO: 93045 - DNA, 1539 bp, Homo sapiens
aggctgaggtgggaggatcacttgagcccaggaggttgaggctgtagtgagctgtgattgcaccactgcattccatcctgggcaacagagtgagatcttgtctcaatcaatcaatcagtagcttaattttattttaatcccatatattataatacatataggtttatttttattttatagttgtataacatgggataatcaggtatgttaagatgttttcctaaaatggaatagattgggctcttcgggcaaatagattaacgatcttgtttgctttatctagtgagtaacttaatttttggccattgacaagaatgtaagaaaagtagagtaaaagtatgaaatcctttgatattattttctgggttatgagaaaaaggagaaagatgaagacacatcaaagaatgtaaacttattttgacattaaaaatgtgaaacttttaatgcaactttacttgcacttttataaatttcagatgtttgcctatgaacttcagagcagaggacttagctagcggtattctccgagaacgagtgaaagtgggtgcaagcttggctgatgttgatccaatgaacattgataaatcagtaagttttgtaaatgtttttctagaagttttcttttttttaaaagtttttttcttgtttctaaagcagcacatagtagaactagaaaattcggatatgacagtgttaatgtttcgatgtatatgttttgaaacctaagaaccctagccacaagtggtgcttagtcagatattttcatttcagtgttactggaatatgtaacaggtaggaaatgaggctgagaaggttatgaggggcaaggcttcataaaccatgatgaacaatgggctgttgttgaaattgcctagtttcatgattttgtattttgggtagctcactctggctatgatatagttaatgaatttgggggaagcaaggctggcattagggagactggatgttgctgtagtctagtaatctggagtagtggtcatggtagaaactaggataactttgaagaagtaaatgggtttgaaagaattgaggattgaattcagaaatgacagaatttggtgaattaattgcttttggggaacaagagaaaggtacaacttgagagtattacccaggtttctagcttaggtgactaggtagataatggatggtctggatggagaatggcttgattctctgagtagggaacatgagaagaggaataaatgtttgaggcaggaagatgatttaattagttgtatttaactaatacatgtttaggtatctgaggtatactacaagtggaagcaccttgtaggtaatgggttatttaggtttggcattaaggagaaatacctggactagaaattcaaatacgggtcatcaatataaagagcggtgaggtcactttggaaaatagatgatcgatcacacctggggaagatacatagcacaaaaacaggcacaagactcggaggacatggtagattctttctcattgttagtagtatcttattttgggggatattttggaataag

SEQ ID NO: 93046 - DNA, 2480 bp, Homo sapiens
accatgcctggctaattttttgtatttttagtagagatggggtttcaccgtgttagccaggatggtctctatctcctgacctcgtgatccgcctgcctctgcctcccaaagtgctaggattacaggcgtgagccaccgctcccggcctagcatgtatttcctgaatgtcagtgttctacttgaatttctaaaagagtctttccagtaaaccttatattggctttaaactttttacaaattgttttattttatacaattacttatttttatacaaataaagataaaataattttatacaattattttgtacaagttattcttaataccatcttcaataaaaagattgaatttgtattttttcagtgtcatgtatctgataattattcatagaggcattatatattttttattgggaacttattaacaaaagccttatatttaaaaagttttattttaatgtatatattaaggtagaagatatcctggttttgcttttcttattgggcactgtattctgttgatggatgctggttatgaaagaggtatttaattgggatatggtggggcgcatcactgtaattgcagcactttgggaggctgagatgaatgaatcgcttgagcccaggagttcaagaacagcctgggcaacatggtgaaaccccatctccacaaaaaaatataaaagttagctgggcatggtagtgcatgcctgtagtctcagatactcgggaggctgaggtgggaggatcacttgagcccaggaggttgaggctgcagtgagccatgaacaggccactgcactccagcctgggtgacagagggacactctatctaaaaaaaacaaaaaagaaaaaaaagttgtgtgtagttacacatcagagatgatttgattacactttcacaaagagctcttttatgtatatggtgccaccattgtctaaatcctgattttattatgtgattgtagcactgctgaagctgtactacaggaaatggacaacattaacatccgacagaatcgtcgatcaggagaagtagaacgacttcgaatgtggacagatacagaatttgtgagtatattagctgtagcaatctttgtaaatatttttcattttaattgaggaatttaaagggagaatgcaacagttggatgtttttgaattagcatgagtgttccttcgtcttcatttccaacttagtttgggattttattgcttgcttgtttcttttcttcattctcctcttgctacaacctttccaagaagaccctcttcacttttgctggatgagtcaccttaaagtgcaactgtgattctgttattcttctgatttgaaccattaatggttttttgttgtgcactgaagattaaaaacaccttgatgttgatgatctggcttcaactttgttttctcacacaccattgcctaagtgtaaacaaatcattcttattcctataacttttactcttgttaatatttctagttagtgactgatgcagttctacctttgtttcaaggttcatttcagatactgcctctcttccctttaccccataacaaaaggagggtcttctctttgaattctggagtactttgtacctctctttatgacatttaacttattttactttcttttataattacctgtgattgtcttatttccctcctactaggctgtaatttgcttgagggagaaagtatgttgctggcattatgtgttttacatttttataagtttattgtaagtgttttcccttttatttcttacatttattgaatttaggaagctccattttcacgaatctatggcacgcaaataggtgctcaataaattttgttgagcaggtatgtcccattgggttgtttttttgtagtggagaataaatgtcatgttgctatttgacagatttctttctttaaaaggaaaacatggatatgtattcaagagtgaaaaggcgaagaaagtcactaagaagaaatagttatgggatacaaaatcatcatgaagtttctactgagggtgaagaagaaggtttgtaaagcactttttggaattctagaaagttcaggtgggagggaagaaaaataaaatatacaagtaatatatgtagaatgttgctgagtagttggtttttggattttgaggtctatattgtataatttgaaataatttaaattcagttggcaatctgagtttcatttccttcatttggaaaaatacttttaagtgcacattatacattatgtaatgtattttattagtagccattggtagtccttcagtgatctggtatgggatttactttgggctcatttgcttcttagatgaggccttttttgtacttaggcaccttctaactggatagttactttgctatccgtggcctctaaatctctgattatgtggatctcaaatttaggtatggtctgaggaataaagagtaaagtttagagagagacttctaataccagtggaaagg

SEQ ID NO: 93047 - DNA, 1661 bp, Homo sapiens
ttggatatttcaaaaatatcttagtttgcattgacaactcttttattatgcagcaatttagtttttacttttgaactttctgactgtactaagaagtatggtgactttttcctagtcctcatgttttgatggcctttttagtaactttccagtgatttacatttctcttcttccacccaaaagagagaattgtaaaatggctctttcgataaatcagctgtttgatttgtcagattaaatgtgtaataaaatactttgaagaaattattaaatgatattggtattcaagcacttttttcttactgtttattgtgttaataaatttatcattgtttgaattttatttcatcaaccaaaaccaataggtaatgcctgtgacccctgctactcatggtctcagttaattttatggtatatattaagcttaagccttttttttgggttttgatttgtagagttgatggcagagtaaacttagtgtataatctgttattaaagcttttcttgaagtaatgaaatggcttttaactagctagtatattttattaattgacatattaccaatcttacagtaaaaaaagttatctttacttttaaaaaagttttaaagattaaaataattccagcagtatttcatttcttgcttatataagcaaatgttgatgtgtttgcatattaaatattattgtgttctaggttaacttctcagcctggtgctacattaccaaatggacatagtggcttatgtgagtattctattataaaactggttagttttaaaattcttacaatgttagagaaagcagtaaagtggggaaaaatagagtgatttaatagtgtgctgagcatacagttggaaatggctgaatttcagtcatagtaaaaaaagtatgtaattgttaaactttgagaaatcagcatacctgaaatttaaattatttatgacagattgtaaaatttatagaaattttagattattgactattaaagccatttaaaaagttatattaaattttttgtagtcttttaaaagtaattttttgattttttttttcttttctgtctttctgtattctgtactttgaaatgtaaatatctctcttcttgtagcccttcgaagccatccccttcgaggggaaaagaagggagatggggacctttcttgtataaatggtgacatggaagtcagaaaaagttgtcgttccaggaaaaacagatttgaaagtgtgaaccagagtttgttatttgatcaactagtaaataggtatgaatgccaagtattaagcagtttcatttaattatttggtttttaagacagttacgttttaaaaaaataacataagcaacgacttagcaatcaatacagttctttaaaaacttaacttgaagctgggtgtggtgggtcagttcaacattttgaattgaagatgttttgagactgagtatgtgggattgagtctcttagctagtcagtgagctgactatccgttcaacgtctgcatctgtaaaactttactcttctcagataatatgtcatcctacttaatctttacaatagcctggagagggtggtcagtacaatcgctatttgacaagagaggaaattatattctacagtgataacatcaaatttgggcttaagttactattaaaacttaagt

SEQ ID NO: 93048 - DNA, 1382 bp, Homo sapiens
tacgcctgtaatcttagcaatttgggaggccaaggcgggtggatcacctgaggtcaggagttcaagatcagcctggccaacatggtgaaaccctgtctctactaaaatacaaaaattagctgggcatgatggcgggtgcctgtaatcccagctactcgggaggctgagatgagagaatcacttgaacccgggagatggtggttgcagtgagccaagatcgcaccactgcactccagcctgggtggctgagcaagactccacctcaaaaaaaaaaaaaaaaaatctcagtatattaaatcttttaatatactcatgtatttcatgtcgtgtctcctttttcagtctcccttttataaagatgatgatgacaataatctatgactataaggtcattggatcaattgaagaacaagtttttaaagattttttcttaaaacagatctttcattagtaataaaagccaagtaagcattgtcttctttagagcagacaaaaagcttattgtgcttttttccccaatgatgttaccattgttctgaaaagttttagatttcttttgtggaatgactttagggtctgcatcttattcttttgaacaattcaagtgatgtgaaattccaaccatttggctttgtatatagtcagaattcatttggtgccaagacttgtgaataaactgatcaagctgagttaatgctttgttgggtctaaagacaaagtatatttatgaagtaataaagttggtttttctgtgtggttttaagtggattttgagagtgattcttaagaattccaggaatgcattgtgtaatgacaacgttgtaagaatacctgtattacatccatttagttactttatagtcacactcatatacctggagaatcatgtgcattgtatacagtggtgctaaaaatgaaattttctccaagatagtatattaggtaaaggtattttttttgttgttttctagaggaaaggcgggggggctagatttttgttgttatttttttgacaatctgaagatgcgtagtagtatgagggttttttttgttttgttttttgttatttattatttattttttgtttttagacggagtctcgctctgtcacccaggctggagtgcagtggcgcgatctcggctcactgtaagctccacctcccaggttcacgccattctcctgcctcagcctcccgagtagctgggactgcaggtgcctgccaccacgcctggctgatttttttgtatttttagtagagatggggtttcaccgtgttagccaggatggtctcgatctcctgacctcgtaatctgcccgcctcggcctcccaaagtgttgggattacaggcatgagccaccgcgcccagcctgttttttgttt

SEQ ID NO: 93049 - DNA, 1313 bp, Homo sapiens
aggtgattctcccacttcagcctcccaagtagctgggactgcaggcatggaccagcacacctggctaatttttctatatttttgtagagacacggtcttgccattttgcccaggctgggctcgaactcctgagctcaaacaatctgcccacctcaacctctcagtgttgagattacaggcatgagccaccatgcccggccaaaaacatcctttaaagtctacatcaaataggttatttatttatttatttatttaaagagacaggtcttgctgtgttactcagactggtttcaaactcctggccacaaggatcctaccgcctgggtctcccaaaatgttgggattacaggtgtgagccactgtgcttggcctcaagtagttcttatccatcttttttaccactgccttccacgtcttatgtacatagtaggtcatcagtaaatgttagttaactgaaattatttcccttatgcctgaggtacttttcctactcatggattataatcactgtgacacagattgctaaatggctgtgggtagattgcataatcttttaaatatctttgtcatgaaactggtaacgccttctctcaaagggttaggttatcattagctagtaaaatgctttgagggaagatgaaaaagttaaggttgagggttatgatcatcctattaagggtgaattgttagcatcaggtttgtaggtagaagctttcccaaagcttgaagttaattaaatggtgctgaagtaattattttgtacctgtttacatcgtggttgcttactttacttaaatccctagatttctttggagggaaggagtctttggtaatcctctttattctgaggtctctgtcatagagccaaatcaagattgaaaccctcccgtgacaaaaaaagtaaatataccagtacattgtagcagttaggatgatgtgctttgtattatacttgaagtatgttatatgccagaggtcctcagacttttgtgtactaagaatcatttggaagcccttgttaaaaacgtttcacctccagagattccagtccagcaggttgtaatttttaatgagtaatgcaggtgatttttgattcaggtagtatgtaaacaacagtttgagaaatacttctgaatggaattgaaagccagtagaatatgcaaatggccaataaataaatgtgcaaaactcacttaaattgatattcaagtaactatatacttggattattttaaaaattcaaatattttactacttttttttttgtcttcagttcaatggtacatagtacttatttccagagtatgtttggg

SEQ ID NO: 93050 - DNA, 1394 bp, Homo sapiens
tctgtggcatttttcttttcttttctttttttgaaacagggtctcactgtgtcacccaagctggagtgcagtggtgtaatcatggctcactgcagcctggacctccctggctcaagcgatccacctacctcagcttcctgagttgctgggaccacaggcatgtgccactactcacggctaatttttaaactttttgtagagacaagtctcagagtctcctttgttggccaggctgttcttgaactcatgggcttaagtgatccttttacctcagcctcccaaagtgttgggattatagatatgagctatcatgcctgaccatgtggcatttttcagtacctacattgtctctttcttattttaaataatgtaatattttcagatttttagaaactaccttttagaaatttttatgtggaagaaaatgcattttaaattattatagacttttttaatctttctgtatctcctaaactaacaggtcgcttctatgtatttttttctctttctgtattctttcatgatgattgcttagaaatactaaactagtaagcccttgttcttggaatatttgagaaaaatttagaacattttatatgcttgccatttcaggactttgtagaatagtgttggccctaaataaataaatagcagtgcagagttttgttttttgcagtcatggtaaccactgcctctgtgcattccttttataaatgaaagaaaaagaaattgactgcacttctaagctttcttgtgaaaacaggaatacttgttaaagaaaaaaagtatacaaaaagcctgtcctataaggaaatcggaagagattgatttgtacccatacattttctgatctaacttgggggaaaatgttcctattctgttttttctttgtctctttgaggtgttttctctcatcatttacttactctttaaataatttgttttattctctcttacagttcccttttttctataagaagccaggttgtcttttcttaaagaaaaaaaaaaaaaaaaaggaaggaaaatcctttcctccaagtctaaactattctttcttttttaattctgacacttttgtaagactagctctgtagtcatcacctgtacttgctcaccacttgctccattattcacctagtgttttccaccccgcatttcacagacattgccctgtcagaagttacaatgatctcttacttacaaatcctcaggtttatcagctttcttctgttaaagtctttttggagcagtttaactcctcttgttttagtgagagactatatttgtctctgatttttatgacatctcttgtgcttatccccattaattaggcatttttttaaggttttgacttctgcccttctgtttttatactctgtacgttacctatg

SEQ ID NO: 93051 - DNA, 1002 bp, Homo sapiens
tctaactcatctgaagcaattagctcatcttcactcatcagtttgtggtcccatttttgaattcatggatatcatgctgtcctcaccccccgaggaataaggtgaggtaatttgtcaagcagctgttatagagatgttaaaaggctaggaatcaataatctaatgaggaaatgaacatttggtagcttttaaattgctaaaagaatgaaagatatgagagctctttgtagaagggtactaatgaaactttgtttcaaagatccttttaaaatgttttaaagcaccataaataacagggtactaaagatttactttgaaatatttgtttttcagtcttaagaagatttatgttcggctctaggagatgatgtagtcatctaattgctttctctgaaaggtttttttagagacgtaactactcttacatagtgattggacctttagaagaggataaattataattctgaatttattaagtttatggactatatatttatgaagcaggttgtatatttctggttagctcttctccagttttgtaggaatttagcactcctggttcaccctttctggagtacttaaagacaccctctatgtctgtggggtctgtaataagcatttgccagtgtctgtaaagtctcatttggtgcaaaatggggttgcccgtgttgttgctttcgcagacccttatttttgtagaaagaaatgtattcctgtttgtaacataatattcctgtttgtaattgaggagtttctcctttttctgcttttgtgccatgtttgtttgtttgtttttttttgagacggagtctcgctgtagcccaggctggagtgcagtggcgcgatctcggctcactgcaggctccgccccccggggttcacgccattctcctgcctcagcctcccgagtagctgggactacaggcgcccgccaccacgcccggctaatttttttgtatttttattagagacggggtttcacggtgttagccaggatggtgt

SEQ ID NO: 93052 - DNA, 1008 bp, Homo sapiens
gcctagagcgtcgctccccggccgccgagcgctgacgccgcgccgggggcggggcagctggaggcggcagggagaggagcgagcagccgggaagggctggccggcttcgcagcgccccgccgtggctgcggccggaagcggtctcgttggccctgcggcgctggagccttgacgcacggagctcgagagcgagaacgggagagaaaggggtagaaatggcggctccgctcggctcccgctgaggagggcgaagccggcggagtgtctgtgctgccggtctgcagcaccgcccccgcttcccgcacgccgcctgctcacgccgacttcccttcctctgcccggctctctcttgtgctcgtctgcgctccgcacgctccgggccggctcgtctctcattgcccggctcggctccgctggccctgactgaccggccggcgggccggccttgctcggctctcccgggcgcggcgtggactccgtccccctggctggaccatggtgaacacccggaagagctctctccgccttctcgggtccaagtctcctggtcccgggcctgggcctggggccggagcagagcctggggcgaccggaggcagcagccatttcatctcctctcggacccgctcctccaagacccgcgccgccagctgccccgccgccaaagccgggggaagcggtggcgccggcgtcactctggatgaggccagggtaagagcgcggcgtcccgagtccggaggctcggaagtgccggccctgctgccggggctttgtctggccgggttgggggtaggaagcctacagtggagaccgctcgggcggctggagacagggtctgcgggcgcggtggagggtggcacccagagaagggccgcgacgctggcccctttgcttttcaagctggcccggctcttttgtgtgaagaacagcccttgagtccaggggagagggctttgggggtccctttcggcgtcattcgaacgatctgctgtccgtgtccttgtcctg

SEQ ID NO: 93053 - DNA, 1007 bp, Homo sapiens
gcggtctggggcggcggcgctccggctctgaagggctccagccaaacggagcccgcggccaaacggtgcctgcggtgcctgagctgagtgaggccgaggccgggaggccgtgcccggaggtgagcgtcccggggccgcgccgcgtccggcggggtgagggcggggcggggcggtcgcctgccggctggggccgaggggtcgcggcctgtggcttggccgccgcggatcgtcggtgtcggggggagtctcgctccggagggccgcgtgtttgcgactcgggaaggggcgccggcggcggagcccgagccagggtcccgcccagcccaggtgagcggcgaccccgagcccctgactcgcctgcggcttgacttgcgagctagctgaaggcacagctcctggttctctcgcagggcgttccgaaacttacagttatgcgcaacacaatgtttctattttcaaaggcgaacgctgcacgatcgcagtccagtgatacaaagtatgcctattagtgacttcacccgactcccaccactcactttctctgatgttttgaaggcctggtgttcgctgatttcacgtttccttaatttcttctttgtgccttttttttttccttttcgctgccagtaataaaagagtttattacttgtcagcaatgatgaatgttcgtgtggcatccagcgttgagttcctatgtacgtaatttgagataagtaaagataggaaactgctgatttgttttgatgcgaatgcagaaaataatgtggtagtatgaagtctggccggttgcagtttgtttttaggggggaaactttaaaagttcatgttgtgtcttctttctaaatatgctgaaagtcggatttatttaaaaggcaattaaattcagtgaatacagagtatctttttataacactaatgttagtgctaggcactggcggagtccaaaaatgtgtaaaaaatgtgtgcaggagggagtggttaagcacactaatgatatgaggctgact

SEQ ID NO: 93054 - DNA, 1024 bp, Homo sapiens
ctgggcaacaagagcggtactccatctcaaaaataaataaataaataaataataaatgtgatccacccaccttggcctcccaaagtgctgggattacaggcatgagccactgcgcctagccattttttgtagagtcagtctcactattttacccagactggtcttgaattccttggcttcagcaatcctcctaccttttcctcccaaagtgctggaattacaggtgtgaggcacatgcccagttcatttgttaagtcaaatggtatattatactttttttcataataagttttaagaagtctttcttttgtcagattatcagacttaaaatgtattttctatcattgctttattttgatgatgaaaatgacagctttgagtttgctcactttttctttagacacttttaagtaatactttaggactacatggtaacttacatattaagctttttacttactttctttttacttactttctttgtacttttacagtaaggcgaaagagaatgaaagacgtagataacctcaaaagtataaaagaagaatggtaagttaattcaaactgaattgctttgttaatgcctttgttaatatcgtcctgtatttttattacatttcacttgcagagatagtagagtacgttttaattatgtatgactacttcattgtcatctactatgttgaagtaatttttttaccatagctgcattaaacaaattttattgaagttactgaatgttttttattaattttaaaaagttaaattatctgtgttcatacattacttctgttatttgataaattaaataactatttacctcattagcctcttgtgatagatacactattttagtgtcatagtgggaatatggctttggagtcagataaacctaggcttgaatcccgtctctgccttctattatctctctggcctttgggcagcttaggtaaattctttgagcctcaatatctcatctataaaataaggatacaaatacctacctatctgaaaggttttatgt

SEQ ID NO: 93055 - DNA, 1006 bp, Homo sapiens
ttgttcctgatgcattatcccctttagttcaaaagtgttttctgttaccaaaaaaacgcatagtaatcccttttaaagtcattttgagccctttaaaaataacacatttttggccaggagcaatggctcacacccgtagtcccagcactttgggtggccaagacaggcacatcactggagcccaggagtttgaaaccagcctgggcaacacagtgaaatcccatctctacaaaaaattagctggacatggtggttggagcctgtagtcccagctacttgggggtctgaagtgggaagattggttgagccctggaggttgagactgtagtgagctgaaattgcgccactccactccagcctgcacgacagagagggaccttgtctcaagaaaacctcaaaaaacagaacaaaaacaccacacattttctactccagaccagtggtttttaacctagagagatttttgcccctagatgcatttggcaatgtgaagagatgtttttggttgttataacactggggattggggatggggcagggatgtgcatcctacttgttgtatctcatgggtaaaggccaaggatactgtttaacattctgcaacagtgatccccaacttttttggcaccagggactggttttgtggaagacagtttttccacggacctgtcaggagagaaggggagaaggggagatggttttgggatgattcaagcacattacatttatttgcactttatttctattattattacattgtagtgtataatgaaataattatacatctcaccataatgtagaatcagtgggaatcctaagcttgttttcctgcaactagatggtcccatttgggggcaatgggaaacagcgacagatcatgaggcattagagtctcataaggagcctgcaacctatatcccttggatgctcagttcacaggttcatgctcctatgggaatctaatgccaccactgatctgacaggagacagagctcaggtggtaatg

SEQ ID NO: 93056 - DNA, 1030 bp, Homo sapiens
tagaaaattgccactataggctgggcttggtggcttacgcctgtaatctcatagctttgggaggccaaggtgggtgaatcacttgaggccaggagttcaagaccagcctggctaacgtgctgaaactctttctctactaaaaaatacaaaaattagctgagcttggtgatgcacgcctgtaatctcagctactcaggaggttaaggcatgagaatcacttgaaccagggaggcggagctcgcagtgaaccaagatcgtgccactgcactctagcctgggtaacacagcaagactgtctcaaaaaaaaaaaaagaaaagaaaaagaaagcaaccataccttgacagcttctcaaaacttaaggaatttcctagtgagattagtgtcattttgataaatataaatttttttatataattaaatgtgtcagcagttggaagatctgcataatcaagaaaaccagtattttccaaatgagcaatatatgatgttatacagtgatgcatgagtaaaagagccaaagaatcacatatactaaaagactttaacgtaacaagtatatgaaaagatggttggtaagtttcagattccacattcagattctcaactaacttttgagatactactactacttattacattttgaagaagtgtcaaagaagattatcctgggaaggctattaaaatacttctttttctaactacataactgtatgaggtttggttattaaaaaaaacatttcaatcaaaataacatgtcaaagcagactgagagcggtaccaattatgagaccccagctgattttttgacgtgagacattttaaaaagtgtttgtgaaaaatcctttcactctgattcgctttttaaattaaaacttaatctattagttgtgaaaggcttatgttgaaaaaaggcttatgttaaaaagcagacttattactccttgaccctagcatctactttcttttttcgtttttttaagatggcgtttcactactgttgcccaggctggagtgcagtggtgcgatctc

SEQ ID NO: 93057 - DNA, 1015 bp, Homo sapiens
cccagccaagtattttaaattttaccactatgaaaaatatttttgactattttcttttatttatgtaaaaaaaaaaacccagctatgtttagatataattaacctaccataaaattcatccctttgaagtatatagttaagtatttttaatatgtctacagttttacaatcatcagcacaatctaatttcagaatatcattattgaaaaagccgaatatattgctgaaagaaaaaaaaatcagatactagaagtcactctccattttcccctgcagccctaacataaccatgaatctactttctgtctatctctatggatttctgtcactatgtatttacctgttctactcattttcacattttgggctattatgaataatgctactatgaacatttatatacaagtttttgtgtggtcatatgttttcatttctctcaggtataaatctaggagtggaattgttaactcttatattaactttatgaagaactgcccaaatgtattccaaagtgactgtaccatttaacatttctaccagctatgtatgaggcttccagtttttccacatcctaacacattagcttctgtttttttaaattatagccattttagtggttgtaaaggggtatgtcattctggttttgatttacatttctctaatgaccagtgatgttgagtgtcttttcatgtgcttattgtccattcgtacatcttctttggagaaattcctgttcaaatcctctgtccagtttttttatttgtttgtttgtttgtttttttgagacagagtcttgctctgtcggcgaggctggagtgcagtggcatgatctcggctcactgtaacctccgcctcccaggttcaagtgattcttctgcctcagcctcccaagtagctggaattacaggcatgtaccaccacatccggctaatttttgttttttagtagaggcagggttttaccatgttcgccaggctggtcttgaactcctgatctcacgtgattcacccgcctc

SEQ ID NO: 93058 - DNA, 1020 bp, Homo sapiens
ttggggggcagtggttcacgcctataatcccagcactttgggagtctgagggaggaagattgcttgagcccaggagttcaagaccagcctggacaagaccctgtctctacagaaaatttaaaaaatatatgctttcacaataaaaaataataaaaactgatgctgttcatgagcttatggtcttaaaaattatattcctgtgggtttttggtattcatattatttaactacattgttttgaatacatttagttatttcattgtatagaatattatatatttctgtatatttctacatattcattttttgtatgtacagaatgtttttcagagaaataaaatacattgggagctttatcattttctttctttgttttccaagggaattaccttcagaattacagggaatttttgataaagaagaggtggacgttaaagttgaagacaagaaaaatgaaatatgtttgtctacgaagcctgtgttccagcccttttcaggacagggtcacagactaggaaggtaaatatgcctattgtcttgttttgcatagatcaaggcttaactaatattctgtctatcagtattttacccatgtagaccacatgaatggagcttatcatttctcccattggaaatcagattttttttaatgttaatttttatgaggacacataagtcatagttacctaagtatatattaacaatgcctggccaggcatagtggctcatgcctgtaatcccagcactttgggaggccaaggtgggcggatcacctgagatcgggagttcgagaccagcctgaccaacatggagaaaccccgtctctactaaaaatacaaaaaattagccaggcgtggtggcatgtgtctgtaatcccagctcctcgggaggctgaggcaggagaatcgcttgaacctgggaggcagagattgcggtgagccgagatcgcgccattgctctccagtctgggcaacaagagtgaaactctgtctcaaaaaaaaagaaatgccagcaatacag

SEQ ID NO: 93059 - DNA, 1086 bp, Homo sapiens
atcaagattggtaaggtgcatacatattcatccacacatacaaatatatctggatgcatccttcagaatgatcaggaagtactttatttagtttctttttcattataacctaaggactaagctcaataaagaacttataatttcttctagaaatttaacctgggcagtaggtaaaggtaaagtccatagatctatgaaccttctttaaaattatccattctgtaaagcactactcaaataataccagtaataatatatgtagcttacaaattactcagatatgtataacttcatcagattcttagaaccatcatatattgtggacataaataatatatctttctgttattactgaagaaacacatataacttaaaaaatcttccttaaagttatacttgctataatatttttatagtaattatttaataataaagttttattgaatggaaaaaacgtctaactttgttgtctggatttccttagtgccacaccaaaaattgtttctaaagcaaagaatattgaagttgaaaataaaaataatttgtctgctgttccactgaacaacttggaacccattactaatatacagatctggttggccaatggaaaaaggattgtccagaaatttaacattactcataggtgagtcttcaatttcagtatttgatattttttcaccaagttaaaatttcattttttctttttggttcagtcaacagtttattttttagagatagaatctttctttgttgcccaggccagagtgcagtggcacagtcatagctcactgcagtcttgaagtcctggattcaagcaatcctcccacctcagcctcctgagttgtagaactacagccacatgccaccatgcccagctaactttttttttttaatttttatttattgccagctaattttaaaaattgttttgtagaaagggagtctcactgtgttgcccacactggtctcaaactcctggactgaattcatcgtcctgccttagcctgccaaagtgctgggattacaggcatgagccatcgcatcctgccaagcattttatttatttatttatttttttgagtcgga

SEQ ID NO: 93060 - DNA, 1341 bp, Homo sapiens
atctgtgaaatgaggatgcattctataatccatggctacatgacgatcatgatacaattgtgacagcctctgtaaaacatagccataattcctttgtcttacctaagataattaacagtagtaattcatagtactaattatcttacctaagataattaacagtagtagtagtattgtcatcaaatttctgggagtcaaactttaaaagatagcccaaataatcagttatatcataaattcagttattctatatattaacatatccagagtctgggtgttgtggctcatgcctgtgatctcagcactttgggaggctgaggcaggaggatcagttgagcccaggagttattatgatggcaccactgcactgcatcctgggtgacaaagcaagacgctatctctaataataacatatccagatacttttaccagttgttgttactataaattaggtaattcaaattttcctaaaattatattaatagtttttgctgttttacagagtaagccatatcaaagacttcattgaaaaataccaaggatctcaaagaagtcctccgttttccctggcaacagctcttcctgtcctcaggttgctagatgagacactcacactggaagaagcagatttacagaatgctgtcatcattcagagactccaaaaaactgcatcttttagagaactttcagagcactgatttttgatagactaagtggaaaatttgcagagaaatgatggttgtaagtggacatgcaaaccaaaattggggattggagaagtcagactcactagacttttggttcgagtactattgaactctctcctgatgagaagatgtttagataagtacaagttaagaaagtagcatatgactggaaactatattcagtgcactttctccaaaagactacccagaaaaatagacttattttcaaataccagttatcaagatatattaaatagctgtattgtttagaatcttaatatggtataaattagcatatgtattcacaatattcattcagacatcattcccagacagcagggatttatttaaatgttagctgtctgagtttttaaatagctaatacgaccgggtacagtggttcatgcctgtaatcccagaacttcgggaggccgagacaggcagatcacgaggtcaacagattgagaccatcctggcaaacatggtgaaaccccatctctagtaaaaatacaaaaattagctgggcgtggcggtgcgcaactgtagtcccagctactcgggaggctgaggcaggagaatctcttgaacctggcaagtgtaggttgcagtgagctgagattgagcaactgtactc

SEQ ID NO: 93061 - DNA, 1077 bp, Homo sapiens
aaaaaaaaaaaaaaaaagaggcaatgataaaatcaatgagcttatctttctgatatagaaaataacaggatgacagttaatacatgttcaggaatctaagaaaatgtttcatataggcctatcatgtagcatttttatttgcataattatagtcaacatatgattctccatgtaggggtctctcattgagaatgtttcctgtgtacctatagaaaagcctctttggtagattttccggtttataattatttaaccagaagatacatgggaggttcttttgtatgtacctgtagaatacatcccagtaagggtcctatggagaaagacctgttgtcatcaataaccttcattattctaactgtgaaacgttcattaatgcgaataatatcctcaaagattttctacaatgagaatcatccagtaaagctttttaactgagaatttaaaagttgtaaaattgttagttaaatgtgtataattatcaaaagaggttgactttggaaaacaaacaatttgctaagggaaggaaaacttgaaaataatcaccttagatggggcatacaatttgacctaagcaattgtttcaaaactgtcttcagtttcttgaaaataattgttagggctgatatatagaaatacatatctaggccaggcacggtgactcatgcctgcaatcccagcactttgggaggctgaggtggatggatcacgaggtcaagagatcgagaccatcctggtcaacatggggaaaccccgtctatactaaaaatacaaaaattagctgggtgtagtggtgtgcgcctgtagtcccagctactcaggaggctgaggcaggagaatcacctgagccccggaggcagaggttgcagtgagccgagatcgtgccactgcactccagcctgggcaacagagcgagactccgtctcaaaaaaaagaaaaaaagaaatacatatctaatgttacagattgtggtttattggttaattactatgcatttttttcagtttaaaaaataatcttattttatatacttctctcggtataatttttcatgacatttcagcatgttgataatat

SEQ ID NO: 93062 - DNA, 1051 bp, Homo sapiens
tctataatgaatataaattatctgtgcaaaaaatacattaaaacaaatgacaaagccaaatactggtctactgaataagccatttccatctgaaggtttagtgcaatgagcaattttttcataaaatggtttgtacttaggaaaagaacaaaggagtaaaccctactaaagagtcttcatgctagttcagctgataacacaaagaataaatgaaaaattaaacatatcattgagttagtattcaaaaatagcacatctttacatttctgagtattaaatgaaagtaatgttggttaaagcaaaagcacctaataaatgtttgttgattatcaaactgaatgactttgccaaataaaatgacaagtgtatttgcatataactattttataacaagggtaaatgatttcacagatccttttaatgaacagtatttcattaacagttcttcaactgtcagcaaaagattgctctcaaaatactttaaggcactgaaatagatgcacacatattatcaacatgctgaaatgtcatgaaaaattataccgagagaagtatataaaataagattattttttaaactgaaaaaaatgcatagtaattaaccaataaaccacaatctgtaacattagatatgtatttctttttttcttttttttgagacggagtctcgctctgttgcccaggctggagtgcagtggcacgatctcggctcactgcaacctctgcctccggggctcaggtgattctcctgcctcagcctcctgagtagctgggactacaggcgcacaccactacacccagctaatttttgtatttttagtatagacggggtttccccatgttgaccaggatggtctcgatctcttgacctcgtgatccatccacctcagcctcccaaagtgctgggattgcaggcatgagtcaccgtgcctggcctagatatgtatttctatatatcagccctaacaattattttcaagaaactgaagacagttttgaaacaattgcttaggtcaaattgtatgccccatctaaggtgattattttcaag

SEQ ID NO: 93063 - DNA, 1025 bp, Homo sapiens
cacgtctgctccatcacagcaactgtggactcacaggttgctatagctactgagcttccattggataagatctgtggcttaaatgcatctgaaacctttaatatcccacctaacagtaaagacatgactccgtatgctttaccagttattggtgaagtacgctctatggataaagaggcaactgattctgaaacaaattctgaagtatcagtttcttcttcctatttagaacctctggatctaactcacatacatttcaatcaacataagtctgagggtaattctcttatttgtctaagaaaaaaggactacttgacaggaactggccaagattcttcacatttggtccttgtgacctttaagaaggcagttaccatgacgagaaaagtcactattccaggcattctggttcctgatctgatagcatttaatcttaaagcccacgtagtggcagtggcttccaacacttgtaatataattttgatctactctgtcattccatcttcagtcccaaacatccagcaaattcgattagagaacactgaaagaccaaaagggatatgtttcttgacagaccaactattactaattttggtaggaaaacaaaaactcactgatacaacatttcttccttcttcaaagtctgatcagtatgccattagcttgattgttagagaaataatgttggaagaagaaccttcaataacatcaggtgaaagccagactacctactctactttcagtgctccgttaaataaagcaaatagaaaaaagttaattgaaagtctttccccagatttttgtcaccaaaacaaagggctgttgctgacagttaataccagtagtcagaatggaaggcctggaagaacacttattaaagaaatccagagtcctctgtctagtatctgtgatggctccatagctctagatgctgagcctgttacccagccagcatcgctgcccagacacagcagcacaccagaccacaccagcacactggagcctcctcgtttgcctcaaagaaa

SEQ ID NO: 93064 - DNA, 1057 bp, Homo sapiens
tgaaaccccgtctctactaaaaataaaaaaaaaattagctgggcctggtggcaggcacctgtaatcccagctactctggaggctgaggcagaagaatcgcttgaacccaggaggcagaggttgaagtgcgccgagattgtgccattgcacttcagcctgagcaacaagagtgagactccgtctcaaaaaaaaaaagaagaaaaataataactctacaatattttctgatatccattccatactcagatttccccagttctaaaaatcttcattaggtagaagattttatttcttcaagatccaaagtatatacattgcatttgcctgatagctcagtagtctcttaatttataatactccccctgtccttttgtctctccacattattaacctgggaaggggctaagccgttgtcttaccaaatgtcctacattctagatttgtctagatttctcatggtgtaactttccttcttaatcatttcaggtaacctttatcaaaaggatggagttgggaaaaggaaaactactcaggactggactgaatgcgttgcatcaagcagtgcatccgatccatggccttgcctggaccgatgggaatcaagttgtcctaactgatttgcggcttcacagtggagaggtcaagtttggggactccaaagtcattggacagtttgaatgtgtctgtgggttgtcctgggccccacctgttgcagatgatacacctgttctactcgctgtccagcatgagaagcatgtcactgtgtggcagctgtgtcccagccctatggagtcaagcaaatggctgacgtctcagacttgtgagattagaggatcactacctatccttccccagggctgtgtgtggcacccaaaatgtgctattctgactgtgttgactgctcaggatgtctccattttccctaatgttcactctgatgattcccaggtaaaggcagacatcaacacccagggccgcattcactgtgcatgttggacccaggatggcctgaggctggtggtggcagtaggcagcagcctgcattcttatatttggg

SEQ ID NO: 93065 - DNA, 1720 bp, Homo sapiens
caacgtagagccagtcagggtggcaagagcacctgtagtccccacaactcacgaggctgttctgtgtagtagctgtgttcttagtattcctgatgtgacagtcagcttgacctatggatattttagttaagataaaaacgaagaacaaaattacctaattcaagaaattacaggcttatccggtatatctatccatgtttatttcctctgatggtttcaggttgatttcaaaatacttaactaaaaacgtatttcaatttactgtttttaaaagacagttaccagtttaaaagacagttctgtaagtcaactatcaatgctcaggtaaatgtatatcttaattaagtttaacttacctctccagggggaacacacctgaaactagaggaacagcttatgtggtctatgaggacatctttgatgccaagaatgcatgtgatcacctatcgggattcaatgtttgtaacagataccttgtggttttgtactataatgccaacagggtaagtatagcaaagttctcattgtgtagtgatctcatttgagaattagtgtagaactggccgggcgcggtggctcatgcctgtaatcccagcattttgggaggccgaggtgggcggatcacgaggtcaggagatcgagaccatcctggctaacacggtgaaaccccgtctgtactaaaaatacaaaaaattagccgggcgtggtggcgggcgcctgtagtcccagctactcgggaggctgaggcaggagaatggcgtgaaccccagggggtggagcctgcagtgagccaagatcacgccactgcactccagcctgggcaacagagagactccgtctcaagagaattagtgtagaactgtactgtgatgatatatgtctactatgactttcttttttggctaatgctattgatgaaattcatttggctgtagattggtaatttaattttggtgcttaccacatttccaggcatttcagaagatggacacaaagaagaaggaggaacagttgaagcttctcaaggagaaatatggcatcaacacagatccaccaaaataaatgttttctacattttcatttggactaaatcccacgaatgacaactaccacctttttttcctttttaattaatactaaatattgtgatttcttatttgaggttcaaaatgacctgcttgaaactttgatacatattggaatacattatgttaataaacttgtagctttttgtgaaacacctcagtcttttctcttgaactttcccttcctgtttgataccaggaaaaaacagttgaagcttatcaagaattgtaggtgctcctagggattctgagtttcttgagaacaggatctctttacattcttaatgcctccagggcccggtgcagtgcttagccatcaaaggaacttgctgtttattgcatgtccattaataatgaaatcttcataacaactcagtgaagataggtatttgcattttgcaggtgaggaaaccaaagttcatgatgttggttgaatgaataaaatgctaacatacaaagctggtgtgataacaaccagttattaaccaagcctttacatttgaataatgcttgctttatagttaacaaaacacctgtgtcaatatgggtacccttgtctttagaacagaggtctattatagaaatggtcatttagatgatagtacattgttagaaacttagatttgcctctttaa

SEQ ID NO: 93066 - DNA, 1002 bp, Homo sapiens
cccggccagatagttgactttttaaaagatgtgtgatataggtgtatctttatgccaatgggagcaatccagcagagtgtgcgaaacatgatatggaagaaagataggttgagtttagaagtgaaggttttgagtagatgaaggttggcgtagtaatagagggaaagtagttggatatagatgaaaagtatttcaattggtcatgtctattttctccaagaaacaagaatcagggtcatctcctgggatgggcagggaagagggtacagcccaactcaggtgttagcaggagtgatggtggtaaggtttgcaaaggcctacacccaccaccatgcctggctaattttttaaaatttttgtagagatgggggtctcactatgttgtccaggctggtctcaaactcctgggctcaagtgatcctcccactttgcctcccaaagtgctgggattatagggaccagccactgcacccagcctctgttgctttttcaaagatctgcccattttcagaaacatcaaattatacctcttattcttggctttttattattacgtatcattaagaattttttaaaatgcccctaattataggggcatttaaattataattttttagaatgcccctaattataataacaatacgtatttctcattttagattcgacttccacctgaagtaaatcggatattgtatataagaaatttgccatacaaaatcacagctgaagaaatgtatgatatatttgggaaatatggacctattcgtcaaatcagagtgtgagtcttactgagtcatttaaagaaaatgatagcataatctgtaatttcagaattatagctgacgatgaggccaccctgtgctgtgtgcagtgcgacaacccttaccaagagccttgagactagcagattgagatcagagagatgagatctttttgaaggggggagaaaacctactgagaccctaatgatccagctcaatgagagccaagaagaggatttga

SEQ ID NO: 93067 - DNA, 1060 bp, Homo sapiens
ttaccccggagtctattcgaagggggctgctacgtcagcgcgtctcagcgtaagacggcgctattccgctgtaacagcttccggcgggtcctggatgttgatgtcctgcatctaacgcggtgtaacccccgaagccgagcgagctccggaggaatttcagtatctgctacggtaacttcatcagcccgccaagatggcgatgcaagcggccaagagggcgaacgtgagtatcgggtgttctgcggagggtgggagaacttcgggtttgactttcttagcggcgtggatcggagcattcttgctcctcctccgtccccagagcggagaactccagaattcctatcctgtcagcgaagacactatccggccccatcctcagagatatgctccttgagccacatttctgtccccaccccttttgagagttcctcagtctctaccctagtgtcagtgatagtgttacccctatagcctctttgcttgacccgcacctaaggacctggcgttaggattatctccttgacttaaagtcgatatctcagaagagtcctcaactaacttaatggttcaccaacaactaggacctgggattcccctcagatcatggtgcttttcggatccttcattaacacattaattaaaacaatattttttgagcacctactatgtattctgcttgccatgtgggacataattcatcaattatatttattgaatagctactatgtgccagacactagtcttacgtattgggaatacagcagtgaataaaacaagtccttctgcttacattctagtgtttgagagtacagtgttacggaaacttttaaaaaaaaaaaactcaaaaaagagattagtcaacagtaaaacgcttagaggtgtaagatgaagttaggccgagtgaggtggctcatgcctgtaatccccgcacttttggaggctgaggtgggaggattgcttgagcccaggaattcaaggctgccttgagccatgattgtgccactgcgcagcacttcagcccaggagacagagcaagaccctgactcaaaaaaaaaaaaaa

SEQ ID NO: 93068 - DNA, 1034 bp, Homo sapiens
tttcactctgttacccaggctagagtgcagtgtcccagtcatggtgtactgcatccttgaagtcctgggctcaagtgattctctagcttcaccctcccaggtagctggaaatataggcaggcgccaccttgccttgcttttgatttgttctttagtctttctccccagggagagcaggcatgttgccccaaatacctgtgttttccttgtttgcagcagagtgtatgtcacatagtagaagttaaagccaaagaaacgattgaattaatgaatgtctctgtgggttattcttaggagtaatttaaacttatgaagtttaagttttggaaaattttagaacaagaaagctttaggataatatatttgtcttttctaccactgtttactaggaactagataagtatttacaacatcatgccttcttaaatgcaagaagaaaggagatgttatataaaagatgggttgactgtgtggcagatcctcttcagaagaaaattatagaaaaagtttgctcacataagaagattaaaaaaaggaggcaaggggaattagatggctttttaaaacatgtaaataaaaaggtactaagagatcatttgatgcttttttcagttgatttagacctaatgtcatctttgttcatttataatcattcagtcagtctgtccctgtcccctctacatatgtatcatctataccctgttacataatagcataaagtattcttaaacccaggacatttggaaaggagagaaaaggaagattagatttaattgtctacattagaaccatttttctgtgttttccccatgtggttattattattattattcgagatggagtttcactcttgtcacccagactggagtgcaatggcacgatcttggctcactgcaaacctccacctcacggcttcaagcaattctcctgccttagcctcccaagtagctggaattacaggcatgtgccaccacactggctaattttgtatttttagtagagacagggtttctccatgttggtcaggctggtct

SEQ ID NO: 93069 - DNA, 1460 bp, Homo sapiens
cttccttcactatacctgattgcttgaataaattaaatttaaaatgtagccttgtctttctttttgcatttgtcactgatgctgctttcaagcataagaatgatactatgtgtttgactctcaagtcctgatatgctcaaaattaactgtgcacctcttgttcttgtgtatcgttttatttccttgctatagggaaatgcatttatagaacattatgatccaaaagagtatgatcccttttatatgagcaagaaggaccccaattttctgaaggtagggtagatttcttttttttaactttggtattatgtgtttggttgttttgagcagccctaatatatgagcagtccttaagcgattccctaaaagtgcagtaacattttaagcatagtttcccatcgcctgatcttagaaaggaacaaaaagccaaaggccaaagtaaattaaatctccataaaagtggaaaatactggataatgattgggtaataggtaacgtttaaaaattccatagacttttaaatttgttacaaaagtaacacattttcatgatagataaatgagaaaattgattttcaaattaagaaaataaaaaaccaaaattctattacccagaattaattcattatgttaactcattaacatttttctgtatatctatctagacttctttctatatgtgtgtatgtattcacatttttattttataagaatggagttacatttggttttataatgagcttcccctccctcaatagtttattatttgcttctttctcaaaatataagtatataattttcttcattgcatgatattctgttactaatagcagaattaattaaccttgcactgaaggattaaccaagtcttagggtttttttcacatttatttcacctttgctgctactgtgtgaggtaagtcacagatgagacaagtaagattcaggtcacttgtcaaagtcacccagctgtaaatagcagagcacagatgtggtgttttgttttgtttcgttttttcagagggagtctcactctgtcacccaggctggagtgcagtggcgcgatctctgctcattgcaacctctgcctcccgggttcaagagattctcccacctcagcctcctgagtagctgtgattacaggcgtgtgccatcatgctcggctaatttttgtatttttagtagagatgaggtttcaccatgttggccaggctggtctcaaactcctgacctcaagcgatttgtcctccttggcctcccaaagtgctgggattacaggcttgagccactgtgcctggccttatcttgtataaaatgttgttttgaaatatgtacacattgtggaatgactaaaccaattaacatacattgcatcacaaacaccagttttttctaagtaagaaacctaaaatcttctctctctgcaattttcaagaatacaataccttgttattaactata

SEQ ID NO: 93070 - DNA, 1117 bp, Homo sapiens
tccagattcccacaaatttctaattcaaggcactttataactccaaacgagtggctgaaactgcctacaagatacatagaaagtgaattttgtagaaggagaaggtaatggttaatatactagaaattatagaaccttttggactttgaaaattcttcagactgatataacatttttcatagttatgattttttaaaattatcatttttctttttttttgagacagagtctcactctgaaaatttcatttttcaatgaaaaatccataattcttatctttgtttctctgtatgtgatgtttcttttttcttgggtactttcaagattttctgtttctctttggttttcattagctagattatgatctgtttatatttgtttttttctgtctatcttaatgttctctgaggttctcatatgtgtggttttatgtcttttattattttggggaaatcctaggccattatcacttcaaatatttcttatttcctgttctgtctactttttttcttcctcctgagactccaattatatgtatattagatcacttgatgatgtctcacagtgccatagctcttactctgttctgattttccactctttttttccttatttgtttttcagttggatgatttctgacttgtttttaagttcactgcccttccttagctgtgtcctgtgcccatcaaaggaactcttcatctttgatatcatgattttcaaatttctagcattaccatttgaatttttagatagtttttatttattctgaaattcttcatctgttcatgcatgttgtccaccttttccactagattctttaccatattaataatttaaaactccctatctggtagttctaatgttagggtcatttatgaatctagttctcttgattgctttatctcttgacaatggcttgttttgccttgccttttttttttttttttgcatgtcttgtaattttttattgaatgccagatatttgatgtagaagaatggtgtacatggagtatttatgtctagaaatggatatgcctcttcttctgtcaagcattagtgtggaggattagccttatctagttggaattgagttgggtttgggtaatgttattgc

SEQ ID NO: 93071 - DNA, 1027 bp, Homo sapiens
ggcgtggtggtgggcaactataatcccagctatctggaaggctgaggcaggagaattgtttgaacccgggaggcagaagttgtagtgagccaagattgtgccactgcactccagcttgggcgacagagcaagactctgtctcaaaaacaaacaaacaaaaaaaccaaacagcaacaacaaaacaagtagctaatacagaaataacaaacacagaaatggaaaaaaaattgttaacaacttgtactaaagctaaaaggttaggagatttaaaattgaattggagtagtataaatggagtttgggactggtttgggtgggtagtagctgttacaatgttgtacctagagtgaaagatgttgttgtaaacagagaatggtacatactatcaaatactatgtatataatgtggggaatcatctcagctaactagttttagaattaagagatttctctacataattatgtatcttgtgactatctggttaaaagtcgtgctgcccctcagatattgctggagggaatgtaaaatggtgcagcaactttggaaggcagcttggcagtttctcaagatgttaaacattaaattattatgtgacccagaaattccgctcctaggtttctactcaggagtaatgaaaacatatccacataaaggctaggatatggatgttcatagcagcattattcacaacagccaaaaaagtggaaacaacccaaatgtctatcagctgatgaatggataaacaagatgtggtatatccatacaatggaatattacttggcaattaaaaggaaaaaaatactgatacatgctgcaacatagacaaacttcaaaaccattgtactcagtgaaggaagccaataacaaaaagctacatatagtatgtttttttatacaaaatgttcagaaaaggcaaatctgtaaagacagaaggtagatagtagttgcttagggctggggatgggagtggagagtgacttaatgagcatggagccttggggttaatgaaaatgttctaaaataaga

SEQ ID NO: 93072 - DNA, 1006 bp, Homo sapiens
gctctggggcagggagaagactgtctcgggagggggcaggctccctttcttgaaatggctggtgattccacaggactgactcagggactcggtaagctgtttatgttttattctgtcctctacatatatttcataatacaaaggtgatgataataataataaaactataaactactaaaagacaaaagtgtgactagttacaagagcttcagtaggaaataaagtaagttgcaagttaaacaaatatttgtttgttctgctcatctgtacctgtatttgtaagttttactcctggctcttgcagaggctttatgccactcttttggaatcacacagtgtgaagtgaaagtgaagtagggcgagctggcatgcagcctggccttctctatttcttcaagttcttttatggaatgtcgttttcctacaggaagataaaaaatcgaaatcaacactcttcaagaactccagttgctcttgaaggagtgagaaatcactggacaattagcagtctcaaaaaaatgaggcccagtgatcacaaagcacctgtctcacactgaagaccagttctcctctcttcatccacctcttgctgtctttgaaacagaggatcaacaaatggtgggactgtaacctacaagagaaatgagactctttgagtaccagagtgcagtctgtattaagcttttaaaatgtgtcccacataaagatgggaacaatagaccctgaggactacaagagtgggaagggcaggagggggcgagggttgaaaaacgacctattcgggactctgcttactaccagggtgacagattcaattgcaccccaacctcagcaccccaacctcgtaccccaatatacccgtgtaacaaacctgtatgtgtacccccgaatctaaaagttgaaatttaaataaataaaatctgacctaaacattcaagtatgcccttactgtataccaaagcagctgagaagaaaggccccagaatgtgccaatctacacctcaga

SEQ ID NO: 93073 - DNA, 1075 bp, Homo sapiens
cagcatctgcatatgttgctgtgcatcgtccgtgcgttcagtccttcccacatttgtcaattactttgtgccaggctctgtgctaggcttaactgagcctggactttggtatctgatgtttaaatgttgaccctgccatttagcagctctgagtggatcacactccagtcctttctaagcctcagtgtttctcatcagtaaaatggggagctacattatcaggtaattatgcagtttaaataatataatttacataagtctagcacatgcctaacacaaagtaagtatccagtaaatgttagctgctattaagtgctgcacaaataccatgtattattttattaatattactatttgctaggcaattgaggggttaatataaggatgatcgaaacagtccatgctctaccctggctcctgtctggcagaggagacagacattacacacgatttcagacccagcaggctgtgggctgctcataagcgagggatactggatgcagaggagggaagggatctgggaggtagatgtgggatcagacctgcatcttgaaggatgagtaggatgctgacgggcagagaaagcaggcagggcagaaagagcaagcaggggcttcctagcaggcaacacagcctggggaaaggcacagggcagccagatgctgggctgttgggcccagggcagtggcagatggggacagggagccggtagtgttatggttggtttgaaagacagggtctgcatccttggagaagagattaatgagacttgtcttcctcttttgtagcccgctcccaaaagacttcaggcattgggcgcctgatggtgcatgtcattgaagctacagaattaaaagcctgcaaaccaaatggtaaatactgccttgattcattcagcagacataactgccctgccccagtttttgctgatgactttttgagacagagtctcagtgtataacctaggctggagtgcagtggcacgatcttggctcactgcaacctctgcctctggggtacaagtgattctcaaggcttagcctcctgagtagctgggattacaggtgtgcaccac

SEQ ID NO: 93074 - DNA, 1004 bp, Homo sapiens
aggagtgacatgatctggtgtgttttaacagtactgctctgccttgccagattaaagaggggaagggatcagaagccaggagatccattggaaagctacttcagtaatccaagcacaagatgatgataacttggatcagaacagccatgggggacgtgtgagaagtggtctggatgtattgtgaagagggatcccacaggtggattgaatgtgaagtgtgagaagtatcaggtggcgtgagcagctggagagatgatattgccatccactgaggtggaaaattatagaggagcaggttgggagatgattaggggtttggcttttgatgttactttgatgtgccttttagacatctgaatggggatactgagtatacagcagaacgtgtgaagaagttcagggaagatgttcaggctggagtgtaaatttgggagcctatcagtacataaataagccatgagaatgaactgggtcaccaaggctctgagtatgtcgaggaaagttccaaggactgaatcttagggcactgcgacattagaagtctggagagttgaggaggaacgagcaaaggagccgtggaagggcagaccagtgaggtgggaggatatgaggagaggagaggtggtgacctggaagacgagtgaaaaaggatctcatgaggatcgagtcatcagcaatcacagatgttagcgataggtcaagtaaaataacggaggaggctacctggggagattaggaagttctttttctttaaagtgaaatatctgaaaataatgttaaatgtataattttccagctacattcagtaaacatttttctacagtaatattgattccttggtgtttgttgaaattggttctgtgggttctttgtgttgttgttgagacagtgtcttactctgtcacccaggctagagtgcagtggcacaatcttggctcactacaacctctgcctcctgggttcaagtgattctcgcacctcagcctcctgagtagttgggatta

SEQ ID NO: 93075 - DNA, 1059 bp, Homo sapiens
taaagttaatcatgttggtggtcgtataagcccttgggtggaaagaaagatatggatctaaatccagtccatctgtcaacatctagcacaaacaacctctttccaaaaagcctttcctcatctccggaaacttattcaactaacatgtatgaagtgtttacataaggctaagcaggtgctggggatacaaaactgagtgtcaagtggccattgtcttaggtggtacatagttctttgaggggattaggcccatatgcagataattataaaacagcatattcagcacagtgatagatatttgccaggcacttaaggactacagagaaggaataccaaattcagccatagattggtgaacgagagacttgctggaggaagcaactgccaggtccataagataagtagcaataagccagatttggtgggtaggatggtggagtgtatgataaagacaagaaatggcatggtggggaagtgtaattataagcatttcagtatcgtcagaatggaaatacagagccaggaactataaaagttgaggcttgagaggcaggccaagggctaagtcagaaattctctagctcagctgtatgttggaatcacttgggaaacttgaaaaatctatagtttccagggtcctaatttaaatggattgaagttcggcctgatcgtggggatctttcaaagcctcccatatgattctgatatgcacccaaggtggagcaaaaaatgatgaaacggagttctgagggaaaattggcaggaactggagatagatggaatatgagtgtcggtggaaaagtcagttatttccagatttgtgtcttgagggacaggatgggataatggtgccaccaactgcagtgaagaattagagttgggggaagaagaggagtttggagcacctatgggatgtccacatagagttgtcaagcaggtggtcagataagatagacaacatcagatgtacaccacctggtggaatgacatacatattggtagttgttgaaccagtgaaagtagatgagattacttgggaagaagatcagacctcctaga

SEQ ID NO: 93076 - DNA, 1110 bp, Homo sapiens
ataagtcagctttcaatttgcttagaaggcaacattagaaggttagagttcatcagaaacatagaattttaaaatgtgagttcaactgaataaatttgaatttctgtaggaggtaaagaatcaaaatacctgtttaaagattgcaattgcaatgtataataatcacttttaaattatttgattaaaccttttaggttttccagaaatgaaaaaaatcagttctaaaaccaaagctgatttttagaaaatttgagaatgtaaatcagccctatccataatatagtttctctaaaactttatcttaaagagtcattttaaaataatataactattaaaaatgtaactgatatttaaatgttttgaaataaaacattttaaaatataaatactgtagtttaaaagaaagaaactgggggaaagaaaagtagagaaagaaataccaattccagtccaaagctttatttgccaggttttcttagaatgacttttaccagtttatgaattcttgtaaacagaatctataatggaaatactgaaagacttttgcctaaagtggcattattgaatgctgctgtgatgctactgtaatgtaataaattattaaattgttgcaaagtgctgtttttgccttaaaattttattttgtgtgtcttgaaaattatagtattaaaggtattgagattgtgcaaatgctgggcacgcttggcatgagataatctgtttttatttttacaaaattgtaatataactatgcaagtgtgtttattaaaagaacacaaactatattagttgtattgtgtatttcttttgaaacattctttaaaacttacttttaattgtttttatttagtcatgattaaatgtctttggaatgtctctttttccttaatgtagtctcatgagaacaggccagcaaattgttttatatcatagggggcaaaataaatgtataagtggtcaagatgaagataatttgattggagataatcatatgtatctcaaaagtgaaataaagtttgattttaatacattgttgctcacaaaagtaaggaaaacataatctagggtaatagacttgtgtttttataagttttactgcaacttttttct

SEQ ID NO: 93077 - DNA, 1020 bp, Homo sapiens
cccaatgttgtcttccagttgtgaaagcaccccagagacccactatccaagtttcactctagcgtggaggcagggcaggcagccctgatcaaatatctcctacacaattcgtttacttcgtttgaatgttagagccacttgtgattatttttttgtgtttctaacttacagtttaaatttatttgtaaaaagttaaaggatagtgggtctttgtgtggctttccctgctgttcactctggcatctttagcatttttcttcttttttaatttgataattgtaggtcattagcatgcatattgagtttgcccttatgtggtgggagttcaaacacacaaagacccactatttgcacaaactattcttactggtttggaataggctgccatgcttttttaatgttattgcaacatgtgtattcatttacagaattcagataaaatttgcttatgttctgctattatgtttgatctaatcctaatcacagtgagctcttaattagctcaatatgtggtttgccctcaagtgtgcactgtttattactttgtaatatgccactatgagtactgacatttagatttgtttaaaggccaagaactggaaacagccatgccctgttttctgtgtatttgggatgggaataacaacattttgggggagctttttaaatctcagagaagaggaaagtggcctgctctggcaggtatgtgcagtgtttcatttgttccagtcccaagaatgagcactgtcctatggtagttcgcttaggatctttatgtgctctgggctaatgaaggtactgcatcatgtgctgcagcgtgtgtattctttttcgatgacctataaagggattatttttgaggaatgaaaggctcccatcattgactgtgagatgggaaaaacctttcctagcttagagcatttatatcttaatccattttaaagtcagagttcattgttacctgttttaatcaggtgactacatgtcccagtatacaaaggggcactggttgacattctt

SEQ ID NO: 93078 - DNA, 1998 bp, Homo sapiens
ctattacactcatgttgcagtttattgcaatgaaaggatacagattaaagtcagccaagggaagagacacatggggcagagtgcagtagagttccaaaaacagagcttccagttgtcctctcctggcagagtcatgaacagtattaactcctcctggcaatgatgtgtgacaatacacacagagtattgccagtcagcaaagccttggtgtgcagttttgactggggttcctcacatagatacagttgattgcccgtttttctgaactcagtctccatcccctaccaaggtagagctgatactgcatgacccaaagcacatcacattgttagatttggcatgacccagtacccacaggtaaactaagacactctgaccagtcaggatagtccaaggatttagagattactttccaggagctgagggcaaaaaccagacctctctttaggcaaaattaaattatttactacacatttatggtttttctaatttttaagttatgtctcaatgattgtttttaatctcatctttcaattatgtatttcttttgctaatttttaggccagaggaaaaaagcgacagaaaggatggtttcctgccagtcatgttaaacttttgggtccaagtagtgaaagagccacacctgcctttcatcctggtatggaagtgggttaatttgtatttcattttagaggagtttgttaaaactcagcaacttcttagattagctcaatctttggaaaacattaaaaatgtgttctttccttatgtctgcttaaaagggacatgccactgagaatttcctttctgaaaagttcagtgtaggaacagccagcttattcactgatacttgaaccacttcgactctttgaaatctttcaatgtgaaattgttacaccatcatacttaaagtgaagtacttcacttggattgttaactgcagttgggaaattcttgtttttgtaagaccaggaataggggaaggagggtgagaaagagcagttcaagggaaattttagcctaattttaatatttaatattaaaataatttaaatcctagggagattacaaatgattgacccttgcaggaataattaatttgtttaatgtgttattttgttattcttgtgatagtatgtcaggtgattgctatgtatgactatgcagcaaataatgaagatgagctcagtttctccaagggacaactcattaatgttatgaacaaagatgatcctgattggtggcaaggagagatcaacggggtgactggtctctttccttcaaactacgttaagatgacgacagactcagatccaagtcaacagtgtgagtaatattaaattatttttctctcacctagtgtgaaacttcaatatacagcactgcatttattccttttctggattagatcttaaactcagcactcacagcaaatgtagattagtgtttaaagtgagaagaaacaaaaggaaactttttacaaggtcagaagttatacagctttattttaaatacttgctagctccagactttcgtattagacttaatctgagagtatataatttttcctatgagttctttggtatgactgccatctatactgcagcttctttttactatcatcctctttttcagtgtcccatgttcttttttggtttaataaaaagtagctagtggctgggcgcaatggcccacacccataatcccagcactttgggaggccaaggcacgcaggatcccttaagcccaggaattggagactagcctgggcaacatggcgaaaccccatctcgacaaaaaatagcaaaattagctgggtgtggtggcacgtgcttgtagtttcagctacttgggaggctgaggtgggagatctcttgaacccgggaggttaagagtgcagtaagtcatgatcacacacactgcactccagcatgggcaacaaggtgaaaccctgtctcaagagaaaaaaaaaaaaaagtagccagcaattaccctatt

SEQ ID NO: 93079 - DNA, 1151 bp, Homo sapiens
taacctttatacttttacatttggattgttggaaataataaaacaacacggtatcttttccttgtagagttttgggagtgctagcaagtctggagcatcaaataaaaaacctggtacgtatagtagtgatcttaaaaaattactaacgtgtttgctctgtcgcaatcttgaattcatagtttcttctttgtcttttcagagattgctcaggtaacttcagcatatgttgcttctggttctgaacaacttagccttgcaccaggacagttaatattaattctaaagaaaaatacaagtgggtggtggcaaggagagttacaggtaatattctttaaatagcatctataaattttattataaaagtactgcatgctccataaaaaagataaaattaataaaaatttttagatcacccataatcattccacttagaggtaatcaatatcaatattttactgcattatatttcctttagtctcttgtgtgtacatttttagcacagttgagttgatgttataagtaacaatttaaggaataattttctccaaagacataattgttttccaataatgcattcctttataattcacagatcatgttcttaaagaaacagcatcatctttccctgggatagtcccaggcttgcagtatagcctctaggagaaagacataatctagatggtgtgctgagaaaatactactaattgggctgtccgctagtggtcttaggtttttgaaacagcagtgcaattaaagacaatacagacatagatgaaccttttttttttccctaaaacgttaatagatggttattgcatatgttttgatacaggaaaagggttcttctctcacttctattatttccttactagttaaaactaaaaagcattttagggattaaaagatgacaagagatataatagctatatttttatatgagtgatatataattgtagtatggaggataaacatagcttcattcttgcaaatcaggagtcttaggattcctgaagaaaaatgggggttcaaatttaataccttcttgaataaccccctgaaattccaccttctgatttactttgaagatggaccgaactaagtgggaaacatgactctttacaaattttacttctgacctcctgattaatgat

SEQ ID NO: 93080 - DNA, 1025 bp, Homo sapiens
acctcccaagtaactgggattacaggaatgcaccaccacaccgggctaatttttgtattttagtagagacaaggttttgccatgttggccaggctggtctcaaactcctgacctcagttgatctgcccgcctcggtctcccaaagtgctgggattacaggtgtttgccaccacacctggccgaattttggatttagaagaatataataacagtaacaacaaccatatatagctggcatttgtatgcatgcactgtgctaggccctttatagacaattcctttatagaaattgtcttattttatgtccataacatttacagagaagaaaacttaagcaaaaacagattgtttcagtgttttagagggcatttcttctaactatgcattcagttactagtgttttctaacagataaggcatataacttgaaaacctgcagtaatggagaatttagcattaaacaagacagtccattcagttgtgaccagtagttgtaataaggttccccttctgtttatttaaaaactgcctcacagtgtaatttactcacaggtcctagggaggcctggtgcatcccacaggtgtctagttaaacaggacagtcttctagatttttgaaaacagattcctgggttaaaatggaaattaatgttatagctgttctgagataataaaaacaaagttttattatttttatttttttaatgtagtgcattctaaacaaataataaaatgtatatattgcctttattttttcctacactaaactaagccctatatgtgcttaccacttaacaatttgtgggtgtcttttaagtttctttagaaaggcgaaatatctcacatttgaaaaactatttgtaaatcatattgaaattttaaaaatatatttaaaaatgtagaagtttataattaggctgttcttaatcctgcaggatgttgtgtataagtcttcccagttctgtgtactaagactatatttaatttgagaaagccctaaaaaatgcactactaaaacctgctgtg

SEQ ID NO: 93081 - DNA, 1079 bp, Homo sapiens
cacctcccaaagtgctggaattacaggtgtgagccacctcacctggccacttctttgtaccataaatcagttagaaaagttacttttcattttctttcaagcatttctcccctgtttactataaattgtcaatatttaagtaactctttactgagggcctcctctttgccaaattggggcattcccatttctgagtctccaagattccctgaatataacttctcttattgcttatagcactctgcattatagttactgatttttttaaaccaatgtcccttattagatcataagctcaatgaggctgggatgcatgtctttttttttatttgttcatttttcagtttcttcatgcctgttctaatcctcatgcatagtagctgctcaatcatattagctgagtgaatgaagagaggcgtgaatgaatgaacaattgaatgaattttcaaatgaaaaaagctaaaaactagataggtctctgacctttatttcctactctgtagggagtcaagttgtcgaatataataatacaaggaaataagtactataatatagctatgggtaactgtctcttgtgttttatatggaagttggtagaaaagcagtctgatttgatgaaaagatgctggtcttttgcaatcaagaggcttgagttttggctctgctatttttgccaggctgtaaggaataacctacttaatcttcagttttctaattgactgaatgaaaaggttaagccaaataatctttaaagaccctttcactgctgagtttctgtgtttctggaaggtagtgctgtttctaaaaatttgcttttcagcctgacatggaattttggattgattgattgattgattttgagatggagtctcgctctttcggccaggctggagcgcagtggcgcaatcatggctcactgcaacctccacctcctgggtttaagcaattctcctgcctcagcctcccaagtagctgggattacaggcatccaccaccatgcccggctaatttttgtttttttttgtttttgagatggaatttcgcttttgttgcccaggctggagtgcaatggcccgatc

SEQ ID NO: 93082 - DNA, 1037 bp, Homo sapiens
aggagaaggaggggatggaggagaaaagttcagttttaaagttgacttggaagttcccatgggacatccacttgaagatatcttgcaagtagttgaaagtataggcatgttgcttcgggaagaagtcagcactgagatcatagctcttggattcattattgcacagaggactgatcaaactataggagtaagtgggcttattcaggaagggtatagaatgaggaaagaaagccagtgatgaaacttgaggctgtccttagtgtttaaggaacaaggaccaagaagcagagggagaaacactgtgaggatggaggatgtcacactgtaggatgaaaatgtctgggagaagcaatgaaattgataaatcacctgacatgtttaccagttggaaaatagtattcagagaagatcttattgttctgttagagagttcaaaaaaactgtgtaacaggaacagaaaaaagtaagccaaaaacaaaaaaagtaatgattataggagaataaaaagtttacaaaaaaggaaatttaatcagcagcatgctgcatgactcagatgtgaaatatttaaacataatcataatattataaacattaaataaatttaaataaagattaagctataacagtattggtagagtaagaggctacagtgaaagagaggtcaatcttcatttcccatagccaaaagccagtaatgtctaaaattgaaaaaattcaagaaaaagcagtataaatatgttattcagaaatataaatggtgatatagaagaaaccaggaagaatggcaggtcaggagtgaaaatcagggcataaggagccatgagataggggaggattgttttccctcattagccatatataatgaatgctatttgtctttgtaaaatattttcatgtaacttggataaaattaaaattaaaaagacaacttgccagtcactggaaatagtagctgttaatttgtagaaaatgccttagctgtttagttagatgggcttaattctgaaaatgagaatactatacaatagttttcatct

SEQ ID NO: 93083 - DNA, 1161 bp, Homo sapiens
gctctataattcaccaaaacactagctgtctcacctaaagagaagacaattgtcattatttgcaacttacatgtatacatctttgctatgactcaataaagagctctaaaacctaaaagaaaaaatcaagcaccaaatactacaatgaaaatccacttgatacagacttgctaggatttcagtatcttgactagtcatctaataaaaaagcaaacaaggatgctcatcttaagtaaggtaggaggcagcaaaacaaagagatgacttgcgggatgaagcacacacatgggtagaaaggaaagtgcaggagtgggggccaggctgagctgtacaaagtggaaggagaccaagcaaagagaggcttggtttgatctgtggaggtctgaatataacagggaagtaaaggacaaaaaggggggtctcaaaagataagaatagcaagttaacagggatggctgaagaaaaatctatacatctatcagaatggttctaaaaggaaaacagtggaagagtacacaaatatactgaatttgataagaataaaattgtttactttgttcatctttagaatgttttaacttataaaatttcaacaaactgtatcattaataatgattcaaagggttcatgtatctaaaagagatacaatactactaaaagtattgtggaaatggactgaggtgtatcaaaattttactgttgtttcattaaaataaatagcttagttatagtggttgaataaaatatttaaaactattttacttcaattatgaaaaccatgtctgagtcttttcacaatcagtagtaactatcttcttttctcctgctgtgctaagatttctactgctgtgttaagatttcagtctgttttaataagcctactgctttttatccaagtttaatttataaaaaggttttttctgactctacaattagtatctttctaattttcttccctttttttgtctcttatcaggtcatttttttcttgttgcatttgttctactgtctcaaagtatccttatccttacgttttttctcctcagctttcaaagtatccttatccttacgttgtttctcctcagctttccgttcctcttcttgaattttttcttgtgttttttcttcctggagtcgcttttgtttttcttcttcctcctt

SEQ ID NO: 93084 - DNA, 1021 bp, Homo sapiens
aaaaaaaaaaaaaaaaagtaggttgtttttctagaagcatttcctatttccacagcaacaatgactaaacccctgaaacaaagattagataggacagtgggaataacagctggaagacagttcttgtcaaatatctggagagaaaggaaggaaacttagatgtaatttttagatttatttgctgaatggttccatttcaacctttttctttttttcttgagtttggaggttggttagcaggagggaatttttgggtgtgggaaattgtcagtcatacaccccagtgcatccactaatcaatccaaagcttccaaagcttttcttgattgattgattgatttgttttcctttcacctctgatctcagcagtttctccccacccctgtactaatacttcattgctagttcttcaccttgacaggaaccagatcttagtatgtttttatttagtgtaaaaaatttctaggacattatacaaactctttttcttttatgtaaaggaaagcaaagcaaggaaaagaaaacttatggaaagaaaatcttagaaaggaggaagaagaaaaacaaaagcgactccaggaagaaaaaacacaagaaaaaattcaagaagaggaacggaaagctgaggagaaacaacgtaaggataaggatactttgaaagctgaggagaaaaaacgtaaggataaggatactttgagacagtagaacaaatgcaacaagaaaaaaatgacctgataagagacaaaaaaagggaagaaaattagaaagatactaattgtagagtcagaaaaaacctttttataaattaaacttggataaaaagcagtaggcttattaaaacagactgaaatcttaacacagcagtagaaatcttagcacagcaggagaaaagaagatagttactactgattgtgaaaagactcagacatggttttcataattgaagtaaaatagttttaaatattttattcaaccactataactaagctatttattttaatgaaacaacagtaaaattttg

SEQ ID NO: 93085 - DNA, 1020 bp, Homo sapiens
tacatatgtcaaaaacatgactgaacaaaatttctcttcagatgttataacaagcaaattattcccccatatttttaatggattgctttttttaattgaaaatgatgtaccaaatcaaagcatcggcttgttaaagattctgtgttccgtagaaatgaactgatggaaaagtagattattttaatgtgtttatctcaggagctatatggtttaaatacttaaggttttttttatcatctagatattttttaaaactttaaatattttaaatttagttcaacttgctataggatttttatcttttaatgcaaatgccacattaatacatatgacaagcatatttaaatcattcacgtattgacttattttctttttctccttaggaactgagagaaacctacaacacacagcagttagcccttgaacagctttataagatcaaacgtgacaagttgaaggaaattgaaaggaaaagattagaactaatgcagaaaaagaaactagaagatgaggctgcaaggtaatatagctgatatatttattgtgctatattgccattagaattgtaattttgttgctcatatctttagtttatgaaaatttaaggaaaataaagggattatcctaatcagattctggatctcataagttcagtccttttagggatcaagtttgcagtaactgattttattttctactagtgaaaaataacagactttggagtcaaacctgtattagaattcttgctcttccacttactacctgggtgaccttggttaagttatttttatctttctgaacctcagttactccatctgaaaatagagacaataatgcatatctcataggtaaatgtattaaataaaataatacagctggaactgggcgtggtgacacacgcctgtagtcccaagctatttgggaggctgaggcaggatgatgagttgagcccaggagttcaaggccagcctgggcaacatagcaagaccttgtctcttaagttaaaaaataaaataatgt

SEQ ID NO: 93086 - DNA, 1068 bp, Homo sapiens
aatcttcctgggtagaggaggacatgatataactcagcctaggccagaagaagaggggtggagatgcagaaagtgctattggttttttgagatggaaagttgagagggctgcagtctgatggcctaatgaggcaaggtttatagctggtagtgaggagaatggatggaagattaggaagtttcaggagagaaataggcatgaaatagacatctcagtgcagatatgcaagcttagtagaggaaaacctaagtgtgctgagcaatgttgaatgtctttttgaagttggaggtgatgtatttaaattgaaaacagtatgcctaattgtgtgattttgcctcaccaatgttcagctgtttaggtataagcacagagaaagctgatgaaataggttcatggttcatacaggtttgaggttttaatagacatgcacaaagagagagggacagaagagttacagatcttgacaaaagcactatgatcaagatgagctctgaaacatgaactagacatgaaggatgtgaagagaggaaggggtgttaataaagaaagagaatgatgggagtcaacagaatggtctcagtgaggttgaaaacctattgatggctgggcgtggtgtctcacgcctataatccctgcactttgggaggctgaggcgggttgatcacctgaggtcagtagtttgagaccagcctggccaacatgatgaaaccccgtctctactaaaaatacaaaaaattagctgggtgtggtggcacgcgcctttaatcccagctactcgggaggctgaggcaggagaattgcttgaatctgggaggtggaggttgcagtgaggcaaggttacaccactgcactccaaccagggcaacaagagcaaaactctgtctcagaaaaaacaaacaaacaaaccctattgatatagatgtaccaggtataagaaaagttcgaagggtaagaacttacgtttgaagaatgggatatttggtcaatggtagttctgtttctgattagtaagactcagggtgtaataatgggagtgatggattaagtagagttaaaaaggtcattga

SEQ ID NO: 93087 - DNA, 1019 bp, Homo sapiens
ctaagaataaatggaaagctactttaactatagtttctattaattgagtattaactgtggaccagagtgtacaatggctttatatccatcacctcatttaatgtagcatgatgctcattgtatagatgaaaagcctgaggattcgattggtgaagcatctttcctaaagtagaatttcacttcaggtcctagtccttttgaatgcagaaccaaggcttacaaccatttcctctgatgctctttccagcatataatctgggaagtggaaataacaactgaatgttttctcttgtactggtctgcattgtgtatacatccttcgtattggtctagttacatcaatctgaccaaacagtaaatgacatgctggtaatgacatacgaacttctgcaaaatgtaaactgtctgatgtttgtttttcagattcaggggtcagtttacttcataaaaaatcattagaaaaggaagaattatgccaaagacttaaagaacagttagatgctcttgaaaaagaaactgcatctaagctgtcagaaatggattcttttaacaatcaactaaaggtatttatttttgatactatttatttttaggtaactgccttcttaccttcattattttgatttaatagaataaatagctaaagctattatatgtattacattttcataatttattttataatttcaactatacaagaatttcaagattgtttttaatgttctagttatatgacatagtgtcatataactaaacatatactttatcacagtttccaatttttgatgactatgtgctgtttgtcttggcatctatacatttccagaacaattgcctttgtcagtattacagaactgatctcagccagcgttatcctaggcaattttcaaaaatgagaaatatggaaaatttgaaatagtttaggtgttagtggctcttttaacacagtttttattttgtttccttgtgaagtgtaatttaattaacctttgttaaataatgcaataatcagtgaaatc

SEQ ID NO: 93088 - DNA, 1058 bp, Homo sapiens
gtagaaatagaagttcagagaaggtaatgccgagcatcacatgcaaacatttattcctcttcatcattctttgagagtgtctctgatattaatattgttaattaatattgtctaatgctgaattcagaaaaaaattcaatgtgttatgtttctgctttcccatactaacatatgggctcttgcactctgagaatgatgtgtttcccactaataactcgagttaacagacacaactctgaaacacattccacttggttttaggcatttgtttcaggatgaatatgaatgataactgagattttaaaatttaactaaaaatattattctccttgtagaaacattttctattagcattttatgttactatatatttatatgatcttcctatagaatggcaaacatcagcagatctcaggcagacttcaggatgtccgactcaaaaagcaaactcaaaagactgagctggaagttctggataagcagtgtgacttggaaattatggaaatcaagcaacttcaacaggaacttcaggtaagtccttcactgctaaattgttcttaaacatgtacaattaatagttcttctgggctgggcacggtggctcacggctgtaatgctagcactttgggaggctgaggcgggtggatcccctgaggtcaggagttcgagaccagcccagtcagcagggcaaaaccccgtctctactaaaaatacaaaaaaattagctgggtatggtggcgcatgcctgtaatcccagcaactcgggaggctgaggcaggagaatcgcttgattccgggaggcagaggttgcagtgaacccagatcgcaccactgtactccagcatggatgatagagcgagattccatctcaaaacaaaacaaaacgaaacagttcttctaatagagttttgttttgggggtcaataaccttgagtctttgataggcttgtgatctaaatacacgcaatcctgtatacaatatcaggaagtccatagacctactaaaactctgctagacgtctggttaagttttgcttaatatatatacgtaagtggac

SEQ ID NO: 93089 - DNA, 1095 bp, Homo sapiens
atacttacattcaatagtgagttacgtaaatgtacgtatttacatttcactaaaataagtgtacccagcagttttaccatcattatccttcttttaaaaataaaaaattggccgggcccaggtggctcacgcctgtaatctcagcactttgggaggctgaggcgggcggatcacgaggtcaggagatcgagaccatcctggctaacacggtgaaaccccgtctctactaaaaatacaaaaaattagccaggcgtggtggcgggcgcctgtagtcccagctactcgggagactgaggcaggagaatggcgtgaacccgggaggcggagcttgcagtgagctgagatcgcgccactgcactccaggttgagcgacagagctagactccatctcaaataaataaataaataaataaataaataaaagtaaaataaaaattgaacttttaaggcaatattttactccaaatagactttattaagttgtgaattttaacattttctttaggactctggctgacgttgatggtgatggacagctaaaagcagaagagtttattcttgcaatgcaccttactgacatggccaaagctggacagccattaccactgactttacctcctgagcttgttcctccatctttcaggtgagtgtgcctggaggtggagaactatggttttgataacttggcagatgtgatttagaagagagttaaatatttgcactgccattgattttagtattcaacaagttatacttgaaaagggtacatattagaagtaggtgtgggccaggcgtggcagcttacgcctgtaatcataacactgggagccaaggtgggaggatcacatgaggccgggagttcaggaccagcgtggacaacatagtgagaccccgtatctacaaaaataaaaataattagccaggtgtggtggtgtgcgcctgtagtcctaggtactctggaagctggggcaggaggatcactggagcatagaagttcaaggctacagtaagttgtgattatgccacagcactctagcctgggcagcagagcaagaccctgcctcaaaaaaaaaaaaaaaaagaagtggatgtgtt

SEQ ID NO: 93090 - DNA, 1050 bp, Homo sapiens
aggctggcaacagagcgagactctgtctcctccccagaaaaagagaaaaggcagtcaccattatagtatgtaacagcgatcctcaacctttttggtaccagggactggtttcatagaagacagttttttcacagacttgaagcaatggttttaggatgaaactgttacatctcagatcatcaggcattagattctcaaagggagcatccaacctaggtccctcacatgtgccattcacaatagggtttgcactcttatgagaatctaatgccactgctcactggacaggagctggagctcaggtagtagtgctcactcacctgccactcaccgagccccgctgtccagcccggttcctaacaggtcggtggcccgggggttcaggacccctggtatataagattcttaatgccttggtcttataaaatttaattaaatatattttatttagtaacataaaaattttaaataaatttttttatagctcaacttcctcgactgcttcactctcagggaactcacccaagactgggacctcagagtgggcagttcctcagcctacaagattaaaatatcggcaaaaatttaatactcttgacaaaagtatgagtggatatctctcaggtaagcagcatacagtgctgaagagcatgaaaaagggtcttttatgtggacttccactgaagaactgtcatttgaatttgtattgtgtagctcatctgacattttaacatccaaaaaatttagcaggcatttgataaatacaaatacctgaagttgtataaggattcaaagatggattcaacttgattgctttcttcaaagttcttactgtcaagtcgggcaccagatatacccccaactttttggcaaaagacctgtcccttaagatcagacctcatcctctaagctttgcagtgaatggagagccacgggtcacaagagagagtgtgtggaacttagcctcagctcacttttcctgagaatcctcctctgcattgggctttttctctgtttatataacctcaagtgagcattgctcacccttta

SEQ ID NO: 93091 - DNA, 1045 bp, Homo sapiens
gattgtgtcactgcaccctagcctggatgacagaatgagactctctttagaaaaaaaaaaaaaaaaaaggtatttcttcagttttttggaaaataaattttattgagcaaattattgaaaataattcaggtttagttctctaggacaaatttctaatttcattagaattttctaaggaaagatatatacattatcattgagaaaaatttccttataatttggcagaatctcaaaatcctctttctgttattttgtagtttcatttatttcataatctataaaccccaaattagtcctcgcttcccctgctccttctttaaagaaactattctctataatatctgtttttttaaaaacgtttacaataagtaacaacccctgtcccatctttccacttggaatattctcatgcctggtagagtacgaggcacatagcaagtattcagtaaatatttggacagatgaataaattaaatttagaagtattataatcttgaatttttttctacctaaactggtggaattcagcccaaaggtctctagattctgttttgacaggcagtgttttattagttattatctctggtcagtatttcttaaagtgtaggttttatctttttgttattatatattttacatgttagatattttaaatttagtgatgatgtacacgtgaatgccatatcatcatttttactttgtcaatccccaaaataacgttagttttcccaccaccacaccacatagcaatctacctacctcatgctccttttagggctttatcagacctaaacaaggatgggaagatggatcagcaagagttctccatagctatgaaactcatcaaactgaagcttcaaggccaacagttgcctgtggttctccctcctattatgaagcaaccccctatgttttctccattaatttctgctcgttttggtaagtatgtattaatttaaatacctgtatttgctacttaaactttatccctaggcatatttgagtattagaaaaggatttgttagcacaaaatgacagtccccag

SEQ ID NO: 93092 - DNA, 1059 bp, Homo sapiens
agggcagtgattgtagtagtaacatgctctactcaagtttgaggatttttatgccccatacaaaggaatttgcattaaacagttgaattgtaaacttcagccaacatgttaatcagttttataagcaaaatgaacataaagcagtacagtcccggtccttctttattctgcttcttccattccataaacatttatatatctactttgcagttcattgcattatatataaaatataacattgagaacaaatggactattcaataacaaaagaatgattatgtgaataatcatctaaaatgttggaaaatgcatttagaagtgctatataggcatacagatagtaattttttttaaacttctgaagaattaattgcatatgtagactgtggtaccttcctacttagaagattgacgataacttagacatatctaatttaagttcaattcagggtttaagatgttactgagagcagcattcatgtatagtacaaaactttgctcctctagtaatcctgacatagattgttaaattgttttgatgcccattgctattgggacttgtctgtaagtatgcctgtgtgtgaatgtgtatgtgtgtgtgtatgtgtgtgtgtgtatgtatatacgtgtgtgtgtaaaaaccgagatgagactacttactgaatgagatctagcctatagtagatgttctgtaaatgtgaaaatttttttcttcactgactataagaacttgtttgaaagagccagcaagtgagatgagaataagcaacagaaatgtttatgaaaatcccatattttcaatatcagtgatgagttaggggaagcggatagaattttaatgtatttctaacacgattattacatattgtaaaagtttgttagctttttagggaaatattagacatcaacccctaaacttagatttttctgcctcttcgataaggcttacagataaatatagactaagattgggagatttttacttgaagttcaaagtaacaaacttttgccttttcaaagggttctgttagttgatatatttaaataagaaagccagga

SEQ ID NO: 93093 - DNA, 2466 bp, Homo sapiens
taatatttaaatgatttgggtaaatagatgagatacggcatgatcttttaatatagtagtgttttcctgcaatattatgatccatggttttaattactaagtgcattgctataaatttgctaggccttcacttcctaactggtcctactctcaaaattcatggaacgggcaggacacagtggcctgtaatcccagcactttgggtggctgagggaagcaaatcacttgagctcaggagttcaagactagcctggccaacatggtaaaacctcgtctctactaaaacaaacaaacaaacaaacaaaaattagccgggcatggtgatgtgcgcctgtagacccagctactcaggaggctgaggctggagaatcgcttgaacccgggaggtgaggttgcagtgagccaagactgcgccactgcactccagcctgggcgacagagcgagactccgtctcaagaaaacaaaacaaacaaaaaaaaaaacagacccacaaaaagattcatggaacaatttttgaatttattgacagctgaataatgaattcagggttcaaaatgatactgcactctccttttctggttgtttgcaaaatagcagccatttgttgaacaccctatgtggcaggcagtttactggattatgtttaacactttaaaaaatacttctgcaaagtattttttatagatgagtaatctgagtctcaaaaaaggttaaataacttttccatggtcacagctgggagaatagcagagctgggtttgaacccagagctgtgaatttccaaagtcccttctcttagagtgcttgcccagcacatttagttatgttatatatgtattttaataattttgtgtgttttaataattacttttagactattttataaaccccttgagctcatttaaacagctgcgctacatttattttgaatatttttcttgtttgggagtttttaaaaaatgatactatgggctgggtgcagtggctaacgcctgtaatctcagcactttgggaggctgacgtgggcaggtcacttgaggccaggaatttgagaccattctggtcaacatggcaaaaccctgtccctactaaaaacacaaaaattagccaggtgtggtggagcattcctgtagtcccagctactcaggtggccaaggtatgagaattgcttgaacccaggaggcagaggttgcagtgagctgagattgcaccactgcactccagcctgggtgacagagtgagactctatttaaaaaaaaaaaaaagtatggatttccatgttattcttatatacttaatttatacagttgatttatttttttctcttccaaattaatttctacaagaatgttggttcatgccaagggtttctttattcagtatctactattaaatatgtgactgtttttctgtattaaggcagcacgattacccaacaaaatctcttacccttcctcaaatgtaaattctgcctgttcagcagcagcagaagctctgcattgttttctgttggaagtgtgagctgaaggggacagacattcctactgcttagcgggtgcactaaactgtgatttgcccttgttgtattatcaacggcacaatatttttatgttgcagatggctgagagctagcaaggaaaactcaggaccatgatggctcagtttcccacagctatgaatggtaagcagctttgtgcttgtggcaagatgaggttatggattttttttttttttggtagaggtttaaaatattcatgtagataattttccttaagtgtataaatacaaaacttgaagtattcttggaaaatattttggaacactgcatatgtcttctgtaagaatattatgttgtaaatcccatgactatattctggaacgtgtgtttgccattgagcagttaggaataaccaaaaggtatattgtgtttgatgcataaaactggatgacaaatagcagagtgctataaggtgactattaaaggtattttgataacataacatgattgtaaaccgatgaagccaataaagattaatttagtaatatttatgtaagattatgttttccctttagataagattatgtatgcctgcatacataattgtttaatatcaaacattttaaaagaaagtgctggccgggtgtggtggctcatgcctgtaattacagcactttgtgaggctgaggagggagatcacttgaggtcaggagttcgagaccagcctggtcaacatggtgaaacccaatctctactaaaaatacaaaaactagccgagtgtggtcatgggcacctgtaatcccagctgcttgggaggttgaggcaggagaatcacttgaactacccgggaggtggtggttgcagtgtaccgagatagggccactacactccagcctgggaaagagtgagactccatttaaaaaaaaaagaaaaagaaaaagaaaaagaaaatgcttaggtaatttga

SEQ ID NO: 93094 - DNA, 2552 bp, Homo sapiens
cacgcccggctaattttttgtatttttagtagagacggggtttcaccttgttagccaggatggtctcgatctcctgacctcgtgatccgcccgcctcggcctcccaaagtgctgggattacaggcgtgagccaccgcgcccggccaatgcttgcatcttttaatagccaacattctcttagatctgcagttgggctcaacgcactcaagccttagcacaatcttctttgtagttttagcctttttctggaaaatcagcttagtttgcccaccataaccactctgcttcctgtataacaccactttccctgggcatacagagaattcttgcccttcttgtactgtgtcactttgcagggttggtgcttgccacacttcttacagaaagtcctgcgggttttaggaatgttcaccatgtttgcatgagcgctattggcacggaaagtaattgtaattctttctgtaactgtgcttcttaacaaacaaaaactttaaccttggctgggccaaggggtttggggtttggccaagatggtgaaaccccatctctactaaaaatacaaaaatcaggctgggcacagtggctgatgcctgtaatcgcaacactttgggaagccgaggcgggcggatcacgtgaggtcaggagttcaaaaccagcctggccaacatggcgaaacctcctctctactaataatacaaaaattagctgggcgcggtgctgggcacctgtaatcccagctacttgggaggctgaggcaggaaaattgcttgaacctgggaggcggaggttgcagtgagctgagatcgcacaattgcactccagcctgggtgacagagggagactccatctcaaaaaaaagaaaaaaaaaaattagccaggtgtggtggcgtgcgcttgtagtccccgctacttaagaggctgaggcaggagaatcacttgaacccaggaagtggaggttgcagtgagccgagattgtgccactgcactccagtctgagtgacagaatgagactctgtctcaaaaaacaaaacaaaaaaacccctaaaccttaattaagcgacttttcacttataatggctgtgactttttctgagtcttactgaccgtttgtaaaagcaggatttcctgcttttgttctagcatttctacttttttctgtcttagtgtgagtatattttctacattgtctaaagtacgtttggcaattactccaaatggcaactgaattatattaaattgaagcagtgttctttgccttatgcctactatttacccaatatattttcttggtttctacaaagggaacaatgccagttctgcattaatttttaatgagcaggaaaatcatatgaacattctaaaaaccatacataactaacagtattcaaaatacatgatgactgcaaatttgccaaaattgcctgtcactacatttcatcccctgtgaagagtagaaaggggtgtttgttggatgctgacttcagttgcacttgcctgaaacaggcgccagtcatgtacctggggagatgctggttacccttttcttcctttcagagagttataccaagagataagaaacaattagcactccctaatttatgtatgtgattgatgctgtccagtgtgttgggagtcatctctggcttgtttttcttctcctggacaaatgtgctaacagtaagttctcctgctgtttgtaggaacctgtgacgcattatctccatttaagagaggaagaggcagataaagcccatgggaagttcatgggcttaagaattagacaggcttgggattgcattctggcttcatgacatactgaatttgggcaagtaatttaacctcttcagtttcttctgtgaaatgagtacagtatcatctgccttgtggggatattgtgagaggagtatccatattatcaaaggtgcctagcagtatctggcacctggtagataagtctacaagcttgtcagtgtctgaagctccttctgcagaacctgaaacattggattctcaatgaatactcagcatgacacagtacatctactgtgatcaacagaagtgtattgaattaatggtaaacagtaaatgttaatttattaattgctttttgaaaaatgtaaaacaaagtttttggtatctgttgcattttcaaaatttcaattataattgttaagtactactctgcaaatagactagtagaattgttaagcattaggtaattattccacagtggggcagagagaatagaaatgtaatagatatgaaatgatatgttttaaaagcttattggttccaacaaaatatactcccatatttagatgttaccacagttaatcagatgttacatacaatataaatgttacatataatatggtacctatgtgcatgggtggctaaattccacataccagatgataaagattctgtaatactagtaccttcagctttacccaagggatttgcccttattgccagtaatattattaatatttagttcattctcaggttttatttcagaattatgcctgtgattactgagcatctactatttg

SEQ ID NO: 93095 - DNA, 1739 bp, Homo sapiens
ttgttgttagcctttcacttttttttttttttttgagatggggtctcactctgttactcaggctggagtacagtggcacgatcttgactcactgcaacccccatcttacagactcaagcagtcctccctcctcagcctcctgagtacttgggaccacaggcacatgccacctcgcctggctgattttttttatttttggtagagaggggtttcactgtgttgcccaggctggtcttgaactcctgagctcaaggtgatccacttgcctcggcctcccaagtgctaggattacaggcatgagccactgtgccaggccagcccttcactatttcatgtgagtaagtaatcttctatttttccagaccacactagttactctgcttttgcagagtaacctctgcctagaatgttttccttcacattcattcattttaacaaatgttttgatgtgtagggcctaagctgatttgaatgcaagctgaaatgcacatatctggttgagtcatgggaactgatttgcatgtgtctttctcttttatggcttgaagaggagagaaatttgtgcttagacacttgagggcctacgagatcaaggagtctgtccttagctctgccctttggactgttgtctgagcctaaagaagagagacaaagaaagcttgcattgggaggctgaggtgggaggatcacttgagcttaggagtttgagaccagcctgggcaacatagggagactgcacctctataagaaattttaaaaattagccgggcttggcagcgtgctcttgtggtcccagccgcttgaaaagctgaggtgggagaatcacgtgagcctgggaggtcgaggctgcagtgcaccgtgattatgccactgcactccagccttggcaacattgactgtctcaaaaagattatatatctctaaaagaaaaaaaaatggtagaagaaaatctgtaccttctcaatcgctctttcttctgcttctaaacttatgtatgcctttgttcattcttactccccttcctgaacttcattcttagagacagaaatatctgtcccaggttctaacttcgtgttctagagctgtctactacttctttttctggccctaacttccattaggtaacttctctcccatctcctttttgtaaattaaatctttatttcttttttttgtctaaaaatagttttgttctgtcacctaaaaactaaagccttataataactctgcctccctttcttaaatcttaccttttttcctatgtattttttgagaggaaatcttgctctgtcgcccaggctggagggcagtggtgcgatcttggctccctgcaacctccacctcccaggttcaagctattctcccgcctcacaggcactcaccaccatgcccggcgcatttttgtatttttaatagagacagggtttcaccatgttgaccgtgagaccggtctcctgacttcatgtcatctgcctgcctcagcctcccaaagtgcttggattataggtgtgaggcaccacacccaggctcttccccttattttaaacatttattgcctaatctacttcaatttggcttctatagccatcactgtgctagaactacactcactccagattgccaacactaatagctgagtcttaacttctgtgacaataccattttctccttgaaactcttaactctgtatcccgatttctcgtgtttctgaacctctgtttctgactattcttgtctct

SEQ ID NO: 93096 - DNA, 1809 bp, Homo sapiens
atgatttgtgagggctggtgcttacatttcagtgattaagaaatcaagtgtctgcttaaaacattactgccgtgaagcgtagattatatgatacagttgagggatggatctcaagggttaaatttgtttgaggtttgtctcctcttctggaattggttggaggctagtctcaaaaaaaaagcaaacaaaacaacaacaataacaacgaaagttggccagaggggcctcctatgatgttgtaggaagggggtcggatttcttcatgttgagaataatgtgaaaagaaagtatttgcttaggtctcttggatcttcaactagaaatagttttgggttaaaggtagcagtggggtttgattcagcttaacaaataggcattccttgaactatttgccataaattagataaaatggaagtgtttctgttttatctcctgtactttgtggaaaggtctaatttggttttgtgaacgaatgtccgaaatgttttatatttcttcttcagactctatgctttgggaacagtgggtcacagagagggtctgagttgggaatatatggtttagagagaaaatagaggactgctgcttataagaacaggtgtttagtttgatttttgtagatattttctactggttatttaacaacattgaagtttgctttataaggtgcaaaacgtgaattttacgtagcttacacttgatctcttccttatttctctcagaaaacctgtaggattgtgcctattaaattgctttttgtgtggtttaaaccaagagagtattttagatctgcagtggttttattggaaaaaaaaaaaaagtgcttgatggagctaatggtgattgtttcacttaaactaggattatatagacaatgcttcttcctgcctctttctgcgaacatttgtttttgtttctccctcaattccagggtttcatttctagaaatctgggctgcaaacagaagcagcagtttgtataatcccaagaacttgcttatgccaggaagctgtaagggtagcatgaagcgggtgtgatgtaaagacactgctactacttaagacatttaactgttgagggagtctaaggtcaaactttaatttttgttgaatttcctgttttctgcttatgtgttaatcttttggtgggcagaagattgggttgctatggtgctaactggtgtatattgtgaaagtgctggcaacatttcatgcttttactctatagggaagggtggtaaacaagcctaaataatttaaagatgttgttctcagaatggaatgttctgtgcatgtcttcttgatcctgctaatccagtgagcggtcttcactaggactaaatgttgagtaagtgatgagggtggtatagaggtgctgaaaggtggagtggtggagagagggtattgggcattttcttgaaattcttttccccaattctgtatagggaatctgtatactagactgtgatttataattgtttttcaaggatgttttagttctccctgcttggttgtcatcaatttcatatacctcctcttagatactacctctgttccgtactttagtttgtcttttttgctgcgtctcccaaggactccacattgtttgaatgttatgttgcatatcttatggagttggctggccttaagccatgtggcttaacatagttttcattatagggcaggtgtgggaggtcaatacaacgcacaacacggagtaaaatctaagtcatggagcataggagatccccgggacgctcatgattgttttggcattggtttttgccttttaaatatgattataacagaa

SEQ ID NO: 93097 - DNA, 1009 bp, Homo sapiens
gaaatacttcgcaaactgtaaagtgctacgcaatgaagaaagtattatgataatcatagatatcttgcgtctttgcttttacatgttccattttcttcatttaaattggatttcctttatgttctcgtgaccttcaaaaacagcatcaaagctggtatgttttcaagaaagcttgatttttatcactcccttagcattaggtactctgttctgtataataaacttctctttctctctctttcttttgagagagattctctttttagtgtgtgttgattggttttcctaaacagattggaaaacgcttgagatgccaggaactacaacatttagagttaaagagccttaaatgatcatttaggacagccttcttaatattacagctgagcagactaagtccatgcagatgtagttgggaatagggtttctttatgagagttactttttgtatttaaagttacaatattacaaagatattttaaataataagaattcctgtaagcttttgagtaatgtgtaagctaggaggaaaggagcatttttattttttgaccaaaatatgactctcaaatattgtaaaaaggtattaattaggaattaattaagaccgttttctcaaaaactacaaaagtacctgtagaaaaacgtctgcttttcttgtaaggccctcattcatagtcagcaaatatttattgagtgttgtctctgagccaggtactgtgctagctctacatattacattttataaatgaggaaacaaggctcagggaagttaagtggctggcgtaagattgcacagcttataggtgttagggatgacatttgagttcaagcctactgagtggaaatcatattcatacctttcaattggcttctcttcaagcatgttcgtcacacttggccacattatacttttttttttttctttctggactttctttctcttgaatacctgtgttgtggagactcctgcagtcttgttcctttctgatgacccgggagccatata

SEQ ID NO: 93098 - DNA, 1087 bp, Homo sapiens
tttgtaagaaacaaaaagttatttgttctgcaatgtctaatatctccctctccattctaaatggtacaggtagtctgtaattgaatttctaagtagctactcaatcattcggtcaagacgtagttatatgagtacgtactttgttcaaggtgctgtgctgtaaaaagatagtggttattgggaaattaaccgataaaatatagatcctgttcttaagcagattatgacctgagagaggtgataagacaaacatacaaatacctataatagtaattgaatgtgatgagtgctgtgagacaggtcctgaaacagtgctttgaacattcagggagagggaatgattattgtattttcatttgagaaaaatcagggcaagttttatggaggacttggtggtagacaaaagcattgagggcaggggatgatttctttaagaatagagacaaggagaacagtatgttcaggaagattaaatagcaaagatgaaaagacggagtaatgcaggggaaagtgcaaggagtgtggcatcagctgaagtgggagagggaagcatatcgtctaggtgtagtaagaaaacattggtggattttaatggagggaggtggtggggagcagtatgtagtaagtatgtagatatggatgaaaatgagaaatgtcaattttccaaatttacgtggatcttttcttggcaggttttataccccaaatttcatattttttgtttttgaaatgattccatatgtaaggcttacccacattgggaacttattcactcatttttatgtatatttaaacacagattatatggttttttttttgaatagaagttggtacaaaatctttttcactgccttatacttttttcgaattaacttttttgttttttacttttgattatgaattatgccttaacctacatgtgatatgagatatgcatattgcatgatacttgcccaagagttagccagttgatccaacataatttattaacatattcattttaataattccctactattttgaagtctacattttgatgtttctatactcccttttttctgattctgcatttctttattccaaaaat

SEQ ID NO: 93099 - DNA, 1285 bp, Homo sapiens
acctcccaggttcaagtgattctcctgcctcagattccctagtagctgggattacaggcatgtgccaccatgcctggctaattttgtatttttagtggagacggggtttctccatgttggtcaagctggtcttgaactcccaacctcgggtgatccgcccgccttggcctcccaaagtgctgggattacaggcgtgagccaccgcgcctggccagtagtttcttaacattaaattatccgcaaaatggaagaaatactagaggtctgtgaagatgtttcttctctttcagtctgttgtggtggtttgtagtttacaggggcttgggtaactggatttttaggtttattattttaaatagtagactcaacactattttgtattgcagtagagatcacttatgcagatctttttaataccatttcatagagattaagtggtcaccttgaggcagaggagttaagaatgatctaacttaaagatgacttactcagtattttttcacaaaaagacaaatgtcccaagtttgttggtcctttttgtgaaacgtggctataagtgctatgttacctagcaaataaacacacttaatctgcccctttgagataatagggtaagttcttaacagtgattcaaaaagtaactacctttcagaacaacaacaaaaaatttaatgctgtagggaaaggatattgaaaatggatatttagaatttttcctgttatggaatttaattgttgaaaattatatgtgttaactttaagagctttttttatatgtatacttgaacttggaaacagaattttctaacctgtataaaaatcttttaaaagagctgtttagtgattttgagcccatctgctgaaaacacaaaaaggcaataccatctgattagtttataagaacaactgattgccatcagaaggtatggaaatgcactagctgaattttagcaaaaacctttgcataaatggtgaatgggattggaaattgaatatcatgttttattcagtgcacccagtaatggagttcttttggttttattcatatttgtgaggtaacattttttcagctatgataaccattaaaaccaaataaaatagttatatctcataaaaatgaaccgaatatagaactagaccttcaagttgttatattacaaagtatgaaagcaagatataaaaataacaaaccatgttcatttacattgctgtcaccaaaagtagtgagtggtattaatataataacaatattaggaaaagcacaaagtttttgtgtcatcaataa

SEQ ID NO: 93100 - DNA, 1055 bp, Homo sapiens
agaatgaggccaacatacagagtaaagcagagctggcggagacagatagacagactcactcacacacacactcactctcacatgcttgaatgagtgagcattgggagccattggagcctttggatctagttgcactctgtattagatccacccaatatttcccagttaaatgaactcatcagttgcccaatttgcttgtgctggtttgcaagtgttcctgttgtttgtaactgaaagagtccttgctaatccagacccctgttggcatcatcatcatcatcatcattagaatctatgtagtaaatttttttccaggtctcggtaccaggaaaagctgtgtttcctttgaccagctggtttgcttgtattatgtagtcatcatgacttttgaaactgatagttatttctctctttggctaaagatttagttagctgggggtacatgtctcagttggatgctctatagctgctttattcaggtgatttaatggctgagctgaatgctgggaaactcttgctttgaggacttttggggtcaaaatcattgtgatgacattgaaggctatagaactttgggactcaattgactgtccattggtgcagattcagaatcattttcagaggaaaattttggctcgttactttcttggctcacttccgtggagaggtgggttggcagcctacttagacatctttagtggttaggttccttaattatcataagagaatactcacctgattgcatttgattatgaaatatatatagtacctataattggcagtatggcatagcttcactctagcaagtatgtatccacatactctgctgcctgatttttattaaaaaaacctagaaacagcattttttgagaattgcttaaataaaacactttcaatccattgctttagaaagaatcagtttttacttggaccaggccagaataccagagagtatgttgattgcattgttttagactgggatagaattgcttttacagaattgttctttggtgtaatgcaataaacatttattaagagctattaaaacaaacagc

SEQ ID NO: 93101 - DNA, 1057 bp, Homo sapiens
tctggttatcttttgtgatgttagcagttgttggtatcactattggcttttgcttcttaaaatcctaaagtgatcaccatgttgtctagaagaaaatggggaggcattgtctggaaatgatagagtctgctttgtacaaataggactcctggtgtgaccacttgagaatgaagcaatattgtgtggaatcaagaagatctaggtatcagtcttggctcctctgtgtaggagctgtttgatcttgcgtaatcaacaaaatcagcaacaatgacagcagcagctacattcacttagtgcttgttttgtaccagattatgtgctaagtgctttatatacattgtgtaatctaatctttataacaatcctgtaagccagacattatcatatttatttttgcagttcagaaatattaaagtgtccaaggccacattgctaagaaatagtgaaacagggagttcaagcccttgcttgactccagtcttgtgctcataatcactttgttcttctatatctgtaaaagtgggtatacaaatagctgccttatctactttgggggtcaattagatgttgtttgtgaaaatgccttgaaaaataagatagatattaaagtgagaagtacgctgggatgaccattcatgaggaaaggtggatggtggaggctttgcctataactaagtgacagtgaaaagtttggatggaaagaaccctgtggtcattttctgactttcatttctattactattgctgttgaaatgtggaagtgttttcttctcttgttaaaattgagagtgatagagattttacaggtggtaaatgttgcatgtcagaggttgcttgagagtccctgggtgaacaatgatgtcttggttttactccatttgccatatatgtaggcttagtacagatgggtttaacagagagaaagagtatagtcacagttcagattcttttttctaaaaggacaaatatttgttaaaagtaggagaaattataattgaatgtataatattttatctctttagctgggtagtgggtatataatgtatattaaaattat

SEQ ID NO: 93102 - DNA, 1010 bp, Homo sapiens
atatatatacagaatggaatactattcagccataaagaagaatgaaatcctgtcatttggagcaatgtggatgaacctggaggactgtatattaagttaaataagtcagacacagaaagacaaatatagcacattttcactcatattgtgggagctaaaaaaatttgagcacgtataagtagagagataattgtggttaataaaggcaggaaggataatcgggaggcaggtattgggagaggttggataacagatacaaaattataggttagataagaataagttctggtgttctgtagcaatgtagggtgactatcattaacaagaatttagtttgtatctttaaatatctagaagagaggattttgaatgttcctaacacaaagatgatgaatgtttaaggtgattgatatgccattaccctgatttgattattaaacattctatatatgtattgaaatatcaccgtaccccataaatatagttactaaatgtcaattttttaaaaagctattatttttcaaatgataaaaaagaagtattttgtagaatgttaattatctatattccattttattaaaatatatacaattttgtttttgtttgcttcaagagaaatgtcccagtgtagtttatatattaattatgcatatcttaatgaattcagaatagtactttaaatatattaagtttatttactgctccccccacccattttccaaagtagactgcattaatttcatgtgattgatccaagtagatccaattgattgacttactgttttcctaatttcaggttccagttacagctatatcagagaatgagttaatctcctcagaaatcactaaatactactctgaggggcttagaaattaacagggtaagttgaatatcatcttaaatactatctggatttttatagtgaattcctaatttgggcctatagtgtgtcaggcaacagttgggcactgggaagaaaattccttctcttattttccatgcctgtagt

SEQ ID NO: 93103 - DNA, 1037 bp, Homo sapiens
taagaaaagtgtttttctcttcaaattgctatcccctcctaatttttttttttttttttttttttttgatactgttttgaaccagtaaccatggtttcttgtagaggctccttgggagctttaacaacatcagtcagtttcacagctggaagcagagtgatctagataaaagcataataaaaaagcttactgaggtttttttcccccctgttataacaattctttcattagggagcactttgcataaagtgaaatgttctctgttcccactgaagtagacattttaatttaaattaacagtaacgtagtacctggttcctttttagagtctagaaaagggaggtaatactaccattcacctgtccttcacctgaacctaccctgtctctgtccccttctttttttgtttctattttcttaccatctttctgggccaatggtgagtgatagtaatactgacatttggggttcaagatggatgaagtcgtgaagttgtagctttgaattaatgagggaaaaaggagttaagtagcaataaaaacttgatacagtggtaccaggagtttatttgtcaggatcaagaagagtcaaggactggctcttgtcagagggccagagtaagtaatttgttagaagtcagcgttggcagcaagcactgtcttgacggatggcactattgagaagggaaaggaaacctatatttattaaactctttacagaaaagcttgccaaccctcattgagatagactggatcagtctaccctggactggatatgagaatggttatattgtggggaaagcacactcttaggttatactgcttgtggatattagtatagctgtggcataaaaggagcatgatgggaatttggatgagagtagtgggtcttctgggcctttctttatcgaaagtctaaaccctgcctgtgaaaggaaactccaaatgtaaacattgaatgtttatttttttttacacatttctttgtccttcctacatgtatacctatgtccatactctcacatggttttactgtaa

SEQ ID NO: 93104 - DNA, 1409 bp, Homo sapiens
tagtacccaattgtattcttggttattttctttgttactccataattgcagtaaagaaaaaaaatgggttattaaagggctattctcagttttaactgacaatacaataaatattggtaactcatattaattaaacctctttgggtccttgataatttttaaaagtataaagggatccttaaaccaaaagaatttaagaactgatgatctatgggaaagaaggggctattaatcaagtaaatttttctattttctgttcttgattcataaggcaaatagttctgtcataatcagagaaaataagcttttatttttagaaagtagacagattacatttctgtatttaataagaacaaaaagttttcaatgtatgcatattcaattttcaatagattctctgcccctgttctccctgcctaccaaccctgcttcccccaccagctttggtccttgcttctggtgagaagagtcaagggagttttcttaactctggtccatttacttgttcaaatgctactgagtgttttgttgatgaatggcagatacaattcctttcttagggaagttgctgctaaatgatgaaacaatatatacatatgcaagatattactctacgtatcaatatagaatattttgaacagaatattttccaggaagtaaaaataacagttcttataagtggattttgagctgactcttggggtggatgcatgaattgacagagagaggagaggaggaggagaaagagtatgtgtagagaagggtttgacaaacttttactgtaaaggaccagatagtaaatgctgtaggcattgccaaccatacgggagctactggactcagctggtgtagtgtgaaagcagccatagacagtaagtcataaacaaatgagtgtgagtgtattccaacaaaactttgtttatggacagtgaaattgagttttatataattttcttgtctcacggtaagaaacaaatgagtgtgactattccaacaaaacttttttatggacattgaaattgaatttcatgtaattttgttgtgtcatgaaatattatgcttcctgtgttttttttcaaccatttaaatatgtaaaaactggccagatgtggtggtatacacctgtaatccctgctactcaggaggctgaggcacgagaattgcttgaacccaggaggtgggagtagcagtgagccgagattgcacactgtactccagcctgggtgacacagcgagactctgcctcaaaaaaaaaaaaaaaaaaaaagttgaaggaaaggtgagaatgtgttcatggccacatgaactggggatttaaaaattttgttgatcttttcaaggaactaacttttgctttgttaattttttctactgttttatttctttcactgatttctgcatttagatta

SEQ ID NO: 93105 - DNA, 2325 bp, Homo sapiens
cattgatttctgaataattgtgggattaagattttatatgtggtcttagctcagatattcccctaatatataaactcttcttaatcactattctaaagtatctctcctagtcactctctacttcattattctgttttcttttctcctattagaatgtaagctaaaggagagttcaactctgtatccctagcacttggtacaatgcctatcacatattaggcttttaaatatttgagaattgaatgactgcctgttagaaagagaaaatatgtatactgaggtatactgagtaaaagaaataaaaagcaaatgttttataatttgattttaaaattccttactaatgtttaatacctgtttttttgttttttgctgttttttttttttttttttttttaagttaaggctaggtctctgtttgtcattcctcaccccctacccccactactgtgcatgtcaccatatggaaagtgatggttacatgtgatataaattagcacactttgttatataattaaactttgcatcccccaaaaatggaattacttattaaaatctctaagtacagatgctggtcactactctactttaaaaggtaatatgtaatttagaaatatgataaaaataaatctaaatacttggaaacaaatagttttactgttaactttagtagctgttctttgctatccttaaggggtacgaagaactggtaagactgtcgttgtcagttagcagtgtggtagagtagatagaacctgcacatagaaaaaattagtaatgcaaacagttatctgataaaatctatgccagttttaactatcacctaaagagatttaatatttactttttcttgggccttagtagaatgccatcttctaacacatataaaacctatattggaaattaaaatcctatctgagtatcctgccataatgttttggagatttagaacaacttggttttgatggtcctcagtagaagctttttgattaagtagagttgttctttaggaaagaactaaacacttgcagtttaggtgttaggtttaatttttaggtttttgagtgtggattttctctgacatcttgttttctcttgccttgtggcaaatacagagagaaattgtattgcagaatgatgatacaaaaatgctcttcctccaagtaatagaggctaatctagcagttttactaattgtgttttagtttttcttcctccctctgttctcaccttcaaatctgtgcctaattccttatattaataatctgggaggccgggcgcggtggctcacgcctgtaatcccagcactttgggaggctgaggcgggtggaggacctgaggtcaggagtttgagaccagcttggccaacatgttgaaaccccgtctctactaaaaatacaaaaattagctgggtgtggtggcggacgcctgtaactccagctacttgggacgctgaggcaggagaattgcttgaacctgggaggcagaggttgcagtgagccaagattgtgccattgcactccagtctgggtgacaaaagcgaaactccatctcagaaaaaaaaaaaaaaaatctgttatgtaccccacctcgtgccattattctgaagctcatgggtttgtatagaaaaatgtgtaatgttctttgaccagtttaatgatcagagcttattctctttgagcttttaactatattaggattgttgaattagagcaggttcattaattgcatatattaattttttttaatgttgtgtatctactctgctccagattaaaaatacctacacggagcttacagttgagtgagagagatacacaataaacacataatcacacaacaaatatgtaaataaaatagtggaaaatatgctgtgaagaaaacgtagaaaatgctatgaaagtacagtggaggctgatttagattactgggttaagagaagtagaattttagctgaagtttgaacaatgaataggaattggatagatgaagaaggtatgagggattattcacagcagataacatattgtagggaaggccttagagtaaggaagaaagattggggaataggagaaacttttaggaaagaccagtgtggttaaagcatagtatgctttggggagagtggctatgctgtgagttttggattttatcataagtgagataaaaccctgtggaaggggtgtgtaagcaggattagaatagtggatttgtgtgtgtgcaggggaatagataaggtggggcttggtgattgaataaataaagtgtgatagtgtaaaaatttaaagggtggtgatatctaggttttgggtagcagcagttgaa

SEQ ID NO: 93106 - DNA, 1758 bp, Homo sapiens
gagtgcaagaaaagatgcttggtgtcattagtgattagggaaatagaaatcaaaaccatgagataccatttcacaccctcaaggatggctgtaattttttaaagacaggaaataactctttatttggtgaggttgtggaaaactggaacccttgtacattactggtgggaattttaaatggtgtagttactgtggaaaactggctttgataattcctcaaaaagttaaagagttactgtataacctaacagttccactcctagttaaatactcaagagaattaaaaacatggccacataaaaacttgtacataaatgttcacagcagcattactgataatattcaaaaagtgaaaactacctaaatatccatccactggtgaatggataaacaaaatatggcatctccaaacaatagaatattattcaattattaaaaaggcagtgaaaatcctgaagtccctatccttccttaccacatgagaaagattttggttgtcattgaaatgaacagctaaaatgaaaacttgtttcaaagacccttacgtgtcttaggactccagtttgagaaacatttttttggaaattacctagttcagatctctatttatcatgtttttcctgtgtgatgcccttcatacaactattaacttggggatatttagctctcagagtatccttctcactatatataaatgcttcttcgtgctaactgcctgctaagcatttttaaatatattattagaaatgtttattaactaattggcagggactttttaaaattatgcagttctcagctaaatccaagaaatgaatgacagatttcttatgtagaaatttaaattcaactgaattataaggcacagttctatttctttagccttcacctgtttggtttagtctggtacatttgaacagagataaatgtagtttctagttcctaaaactactctctagagattgcataagattgggtataatttagcaactctttttaaatcaacagggtacttttacttagaaaccttacctctttttaaatagtgatatgcaaattggtttcctgaaaccagcatttattttcttaatgattcttatttaagtaccctgactgcgaaatacaaagccatttcacataaatacaactgtaatagtttttcctcatgagaagttttacattgccttgtttattgtgttttgtaaacaggaagcagttaataccagaatcatactatcagcaaattatgggtgactgtctcatagctcttcagctcttggctcttatttcagtaggccagcctgtctggctgctgttgtttgttgtttgctctccctagccccagaatctcagatatagcagttgtgaatctccagctagtagtctaagggtagtacatatgggaatcttgctttagatccagaggtatttattactcaaaattattcaatctgtgagattgtattattcagatcatgtaactgcagcatggcttgggtttgtagtactgtgaaatatcacgggttgtttttttacaaaataatagatctttactttttcaaaattagaatattccctaatttctagaccaagaaggcagtttgctgtttttttcccattgaaagacaataaggattttaagaaatttcatgtttctcaattataagaaataatttcaaagattttaaaaatatttcagaaaatatttaaccatacaaattaaatatctttgttttagaaatcttaaatgttgtattagta

SEQ ID NO: 93107 - DNA, 1862 bp, Homo sapiens
ctaattggttgtaacaatttcacaaaggattattaattttattttacagatgtagaaaagaaagtatagaaacactatctgatgacctctgtacttttatgtagatcttcatgtttttatgatggctgtaattatctattcattgatatagcacaatttttagaaattttctaacagaggggagcttccctacctttatttggttggaaaggtcataagggtagatttcttactgttgtccttcctgtttaggtgtgaagtttttcaacatgagtggcctcggggacagttcatccgaccctgctaacccagactcacataagaggaaaggatcgccatgtgacacactggcatcaaggtaggaacactcctcttagtctatttttggcagagctgctttattactttcactgccacttcagagcttttgtttaatctactccaagttcagtggctttctttgagtctttcatactcaccatgttgtcttccttcccccagggtctttgcacatgtttctccctcaatccagcttgcttcctcttgatttcctttagttaacacctactcatccttcagatgccagcttagtcattacatacttaaagagagccttctcttccttccataactgttagatcaagttcctccattcatgtatctgtctcagatgtttttatagccatgatccataattgcagatttttactagtgtgattatttcatgaatttctggcttccccgctagactctaagctgccacttggtaaaggaccttgtttgttcttgctcatcattgtatccttagttcctaaaacagtgtgtggcttatatatagtaagaacacagtaaagatttgtcaaatgaatatataaatctattatacacctttaattgctatcttagaacattatggcattaatggagctaagaaatatcaggattttaaaaaatgattgtgtagttaaatatttggtttgttataaggaatatgaccaccttgaacaggctaaaaggaacctaatgctaaggagaccctcacaaatgccagatagagaagaaacctcaaatgccagataaatttaaatatgcatagttatattcagtcctattaacttttgattagtattgcattacatgaatataccacatttgaaaaatatgtttttctgcagatacataccctagctgctcatttaatattaggttaaaagagcagctagcttcctacctgagagcagcttcctagaatgagtggagattttattccactcatcttctaggatttagaggaaagtttttcaaactccacactattgacatttcgtgtcagataattttttgttgtgggggagctgtcctgtattttgtaggatgtttagcagtatccctgcttctacacaccaaatgtcagtagcatcttagttgtgacaaccaaaaatgtctccaaacattgccaaatgtcccctggggccaggggaaacaaaatcacctctagttgataatcactgatctagagagtaaagctacagaagactcttctgtccttggattacatgctgctttctctcatgggaggaaaaaaaggaggattttaacaggagaatgccagggctccaggctcgagaaagaaaagtgactatttatcttactcagctcagagagctgtcagagagagacaataacctgagtactcataatcacaagtaagtgtccagatgctgggaggaaggttgagatcaagatgcaatctagaagtgtgtcaaaaattaatgctcttgttttatctgtgtataaaatcagtccttaaaggaaaagctaagaataaatatcttttacatttaattttttgtttggggaaa

SEQ ID NO: 93108 - DNA, 1055 bp, Homo sapiens
agagacagggtttcactgtgttagccaggatggtctcgatctctgacctcatgatctgcccgcctcagcctcccaaagtgctgggattacaggcgtgagccgccacgcgtggcacaaatccatttttttatcatagggtctatttactttagttggagagttttcctaataattagacaacttaatccatttattcagtacatgagaagagagctctaaaaatgaatggatatgctaatttttacattcatttttctttttttcctccctttccttccactctttagcctatatatgctccaaaagtggaggggaggaccttggacagaaatcctatataactaaaccagacatgcatataaaaatgttattcatagctcttcattttccacattgttcccccaacagaatagaaacttcatttccttttgaaaatagtcatatatgtttgttgtaactggggacttgaaatgattctttctattaaaatcactactgatatttgaatcaagtatcaaggtatcttatgtattttattttgaaattttaaagtataaatgactttagagataaggtagtagattcttttattttaaaaaatgagacaatgagcatcaaagattaacccaaaccttagaacttgctaatagcagaacccaggacttcttactccagtataggtttgtttccatgatttcctctaacacttaataaaggatgagatggaaaaaaggaaggagggtcattggagagtttaaggtaggaaaacgtttgggaacagtaaaaaagcagccttggccaggcgtggtggctcacacctgtaatctcagcattttgggaggccgagatgggtggatcatgaggtcaggagtacgagaccagcctggccaacatggtgaaaccctgtctgtactaaaaataaaaaattagcccagcgtggtggcacacacctataatcccagctactcaggagactgaggcaggagaatcactttaatccaggaggcgcaggttgtggtgagccgagatcacaccattgcactccagcatgggtg

SEQ ID NO: 93109 - DNA, 1037 bp, Homo sapiens
ccaagttaaaaccccacttaccaatgtacctgtggttttgaatcattttttcattgtcaaagtataactggaaaccaactgaaaaactcattaactgctgtaaaattctgagcaaaatggctagtaagttttaatttttaatttttgcctttgattatagtatttgaggggaagatcatacgtattttcttggaaatgttacagttttctaattggtagacatttagatttgctagggagataagtattctattgcctcaggataatgttagatctgaagaggtcagtctgtcttttaatctgagtatctaattaagcagatggcttaaagtacatcttttgtatcttcagagtttgtgctttttcaccatattcgcaagcacataatcaatttttcttcctcagtaaatggagttccttggcctcaagaggcaacacgacgaaatagccatacctttaactgcaggatgctaattcaccctccagatgagccagggaccgagaaccaagaagcttgccagcgttatgaagtaatgcagtgtttcactgtgtcacagccaaaatcaattcaagaggatggagaaggtaaagccaaacggtctttttaaagtgtttatttcttctgtgactttaaggaaaagagaggaaattaattataaactgcctttttcagatagtatttttggttactataatatgtatcatagtggctattccatttgctatatattcttaatacttaaaaaacaataattactaacatctagaatcattcctttaatatgccccccagattctcagttttaagctggcattcccactaaaatgtcaaataattcaaaccaacttgctgtctagaaataagagatgtaactaactgctgccagttggaaatgtaccagatgcagcagactgttgaacagctctgatttttagaaagtttcaagtttagagtgtagggaacattggagaatagagttggcatttttcaggctatacaaggtaatttataaggagaaaacttaagaacagatgga

SEQ ID NO: 93110 - DNA, 1054 bp, Homo sapiens
caacagctctagtgatggcaaacctctggattcagggcttctgcataacaatgacagactttcagatggagacagtaaatactctcaaaccagtcacaaactagtgcagcttttgacaacaactgccgaacagcagttacggcatgctgatatagacacaagctgcaaagatgtcctgtcttgcacaggcacttccaactctgcctctgctaactcttcaggaggttcttgtccctcttctcatagctcattgacagaacggcataaaattctacaccggctcttacaggagggtagcccctcagatatcaccactttgtctgtcgagcctgataaaaaggacagtgcatctacttctgtgtcagtgactggacaggtacaaggaaactccagtataaaactagaactggatgcttcaaagaaaaaagaatcaaaagaccatcagctcctacgctatcttttagataaagatgagaaagatttaagatcaactccaaacctgagcctggatgatgtaaaggtgaaagtggaaaagaaagaacagatggatccatgtaatacaaacccaaccccaatgaccaaacccactcctgaggaaataaaactggaggcccagagccaggtgggtaactgcttgcttcacagaatggtcattcttagtaattttttttttcatttattctattccatctgtagaccagatatgaattcatactatgttttatcctatccattgggcatatattaagaggttagtatcaataactgatcacaggatgccctcagaagttttctttagaacttcagaaggctacagttttaatgcagaattataaaaaaggaaatttttctttctctataaaatcagtgttcacatctttagacattttttaaaataccttccctgcccctctctcccagccctacctattgaatctaactctctaggaataaaacctaggaaccaaacctaagtctgggaacccctgatgtaaatgaagtgggagagaaatgtaaggagatggacaaggttacttagtctggcttgtttttt

SEQ ID NO: 93111 - DNA, 1029 bp, Homo sapiens
attttagatttttagctattctgaggtgtgtgttctaatttgcatttccctgataaatattcattggtcatttggatatcttcttttgtaaattgcctagtctagtctcgtgaccattttttaatgtgtttttattttgcttattgacttttaagagttctttatgtatgagtcctttattggacatatatttgcagacatctttttagtgctaaggcttaccttttctttctcttactggcactttttgatgaggtgaagttcttcactttaatatagttcaatttgtcaatcttttcctttatggttaatgctttttgcacatgtgtaacaaaagacatgttcacaaatgtttttaacagctttattcgtatcagccaaaaactggaagcaacccaaaaatccatcacaatagaatggataattatgttgtgacatattcatacagtgggacactattcagcaataaaaatgaatgaactgctgctaaatgtaacagtgcccaaacttcagaaatataattaaatacatatatgtaattctacttatatactctagaaacaaaaatttcagttgaactagataatgaaacccaaaaagtaatcatagtatagcaatattgtgaaataaaggccagttttcttctctacataacctaagacagatgtaggaactccctatttattcttttttattttattttattttatttatttatttatttatttttgagatgggagtctcgctctgtagcccaggctggagtgcagtggcacgatctcggctcactgcaacctccgcctcccaggttcaagtgatcctcctgcctcagccccactagtagctggagttataggcacgtgccacgatgcctggctaatttttgtatttttagtagagacggggttgccatgttggccaggctggtctcgaacttctgacctcaggtgatccacccgcctcagcctcccaaagtgctgggattacaggtgtgagccatggcacccggcctccctatctattctaaaa

SEQ ID NO: 93112 - DNA, 1008 bp, Homo sapiens
acatttcatattgatgttttaatgcctattagcagttttgagaagccttgtattaaagaatgtagtttagatttcttttacccaacatttcccaaactttcctgattatggaatttcttttctcaagtaatacatgttataccacagaatgagttttccatgaagttgcttaggagacaactgtgttaaaatatgttattgttctaacccaagttagcattttcctagttgagagacactttgatagtttaatacattaaatttatgaagataaggctgtcagatttttttgcccatcacattttgatgttgaaaaaaccagtggtaagaattccattgtatgaccttgaaactaaaggaaactaatcagcccactttcaaaattagtctggattttcaacgttagttctatcccttttctgatggtatcatatgtgggacttcagttatttcagtccaactggaacttttaactgtcatgacccaattactgatagtttgccaggatttcagacagctgcgaagaataatcttgaatccatctgtgacatttttggaggcagtattttagctgaccagagtattagaggaagagtcagaagcctagattcaaatctcacattctccagtcattaacagtcttacctcaaggaagtacattttttgaaccttattctctttatctgcaatataagaattagattaaatgattttgaaagtttcttctaatagaagcagtgaggctctagactggaatgtcagtcacaattgaggaaacagtaagatgcaaggctgaaaagagataaaatgaaagtctgcatattgattgatttggaggtctttatctccttccccatccaatatgggagactggaagaattttctcaggggacattgaatgggcggaaagatgtctggatgtgagtatataagtacaaaagccattctgctatctcatcatccaacaatgaaggctcccagaagagacaagcctggcactcagccctc

SEQ ID NO: 93113 - DNA, 1005 bp, Homo sapiens
ctctatcccccatgacacttatctttttctcttatacttttcttttccttgccattttgcactgtattctgagagaatctctgagctcaactttccagatcaaaactaaatcttcagctatgtccatcctgcccttcagtccatctattgagatcatttcatcatagctataattttaagatttctaaacattctttttcttaggagtctattactttttatggatgcaatagactttttaatctgtatgatgatatttattgtaatttggggttcactcattttctatactaactcttttttcttcaacattactttcttcattaaagttgctttctttctcctgttgacttttcttgaatgtttggtaaattttgactgtctctccatatatattgaaaaagatctagaattttaaaatactggtagctagtgtatttctttagctaaagtgagaagcccttttcccctggcagtgaatgtagattctgattatagaagccctacttctcagttgttgtgaggaataggccttggaggtggggaaaccccttgtggcagccctagcaccccctttgggagattccctgggcagaactcccattttgagtcatatgctcacaattgtaatcccatggacaggtgccagagtcagctgcactcagagcaatggcctggcagcagctgttcagccatccataattatccagcaattgcccatggcctgttcctttatttgctcaaatgaccactgagcctggagttgttctggtgttctgggaaaattcctctctttggaaaatctctttctcctgttgcaagtgttttagtttagttgaagtttcacaatcagtttgtttccatttgtgttttgtctttcagaaattcttcgttgttttagtcttctgccatgaaaatttcttctgcctttccttcggctgtagatttgtgttccccttttttctttcttgagttatttcagtggtgtttttgaagagaaaataa

SEQ ID NO: 93114 - DNA, 1066 bp, Homo sapiens
ttttttttttttttttttttgtacttttagtagaaatggggtttcatcatgttggccacgctggtctcgaactcctaacctcaagtgatccacccgccttggtctcccaaagtgctgggattagaggcgtgagccaccacgcccggcccacagcagacatttttaactgtttgctcttgtggtccttaatgattatctccatatctgttgcttatacaatcttaaatatttatgccactacgcctactcatttcctgtcatgagagagaagatttaactcactcacaactcccaggcccctattctccttcattctcctaatatagtaacatcactgggcatcaatctctccaacctcaatcaatataaataaactttattttcttttccaataatcataaacagtatctcttgatgctctactttgtaaattaagctgtttctcttaatttaataattgtatgatgttccccttaaatagtttgtatctcaaaaaataaaaattaaattgttctttaagttataggtctctaagtgctttattaggagcctaattgaatgaattgatttaattgaatgaaaggtctttaattgaatgaaaaggtcccttatccctttcctaggagaggaaggatggctcttcaagtctttcatgaaagttctgggagtggacttgacacttttattgtagcaactgggctgccttgcagagagatttggtatatacctttaaaaagtatcaactgctggcagggtgcggtggctcacgcctgtaatcccagcactttgggaggccgaggtgggcaaatcacaaggtcaacagatcgagaccatcctggccaatatggtgaaaccctgtctttactaaaaatataaaaattacctgggagtggtggcacacacctgtaatcccagctactcgggagtctgaggcaggagaattgcttgaacctgggaggcggcggttgcagtgggctgagatagcactactgcacactagccacactagcctggtgacaggtgagacttcgtctcaaaaaaaaaaaaagtatcaactgctaaacaa

SEQ ID NO: 93115 - DNA, 1060 bp, Homo sapiens
aatgtatttttacctggcctcattgcctcctctcctgtttttttacttgctgttccctctgcctcaagttaactctgccctcctccttgccaccttgcattctcatccttcaagatgaatgcaagctgagctcactcatgcttcttggtccctgtcttcatccctagactgaatgagttgctccctctgtgctgccgtagatgtgtccgtctatgcagacaaagcacctgtgcattttactgttgtgcgttggcttctgccactcaatagggaacggaactcctagaaggacaggaatttgctcacctttgtaacctccaaactttatacagtatcttgaatgtactgagtttttaagtaaatctttataaaattaacttggtttatctaaatttatgttcctggtctttcaagtttaagaagtatatcagttttggtatttaagagtctttttgacttttaaaactataaagttggtatctttctttttgaagtgactcagaacttcaaaaagttttaacttattccacaatgccttagatttgtcattttaacatttatattataatgagcttttccccaaaattggtttgttttctgatctaatgggagtgagaaaatgactgaagttagaattaagagttgagctatttgatgacaagagatttaatcactgttcatagctctttggattcttataaaactttcgtaggctttctagtttatgtataatatattgaaatatatttatgatatataagtatatataatttgtgttttacaaagtatataaacataaaatagtattaatattattgttactgttatcttccggaatagtttattcatatgaaattattgaagaagaaatgttttaagctatacattgttttcaagaaaatctcatttccaagaatacttcttttgttaccagatactgttaaggcatgcctggcatgcctatgacctggaaccctaatcctggtctagactgatcttccaaaccagtattcacagaaaattgttctgagagatagatattaatggttagatgttagaa

SEQ ID NO: 93116 - DNA, 1019 bp, Homo sapiens
tttttttttttctccaaatcctggctgctgaacttttcacacatcactttgagttttataaggattttaatttggttgtgtcttagttataatgacagggaagctgtctgatctgacaacataataagtaaggcagttaaagttgaaaacacaagactatattcttctaaagttcattgaaaggtgagagaaaatcttcatgttagagaactgtgtaggtctcagtgaggaccatgtataaattaggtagaaatggaaccatatctgtaatacaagaggaatttagtctcctaatgtattctaatcccaacttcctaaactcactctggattttgtggcccatcattataatcactaccttacaggtactctgactcccttgcctatctctccctctgttgcacttatgcctggcaaaattctccctaatgaaatccaactaaactcttactttatacctccacctaagtattgaaatatggcttggggaaaaaaaaaaacagtcatgctgacatgtctcaataacctatttctctgctcccctttacagttaaattccttaaaagattatactctatccacttcccctactcctactccttgttgaactaatcaggctttcattcccatcattccacagaaagtgtccctgtcaagatagttaaatgtccttttcagtgccaaaagcaatgctcatcagtagcatttgacatatttgagcatttattctttcttgaagctcttcatttggtttctagaacaactctctgtcttgagaaaagtgactctcctcctatcacttagtctccttgaggatctttctcatctccatgacctccatttgagggccccagaggtgattctaggacctcttcgccatacccactccctcctttggttgcatcacccatcttactattgtcaatgcctactgctatgcttgactcccaaatttaaacctccagtgcagatggctttcctgaacaccatactctatattcagctgcctaaccaatatc

SEQ ID NO: 93117 - DNA, 1044 bp, Homo sapiens
ccaaatcatttgggaaagaaaacagttaccaccaactctttaaacactcacacttgctcatttggttcatgtgcaaaagcttattagtcatcataagccttgtgtattagcgtatatcacctggagacagtgaccactcactgtctctgtcacacaacacaagataccatgaggaacactgaaaaacaacccctgctgccaaataacgaagagtctagttggtgagggggcaggtcagagagaattaaaacatgaaacagtcagagaaccattaagtagaatgatgtaatagagttcagaggtagtgtaacatgattctttttcattatctctctggtggcaagagaaagaaatggttaaacaaacctgtgggtcctggaactgggtagtgcttctgtgtaaggctggttgatgggagaatcccattgcttattagcattttaaaggataagaagtcctgttgtttaaccttttgtttctcagacttatttgaccagggactcccctgcttgttaatacctgtaatatctgtggaacccactctgggccagagtattcatccttctctttttcccatcatttagtgactaccaaatacctagtgctaccctgagaaaactgtgatagctgctacaaagcaggcaggaaagcagagtgaggaagagggcctgtgaatgttggactttaggtgtcagtggacccagacgtctttctaggacctaggacagtgattgcagctgcagaagagcttggtctccttcccttaatgggagatgctaaaatggaactattggcaggagcagtttgaaagaacttaaactaatatacagtcccaaatattaatttgaaaggaaattaagctctaaatttttttcaataagtatgacatcattgcagtccttgaagtttccacatgcattaacttacatagccttgctcctccgcagtggtgacttatgtatcaattgacaaatgagtactgtcttaggcagaaatgttctcattagaaaataggcatagaggctgggtgcaatggctgatgcc

SEQ ID NO: 93118 - DNA, 1125 bp, Homo sapiens
agcttcagacttgagggccactgcagatctattccagagctctctctgatattctgctctgaggattctagctgcatccccttaactcagggagcctgccaggcgctgcctggattccctttgtccatgatacagccggaaatacactccaggcagtaggctgggcggttgccacagtagggactgctgaactgttagggatcactgtccttcgttgcctttgtctaatgtcttcagtgcctttttttcacatattttgtcaatttttttagctgattgaggcaggaggataagtctgatccctgttactaaatcttgaccaaagtgtgagtctaccactaattaacatatgtatgtgtgaattaactttttattaaagtatcatatataagaatatagagaaaagtgtacaactcaatagattttcacaaagtgaacacacctgagtaccactcagatcaagaaacagaatgtcatcagtaccccagaggttctccttgtgtcccttacacactcactaccccacaaggggaatgactatcctgacttgtaacaacacagttaattgctaagcttttcatttttgctgtgctcctattacttttctgtcagtgagattgtttttcattggagaatttggttttcagtttaaacaactagcttgtaatttgatcttgtatttatctttaatagataaatgatcccgcactgagacacacaggcctctactgcaaccagctctcatccactgaccttctcaaaacagaagcagatggaacccaggtcagtaaggaaattctaagcccagagctgtcaaatgtactctagatgcacagaggtcattgtgtagcatcattaagagcctgaccttgggagtcagacctgggtgtgagtcctggctctgctcttcttagctgtgtcgtcctgggcatgttatggagctttcctgagctgctgtataaccacagaactaacatgacacctgcttataggattgttgagaggattcaatgagatcagttcagatggcttaactcagtgcttagataggataaagtgatcacaaatggtggccactaattgttattttgtaaataagcacagtgctaaaaactcatctgtaat

SEQ ID NO: 93119 - DNA, 2079 bp, Homo sapiens
tactcatagtagtgaagggaaaattcacactgttctcaaggctaatagacgtactgttaattttagctcatgtgtttaaatggattgtctatcaggggaaaaaagtcaaatatgaaattgttctaatgataatttgctgtaattctaaagccaatatgtgaaagagctgtgtaataatatatttaaatactaaaaaatcttttggacattaaccttagatgctgatgtcctcttattgagttgtggttttgttttgctaatactggttgaaagccctttaatttttcagtgacatcataaagattttttatcctactgaaatcatccatagaatggttttaaaccagttttctaaatatcatgtattttttaaaacctaccactggatacccagactctgaaactgggcttctcccaatcttggcaacattagcaatgatactcactttcagtattgatggcaaccctataggaggcgtgaccattccaattttgattttatttttaaagtgtgaactttccagaaccctgagcaaaatgagtgcagcgattttctttttgtaggacaagaagacagaagagttcttctctgtggtgactacagactagaggaatgctctagtgagtttccacttcaagtagtacccactcataagccgggggggcagacccttctgtctaaacacatcttttatttgtgttccagcaggtgcaacaggttcaggtgtttgctgacgtccagtgtacagtgaatctggtaggcggggacccttacctgaaccagcctggtccactgggaactcaaaagcccacgtcaggaccacagaccccccaggcccagcagaagagcctccttcagcagctactgactgaataaccacttttaaaggaatgtgaaatttaaataatagacatacagagatatacaaatatattatatatttttctgagatttttgatatctcaatctgcagccattcttcaggtcgtagcatttggagcaaaaaaaaaaaaaaaaaaaaaaaaaggagtttgcttttgtcgggagattgaaagatgtttttgtttctttctttgtaaaggccttggatattgaaaaaataccaaggcagaacagttggacaatctatttcttgagccaaatttaattattcttatttttgtaatcagtcattggcttcttatctggatgaaggcttttggaggagaaccaaaacgacaagttccaagaagaagatgaagctccgcctccgccgcttagtcccaaccctgcccaggaagaagggcccgtggggctttgcctgtgcccgtccaccaaaggctgtcatgtgtctcgaaatcagcagccctccccatcccaatcccaggcagcttgtgtgtacaatcagcttctctagcaactctgtatctgttggcttcaagagaatattttgcctccacatatgtaccccttctcctttttttaaagatggatttaaaccaagatgcctccaggaaagaggacgaaatgagtatattcacagaggaatccaaaaaatacagtttgggggaaaatgcaataatttttgatgagatgggtgaaggacaagaagtgagttgtgtcaattattgtagatacaattttctgattaaatctggaaaaataaaaggcagcctgttttttctgcttttattgtattaacagctgaggtagctaaagttatttaaaataaaattaaatttatgatccaagtagcttatttttccctttaaatctcattgtaaatatatttgatttcttgtagaaattgatttccttctgtttaattttatgcttttattatactcttgatttttctaaatttgtgtgtgaaatataacattgattgaattgcagttacatttggttagtaatatttcattattttaataactgtgatgtcatgtatggatttactttggggttcaaatcaaaatgtcactgccagaaagagctgttccagctgatctagagcatactgccctagagtgtccctgggatcatctgaacagaagtgcacaggctacttgtacagagaaaaaattaatactcaaaggaaa

SEQ ID NO: 93120 - DNA, 1045 bp, Homo sapiens
gtattgtggaagaagcaaaggtagacccccatcactcacctttgtctgcatccctgggcctgtgaatgatgacagcacctgacattctgcaccagctacctctgcctccatggcagagaaaaggccataagaacagtggaagaggagcatggactcagacttcaaggaagaagccatttccccaggtccttccttctgcatctcaccacccctagttacaaataactccattgaacagcatctattcagaaactatgccgaataaaaagattggtggaagggctcatgtggttagcaactatgaaacagaaataggacactcagttacaaacattatctcctttagtttttcagaaaatgcatccctgatttcattcatttccagcttgaaagccagccatattactctagtccctaccaaactgctctagaaggtcatttccattttgtttgtgatatttagacgcgcagacttcaggaagttcacctttaacttcagcattccagatgaagtttcctgactcagtgcttttgcataaggaactagaaaaaaaaagtaaggaaaattggagatgctaacatcctcccccatcccaactgcaccttaaaatatgcatgtcaccttcaaggttttataattgcactgtttgttttatgtatgtacagattaaaattattgctacatttgaggaaaataaaattgcttgcttctatgtaattcctgtcattccacaggaaattcacttttccagctactgaatagaatttgtttaacaacctcatgggttgcctcttcatttacagggaagaaatgaaatgtacatctgcagaaattgccaaagcccaaattaacgagtattataaaaggataataaagcatccctgaagccaaagatcctcaaagtcatcctgatttgagccagaccattgaaatttgagaaggtcaaactgaagtcatgatagcaggccttgaggggttctaactgtgacattatctgatgattaaagacttctaggcctgctgtttcttgactcagaagatctg

SEQ ID NO: 93121 - DNA, 1103 bp, Homo sapiens
gagtgcctcacctcgaggaccactttgcgcatgcgccccagctcttggaggtaagcggctgtgtgcgggtggtcgcggtgagtgtgcaaggccgcggtggccgcgtgacaagcctgcgctaccagtgcgcccgccggccaggagaacggagcttgtgatagatcctttcgtaacaccaagtattgtaccaggacctgcggctccgccccagaggccgccatcttcctgaccacccgaaaggccggacctactccccggtgcatcttgggatcagggcggggccctgagcgccgccatgcttttgtacggcaggatcgcaaagcacgccgggaccggttggtttggttttgaagacgtggatggcgggaattctcgcttctggcctgggtgagctagaagggagaaggtaggggaaagacccattgtcggaccggaccgtggccagggtggcgggctgaacggccttcttaaaactccttccgtggccgggaagcccgctggaccagagtagccgtggcctcgggagcgcgccggggccgcgggatgggcgcgggggtgggcatggactctgctggctcggacgatgggagagggcgggcggctcaggaaaggggatcctagccgtgacatttgtgtcatccgcggcccaggggttgtgcctgagtggtgtgtgccctgccgtctgggtttgaatgggactagatgtgatgtgactgttgccatttttcttttattagcaaggacattggagtccctatcaccggttgcctagacaacttcatgggaaggcccttgggaatctgagatggagcaggcgaaccctttacgtccagatggcgagtccaaaggaggtattcagagggtcgccgcctccttcctgctgctgcccaaagatgacccgcaggctgagagagccctttcctcctggaactgacgtgggacctggcctgtttgggagcagaatagtgaaaggaactaacattgaagacaaagggacaggcagccaagattattcgaggaggaaaaatggcttcgtttctaggctcccaccccttttgaaacggataagttgcatccatcatatgctcagtgtttatattctg

SEQ ID NO: 93122 - DNA, 1013 bp, Homo sapiens
aaaataatgggaacagaagtgagtttcaagtgggttgaggtatgagtcacaggcaagaaaatggagaaagtgagtacaagttgagcactgaagatccaaaatctgaaatactccaaaatctgaagctttttgagcactgacatgatggtcaaaggaaatgcttatttccagttttggattttcagatatgggatgttcagccagtaagtgtaatgcaaatactcccaattccgaaatctgaaacacctctagtcccaaaacgttcggatactcaacttgcatggacaactcttttaagtagttttcctggaaaggaaaggggagaaaagggagatagtagctgaaggggatttgtgggcaagaataggcctgtgagtgtatgaaattgtgtgtgtgtgtatgtgtgtgtatatatatatatatatatgagtgtgtgtttgaagacagttgagacttgagcgtgtgtggaagggaaatgaacacagcagagaaaagggtaactgatcatttagggtttctgagaaagcaaggggataggcctcaatgagtaaaataggataattctgcatatagtgcgtgtctgtttctatttgatctcacacaaattttttttttttgagacggagtctgtcacctaggctggagtgcagtggcacgatcttggctcactgcaagctccgcctcctgggttcacgccattcttctgcctcagcctcctgagtagctgggactacaggtgcccgccaccacacccggctaattttttgtgtttttggtagagacggggtttcactgtgttagccaggatggtcttgatgtcccgacctcgtgatccacccgcctcggcctcccaaagtgctgggattacaggcgtgagccaccgtacccggcccgatctcacatacttttttttaatggttttattagccataaaaaccataagaggtttctagtcttaattggataggtgaatgagataagtttttggattccgtcccaaggcaaggagagaa

SEQ ID NO: 93123 - DNA, 1040 bp, Homo sapiens
gacctcaggtgatccacccgccttggccccccagagtgctaagattacaagtgtgagccaccgccctcggctgtgagagggcttctctccggcctgtggtaaagctagagaatcatcctttacacactagagatgtggatttgcgataaactgcagacctagataagacactgctgcctaatcagcgtgtgatagttcatatcctctctcgggctgtctttgaggaggatcctgttttacatcactctccaacctaggaggttgatgatctttgatttcaattgttagctcccctggttttataaattgacagatatctaacaattcagctggccacaaagttctggtaaaaaaaaaaaaagagtcacctgttcttccctgagatgcttcctgttgccacagtgagaaatcctcagcttcttgtaaaattctccttttactctccttaggtgttttagctcacttggaaaggctagagacccaagtgagcagatcccgtaaacagtctgaagagctgcagagcgtgcaggcccaggaaggtgctcttggaaccaagattcataaactaaggcgtctgcgagatgagctgagggctgtggtgcggcaccggcgagccagcgtgagtagaagggtggtatcagcagttcctttagagtataatgaacaaacgtgatttgggaattggtgaattggccattttttataatgtgttttacttgtgatcttactggattgattgcagtccttgatccctcaaatgatcaaacctgtagagtttggccaggcacggtggctcatgcctgtaatcccagcactttgaaaggcgaggcaggcctatcgcctgtggtcaggcgtttgagaccagcctggccaacatggtgaaaccccatctctaccagaaatacaaaaattagccaggcatggaggcaggcgcctataatcccagctactcaggaggctgaggcacgaattgcacctgggaggcggaggttgcagtgagctgagatcgagccactgcactccagcctgggaaacagagt

SEQ ID NO: 93124 - DNA, 1068 bp, Homo sapiens
gttctttttttttaattaaagtgtaatatatatgaagtgcactatgacagagattaaagtatagagcattaccaacacccagaagcctccagtttgcctcttcctagtcttctcttaagtcttctcttaaggtacccactattctgatttctgtcaccatacataggttttacctgattttgaactttatataaatgttaaaaagctaatttatagcttaaaaagtacaaactcttatgtctggcttcttttgctgaatgttctgactgtgagattcacctacactctgcttatagtgctcattttttttattgctgaatagcaattctattttatgagtatactacatttatttacccattctactgtgatgacatttgggttattggggttatttcactttgggacaattatgaatgctgctgctgttaacattttgggtgtttctgtcctttgatataaaaatatacacttatatattgggtatatgcctagtagaattgttggttcataggatatgcatgttaggtttagtaaattctggcagtttttgaaagtgattgtaccagttttacattcccagcaatagtgttaaattccattgtcctgcatttttaccaatacttgctattgtcagttttaaaaatttgtcattctggtgggagtgtaataatatgtcattttggattgaatttgcatttgcttcataaccagtgatggtgaatccctgtattgaacatttgaaaatcttctgttgcaaagtgtgctttattcaaggcctttgtgaaatttttattaggttgtccatctattaaattgtagaaatctttacatattttgagtgagttcttttttgggtatctgtattagagtcttccttagactgtggcttgtattttcactctctaatggtgtcttgtgatgaaaatctttgttttaatgaagtttgatttagtaattaaactttattcttattgcccttgtttcttgtttaataaatctttgtctaacttaagatcatgctgatcttttccaggtattttattttttttattttttttgtttttg

SEQ ID NO: 93125 - DNA, 1483 bp, Homo sapiens
tggagatcaatgagcaagaagcattggaagagaaattggaaaatgtgaaagccattctgcaggcatatcattttacaggttttgtttgtttttttaacctaatttagtctgggtctgcctctagtgagttagtttgctagatgtgttatcagtcctggaattatttcataatttatagtattttacaccctctgccctcatcactcacacacacacacacacacagacacacacacagctgacgtgctatttgtaggcctatcttcacctacaagattgactggcccctttgtacagcagctcagttggtggctggcttattccactcatcttaacagttcgtcatgtgccagaccttgtactagaactgtctttactgctggcttgttttctgccactagtgaaatagtttgaactttccaagtctccgtttcaccgtaaatagggatttattctcccatctatgccacaagatagttgtgggaagaactggggactctgacaaattacttcacactcagaaataaagaatagctataaattaaatttttggccttgcttatgcctgtaatcccatcactttgggaggctgaggcaggattacttgagtccaggagttcgagaccagcctgggcaacatagcaagacctcatctctactaaaaatttaaaaatgagccaggtgaggtggcatgcgcttgtggtcccagctgtttgggaggctgagatgggaggatcatttaagcccaggaagttgaggttgcagtgagctgagatcgtgccaccgcactccagcctgggtgacagagtgaaaccctatctcaaaaaaaaaaaaaaaaaaatttctcaatagtttgacatttaggttgttttttcatttttaccattcttccatggttttaacaactcagtctcaaagtgagccggagccaaggggaagaatgagcctatgatactcattgaacaaacatttgtgtacaaagtgtacatattctaggcactgtggaagctactggaggcacagatgagtaagacatcaccttggcctgctgtctattgaggtgtcttcttgtttgcctcaggcctcagtggtaaactgaccagccgaggagtttgtgtctgcatcagtactgcttttgaggggaacctattggattcctattttgtggaccttgtcatacagaaaccactccggatacatcaccattcagtcccagtcttcattcccctggaagagatagctgcaaaatatttacagaccaacatccagcacttcctgttcagtctctgcgagtacctgaatgcttactctgggaggaagtaccaggcagaccggcttcaggtatctctctgggatgttatatgcctcatccgtgggcccaagatcaacttaaaagggggatgttttttgtattttcagtgtttcctaactgtgagttagaagtttgaccgttacctttccgatgcttgtttcttatttatat

SEQ ID NO: 93126 - DNA, 1027 bp, Homo sapiens
gtttatttgagtgaaacagggaaaataggtagaatccatgaagtagacctcttgagacactttctctgtttatatactgtacattactcagaccggtaagatagaacattcttgtttctaccagtcttttccttcctctttgtaaatggtaaacatgattgtccccattttcccttctcctttgcccacccacctcagcagtgttctcgcagcctatgatttgttttcactgggggccctgcttcaggaaagacacctaatgataaggctgagtcatgggtcagttatggtggatggagccagaagactcatttcactgtgaagacaaatggacatgacacgtcagcacacacttactcctccctacggagcagtctctaaatggaaatccttccagactggctgagagagagattttttggtgaacctgtttcagttaaatgtgacatgggcaataatgaaaaattgggtgaaatgtttttaggaggcagaaattttgaagctgccccagatttcacaccatcggtctttgatttctctgcgcagttagattccagtccccagtctctagattgcattggtccagtaaggggcagccttagtccagaccaaaaaaaaaagctgtatgggtccagtgggtccagaatatcagtgatccaggttccgattcccccagctgcactgagtgagattgaatgtcagtgatccaggctccgattcccccagctgcactgaatgagattgaatatcagtgatccaggctccgattcccccagctgcactgaatgagattgatggaatctttctttttaggagtggaagtattatccacttcatgggaggagcaacgagcatctcatgaaactctgttctgtacgaagcccttgcatcaagtgtttgcctcatttacaagaaaaggagaaaagttggatatgagtctggtctcctaatagattgttttcactgcactgggagcacatcagaggtaagtaaccagtactgaagacagtaccaggtgggtagtact

SEQ ID NO: 93127 - DNA, 1036 bp, Homo sapiens
agggctctcacagaaatgtagcactccactcaaactgcaatagcttgattctgttgagaaacactgatctaaataaatggaaaaataacccacattcactaatgaagataataaggaagacccaatatttttttttttttaaaaggaaagtatttttagcttttatgaaagctttaagtaatttttcctcattttcctgtttgaaacttttgaaaaggaagttcttcagtgtttgtttggttaggcgcagtgtattctaggccactgctttataaatatggtgtgagaaagcagtaggataaaataatcagagttcagtgtgtctcatattttgtttcctaaaagtttagtagagctgtgaatgtactaggaagtcccctctgaaaaagcacagttagttagttagaaatctgcccattaactcagggggactcaggcgccccccgggtcttccctctcctgcaggctctccggttagtgtcctgatttgccgtaaccacgggcctctgacctgctggcacctctggttccttggcgtgtgggtcactcacagatatgaaaacctgtgtctggctgaccaggttctcctgtagccctcccttgcccaggcacagataggagtcatgactggcccaaggccacgttcagacttaaccctgcaatggccacgaagtaacctccgtgtgggagagctccaggaacagtgcaggggattaaagccagcttggagtaccctttagaagaaagtttaagaataaaagagacagggccaggcagcaggcgttccggggtacagtgagctatgatgagaccttcaagctcttgccttccaggcctgtggtggggaccagtggcatgagtcagcaaagtaccagcactcctcagataagtgatattaacagaatttccacaatcactttcaagttgaataaagcttttaataaaacagtcttgttctttatcaatacctgtaaattctcttaaagcagtagcaaaggcgactgtagcaagagctcaaaaggcaaggcaatatcgg

SEQ ID NO: 93128 - DNA, 1013 bp, Homo sapiens
cctgggaggtttggggagtgtcccgtactgcttgggacccatggatcagtgctcggctccaaccacccaaagcccccacccgccctcagtctaggctccccccgtaacgccacgttcttgctccccctccctctccaggtggtagaagaaacccaagtcatcctccgagagtacggcttccgctttgtgaggcgaggccccatctttgtgaaggggaagggggagctgctgaccttcttcttgaaggggcgggataagctagccaccttccccaatggcccctctgtcacactgccccaccaggtggtggacaactcctgaatggcctcgagcctgcaacagtccaaaccggaagggagaatttattttttgaaactgaaggaagtcccgaccttcctggattgaagtgcacactcatggactttaggtttagaaacctcctcagccttcatttgttcgtggatgtgtgagctctgagggtggccctgctattcctgtgtgtgcctgtagtgtccccagcataggggtcttaggcatagggctgaacagtccttccagagccctcgttccaatccctgccgtccttgcccctgaggggccctgaccactgtgagcaggagggtggcagagctgggacaaagctgcctttgccgctgggctttccgggactgtggagggagcacaggcggggaagctccacttcagacagggcttggtggggcaggacatggctcccattttgaagggaggtctccatgtggtccgagtgaggtgagacggccctcgtcctggtgttcctgatcatcttgaaaggttcttctggaactcctgtccccttagtcatgagaacagaaagtgcaatatttcctttcacctggcaggggaggggggatttatttctgaaagaaaaatatataaacagatcttctacatttatatttttaatcttctgttaaatacactttccgatattgccttgccttttgagctcttgctacagtcgcctttgctac

SEQ ID NO: 93129 - DNA, 1103 bp, Homo sapiens
aaagcccagcggcaaaggcagctttgtcccagctctgccaccctcctgctcacagtggtcagggcccctcaggggcaaggacggcagggattggaacgagggctctggaaggactgttcagccctatgcctaagacccctatgctggggacactacaggcacacacaggaatagcagggccaccctcagagctcacacatccacgaacaaatgaaggctgaggaggtttctaaacctaaagtccatgagtgtgcacttcaatccaggaaggtcgggacttccttcagtttcaaaaaataaattctcccttccggtttggactgttgcaggctcgaggccattcaggagttgtccaccacctggtggggcagtgtgacagaggggccattggggaaggtggctagcttatcccgccccttcaagaagaaggtcagcagctcccccttccccttcacaaagatggggcctcgcctcacaaagcggaagccgtactctcggaggatgacttgggtttcttctaccacctggagagggagggggagcaagaacgtggcgttacggggggagcctagactgagggcgggtgggggctttgggtggttggagccgagcactgatccatgggtcccaagcagtacgggacactccccaaacctcccagggccaagcccttccacccgtggcgagcagcgggtgggaaggagaaccctggagtgactggctgggggcctcctctcatccagagacttctctcctaggatggccatggtcacctgggtggcagcactgttacctggaaactgccactgcctgctcttctgtccctttgcccctttcgtggagcttttctgccagacgccactgagacagatcacaaggtattagaaggttcatacccaaaggtaggccatatgcatctagaacttcagcccagattttgtggatgggtggaagtgtttcttcctgtgctgaggctagctattgcagagattcttttccacttgccccacgtctctgcctctggacttactgttcagggccagggtgggaggcaggggcacgtgggaaagcactgttccggttttgttctcatgccgagtctg

SEQ ID NO: 93130 - DNA, 1087 bp, Homo sapiens
actggacgcggtggtgcacacctgtcgtcccagctactcgggaaactgagacaggagactcacttgaacccgggaggtggaggttgcagtgagctgagattgtgccactcaactccagcctgggtgacacagcaagactccatctctcaaaaaaaaaaaaaaaaagtagcgatgagctatttttaaattattcagagttggaataatctacagccgggcatggtgacatgtgtctgtggtcccagatacctggtgttcaaggccgcagtgtgcttcgatcatacctaattgtgcttgtttactgccactgcactccagcctgggaaacacagcaagacccactcttaaaaaaaaaaaaaaaaatgctggaataatctgactgatgtgtgagtccaaaaagctgagtgcacatgtcatgcatggaagatagatgcatttctccaacacatcatccagtcagtcggacatgctttgagcacgttgtccgcacctctttttaggagctgtatagccagacgtatgatgagattggagtcatgtttgcctccctgcccaactttgctgacttctacacagaggagagcatcaacaatggtggtattgagtgtctgcgtttcctcaatgaaatcatctcagattttgactctgtgagtgcccatcccaccctgcactctggccatgaagccggcccattccacatcacatcctacaataggctgcagaggccagagaaactggcttcattttcccagataagccccttccgcaatacatggacttctgcagccacctggaactgctgggctggggaaggggaggtgaggtgggagcccgggaaatcacccacagggtcacaggataaggataaggactggccaagcaacatctcgagacctctctgtcctgggactgtctcctcaaattcagagccggtcagcattgactgggtgacctgtataccagggagaatgcttttacacacgcgcggagcccccctaggagactgccgattttatgtcagtgttgaggttgtggaaacaggcccagaaagttaggaagttctcccaggatcatgtggcagataagc

SEQ ID NO: 93131 - DNA, 1055 bp, Homo sapiens
tttccacaacctcaacactgacataaaatcggcagtctcctaggggggctccgcgcgtgtgtaaaagcattctccctggtatacaggtcacccagtcaatgctgaccggctctgaatttgaggagacagtcccaggacagagaggtctcgagatgttgcttggccagtccttatccttatcctgtgaccctgtgggtgatttcccgggctcccacctcacctccccttccccagcccagcagttccaggtggctgcagaagtccatgtattgcggaaggggcttatctgggaaaatgaagccagtttctctggcctctgcagcctattgtaggatgtgatgtggaatgggccggcttcatggccagagtgcagggtgggatgggcactcacagagtcaaaatctgagatgatttcattgaggaaacgcagacactcaataccaccattgttgatgctctcctctgtgtagaagtcagcaaagttgggcagggaggcaaacatgactccaatctcatcatacgtctggctatacagctcctaaaaagaggtgcggacaacgtgctcaaagcatgtccgactgactggatgatgtgttggagaaatgcatctatcttccatgcatgacatgtgcactcagctttttggactcacacatcagtcagattattccagcatttttttttttttttttaagagtgggtcttgctgtgtttcccaggctggagtgcagtggcagtaaacaagcacaattaggtatgatcgaagcacactgcggccttgaacaccaggtatctgggaccacagacacatgtcaccatgcccggctgtagattattccaactctgaataatttaaaaatagctcatcgctactttttttttttttttttgagagatggagtcttgctgtgtcacccaggctggagttgagtggcacaatctcagctcactgcaacctccacctcccgggttcaagtgagtctcctgtctcagtttcccgagtagctgggacgacaggtgtgcaccaccgcgtccagttaatttttgtatttttt

SEQ ID NO: 93132 - DNA, 1075 bp, Homo sapiens
tcttccttccagcctttccaaggggagttcctccattcacgttcctgtttttcttctttttttgagactgagtctcactcttttgcccaggctggagtgcagtggtgcgatctcggctcactgcaacctctgcctcctgggttcaagttgattctcctgcctcagcctcccgagtagctgggattacaggtgcccgccaccatgcccggctaatttttgtatttttagtagagacagggtttcaccatgttggtcaggctggtctcgaactcctgacctcaggtgatccgcctgcctcggcctcccaaagtgctgggattacaggcatgaaccgccacgcctggccattcctgtttttcatccttctatccagtggccagcttagagcacatgcctcgccttgtctgtgtctgtaggtagaaaaactggcacggacacttttcttgtggaagattgaggtccacgaccagaaggaacgtgtctatgagatgcgacgctggaacgaggccttggtcaccaacatgttgcctgagcacgtggcacgccatttcctggggtccaagaagagagatgaggtgaggggtgtggtctcagcccggaaccatgaggccatttgtctccatctgttctttctttcaggcagcccccgctgggcccaggccttctcagggacaggggactggggcctaggtagggctgaacctaaacagcaaacacaaataagcaaaagaggaatttctccggcctcttataaagtgcactgctgtaggcatcgtgatgtgggccgtacagctctgaggccatgtgtcagaagacaagactttggctagagcccacctttctgttgcctgtgaacttctccaaacagagtggttcccagctctacggtaccctcgtcttcacagctggggctgttagaggaactagagaagctgttttaaaatttattcaaagtagtggccgggcacagtggctcatgcctgtaatcccggcactttgggaggccgaggcgggtggatcatctgaggtcaggagtttgagaccagcctgggcaacaaatagtgaaaccctgtct

SEQ ID NO: 93133 - DNA, 1049 bp, Homo sapiens
caggcggcactcacgtggcgggagaagtagtagaagctgagcatcatgaggaacaccatcaccgtcatagagtacttggaaggcaccaggggcagcctgctgggcagagcgtgtgcaactgaaagggctgtcatctgcctcctggagggggcctgattccctccaactagatggtgctgcttcctgccaccccagccctagagctcaccccggctccttaggccctttcacatcaagtcgggctcccccgggcagtaaaattttcttaactcactgggctcctctccaacagccaggcaacccctggcccctcctggctgcacctggtattcacatcagggctgctccccaggtatttaagaaacactgcattgcctgactgatcacagaggtagctacaaccatgcaggaatttggagaagcaagagacatcagtgatgggatttcatagccatgggactggggtacaatctcaccatggctttttaccttgttcatacatatttttatgtggagctgtggttagtttccattaccgtatggtatttcactgcatgaatataccagttatgtatccatttcctgttgatgtcatttgggttgttttcatttgttttgggggagggggtatgtctattacgaacagtgccactttggacattctcatacatatatcctgggacatgagtatgtgcatgaatttctctaagatgtgtgtatatatatatatacacatatacacacgtctgcgtgggtgtgtatgtaggagtggaattgctgggacacaggtttattttcaaccttactaaatagatcaaaatattttctaacacggttgtactaactcatactcccaccaggagtgtaagagttactattgtacttgatattgtcagagttatctggaccggtacgtgtgtgatggtatctcactagggtgtaactggcatttccttgattacttgagtgccatttattagtggccatttagagttcttcttttgctaagggctatgcaggttttacccctcttctattaggtcatcttt

SEQ ID NO: 93134 - DNA, 1007 bp, Homo sapiens
agtgtggcctttaccccaggggtggtagtccaggaactctaacattctctccctgccctgtcagacacgttcaggcagggggctgttcacggctattttcttcacctctgtgtctgcagcaccttgaacgtgcctggcacatacttgatgctcagtgaaatattaactgcacgaatgaataaaagagtaattggcagagagaaactgaggcccctcgggaagtggggatagggaggaaagtcgcttggtgccctcgtcctgctggcctgtgatgcctgactctgggctggccctggcctgccttaccccccacccaacaccaagctgtggggaccttgccaggccccctcttgtggaggggaagaggcccacaatgaatttctcctgcaggagcaggggcagctggctgcctcgtgaaggccacaccctgaccctcctttctgtgtgtacctggcaggtatgtgcgggagaagaccaagactggggtggacatgcgtgtgggggtgcacacgggcaccgtgctggggggcgtcctgggccagaagcgctggcagtacgacgtgtggtcgactgatgtcactgtagccaacaagatggaggccggcggcatccctgggtgagtgccattccaagggggcaggtttgaggactggggaggggaccgtcccctccatcccccagggctgtgaccctgatgagggacagggggcctcagagaaggcctccctacaaccccggaacagcattcctcctgtctcgccctggtcctggccctggctaaggccgttctgacctgccttggggtgaggcctctttgggcctgatattggatgtggcttttccttcctggaccctgcagtagcctgtcctcctgtcccctttaccgacttagggggctgcctcccctttacccactaagggggctgccccagctctccttatgtcagagcccaggtctccccaaagggagagtaatgagcagtcatcagctagcgggctcgcaggca

SEQ ID NO: 93135 - DNA, 1063 bp, Homo sapiens
tggttttgtgtcgctggcgcctcgtgtagtgcctggtctgctgtcagtctttgatcaggtcaaagcagaattttgtgagcgatggctctgtgcagccgtggcgggtggctgaggtgaccccgcagggctcctgccgggagggctcacggtgcagcagcccacgcaggactgctgcgcttcttgtggcacgaggatgctgagcacagagccacgttgggatgcttcactgcgtttctggctcccctcagttgctctgaaggggccattgccaccctcagccttgtcagggccagaagctgcctgtcccagacccctggctgctcccgaggcagatctgtgaggtctctctggagggcagcatggttccctgctcacgtttcttgccaggatcggggcatttcttcccagaagtatctgaacttgcctctagcagggcctacctttgcctctgaccctctcctgcccctcacaggagaacctcatgctttccatcctgcccaagcacgtggctgacgagatgctgaaagacatgaagaaagacgagagccagaaggaccagcagcagttcaacaccatgtacatgtaccgtcacgagaacgtcaggtacgccggcccggggcgcgggctctgatggcagagcaggctgtggagggctgcatctttgtgggacccgctaggtgctgtgggcttcaagaggttttccagggactagaagcaaggcctcccacagcattcatcagcctggcggaggaagctgccagcagatgttgaagctacagtgtgctctaggctgcttggtccaaccccatcatagaacagatatcacctggagcggggaagggactcctgtgaggtcacccagctgttgagggccagcactggggctagagccctgacctgtgattctaggaagaaggatgagttcagcctgggcaggagtgggcagtgtggggtggtccccaggcaccacagggagggaggcctgcaggggaagtctgctaggacaagtgcaaggtcagagccctgactttacctggaagggtcagggtctcactgtctgggg

SEQ ID NO: 93136 - DNA, 1054 bp, Homo sapiens
cctcacttccaaggggaaaagcaaggccagaagaagacctggcccacagaagcccagccgggaaggaggctggagggaaggagaggtggccagctcccaggttggccagagagttaggctggctccagtcccggagcctcccccaagtcacagaggcctccccttcccaacctgcactcacagttcccttctggccccaataaggctggccattcaggtgttgactgggtggcctgaggacatatggtactgaccactcagacaggggtgggttgtcctgccccaacagacttgccccacaaacggggtaggcgactggggctgctcagacccaagaggtcaacaggtcattacaagctggaaccagacgccagcagagcttgggaatctacacccggtgacttgctgaccagcactgagactcgcctgacctcctgattcgtcacgcaacgggcccttgttgagtgccacagaggctgcaggaacattctgccgggtgtggtggtggttgatcctcagggcaagtgttgatcagctctgatgaaacacaacacagttcagggaatatggcataaccaagagaacccagaaaattcatgtgagaaccagcttcccttgttgtctgttagaccatcttgtttaaaaataaaaaattgacttccctgcctttttcacctaccccagaatacagtctactctgaggccaatcttttatcccctgagggccagaaattgagaaattcttccgcttctcttcccatctcatttctcaactccaaactcggttccgagaaaccacacctagcaggcgaggcgtcggggatccagggctgggagggtggccacagcctcgggggaagggcatggagctggcgccagggaagctggaggagccagaccaggaaagaggccttgcttgaaaaggcttactgaggccagtggtcttggaggaggaggaaggattagcacttggtccagccatgttggggcccaggcatggccaaagattggagtagcagcagccaggcctggccgccaggcagggttgggatgt

SEQ ID NO: 93137 - DNA, 1046 bp, Homo sapiens
gggaggtttatcttcccacctggccctttgcaaggtccgggtggaggtgaggcgtgtttgctaaacatgatgtagcgcaaggaggctcaggtgggctcgatggaggaggcggggttcagctagatttcgagggggaggcggaaggcggccaggtggggaggggcattctaagtgcgtgcttcccacattgggggtgcagggttgtgtttgctttggcgcatgtgaagccacaggatgaccgtggagttggcatttcctttcatcctgtgtcctccatgtattcattccttcacccagcagacagcgtgctgggtgctactgagtgctgggaacacagtggggactgggacagatgtcgtccctgccctagtggcacttacactgaaacaggtggagacatctgtttggcaaatatttttaaacacttaaaaatacaaatacaaacatggattttattgaacagaatgcagaatccacatatattagcaagtaaaatgagaagcttcctccccaggcactttcgtggggaagtttaagagctctcaaaataggggctacagcatgtgccgaggtcaggaggccagttggtgacatgctgaggacgtcagcttggctaaagcagatggtttacctcaggcagctgtgggggcggggtttagattcaagttcatggtaaagcccagagtatataggaccctgaatgccagaatgaagattttgaactcttggacaattggcagctattgaggtgttttgagcagaaggtggtacttgcaaaaatattattttggaagattaatgtgttccagggtggattggcaggaccagggagatgagtctgtccccagccctgtgggaagtaagggtgtgagccaggtggtggcagcaagagtgaggaaaaaggagacccagaggcttttacctggaaagaccagctgggatgaaggacctgctggaggcacagaaaggagctcagtgagagagagcaggctggcgctggttcaggcgttcagccaatgttactgaggacctgcgccgtgttgggt

SEQ ID NO: 93138 - DNA, 1029 bp, Homo sapiens
gctaatttttgtatttttgtagagatggggtttcgccatgttggccaggctggtctccaactcctgaactcaagtgatctgcccacctcggcctcccaaagtgctgggattacagacgtgagctactgcgcccagtcttgtctattcttaatttattgattttatttatgtgtcacttgcattttatttacttgctgtcgtttcagcaggcccatcccctctctcctttcccctccttgccattttctgtctgatgactcttccttcttctgagcaggttttcagtcctttcttctaggaaattcctctttgtggttcctaaggaattcactttgattagaaatgaaactgtttctttccttttccccttcctctcctccacaacactttccttcttgtagacaggaaagtaaatgacttgtttcagaagaaatctacccctctcttgagctccattcaaaaccccaacataagcgactggacttgaactttcgcaagatttccatgtctggggtttgttgttcacatgtcacttcaggactgatctccaggaagtgtagtttggtgtcggctgagtcagatctggtagtggaagactgcgacagctgcctatccagctctcggtgggctcctggactgcccttgggggcagtttctcacccaaggggaccaggccctgaggaatttattcccatgagcctgattcctttcatttttatttttatttttttgagatggagttttgctcttgagtgcagtggtgcgatcctggctcactgtaacctccgcctcctgggtttaagtgattctcctgcctcagccttccgagtagctgggattacaggtgcgtgccaccacgcctggctaatttttgtatttttagtagaggtggggtttcaccatgatggccagggtggtctcaaactcctgatctcaagtgatccacctgcctctgcctcccaaactgctgagattataggcgtgagccaccacgtccagtcttgagcctgattcttataagacagattg

SEQ ID NO: 93139 - DNA, 1366 bp, Homo sapiens
agccagggacaggaaattgagtgtctggcgtggacaggactaagtgtgcctgcggtgggcggtggtgtgagccgggggtggcagggaaggccctgggttgggaggctcttgcagcagagatccttttatgagggttagggcgggtcatggggaaaccgcaaggtaggagggaagaggtgcttctactcagcaatgcccttttcagttctagctgatcagtgctacctgtgctctggaaacccgctctgcgttcctgctggaggtggcctcccctccgccccagacaagaagaggccctcagccctcccccggtctcagagagccctgagaggaggcccagtccagagctcttcctccgttcccagtccacttctctagggccagtagcagacaccagccagtatgccgaggaaccagggcttctccgagcccgaatactcggccgagtactcagccgagtactccgtcagcctgccctccgaccctgaccgcggggtgggccggacccatgaaatctcggtccggaactcgggctcctgcctgtgcctgcctcgcttcatgcggctgactttcgtgccggagtccttggagaacctctaccagacctacttcaaaaggcagcgccacgagaccctgctggtgctggtggtctttgcagccctctttgactgctacgtggtggtcatgtgtgctgtggtcttctccagcgacaagctggcttccctcgccgtggctggaattggactggtgttggacatcatcctcttcgtgctctgcaaaaaggggctgctcccggaccgggtcacccgcagagtgctgccctacgtgctgtggctgctcataaccgcccagatcttctcctacctgggcctgaacttcgcgcgtgcccacgcggctagtgacacggtgggctggcaggtcttctttgtcttctccttcttcatcacgctgcccctcagcctcagccccatcgtgatcatctccgtggtctcctgtgtggtgcacacgttggtcctgggggtcaccgtggcccagcagcagcaggaggagctcaaggggatgcagctgctgcgggaggtgagtcctgcccactgtccccccacagcgtcctctcctgcagctctcaccaacttgggacctgttggagttgctgtttgctttgcctttgagtcaaaatgtgtcctgggggcctccggggctctcacctctctccctagtccctgccttttcacccctgtgccattacccggagtctgcctgtgcttggccccagggaaaggaggatgtcagggcattgggcctcagggccactcttcacctgtgcccagtctaagtgtgtgacaggaaggcccacccagggctggtc

SEQ ID NO: 93140 - DNA, 1047 bp, Homo sapiens
attaacattttagaatttattcatttattccttcctccaagcatttattaataaccttttctatgccagtcacttggctatactctgggataagaaataatgaagagtgagtatcaatttacagctaacatttaaatcctcctttatatcattctctctaaagttatttaaatgcagttatttttagtttaaaagcatgtttgaatgtagacttgatttaaaaaaaaaaagattcccacttatagctacattaatgcaaaattgtgaacaagaggaagggcctccagctctatccacgttaatgtgcatgacttgttgggaagctcttagtgagagaaacaagaaaatatggacccctagaaaagcctgccctcgttccaggaaggtgataaaaacaggggtgcagaccaaagctgagatgggcagggagaagagaagcattgtgctcactgtctgaggatgtgagccccgggctcctgctgaaaaggcagacagcccgagaaccagcgagcagagggtgtgaagccagcagaaaggctgactcaatgtgagtgcttcctaaaaatagcagagcagggttgtaagccttcctgtccaaacagatgtaaaactggcaggtagtgtgggctgggcgtgggggactgcgaatgaaaggagagtgggggcctccttgaccacagaccccaacactagggttctgggtgcacactcagctctgccacttgcttcccattcagcaggggatggctgcacgtggtgccagcagcatctcagaatgggtgacagacagaattgctaaaactactctgaacccatttcacggagatgaattttaatggagtgaaaaagaaattttttaaatgaaaattaaaaagtgtaacatttttttaaggcctgattttgccaaaaaaaaaaaaaaaaaactcagcacatattctactgaatagaacacttttagaaaggtgcccagcagtgcctggcatcccccatgggacacagcaagattggaaaaaggatggcaaagcaggtggctaatttattttcacc

SEQ ID NO: 93141 - DNA, 1040 bp, Homo sapiens
caccatgcccagctaatttttgtatttttagtagagatggggtttcaccatgttggccaggatggtctcgatctcctgacctcgtgatcctcctgcctcggcctcccaaagtgctgggattacaggtgtgagccaccgcaccgagcctatgttttctttcttttcttgctttcttttttttaatttttttttttgagacaaggtctcactctgtcacccaggctggagtgcagtggtgcaatctcggctcactgcaacctccacctcctgggcctaagtgatcctcctaccttagcctcttgagtagctaggaccacaggcacatgccaccacacctggctaatttttcctattttttgtagagacagtgtctccctgtgttgcccaggctgctctcgaactcctgggctcaagcaatccacctgccttggcctctcaaagtgctgagattacaggcgtgagctgtcatgcctggccacttttttttttttaaatgaaattttaaactcttataggacctctgatacctccagaatggcttgaaaatcatgtctaaagggacctccacccaagtcagtaactgagaattaaataacctatgaggcaggagacagggagagacccactctaaggattttgtttctgagtgattttcatgttcctaacattcttttgtcatagttaaaacccaggaagctctaaaagggctgtttcccaccccatcctcgcccccaaacgtggtcaggcattttgtgttagattcactagcactacacaagaaaaaggtggtttatattcaccaaactctaaagcttgtccctgggaagtgtaatttagggaatggggttaggatagtttcactttcgtccaatcctgtctatattgcttgagttttccaaatgaatgtcaattacagtgtactttggtcatctaaaaagctatacaaaaccaaaaactaagcatagcaccagtttttttttaagctcactctgaagctgtttgtggggacctcttacagtatggtgactctaggctgtcat

SEQ ID NO: 93142 - DNA, 1452 bp, Homo sapiens
agcaattacagcagagaaaattcattagtgctcccactcatatccttatgtgtgagttggtgaaatttagcctgagcttgattcttaggtcttgagactcagtttccaacaccttcattattaatgttaagaatggccatataccacttcatttacgtaaaaggaataaaataagcaagttaagcttcagggtcctagaatttttctgatttctataatccttcagcagaatattaagaaataaagcatgatctgcaatggaaaggtttttttggcactaacttcatgcagaatttcacagacatctatgcattaatttaaattcttggtgcaaatgtgtgctttgtagttcaaccttattaaaaattcttcagccagttaggatttcaaaatacattagtgagagtaacagctagcagaataattacaatggctaaaacgtttttatagagaatcttgtttttcaaaaaagaataaaaagtttgaatagctattattaaagaaaagccatgtcttcaacatctgagtcaccaagaagtaacactttttaaacttgttagaaatccctggaggcatttcaaattcatcttctaacctacctaagcactttaaaatacagcctccttctgttcctctgttccccttcatgcctccttttgaattgatatctcagctgtcaatatttctttgacttcagcattgttattttatttctctatatcaatgtgtccttagttttcttagcctgttaatttaaaaatccagacttgggggtcattgtgttgctacccaagagaaaatgctacagttttatagattgcacatcattctttaaggcatacttttacctcaggaaacttactctagtatgttctcatatattgaattctcaactaagtaactatttctttatacctataaactagtacctaattcactgttagttaaatgagctatagataaggcagctaaatttctgaaagatagccagagtaagtaagcagccactgcaagctctgaatcagttttttaaaaaaaagaaaaaaaaaaaaaaggagctgtgccccattgaacaatgacaacatcacaaggggaagggagggattttgccaaaagttagaaaggtggagctgtaagccatgtgcttgttgcctttgacagtgacagtgcgcgtcttacaactaattccactaggcatgggaatgtcacctcctttgccactgtaccccatcaagcttactctgaatcaaaggttttgtaaaacttttgaaaatgaacttagctgcaaaatatagctaaccactttccattgcaagctttgcaaagtgaagagaggttcgtacttctcataattggtatttagcacaattgtaagatacagttttactgtttgtacatcgtttttttccattaaacttttctagagaagacaaaagcttacactggtgacat

SEQ ID NO: 93143 - DNA, 2016 bp, Homo sapiens
gactgttaactgtgtttactgttcttgaactttaagaaaatcttcgtcttcaacggaattgatgtatttgttacatcttgagagtttctcccgctacctgcaaatcttgaaaggcactcttagtgcagaggaccgggtgtaactactgaccccatgtggacaccctctctggggaggcagagtggctggaagggcccttcccaggactcccttgtggggaagagggaggatgctgtaccttcctcaaggacacggggtctttgggacaaataagaattcttacaattcaaattgcttcagagagggagaatgtcattcttgttagcgaattatcagaattacacatgtagaaaaacaacacgcagggcaccaggaaggtcccccagagtatccttatgaaagaaggaggttcttgctagaacaagaaaattcaggacccctctaagagcagaaagcagaaaaggccctagaatgtacgcctaagacttggagaactgttaacatgaccctatgacctcagtctctccaagctgatacataaaactttccatcatagccaaggtatcaaaggccatctgacttggagagccacattagaaatccttcgataaaaataaaggagaaaggctagggcatttggtaaagcaccatatagcttataggatcactggaaccctgaattagaaaaggaaggtgggaaataaaaccatctggtagagacagagcttaatctgactggggagtggctgggtacttagagccctctgggaggcctgacaccagaggatgatgaccagtggggacagggacagatgggtccaggcccctccccagccagttttggctctttgaggagctcagaagcctgcagctctctcctggagcgctgctggtttatcggaaccgccggattggagaagcactgctactgctcctttcctctctggataatactgatctctgtcgtgtttcttctttggtctcgtgagctcattgtcattctggactacccctttccagcatcccttgcttgctcagtggtgtcaccttcttgggcctcagattcctcgtgaccttgaccctggagctcatttcagcccctttcttttcatcttctcctcctggatattcagctcatcatccacttctgccatttctttctttatcttttatcttcccttgtttccttccataaataccttaatctaaacttgtactcactcatgcctgggttatgtaacaacctcctgtatcctaacttcaagaaacagttttcccagcacacacttgtcatgaaacacctactgttgtgattgtttatcaggcccaggtgttggggttgttttgcttcccgtctgtgctgtgttcgggctccattccaggccactgttggttctctcccagaaccccttctttcagaaggcaactctggatgccttccctggtgcccaagcccttattctttcaatcagcaaagatatgctgagtgcctgtgaggtgccaagtactgcctgttttcatctgattattattttactaagtgttttgttagcatttatatactttttgcattgtgcaataataactttttcaatttgtgttatatattacatactatttattggttggttgtctgttttctagtcctttaatcctgcctttgagaaagggtaataatttaggatatgttcactgtaagagatactatgtgtgtccaaacagctaacatgcagtgggttgggctgactctgttactaacatagatcttggcttcttttcccagggatgaagtcaataaagcgtatcggaaacttgctgtgcttcttcaccctgacaaatgtgtagcacctggcagtgaagatgccttcaaagcagttgtgaatgctcggacagccctcctgaaaaacatcaagtagaaagtacagaaaaaagccacatgtgggactcaaatgcaaacagactttccctagaggtgaaataaccaacgtggagttttccttcccagaatctcactgc

SEQ ID NO: 93144 - DNA, 1199 bp, Homo sapiens
gtgtgaacccagatctgtctgactccagagcctgtgctcttttccattgtatcacactgaggctctgagtttggagttctaaagttggtgtgcagacccgagagtcagggaagctctgcctagcaccctgggggaagccagctttgggatgtgatttataaatggctgtacccattgctgacacttatgtcattttggccttaagttcttttgaattgctcactcaccttcctaattcttcctaagaagaactttatataattgatgttcttttaaggtctactataattaaagactgattgcctctagggagtggaactggaggtgggacggggtggggcaggaggctgttgttttccattgtaagtccttctatgctaatacatttttagaatgacattactttgattctataaaaaaccctctaatgaccagtagaaacagatacaatagcaaacactaagaatacacaaaagaacacactttgccaggttaatgactgtgagatacattcttataacatcacaaaaactacgttttgtgtatctgtccttttatttgaaggttcgaaatgagttttacaaggacacacagggtgtgatactggtctatgatgttgggcagaaagactcctttgacgcccttgatgcgtggctggcagaaatgaagcaagagcttggacctcatggaaacatggaaaatattatatttgtagtttgtgccaacaaggtaacccctctggaaatggtgtgttcagatttctagggaaagagtggagctttgagtgttgggaaacaaaaagaaaagaaaaattccttattgtgtaatatggaaatcaataacctttcaaaacataatgtccctaagacaaaaacaaaacaacacagcagcctaaaacctgctatatcaaaatttgtatacatttttttttttctggtgccatacatggggaaggatgttggtgactgagtgggagcaatggttcctaataatcagactctgacccgactggagtaggggcattaattaggtgatgtggactatggaaaggtgtgaaaagcagactatggccccaagggtatggcagatgtcatgaagccaactttcacagaactgagtaacagctgttttcccaagggatcaggtgggacattgcagcagcaggcactagtcctgttgccatagaatatcagtctaca

SEQ ID NO: 93145 - DNA, 1050 bp, Homo sapiens
ttgggcaagtttggggaatgagagattccccagtttgaaggtcaggagctagtgggaggataagactgggaaggttggtggaggactgatcagaaacttttaacatcatttgagaaagttggaactttggagaatagtttaagaaggaagaagttgaggggtttcctgtgtgcatattgaatttgagattccaacaggacattcagctggaagaatgttgtgctaattagaaatgcaggtctggaacctcagaggagagggctcatcttggagattctcacagttgaaactgtacaagtggttgatgttgctgatttgggaggaaggattcaaaacgaaaggaagaaggcataggacaggatttgggggattttggtggtaagctggagtgggagcaatagagagaaggggagttggtgaaagagaatttaagagcctagggaatgtgatgtatgggagccaaggcagtgagagttttagaaaagaagagagagcccgtcgttaactgctgtagaagggccaaggaccatgagtactgagggaaaggactggtgggcttcatcatcttcagttctttctgattttgttggttttaactttaggggatagcttcttaggtttctgtaaacaaataggagcacttaatatccttggtccagatatctgcctatgcccagaaaccctacccgatgtgtataacatgttttcatttcttactacatagcttgtgtgggtctgagtacatttgggaattttgtgaaaagaacatataatatatgggctctgtcaggattctttctggaactttgtcccggaaaccccatgtgtcaatgctgctccttaacttctctctggccctaatgtttgagtatgcccatatttcatgctgcctcttcccacatttggaatgaagcccagagaatgaatgcaaggaaggaaggggaaggtgttaaatagacattgtttttcaggcaccatgctaagtactttgcctgcattatctcatttaaccatcataataaccctgtgaagtaagtagtattatcccca

SEQ ID NO: 93146 - DNA, 1042 bp, Homo sapiens
aaaaataaataaaaataaaaatgaaattcacattcttttttttttcttttccctgagacagagtttcgctcttgtcgctcaggctggagtgcagtggcgcgatcttggctcactgcaacctcagcttgctgcaacttccgcctcccgggtttaagcgattctcctgcctcagcctcccaagtagctgggattacaggcacatgtcaccacgcccagctaatttttgtattcttagtagagacagggtttcaccatgttggccaggctggtctcaaactcctgacctcgtgatccgtccacctcggcctcccaaagtgttcggattacaggtgtgagccaccgcgtccagcctgaaatttacctttctttctagttttcttttcctctttcctgcttcaaagcataggatttcatcagtgatatagtaggacatcctatttaagatagttttgttctgaattcatataagtagctagtttatttatctaagatgtgagaattaccatattatgccaaaggaccatggtatagtcaacagactattttgtttctggcagaaatttttttggaagagatgtttgtcccatgatgagtcaggaggatataattgacagaaacctatttcaaaccaacttaagcaaaataaaagaaaatggatattaatcagttcacataatctagcaacaaggatgcagctgggcctcagagatggctggaatcatagggaatatagataggtcatttcactacatctctctccctctctacctgttggcctggaataacttttaaacattcatctttgtgtttttcttttgtgtttgaattatttatttttcttttttttttttttttgagacggagtcttactcagtcgcccaggttggagtgcagtggcgtgatctcggctcactgcaagctccacctcccgggttcatgccattctcctgcctcagcctcctgagtagctgggactacaggtgcccaccaccacgcccggctaattttttttatttttttagtagggacggggtttcactat

SEQ ID NO: 93147 - DNA, 1698 bp, Homo sapiens
ttctcctgcctcagcttcccgagtagctgggattacagatgcctgccaccatgcccggctgatttttgtatttttgtagagacggggtttcgccatgttggccaggctaatcttgaactcctgacctcaggtgatccacccgccttggcctctgaaagtgctgagatgacaggcgtgagccaccgcgccccgccacttttgtcttttgaaaatgctttttcatagtgatgaatggaggaaccataatgaagaaatatacttattctgtatgtgttctcactatgtatttactaaatgcctgtattttttacctttttagagctgtattataaagcgatactgtgagaaaagattcgtgtctaaatacctggcaacaattggaattgactatggagtcacaaagtaagtatattgtttccctgggtttgtaagttacatagaagttcagaactttccaaaatgatccatatttgcatcagtgctcttgtgtaggtaatcttgaaatggagactttgaagataagttgggaaagataggaatagtagacctttacaggtatctagtgatcatatcattcattcagcctgtgtattggtattgagcacatcccattcaccaggcctcgtgttaggtgtaggctacagcaatgaacatgtcaacacaaagcctaaatggcaggtgtaactttccaggaaacatgtttttatattagcaggtccttccagcaggtgtgtttttagagcattttgaaatattctctctaaaaagtctataaatattgtgtggaacattttctaccagagaagtttttttattggtttatgatcttcatagctattagaatccagcaaaaatgggccagatgcagtggcttatacctgtaatcccagcacgttgggaggccgagacgggcggataacgaggtcaggagttcaagaccagcctgaccaacacagtgaaaccctgtctctaagaaaaatgcaaaaattagccgggtgtggtggcacacacctgtagtcccagctactcaggatgctgaggcaggagaatcacttgaacccgggaggcagaggttgcagtgagctgagactgtgccattgcactccagcctgggcgacagtgagacttcatcacaaaaaaagaaaaaaaaaatgaattgggaaaagtaaagttgggtccaattggggatttatctggagatgagtcaggagggggttgagcttgaagagttggatataattagcaggaaatacccatacagtagaattggggtagatagcatactccttaaacatgaaatttcaggtgttcactatcttggccccactctggcctttccccttttgtcttttctgttacacactttactttccatccatgctgaactgctaccctcagactttctacctcagcaccattatccagcctgtccacttggaacagccctgcccatttctccaagatataaacattctcctgttcccgtaaggtcttctaaacatgccctttattggtcaggactctttttggttgcaaatgacagaaatcctaaagttgtctatggtatttatggtacttaccaaaaattgccttgtattgttattatttgtatatgtgtaatgtctcctgctagattataaactccctgaaaatttattagtataaattttctccaagtgcctggcatagtgcttatac

SEQ ID NO: 93148 - DNA, 1024 bp, Homo sapiens
ggcggggcgcaggggcggggcggggcgaggggctcgcagaggcctcgggttggccgagccgggagggaggagcattagtattagcatagcccccgccccctgcgcgcagcagtgcccagcaacccgagcggaggcggccgctgcagcccggcgctgaatgggctggcggcgcccggctccgtcctgcccgcggccggcccccgcgtctgctccctccccgcccgggcccctgtcggccgccgccagtccccgccccgactgtgaatgaaaggcgggcgccgccgagggctggctgggaacgccgcagcgacgccggcctctcgagaggcgcgcgccccgccgagatgtacggtaaggagggctccgcgcccgggcccgggcccgcgggggcgactccgcaaacttccccggcgcggaccattgtccccctgcacggccctggcgcggggccaggccgctgacctggtgcccggcggggctgttgcggtcgctctgtgcgcgcgcgtctgcgctgcgaggacaaagatgcctcgggccggggaccctggggtcctctccaggcccggcgcgtgccggtgctgggcggtggtccttcggggggcggaggctcaggggaaagcgggtctcccggagccgagcagaccgggagtgctggaggaggtggtcgtgtggcagcatttgcggaattaacaaaagcggtttgtgcctgggagttttctgtgggaagccggtccagggctgagggagacgcccgcggccggtcgtctgcgcggctcggagaaggcgggaggcggcgccggcggcgcagaggcccggggagcagccagtggccgagtctcgtctcgcccgcctgaatggactcggcctctgcctgcccctgccgccccgcgggatccaggttcaccaacttccagattttccctccgcagtgatgaagggaggagacgctgctgagagggtgcagcacagccctgacctctccccgcctccaccgccatcccctcaactgccgtgcaacagttag

SEQ ID NO: 93149 - DNA, 1021 bp, Homo sapiens
gtcctcgggtagggtctcactctgtcactcaggctggagtatggtggtatgcagtgcaaggtatgatcactgctcactgtagccttgacctcccagtctcaagcgatcctcccacctcagcctcccaagtagctgggactacaggcatgcgccaccatgcctggctgattttatttttatgtttagagatgaggtctcactttgttgccctggctggtctcaaactcctgggctcaagtgatcctcccacctcgacctcccaaagtgttgagattacaggtgtgagccaccatgcttggccttggatttagatgtcttaatagcgattggtacttcacatccaagaataaaataaagataaaggacattaagggctatcgttgctccaacattccattttattctaccctgccttttttctcctaagttgggaaaaagattttaataataattatcatagtaatactgatgatgatgatgatgaaagctaacaattactgagttcttactgtgtgctaggaatagttgtaagaacttcactctgttaacttatctagtcttcaccacaaccctattaagtagattcccttccttccattttgcggataagtagaccaaggcacacaagattgtacagctttgccaaagctgaagctgggtttgaaaccaggctttctatttccccaaaatggttgggataaaattttcctgctgttagtggtcccgagagacagagaatggaaaaacattctgttcattttcatctattctttgcttgaagagcatatcaaagcccaaagaagcctgtagttcatgaagaattgaagccctgacattaaatcaatcagacacgtttctctccttttaaatccccatcctcaattaaggtggcaatcagattaaccaagattggccggaaacgggtgagtgtctcggaagctctagagctccaaaaggtcaggccactgacagctactgatttgtgtgttacttcaggcaagtctcacccacactatctccc

SEQ ID NO: 93150 - DNA, 1066 bp, Homo sapiens
tgaaatggaatggggagaaaggcccacgttgctgtcccacctgggctatctgtgcactaggctagttaggtcggttgatcccaggctactagagctagactcgggtcgacgggggcgggggcgggggcgggggcgggggcggggcgtggggtggggcgtggggtggggtggggttcgtatgccatctggtggctgtttctggaatagcatctcactgacaagctgctgtggtctctgggctgggagtcctccggctcctgttctgtccagatgtgggcccactccctgtgacttgagtatcattgactcttgcctgagccaaccactgtgcctttccttttccctccctctctttcctctcctttcttccacttctgttttgttttttgcctccctttcctatcttcatctcccatctccttttccttctgaagtcttaggtgcatcaagacacacatgttctacacctcacctggcccatggggctcagagcatccttcccacagtggtacatctggaaatctttaaggatttccagaaaaagaactttatcttttcttctccggtcttcccccacttcccccagtgggggcttctttacccccatttaatttctgacagctgtgacgcctcccctattgcctagtgcaacccatgtcaaattcctgcttgtcttgtgtggatgaaacacggaaagccgggattgtacagagcctgaccccagcctgcatgccaccctctacccatgtgcctctgtctccccagccggtctccctcacccctccaagcacctgagaaggagaaagagagccccgcggagctggctgagaggtgtcttcgggagctgctgggccgggctgcctttggcaacatcaaaaacgccatcaagcctgttctcatgtgagtgcccccacccactgccttggccccagccttcagcctggatgtgtttcaggtccctggcatctcctggctggctggggggaaggggatattacagttgtggtgccgcagccgagtcgatcccttccctgtgcctgtgttccctgcactgtgacagcaaaag

SEQ ID NO: 93151 - DNA, 1070 bp, Homo sapiens
tgagtgagggcagggcccaggcatggaggctcctgcacccccaaggctttttggctgtgctttatggcctctggcttatactcaacccaattttacaagcatgaacttagacttctctttagtatttatatatttaaaaaccaagtttaaattaactcaaacttgacagcaactaacctctgaaagaaactttaaagaaaattgaaatcttgagccacaaacatgttctttcctcactagctcctcccaggttttatcctgcacccagcttggatgagagacccactgtttcttgtgcctacttaacattagggttccccgtggcagcttcatcctgagcactgcctgtgagccctggttctgggacttggcagtcgcctccctggagcatctttccagagccagcattagaacctgagatccccagatgtttctgcccctcatccccatcctgtgaatagagagacagaaaaggtgcaggttcccattctgcatagattctgctgtttcctctccaccggtcccaggcagcttttcctttccatcactgccgcttagcaaaaatgtgcttcttttgaagaactggtcattttttttgagtgccctcttctcagttttgtttaaacttacactcagtagagtgttgggttgtctgctgacatggagtagaacctggattctggccaaataggccagaatcggaaaggtgaaggtgagtgtgatagtaggtaatctcctcaccccagcacaggccctgggagagaggcaaagcagtttgatgggatctggaggggagggaggtaccctggcccttggtctagcatcagtgagtcctgcccttccaagcccctggaggctagtggcattgcattgtgcccctttttgccacccttctctgatgtgattttgagcgaagaggagtcagtaagcccattgagaccggctgctcccaaagcccgaggactctagctgtgtggggaagggctagcattggtcaggactctgctgacagcactgagtaggcaggaatgtatttgagatttggaagtactgttaatttggtggagtca

SEQ ID NO: 93152 - DNA, 3945 bp, Homo sapiens
cctggaccccaatctactgtctcctcgacagattggtgtttaagatcatgcccagttgcttcctgtcacctcttgacaggtggtgactgggctgctgtggggctggagcagcgaggaagggagcctctgccccctcagtggagtccctgtgctaactgtggtgctcacccagctcctccttgctcccgcggggctctgtccttcgggcctggagtccaccagcgccactccaggagggctgggggaggaggggctgcctcaggcagtccaaggtgctccctcccccgctggccaatgctaaggtcttcccggctcccagggtcaggacagagtcttctaaggctcaggctctcccaagccactgcttagtgacagttagcctttcccagcggcccaagctccaccggaactgggcctggtgctccaaccaaagggttggtgttgggacttgggaagagacttggtagccaagggcatggcaagcctgggggattcctgtgggccggcttgctcgaggagggagtgctgggcacagaggagcccttatggctgacagcttgagagcacttgttcctccagatctagccacttgaccaggccctagaatggaccagatgccccaggggtcatggcccccccccccccccccttgcagggacgagagttaacaatcaccagcttttcttccggcccagcctgtgtgcttggtctcacagtagaatttaggagagtgtggggctttgggattgtgccaacttggccaagctgagatatgcttaatccacctcaacgctggggcctctggggacaggtattgggtcaccttccaaggggtgctgaacttcagcaggctgtagataaggcagaggttagaggcagtggagtgggggaaccaagaaggcctagggaaaattgccaggcatattccctgtggaattttctttccgaagagtaggcccatttcccccttagaaacaagggttctgggggctgatgacagcttcccctgcaggtgccaggtggcgcatgatgccaaagagatccgtggctcttgcctgggggaggtagccaggtgctcgtgctggggacacagtccttggcctcctgcctaagcaggaagctagtttccagcaggcggctggtactaaccccccgccccacgggagcgacaggctggtgcaccggcagactggggggccgcaggcgggcactagcaggggtctgcagtccatagatgatgacatgaatctgttgctgtccttttgtctctaggccccagagacttcttgctattgaacatcctattggaaagcaaactttccaagagagcacccgggacctgttagcttttgaaacaggcctgggtgtgattgactggtagagatgcctgtgtgatttttggcgcattgcaggagtgtggattgggacaggcaccccagcaggaaggaaggctgacaccaaaggggtctcacagggcccagctccccttgcttcccgataattggccaccaggccatggcgactctggggaagcctagatgggaacacccaccttctccagcagtagaaggaatatttcagcagagccatctgggagatgttcttataggaaaactgcagtcattcatttcatagttttgcttatataaatagagtacatttgggaggcagttttgaattcctgttgctactctgcttggtgcggagttgcagtggccccaagtgtctttcagagctgttgcttttaggatccccctcaagctgtgggttagggccagggcagggagggggtgctgcctggcactgtgccctgaagagggctgcttgcttcctttggtcgggagcacggcagagccaacattctggtgggaaccgagtttctagccaggcccctgttttggtcccgggaggtgagtaatctgagtttgtcattgcgtattctccacgctgcctgctctcagtgctggagactagagagcgaccctggagttgtcctctgggagtcctgcctgtttgccagggagcagctgaaacctccccgctcccaatcccgggggtggaaaaggtgtagtggaggaatggtctggagctgggatggcccttctggccatgccctgctgagccaggattaaggaaagtgtcagccgcctccttaccaggccctgtgctggggtcaggaggaccgggaggagagggaaggggtgagaggatggactctgctgttgtagtgtgagctctggaatctttacgttttggtaaaggcaggccagggtctttgaggatcgagttggggaaccttgcctctgtgtttccgagacccagctaaggtgggcctttggtgggtgacctgtctctgacccgaggcagcagagttttgggggagggagaaacaagcaaggagcagggaggacaaggacacaagatccctttgctggtggtgacttactcacttcccccaccagagggcctgggactcccgaaactcccgtaactggaaagctccctggctcagctccactggggggtgaggagggcggctccctcagccccagcctagcggcctccaaccctgtgcctgagaacatgagcagcggtctaaagcatcccctagtcccatttcacttcacagaccgatttggttgcacagccctagaattcaacagacaacaaaaatgctgaaattccttagaatacgcagagggaggaggtgactcaccaaggtgctaaaacattttattaaaaatatatattgttaaattaagtctgctgtctggacaatgactgtttgttttgttttcttgtagtggagtttaaaagagactattattttactctgatatattattattaaaaaggcattttaactttgtacttgaaaactaaatgagcgatttcatgtgttttagctgaggcattgaagtagcgggtgcttacttatttgtgggaaatcatgtattcatactgaagaataaactccgtagctgatttggtaataacttttactgttacagacgatttcgctttgaccccggtggcagagcacttttactccacattccacgcagctaaatgcaggacttcccagactcttccctccccagccctctttcctttctcttaagttcctcttttctcctttattattattatttttttttcctggttccagcatcctttcaccactgtattttttttttttttttttttttttttttttttttttttttttttttttttttagggttgcttctctatttattgacaataataatgtacatttcacagtctggttctaggacattcagggaagggcgagtgggggcccgaggggtccctgccccacccgcctggtgtcctgttgtatctctgtgtaagtgatgctcgtgacatagctgtttatgaaataattaaagaggtcaatgcgtacaacagatgtagaaagtctgtcagttccgccttcatcacatttttttttgtgcccagaagaatataataaagctcctttctaatgtacttgtgctggagaacacttgaataaatggactgtttttgtgcaaaaagaaaaatggaaaagcaccgtaataatgtcgttttgtcttgcgtctcctttccctgccatgactgttcacagcctcctccagggggctcaagtacctaagcggggaggtgctagcgtcgggcccagatgatgtagggcctccctaaaaaacgtcacctgtgtgagcatcaaattagtaaatgggagctgtcccctgggtgcaggaaagagtttggttgactggaagctgaaaaataagttatggtgagacagggttgctgggaaagcaaattcagctctgggctgagcaacagaagttttcataccagagcagggagaagagcgcgccttatgccaatgccttggtcagacacggcgcgaggaggatttttgaacctaggtactca

SEQ ID NO: 93153 - DNA, 1297 bp, Homo sapiens
atccagagtgtgggaaagtgacagtcaaaaccccacctggagcaaataaaaaaacatacaaaacgtactggtgctttcctgtctaagtcgccttttgtgtgttcttttatgaggcccccaccatccacccctctgtgcacaaggcggctcccggcccctggaatgtgatgtttttggtcatctccaaaggctgcagttttatactgggaggctgatgacaccttttattataattattcttatggttctggttataattatgtttgttttaagattttctttaagaaaacaaaaacccaacacccttccctttaggtttcaaaccaaggtgcgggagcagggtgcttctgagttagcggtggctctggtgccctggctcccacccctcgggccaggtgggccactgggcatggtgacagctgggcggccagggagtccccaaggtctgccttctgggcttgtcactcttctcttctacttcccctcctcttgagtcgggtgtgtcagggctggagggaggaccggccgtctctctccttgtgtgtgtgattggagtggtgtgtatttcttttctagtacttggtctgatgatagctgtgctcttacctcgagtcagcagcacctggagccccaagtgctcaacactttgttctacttcctacaaggcaggcggcctggcgtcagtagtaggaagggatggcattgttggctccagggtgagggcccgacgggcaggtgcttgcctgggtagatggggtgtagatatgtggcatatagagatatatattttataatgggaggggggatggcacctcctgggactggtagagctgggaggtgtgtcggcaagcacatggccccaagtccacgtccctagaaagatggggcctacagtgataggcgctctataaatacatagatagggtcatgtttaagaaatattatggggtggggagtgggggaagcaggcttagtgtgctgagcctcggtccccactgcagacctaaaccccacaccaatcagtcaatctcacacgcatacacaggagcatatttctgtactgatgcataatgaatgcactcacacacacacacacacgccagggggctcccagcactcttctcccagggttcaggactttgtggagtcagcccgtgcagctatttacctctgttgccctgattgcaggtagactgtcaatcccagaagttgctaggtgctgaggcaggaaaaggaggaggtttcttttagcaggtgctctcctctagcaggtagtgttctatctcttttgcccctg

SEQ ID NO: 93154 - DNA, 1706 bp, Homo sapiens
ttccctgctcttgatggggaggatgctagggctacgtgttcgttacatgcagactccaggtgtacgttgccgagctaaccctgcaggagaggagaactagagagtgtgtcctggaggtatttctgagggattgttcaaaattactcttatttctgctgggttgtgaaactctaggcagtgatgaccttactacctttaaggtcacagaaaccagcacagtgcctggcacatggttggtgatctgagtgccgggttgtttataaaggacagaagattcggcagaactaagcaggcgtcagaggagttggtgggtgtgagtgcccctgtccctgcacttcgggtggctgctggtcctccgggtcctgctgtgtggttagacggcttccgggcagcctggtctggccagcactcaccctgccctctctgccttttctcccccagggtatttggtttcccagtccactatactgacgtctccaacatgagccgcttggcgaggcagagactgctgggccggtcatggagcgtgccagtcatccgccacctcttcgctccgctgaaggagtattttgcgtgtgtgtaagggacatgggggcaaactgaggtagcgacacaaagttaaacaaacaaacaaaaaacacaaaacataataaaacaccaagaacatgaggatggagagaagtatcagcacccagaagagaaaaaggaatttaaaacaaaaaccacagaggcggaaataccggagggctttgccttgcgaaaagggttggacatcatctcctgatttttcaatgttattcttcagtcctatttaaaaacaaaaccaagctcccttcccttcctcccccttcccttttttttcggtcagaccttttattttctactcttttcagaggggttttctgtttgtttgggttttgtttcttgctgtgactgaaacaagaaggttattgcagcaaaaatcagtaacaaaaaatagtaacaataccttgcagaggaaaggtgggagagaggaaaaaaggaaattctatagaaatctatatattgggttgtttttttttttgttttttgttttttttttttgggtttttttttttactatatatcttttttttgttgtctctagcctgatcagataggagcacaagcaggggacggaaagagagagacactcaggcggcagcattccctcccagccactgagctgtcgtgccagcaccattcctggtcacgcaaaacagaacccagttagcagcagggagacgagaacaccacacaagacatttttctacagtatttcaggtgcctaccacacaggaaaccttgaagaaaatcagtttctagaagccgctgttacctcttgtttacagtttatatatatatgatagatatgagatatatatataaaaggtactgttaactactgtacaacccgacttcataatggtgctttcaaacagcgagatgagtaaaaacatcagcttccacgttgccttctgcgcaaagggtttcaccaaggatggagaaagggagacagcttgcagatggcgcgttctcacggtgggctcttccccttggtttgtaacgaagtgaaggaggagaacttgggagccaggttctccctgccaaaaagggggctagatgaggtggtcgggcccgtggacagctgagagtgggattcatccagactcatgcaataacccttt

SEQ ID NO: 93155 - DNA, 1007 bp, Homo sapiens
ctaccgcctcctgcatgatgcgcggcccaaggagggagatgatcgccccttcttctggctctttgagaatgtggtggccatgggcgttagtgacaagagggacatctcgcgatttctcgaggtatagccagcaaccttggtttggccagctcactaatggcttctaccttggactgctgcttcatcctgtctcatctgcattgtggagctggggactggtgacttctgctttgcaaggggcctgtttgggaagccccaggcttcctggatagaaagggaggaagcagggttagaggcctacctcggaaagaaccagtggtctcactctaagaggtggcattgtgggtgtggacctccggggttgaaggacctgtcactcaatcaggtggggtgccagactcctggggttgggtattctgtatggtgtttgttacacaccaggatctttgagaggacaaaatcagttttccctgagcaagaagggcctatcctcactccctggtaccatgacaggcacctgagaagaaaacaagacttagctcagttttcattccttatcatgtgagtccccgtttaaccctgagccaagtctgagccgcgtgcagagggcttctgctgccagaggcgtgcttggagtggcccttctgggagcttgagcccacctgtgctcctgagtcttggggtgggtcacactgtgagctggtgttctgactgtaagtgtgagcaggcgtctgtttgagttctaatcagggctcatggtaaacacacccatactcgctggagcctgggctctcccagcctctgggtagtctagagcagcactgtgcaatatggtagccaccagccacatgcggctgtttacattaacattaaccattcagctcctcaatcacattggcctcattttaggtacaaaatagccacctgtactagtgggctagtggccactgaattgaacagtgtagaggacaacccaccatcgcagaagttcatttggacaatgctga

SEQ ID NO: 93156 - DNA, 1078 bp, Homo sapiens
cttgctctcatttttctcctctgaaagattctttacctctctcaagccccattttagtccccagatgtggggatgggagcagagcagcggggacaagctcaggcagagtgtagcagggttgccgtgccctggggagcccaggagaaaaacccagggctgcaggaaggcccaaggtggtggtgcagccccctccctggccttgttctcaggctgctctttggttctgtccatggcggtgcacaggcagatgaggtttccccttcccagatctgcagctggggcctgaccctggctaaggtggtggcggggtcatgtcttcagggcttaggctctgtgaggccaggtgtggagcctcccttcgtcctggccgtcctgggacccgtcctggtggtttctgacccttcccgctgctgtctagaactgctttctggagtgtgcgtaccagtacgacgacgacggctaccagtcctactgcaccatctgctgtgggggccgtgaggtgctcatgtgcggaaacaacaactgctgcaggtgaggctgttgtggcctccagtggtctccttagctgggccccaggctcccgccgcccaccgcctcccctcctctcccttccccacagaccctccaccccctagccatgctccagacccggtctttccattccaggtagcacaccttggcctccccggaccagggctgagagtctcctctgctcactgggtctccttccaggtgcttttgcgtggagtgtgtggacctcttggtggggccgggggctgcccaggcagccattaaggaagacccctggaactgctacatgtgcgggcacaagggtacctacgggctgctgcggcggcgagaggactggccctcccggctccagatgttcttcgctaataaccacgaccaggaatttgtgagtgctgggcctggggcgcggtctcgagctcccttggctgagccttggttgtggggcctgagctgtgcgcagggtgtgtgggtctaggagcctggctggagggccagcgctgggtgggagcttgggacaccgctgggcctgcatctgacctgttgtgct

SEQ ID NO: 93157 - DNA, 2132 bp, Homo sapiens
cagcccctgccagttgcaaggcatggggtgggtgcttgcaagtgtaagcctcggcaaacaaggcctggcttgtccccccaggtgtgtgttgagaagctgatgccgctgagctcgttttgcagtgcgttccaccaggccacgtacaacaagcagcccatgtaccgcaaagccatctacgaggtcctgcaggtgagtgtccctgctgggagctcggaggaggagcctagagcactaggaggcctggaagttggagtgcaggtcgggcttgagcagaacggaggcccaggaggcagcgactcctttctctccacctcgctcgcccgtatgcacatcccgctcctcctcagcggttcctccccatcttgcctgtgccaccctcactactcagagtctggccttgagcctgacccatctgccttccagcctgtcctgacaaccccaaccctggcgtgtcaccctccaggtggccagcagccgcgcggggaagctgttcccggtgtgccacgacagcgatgagagtgacactgccaaggccgtggaggtgcagaacaagcccatgattgaatgggccctggggggcttccagccttctggccctaagggcctggagccaccagaaggtaaatgagggcacccagctttctgggacccctgcccgccaggcagatccacaccagggctgggaaagccatgcttagggagggctgccaaggcctccacagaggggcccagtgggaacagccggggtctctcttgccctggggtcaggacttgaatgacctgctctctgttggttggctagaaccgtagagttgggaggtgggaacaagttggagaccaggccgcaccccactgtaaggagggtgggggaaggggctggagtttcctgtcagcctgtaactgaccttggcacctgctttcctcctccagaagagaagaatccctacaaagaagtgtacacggacatgtgggtggaacctgaggcagctgcctacgcaccacctccaccagccaaaaagccccggaagagcacagcggagaagcccaaggtcaaggagattattgatgagcgcacaagaggtagttggcctgcttctggagagggtggcaccaggaggcctgcatccgaggagcaggcgcggcctcctctgacgccagctctcctccccttgcagagcggctggtgtacgaggtgcggcagaagtgccggaacattgagggtaagtttgttgcctgggaactctggcactcctagtgtggcatggggcagagtagcagaggcacttaggaaggtttgaatgacatgggaccaggggccacgtcctgcgtgtcacaccaccttcaccgtgcttcgtgcactgtctgtctttctggtgccatgattctgctctcctgtcaatggcgtgggctggtcttcagggtgtgggactccccagtggccacagaagggcagcccctcttgggtgtgactgaactcacctacaggtcccctttcagcctttcacctttgctcacctctctcatcctggggctgtcgccctcagcctggtgctggtggatctggctcaggaccctcggcctgggaggattggggcaggggtcaggacttgaggattaccccgggaatccctcctgagtaacctggaaccagggctgcttctcatgagcaggtttctgtcctgctgtcactccatccctgtttgtggatggtggcattggtgctctgagatgatggcgttcgagactggggtcacagtgcctcccttttccgtggggcaccctggactcttttctggctgccgctctggcacaccccttttttgtggctggtctggtgctgggctccggcccggggagggagaggcccttcggtggtactcaccccatcccctccctctgctttccagacatctgcatctcctgtgggagcctcaatgttaccctggaacaccccctcttcgttggaggaatgtgccaaaactgcaaggtaggagcacacccacccaggagaggtgccgttgaggccggcccttcggccttctggctgactgtgtccaccgcttctgggcatgtacagggtgacacccggtgtgcgtgtgatgtagacttcagagcttcctctggaagcagag

SEQ ID NO: 93158 - DNA, 1499 bp, Homo sapiens
atatggcgaaaccccatctctactaaaaatacaaaaattagccaggtgtggtggtacatgcctgtaatcccagctactcgggaggctgagacaggcgaatcgcttgaacctgggaggtggaggttgcagtgagccgagattgcgccactgcactccagcctgggtgaaagagtgactctgtctccaaaaaaaaaaataaataaataacatttccgtatcatagggtaggcaaccgatatgctgatgagattgaggaagattagatctgggaggaaggtttcctaaaaggcagaaaagaaggctggaattgtgtgacttgagttcacctctctacttcaagtctttccatttttcacggcaaggcagctggttggctctctccagcccttgaccttctgtcactgttccgggttttgacaaacatggtccccttgagtgtcaggtggccttgctaattcctggagaggtcaaggtgactttttgttttttgtttccccaggctgagaagaaagccaaggtcattgcaggaatgaatgctgtggaagaaaaccaggggcccggggagtctcagaaggtggaggaggccagccctcctgctgtgcagcagcccactgaccccgcatcccccactgtggctaccacgcctgagcccgtggggtccgatgctggggacaagaatgccaccaaagcaggcgatgacgagccagagtacgaggtgagcggcttcttcaccagccgtggccagctctttccgggggccttccactgccagctcctcccgtcctgctctcctctctccatctcccacgggccgctcgctctctccacctgaccccgggcctcttcgtctccccgattttgctctgtcttgcctcattcagatggagctccctcctggctgtcctgccccccagatgcccagggctggggttgccatggggggatcagggtggcagggcctcgtgaccactgtgtaatgatttctgctccttggggctccaggacggccggggctttggcattggggagctggtgtgggggaaactgcggggcttctcctggtggccaggccgcattgtgtcttggtggatgacgggccggagccgagcagctgaaggcacccgctgggtcatgtggttcggagacggcaaattctcagtggtaagttgtggggtttggcagtagcctggggtgggggaaggttcttgatcccagggcctgtggttttggctgggggcagtctggaattggggtgatggaagtgggttctgctcacccctactctgcctgtggtgggtggaagaagctgtagggataattaggttgcacctgtggctcagagagctaggatgctggcccagttttagccttccaggaacctattcactagaattcctttccacctgcactcaggtacttccctactcttggtctggactcctctttgcatcgggtaattatttatcactgtatctggtcccctccagggctgagactga

SEQ ID NO: 93159 - DNA, 1060 bp, Homo sapiens
aaaggactgctccaaagtcagctgctggttgtgaggctccgacaggaatgtagaggctgcaacttcagattagagctcttcttcatactccaggttgcttgctcatcctctttacccttgaggatgggtttgcattcgcagctctaggcccatgggggagctcttttgaaaggcatgtagaaaatggggttttctcccctctaaatctggtatggtggaaatgggtgcaaagccttgaagtcagagggccgtgtttcctagattcagtaaaaggctaatggttctcagagctaagtatcaaggatttcattctcctttgtagggatcctggagcgggttgtgagaaggaatgggcgcgtggatcgtagcctgaaagacgagtgtgatacggtgaaaggatggaggctgtgcaatgggagaataactggggtttggcttattaatttgttggtgggatggcagagagcacgcctggtctatagtgcctgctcagtaaataactgaatgaatacatgtatttatggatctgaagggtgcacatagaaggggtcgaatctggtaacaatacacactgggtgtgatccataagaactccagcatggcgtctgagcatgggaacagacaggctcttggggagcttcctatggtgtttgagcatgtgctggggggagatgggctctttaaacccagagcagtgatttcttcgtcagcagacatcacaaaactagaattgtggcctggaaaccaggaataggaaggattgattgcccaggggaattgtggagaagaagagagggtcccccttgctttttaaatttttggtgacagggtcttgctatgttgcccaggctggtcttgaactcctgggctcaagtgatcctccctgctcagtaactgggattacaggcacatgcctggctgaagatcctagtcttgattaagaagataggagagggtggaaccaatatctgtgtctaaacaatagtgcctgattaatatttggatagaattaacatctccataggtagggggagggatagcattaggagatatacggtat

SEQ ID NO: 93160 - DNA, 2654 bp, Homo sapiens
aggccgtccgaaagctccggcttgctttcgcccggacccccggctccctccgggcaggcggctcgggagcagccccttccctcccctcccggccccccggccccgcgctaatctcttccagagctgggggaggggccaggcggtcttcccgaaggcggggcgctccctgcagcccggcctgggcgggccctgggaacgggcggggaacggcctcgccccccggccccgcgcccctcggaccggagaagaggggctggcccagcgccagcgtcggagcgccggccccctccccgggccgctcgcagccaaccaggccctccagcggggcccacgtgacctggagtcctagacaaagaaaatgttccctccctcccccccgccgcccccctcccctcccagtggccccctccgcccccagccccatcgcccccttcccctcccccaagacgggcagctacttccagagcttcagggccgcggctcacacctgagcgcgactgcagaggggctgcacctggccttatgggtaggttcctggacggagccccggggagaccgggggcggggaggcggcagggccggtgggaggatctccgcagccctccgggtttgaaaagagtgaagtatgcctccccggcccgcagcagccgcggcgtcccggcctggcccgagttctggagatgctgacttagtgctggcccgccgccttcctgcccacgagccccaaggccccactcctcgagggctccagtggcacctggcgccctcgggggacaggaagagcagccggccgggagcccgggcagtggtaactgcaggctggggcacgcggagctggtggcccaggagttgggttggaggcagcttcagctgagctggcagatgggtgcctggcacttccctggtgacctgcgtttctggctgggggaccacgcggtcctcagggccctgccagcttgcggcctcttaagagggacagcttcctctcctgcgagttcctggaagcctccaggcaggccgccagaaagaagtggtggggggcgggagagcacggtgcgaccctgacagggggccggcctgtgacaccagggtagcccaaggccgcatgggcttgggggcggtggcgctcagacctctgacctttggaatgggaagcgctgcagtcgcagggggaggtggaggcgggacaactgcctgaggagatgggactggaccggaggcagtagtcaccggagttcccggtggctttcccagtctggacggactccaggcccaggggcttccgtgagccagcagggagtggggaatagtgtggtgtctcttgaatgccgcctggtttctccgcccccctgggggtgagcagcccgcagcccaaatgcgagagcctcgagttcacccctgtttctcttattgtttgcctggggaggaaggcaggagtgcagagggaaaggggtgctttccctacgccccagacaggcctagtctagtgaggcccctcccccacccagctccggctgccccttcccctttcgtcaggccccctgctgctcacccacccccccccccgcttcttccttcccccaccccactgccccagtcctgatggaggccccttcctcctccgccagcccttaccgggccgggtgcgtgttctgcaccaagtgggctggggatgctgaacagctcgcagcgcggcatctgacaagctgggggaagttgtgggggaagaagaatgttcaggaactcgctgtgaaggggctgagagacaaaggggccgtgggggagtgctgagggtggtgtcaggcacgactcctagacctggggagccagaggaggagcccagcccacctgctgctgccgctgccaggaactgatagcgggtcctttccccttcccgcccactgctacctgcacacctcgtactggctcaggggcctcgccacgcctggaaacggggtctttggatcatccgaggcatcaccctaggtcagccacccatgcctgaagcttgagaaggcgtggtgggcgaggagcagcggcgtggtgtgggctcctctgcgagggtagctgacgcagctgaggatcccagcaagggaggcaccctcccccatagcggggtccacacttcagtgcaccttctcgtaggggaggaggcgatggctaattgatagtaggaaggggagggcagagttctggccaggtgagagtggggctagggagcgatgagcaattactccacattcttccacccccgcagtccgatccgtgagctcattccgccatccatgagctcattttcccagctgtttgggggttgggggcaaaggatgcattatcctgttttagaatttgttgagtcagaggaagaactaggacttaacatcttcagtgtttttcggaatcgccataagaaacagattggtctgtggcttggaggcaaagacttgaagactcagtgaaattaaatgaatctgtaagacaatacattggaccactgagcttcaaacaaaggttcttaacctgggacccttggatctggggggtccattgacaggctttgggagagtcctgggaatcattggtccatatatacaccagatttttaaacaggtcagaaaagctttccagaaatccttccgttcaggtgccttttt

SEQ ID NO: 93161 - DNA, 1008 bp, Homo sapiens
gctgggacttcccagcatacaccattagggaagtgtagggttggctgggagagaacgagggagccaggggctctgggatagaggtggggagagaaggggaggtgagggtatcagcaagagggaagttgggctttcctttccagcagttgggctcccccatcctgcatcttcctccttgatttagaagaattcatctagagtgtcagtgcaaaaagccccttaccactccccctccctaacagataccctaaggctgtgcttgtgcttttcattcctgccattcatctgccaggaagctcatgcagttacagatgccccctagatctggccattcctgtctgaaaaacctgggaggttgtgcccattcctagtttccgctctttcatcttcccttgagccttcctgccttgactgatcccagctgcctctgagttccttcggcacatgtagaaagcatccctaccacataatttaccatctaattgcatgctgtcttgaatgagggctgtggtttcatgtgtggtgggtcttgggtacacaattaggctgtgagtaacagaggcctagagccccatcatgtctactagctcttgcacctctttgcttcccttccccccagcctacctactgcaggtgctaaggactgactgacctgatccggtgtttaggtgagcttcaggcaggctcccaggataaagcacaattcgcttacaggttctaaaaccagactgctcagtgcaggggttaggggggtgcccctgcccgacagcatttgcccaaatgccgctcctctccccagactcagggaggaggttctggggcagggccgaggtttggggtgatggcatagagcccaaccaggcagcacactgcagttgccatggtgacccttttgcttttcttcaggaggatggatttctcttttagcccaaatcatctgcctgggctactctgagaaccagattcctagccccctaccttccacattctaccacagggggcagcttg

SEQ ID NO: 93162 - DNA, 1043 bp, Homo sapiens
cttagacttcaatgtttctcaaagggtgagattgtgtgttacctcaccagaaccacctgggcagtgcattaaaaaggcacactcctggagcagaagctctgggacagtacttgtaggtttgattttctagccagcccccagatgattctggggcttactacagcttgaaaaccaccaagcctcagatgattagaggtaaaccaaatctggcacagatgagattcccacacagatgtattggtagatgcatttattgtatcgcctgcattggcggcgggggtctctctacacattttgtttaaacctgggccaggttaatcacgttgggaatttagtgatgtacccagcaagggtggtttcccaagctctccgggtaattgatagggcttgggttgccagtctgattgtggtaacaagcaaaggaagaagtagggactgtaaggcgggcagacctagggaacagtttccaaacagggttgggggggaaagaccggaaaggacttggtacaggaatttaaatgtttcctttcggatggagatggcaggggtcctgctgttttcagcaatagttaccgcagtgcctgtctgctgggctcctctggagtcttctctttggaccctgaaacttgagagggtctgcatgcctgaatctgaatgcggctcctttaggcccctccctttgacccctggagcctggagaaggggtgggggaagggtggggaaaacaggcctggctgttaaggtttaccaggttccttttggccacaccccccttagtataaacttaacacttctctccagggtccagtttctaaagcaaagtgacagcatcgacacgtccctaaagcaaacttgtcatgaagtccctcacctctcaaatgtgagtccctcctggcttcctttgattttatctgtaatatttagcagatacgtgtgattctattaggctagttaggaaaccaaggcccaaagaagctaggggttatttaaggtcttgtcatcagctgtaaaacaccctgctcagcgccctgctcagtgaaaga

SEQ ID NO: 93163 - DNA, 1343 bp, Homo sapiens
tcacacctgtaaccccagcacttcgggaggccgaggcgggtggatcaccttaggtcaggagtttgagaccagcctggccaacatgttgaaaccccatctgtactacaaatacaaaaattagctgggcatagtggcgggcacctgtaatcccagctacttgggaggctgaggcaggagaatcactggaacccaggaggcagaggttgcagtgagccgagattgtgccactgcactccagcctgggtgacagaacgagactctgtctcaaaaaaacaaaacagactttgtaaaactcatgaacattttctaacatatgcagaagcagagagtagtgtaacgacctcccattgccatcacctggctccagcaattatcaaaagattttctagtaagtcttcaacccttggcatttgcatccccactcccaaccaatgaaggtagcagtgggcattattagaaaaaccaaaatgttgatttaatttaaaagactttagtacacttgacttgcaatgtggagatctccaaacaaaatatattttctgctaataacattattccttattcctatgctgtaattaaagaatccatgaattccagtacaagttttagaactactgatctcattttcagactaggggacttggggctaccgagttttataactggccacaagctcccaatgaagaattgggaacaggactagaatggaattagaatttacgtttcctattccaatgtggggcccaggccctgactgtcacacagtctcctcctgggctatgcctggggttaggaaggggctagatgcaggtatcaagaatggggaaaacacaggtagctttcaagattcccaagtcgccctcagactcaagagtagtagctgttgctatcaggcctgttttctttgtttgtctgtttttgagacggagtttcactcttgttgtcaaggctggagtgcaaaggctggagtgcaatggctcactgcagcctccgcctcctgggttgaggcgattctcctgcctcagcctcccgagtggctgggatcacaggcacctgctgacacacccggctaactttttgtatttttagtagagatgggggtttcaccatgttggtcaggctggtcttgaactcttgacctcaggtgatctgcccgccttggcctcccgaagtgctgggattacaggcatgaatcactgcacccggcctatcaggcctgtttttgttttttggtttttgtttttttgagacggagtttcgcacttgttgcccaagctggagtgcaatggcacaatctcagctcactgcaacctccatctcccaggttcaagcgattctcctgc

SEQ ID NO: 93164 - DNA, 1031 bp, Homo sapiens
gaagagctggctctgtgaggagtggggtcagggagagtgttctaggcagaggaaacagcaccagcaaggccttgacttgtttggcaaactgtatgccagggtgaaatggcaaaggagaaagggccagatgcagccagagaggcaggcggggctccacacatcagttggagacctgcagagtctgcccaaaagctggcttacttctgacaatactgggcagccatagaaggtttctgtgcacaggaaggatgtgatgtggatttgagaggcagcagtggagacagagaagagctttggggtgtattttggagctagaatagctagggcttgctgatggaccggcagggaggggaactggtggactcaaggaggactcacaggggtctggcctgaacacctggtgatggttgtgccatttgctcagatgggaagacccaggggaggatgagtttgggacaggtgggaattgagggctccgtgtgagatgccaggtgcctggagtctgggctgtagggaagtacgggcgacagaggtgggatttgagagcagaaccctggcatttaaatccatgggaacttaagggctcagcaaggggagaaggaggagagacgaagtctcagaacatgtccatgaaaaccccgacatttctgggccacatggagaggaggagtggcaggcagtagggactgagggagaaagcagtacagagcggtgtctggggaagcacggggttttcccagagggtggctgcccagccctagggaaagctgaattcactgagacatgcccatggcgttggacaacctggaaaggagctggtgactttatagagaagcttctgtgggggtcggggaggtgggaacagcccgtggagggcttcagccatgcagagaggtgagaaaatggaggctgaaagactgaggagggaaatcaactcgccacgcacaatttttgagctgtcttgtatgtttgattagtagagaactgggtacaaagagaagtgggtggtgacctagctgcacaggaaaaga

SEQ ID NO: 93165 - DNA, 1060 bp, Homo sapiens
aagactcttattatcctcatttttcagatggggagactgaagcttcagaaaggttaaattacttacccaagattatgcaactggtgagagaccggattagggtcagcacaaaacccctctctactctgagcatagggccccttttcaggccagtgactgccctctgaggtaaacctggctacagcctggtcatggagatttgagttcattttaaagagaacttgggtggcctctggctgagtatagctcagactcgaaggcgagtgttagaagcaccctggcctcccctgcccccaagtcctgagatgcactagggtcatgttcgggcctgtcagggccacactggaaggtcacaaccacctggccctggcggtgaccctgggcctgggccaggagcagttgggctgcataggccgtactgagagagcagctgaccctccctgactcacgacaagtgccgcattccgaggcggcccggccaggctggaaagcgtgtgtgtctgtgtgtgtgtgtgtgtgtgtgtgtgtgtgtgtgtgtgatcactcaagtgggcatgcgcagagtctgtcagggagaaaattccagaaagaagccagttggaaactgcatagggaaaaatcgttctgttttggggagcttggggggctgggaaattaggaagggggtcacattgagaaataacagtagtggtgcagcggagagggagcttgccggggcatcaggacccctgaaaagctcatctcagctccggccttaagtcactccaccccccaggtctcagctttctgcaaaatttaagtgctgaacaagtactcaatgatctctgcaaagcctttcaaccctgattttctaatattctaatgaataaataattatccgtaaaagtaattaaatgccatggagggtcccaagtaggaaacgtttgaggttctaaagcgggctggggagaaaatgcagtcggaagccccaagtccaggtccgagagccagcccgggggtcctccactccccgccctagccgcagggctgacacagtggttcccagcgccaccgcgagccc

SEQ ID NO: 93166 - DNA, 1084 bp, Homo sapiens
actgtccgttgcatattggcagagcctaggccactgcccaccccgcgaggtaacatctcaccaatttcagcttccaggcagtgcagtggccttcagggatcctaccagctctgatccctgccagaatctatacttcctggatagctgggaccacacaggagtgtaccaaggccaaagtttgttttttttttttgtatttttttgagatggagtctcactctattgcccaggctggagtgcagtggcacaatcttggcttactgcaacctccacctcccgggtttaagtgattctcctgtctcagactccggagtagctgcgactacaggcatgcaccaccaagctcgactaatttttttttgtatttttagtagagacaaggtttcactgtgttggcccggctggtctcgaactcctgacctcaagtcatctgcccgcctgggcctcccaaagtgctaggattaccagcatgagccactgtgcccagcctcaaggccaaattttggaggtcaaggagacttaaagagtttttgcccaccacactcagcactaagattctaaggaagatccacctgtctgaaagtcccagacccaggaatcatccttgacagcatctctccctcacctctcatgttcctggcatttgtcccctcccttcatctctgctgccatcctgctcatcagcccctccgatgtcatcctgcttcccagctcctccattccatcccaggatccagatgacatgagcttttcaaattgcaaagctgattacatcacacacactgcccactccccgcctccccaccccccgcctccccgcccccccaccccccaccccggcagccacctttgaaggcctggcctgtctgccccagcactttccacacccttctcctttgctctctgcactctagccttgtgacatctatcagttccctgggtgccctgctccctcccacctgggagccttcttccctgttctcactctctccctctacccctcacccagtggactcccttcgcccttcagctcgcgctggacagcccaggccaactcaggttcttcgttgcagttcccctggac

SEQ ID NO: 93167 - DNA, 1064 bp, Homo sapiens
agaactacggccttaacctgcctcaaaaagctgctcacaggagaggactgaggaaaagccggaggcaaggtgggggttctgcccagaaggaaagcgaagattggcaaactcggagggaccccaggaagtggtgggcaggatttgaagacccaaagtgtggtataccgggtgggggtaggtggacagtgggtgataggaccaagctgtactgaaatctagaatgatactagattcacaaccctcctgtggcccccatctggccccccacgggaggagaagtgatgggtagttactgcggcttttcccattctgaaattgtcacctgcagctgcacctgctggtggtgccttctagaatggtcggcacccccaacccagccctctcccagataatgggcaacatgagtatctcgggggtgtgctgtgtctctttcaagatgactgtcaaaagcaaacaaaagcagattgtttaacagacatggcagcaaagctgaaactccctctagcttgagtgcaggaggttctcacttttagcctcgtctttgccattcacgaatcaattgtgaatattgtctgagcacctgtcaggtgccccactccctgctaagtctagccggatcgagcaaagtctctgccctccagatcgagcaaagtctctgccctccagaggtcaacaagctgtggagacaggggaaaggaggggaggagagtggctgggaggaggacatggagttgggggcagaagaggccaggcctggctggggtgcccctccctcctgggcttccaggctgaggtttctgcccttctcaccagggatggctccttcagtgagcacccagctcttccccagagacttggacagttgcttcaggccatttgactgggacctttttccttcctctggatggttttgtcctgctggtcaccctgagccccagagagccccattgaggggccacacttagcttgagggagttcttgatgggtaggatgaatcaagggttgagcgtggcagaagtcattgccctcccccccaaatcccagaactttggctgaatcatctc

SEQ ID NO: 93168 - DNA, 1099 bp, Homo sapiens
ccctaaactcagccgtgtgggttcagaggacccctcaagcccaccaactctgcaggcaaatgaggctggttcatggggtgggggagagagcagcctcactcctgcctcagtgtggccgtggcctgtggccttggccgtggccgtggcctctccctcctaggccagagccaaccaggcctgcagcctgagctcagacctcagctttctctgggcccaggcaccggtcctgaagtgaggtgacattcatttcactacatcctgtgactgcactcacttcctccacgtggcgggaggtgtgggggtgggggtgaggacagattagaaggaaaacgtagctgggctaggggcctctgggggaggctgggatttcccaggggctggttggggtgggagggaggatgcgggaagctttcaaaggagagagaggctgtgaatgaagagaagggaggaggcggaggcagctggaggtcccagaagtggcacccattggccgcagcgacacggaggggagactgctgccactccaaggctctcagaggctgctggggtaggaggtggccctgaagggagcctgcctcggtttctctgctctctggggtgctggtgaggccagaaggaggagcaacaccccaggcctcacaggccaggtgtggccctgggctgagggcctgacccagggagggtggggtgctccgccccactgatcctcttctctcccccacaggtggagccatcgaagcccccacccacaggctgacagaggcaccgttcaccagagggctcaacaccgggatctatgtttaagttttaactctcgcctccaaagaccacgataattccttccccaaagcccagcagccccccagccccgcgcagccccagcctgcctcccggcgcccagatgcccgccatgccctccagcggccccggggacaccagcagctctgctgcggagcgggaggaggaccgaaaggtgagcagcgggctctgctggggaccctctggcctgggagagggagagccctgtccctatgtgatgacagccggctcctcatactgagtgcatgaccgcatcactcagtgctcacgacagggtgtg

SEQ ID NO: 93169 - DNA, 1017 bp, Homo sapiens
ttgtggtacatacaaaagtaatttgtgtgtacatacatgcatatatacatatatatgtacacacacatatatttgttaaacctacacacagtgtttattttattatttcgataaaactattattcacagctgagccttgtggtgcactgtaatagtttcttttcgtttttttttccctgaagttaataattaccttgtttctcatctgccttatttttttgtacctgttgctaattcctaccacaacttctaatataattttatttttctttaacaatactgttaccttaggacttctttttctttttttctttttaactgacacataataattgtgcatctctatggggtacaatgtgatgtttcaatacatgcatacattgtgtaatgatcaaaacaggatagttggtatatccatcacctccagcatttatcacttctttgtggtgggcctaccacactttccaatagccatcagtattgctttccacacgggcagtcacagcaggtaaaagatgtttcagttccattttttaagttatctatcctctttcactctgggctagttgctttctaggcacattgtagctgatgctctgtgacttccttttgtggtcatctttggaattcccattactttccggttggaatctctgttttctggctttcgtgtcctcctcatgcttggctcactcccctcattagagcacatcttccaggacacacatctgtccatatcaaaatccattcatggctgggcacagtggctcacgcctctaatcccaggactttgggaggccgaggcgggtggatcacctgaggttaggagtttgagaccagcctggccaacatggcaaaatcccatctctactaaaaatgcaaaaattagccgggcatggcggcgggtgcctgtaatcccagctactcgtgaggctgaggcaagagaattgcttgaacccacaaggcagaggttgtggtgagccgagaatgcgccactgcactccagcctgggctaga

SEQ ID NO: 93170 - DNA, 1082 bp, Homo sapiens
cgggcctggaatgatgcagctgggagaggtgggggcacggccagagcagtgggcggaggctgcgttgtagccagccctggtgagaccaggccagagcgtatattttaccacgtgtgcaaatctttggcatcaccggatttttaaaaataatagctttaagatataattcacattccatacagttcacccatataagtgtacagttcgatggttttagtacattcacaatcaactttttaaaattgtcatgaggtgtcataggttttcatagagggagccatgtgtgggcaatccttgctgatagggtggggtgggaggtagagatgccagaggcaggtggacccgctccagggcatctaccaggttattgtgccacagacacaagaggtacaaagggcctggagggaatagggggacgagagaagcccaaggaccaggtacctgctggatgtgaggacccaggggaaaggtgggacctgagttttctccagggtttgggacttaggcagctgaagggaggggaatgttacttccacatagagggaaaaaccagaaaatagagccggctctgaaagaagcatgttctggaagagtaggattttagggactgcaagtcatccagttgggatgaaaataaatagagctggagcccctggcagtaggaggcgtatgttaacttatgcccaggtgtcttagaggaagagcatttagagagaagctgaaggtagaacatgacctttgaggagcacccaccgtgcagaagtgggatcaagactcccggacagccccagagacaaagctgcagaatctgaggctggagacccagaagcaaggagccagatggagtcatggctgggagagaacacacagaaggcagttgctggtgagctccagaagcaggggtctcctttcactccagggcccggctccacaatggcactcaagaaatggctgttgagtgagtgcttgaagcagggagtgattagctggccaggatgttgaattgagctcaagggccatgaggatggaaaaaagccctttggggccgcgggtgactgtatcagtcagggtccattcagaag

SEQ ID NO: 93171 - DNA, 1002 bp, Homo sapiens
caggacccagtgggaccacagctgggaccttgccctgtagctggctcagtgtgccaggggataggggcacagagccctggtgggtctgggagatgagcttgggaaggacttggcctggacatgggctaggctgccctgctttccgagccagacctcaggagatggcagagagggccgcttcctctgtgagggccgtacatgatggcccttgggctgtatggtggccttgtgacatgcagccacacccctggggagacctttgaagcatctctgcattctggaggatctgctgggaagatggcttcgcagcggggctcttgttgatgctgccaagaaggccgggtgggagtcgggctgtctctggctgggggtggggtgggggctgcggtccatccgagtgtggaaatccacgtttctctggtttgtgcagacctgtgcaagcagccatgctgcaggactggccccctggaagtggggcatacatgaactcagggtgtggcgttgtaatcaaatgaaatgtacagcataattaatctggcatacccttaatgatatgcataattgtgctgcatggtaattaggtgtaaatggtaagcagttcacataaatgtttttgtaattggtattaattttgcagaggcaaaccaagtttatgtggtttttctcttcttgctctgttagttttctagtacaggcatttccaagcttttggaggaattctattgcaaatgtttgtttatagggcaatgttttgtgttttctctcagaacaatgttatgaatggttatgaggttcccaagctggtttccaaatgcctctttggcccatacagtaggtgaaatgtgcaacgcgtgtgcctgtgtcggaaggcccgcccagcatcctctggctccaggtgccccagcgtgtgcagcatgaggggggctgtgtgcgtgtgtgaacctgtgcgcctgggtcatctctgcatttgtctaggtatatctctgtgtgtgcatctatgtg

SEQ ID NO: 93172 - DNA, 1050 bp, Homo sapiens
gcgggtgggatttccccagggggaggctgagccaggccaggcttgcagaaggaggctggagcctgagtcataaggcctggaggcggggtgccttgtgcgatggatgagaaaggcaggtgcatttcagtctgtaactggtacgacccctgcagatgtttgaaggaagattttgaggaaggtgctcgcacccttgcattgggaatgctgatgagttagcgcctctacttcacagtgatttccccaaaagatgagctgcaaggcctagaccctggccctccacccaggacctgcggcgagcatcatcaccgtctgagaatctttgggtgggctggaagttgatgtcaagctgtccagcctttccgtcactctccattcagaggcaggtctgcggagagagataggagggacaagctggggacagcatttttggaaagcaaacagaaaagaagcaaaaactgttcctctaaaatagaaaggaggcttatgtgtgttatgtgaaggataatgtggaaggctatttccaaagaatttctcaaaaaatgacgtgagccatgtcagcatcattgaatttagatagaggccaggagcagtgtggcatcgtgctggggccaccaggctggggactggacagatgatggtttcacctcacccctgccacctccttgctgcgtgtcattggaagatcactcaacctttcttaggctcagttttaccatctgtaaaatggacataacttcacaggctggtgttgtttgttttgagcattgcttcttggactaaacctggatattttttccttccctccctcgcttctgcacttcctctggttctttgcctcccaagaagcctgtttcctcctgttccctccaaaactccaagttttgagttcccccttcctgggaaggtccattcgtcatgttctattgactctcttgttcccaattattccctgcaaacctggttcacccagtgtatttgaagagcatctactgagctaaatgggagttattgggggtcagttcctgttttctttttaataaggggagggag

SEQ ID NO: 93173 - DNA, 1112 bp, Homo sapiens
caggtagggccagagcatctaccccaatgccattccccatgctgcggccctcggggaatagcttctacttttgtttgaatattagtatgtgagcagagagcccgtcagaagcccacctggcctgaggctgggtttctgcagggactttgctgttcctgagcagggctttaatggtctactaaaggtgccagatccctttccactttaattttgagggctcattttcaatcatttctctctgacgatttttccctaagaacatgaccaaatctgagatccatgaagtgtcagcctgagatttatgtctgtatccgagcctgcctccacttggctaagtgtgtgggcaagacgaggttcagtgcacatgtgtctgtgcatgatgtgtgtgtacgtggtgtgccgccacctgtggatgggtaggacttgcttccacatgagccagtgtcaaggcagcttgaggccctcgagtcacagggagctgcactctgacacctcccagcggcaggaacttgggcaacaactcgattccctgggcctcagtttcctcacctgtaacatgggagtgtgcgtggattctgcttacaggtggttgtgaggatggagtgagatcatgtgcgttacagccttagaggagcgggagccctcctgttagctgtgtctgttttcatcatttgggtggctcacgtggactagcactgcaggaagtgctctaagaagcctcgtccaccttcctgtgtcttttgcagaatcttggtcagatgaggaaagtgccgattctgattaaaaatcctgggaggtgggaggcttctcagcgacacttagcaatctgttgagttgaacaaatctcgtgtcaacaggttgttttgcttccacctgaaatccctcccgctgtagtttcagctcgttattctcatcctgtcttgagtgcagcagcactttcccaccgtattcgcttccattttccagagatgtgctgagcatttcctgtaagccatgccctgtgctggctttgaggggacacggtgtgtttaggatgcgcccagctaacgaagaactgcagagtgggactggggtcactggagagggagaaataaagtgctcaaaggagagtg

SEQ ID NO: 93174 - DNA, 1023 bp, Homo sapiens
ctgcctgcctttggagagttgggttgtagggagttcctgctgggtttctggggcaaaatggtccccctctgcctccaggttctaccgaggccctgcttgggctgtgacaggtggctctgtcaaggtgggagtctgtgtgtgcacatgtgctggctccaggcgagggaccaggctggcctgtgcagcagctctggcacctgcctgcctccctggtgggtccccctcctctgtgcagctcctccccagataagcagctgcggattcaggccgaccaaacttccctcgttaccccacccaggcaccagtgccttccataggagactgaccctaagaaaggtgaattccttctagactcaaggagtggactggtccacagggctgccctctgagtccttcctggagaagcctaggaaaggacgccagcagccatctgtcagggtgtctgcggacaggattcctctgtggggtgggggttggactagagccggaaggtccattccagctttgacattctatggctctgattctagtggtggaatttcaggcctagcaatggggacagggtggtctgtttttcggcacatggcagtaataggggaaggcttccaaggagaaggagatatgagagagatcagggcgcccagcgagttgggccttgggaaggagaggcagtgtgaggagggtccctgcaagagacgggttggtcacgtccgactctgcagagggtgtaaaaagtacagcctcctttaagcctcggcacgtgtgtatcctgtaggtttgtgtataaatccctgtgtgtggataatttctgaggtttccttttcaagtccaattcacagtaagctcctcagtcccttatggatgttttactatcgctttcacacccacctctgccagtggttctcaaaaagctaggaagacaggacaaacggtaaaatccttgtccagggtcaccggcaggaagaagtggagccaggcctgcactcgggggaagatgccccatgctatacctcttacctgggc

SEQ ID NO: 93175 - DNA, 1217 bp, Homo sapiens
agaaggaactggggtgcaagggaacgtggcagagccatgtgcccccaccgccttgttgcacatggaggaaaccaatgccccacaccagaagctccatgccagaagcagaattggagccgggtcttctgcctcctaatcctgcgctctctgacccacatcaggggtgatgagaaacaccaacagccgagagttaaactaagagtataaaacttgggtgccgcggattcatggatgcccaggcctgcgctctgctggccgggggctgaggcttcctccctttcctcttagtattcatcggcacacctcagtcctccctgcccttctcctgggccacaattctccccaagaaatcaccccattcaaaccttgcattgtgaacccaattctttcttccacggaaacacttcctgacccttaggaatgatggcagaggaccctaggtaccacccttcagcccaacgcttgaaaggcgcccagcatcctagcagcccctccctgcagggcctcctgttcacagtagatgttagcagcttttgtcctgaaccctcaacagtgcccgtgactaacggtgagtgtgtcttgcgcaggcacagaggacgaggagcaagctggcgccgacatggcgaaggcaaggtcttcccccagaggcacattcctctccatctttccaccgcacacctggaccaggcttgcaggctgccagacgtcactccacccgccagggagaggggagccagagccggtgggaagcggggaggggctgcgtggcacagctagtgggcctccccctgcacagccctgcatgtactagcaccttcatcactcccctcagggcatggtctcatctccgcatcaggaattcacctggaggttgaaaagagaaaagaaaaagcaccaagctcttgtgtgtttgtgacctgatgaaacacttcctggcgtctggccagcacgtggggtgctcctgaacgtgggggcacaagtttccttatctttgacctttaaaaaccaacaggtttcttccagcgtgcaaagaaagcgtcaggccttgctcggctctgtagacattcacaccctggccacggtgctaaaaatagtctcacactggttaggcttccgcccgccccgtgtgatgccgccgcctgcagcccgggagggaggggcggagacccagccgcgcgccgcagccgggctgagcctcctcggagagggcgggaggg

SEQ ID NO: 93176 - DNA, 1026 bp, Homo sapiens
gggccatgcctcacatgggaatcagactgggtttcccttgcccagccctccaggccccagggtgctgtctctgcacctgcactcccctgtccacatcaaactgggtttcccttgcccgggcctccaggtcccaaggtgctgtctttgcacctgcactccactgtccacatcagactgggtttccctcgcccgggcctccaggccccagggcactgtctctgcacgtgcactgccctgttcgcatcagactgggtttccctttcccggcactccaggccccagggcactgtctttacacctgcactgccctgtctgcatctcttctgtctttctgtgcctcttgcccttagagctccttgtctgtctttcagtgcatataccagaatgtctgtatgtctatgtgaaatctttttgtgggaatgcctgaatttttacgtatgtgactttctggtgtcatccctaaggccaagagtgttaagagttggggtgagagatggtagagttttttatgtttggctctccacattatataggttctaggatatgtccctgaaactacaacgtagctcatacatgggcatttttataagactaagtgtttttatgggtggacctcctgattctctgccatgagctaggcctgagattttacagacctaggactaactgcagtcacctggacaccagagatctgtaactgtcaaccgtaaagagagagagtatatttgcttctttggggttgaaaccatactgacgtaatataaacagaatttggtcagcaccatcaggcaaacatagtctgctcgataaggaaactgtgagagtcaaatggaacttttgaagaatctagaccaagctgaacttccctgccatattcacccctgcctcacgcctctccctgttcacccctggctggctggctgcatcctggggaatgcttctgctccatcggggtacccttcctcctctgcatctcctcaagagaagtgtaaccaagacacatagaagaagcacagactaacacac

SEQ ID NO: 93177 - DNA, 1062 bp, Homo sapiens
ggagccaaaatctcactttctgtaactgatttatccctgtcctctcaagctacccaggataagctcagtccctcctctgcaggctcgcctttcacgggttggatggcaaatgacaacccttcctagttttctcctctgtagactgctacacccaattccttcaacctttccaaacgtgacatggttttctcttaccagcctgcttgaccataccaggatgtggccattttccaaggctcctattcaaagtacatgcccagggcccagcaccctgctctccatcacaggggatcttgtccctgcagagcacaaggcatctgtgaccctcttgagtgtcccctggaaaagcaccttagacggcattagcacttcccacatagccactttgcactgtgcggtcattttaagtttatcatcagctaaaacatacggaattttttttttttaacagaaccccgtgttaatctaggtattcccccaccatatattgtatggtcactttcttaaacctgaatgcaagacattagatgtctccctggtcatcaccacctgagggcagacaggcatagaacagaggcacgcaaccccacactgcacgcccccagccctggtcaggaaagtgagcgatgtgaccgcactgctccctttgggctgtggtcttacgggctcctattcagcagtgctggggcgtgggccgcacaagtgcagactggtgagctgaagcaccctcagaggcctgcagccaggagctgttagctagagtttcctcccaagcctcagcagttgctttgttcaccctccttctgtacttgtcctgtgccgaagggtcactggcctccttggacttgttttcacagcagaggaaggtgcagaggaagaagaagagaagatgcagaatgggaaagacagaggtaaaggcagctcagcaggactgctcgtttaaatggggagcccgagctcatggatcagccgccccccactttgtttctgcattcctccctgccaccacctttcccagagctttcggacccgaggtccctgtacctacttttcccatctgac

SEQ ID NO: 93178 - DNA, 1092 bp, Homo sapiens
agctgactccatcaccaacaccatgtcatccctggtgaaggagctccattcaggtgaaacccagagctcccagccagcttcctggcctcccctgccttgcccgcgcccttctcacttccttgccagcaccggcagaacctcaccacccagcttgcaccaccccatttcatcacctaactttgccttctaggaacacactggatgtctccacccagagagcctctgtcacacaggatcgcgtaggggcggtttcacattcaggcctatctcaggagtgcatcttgtggagcaagctgaatgtagagaaattcagacctttcagtgcaggcaggccccttcctcacttacctcgtcttccatctgtactttgtccacagccgctctctccctaggcctgaccgaccacctcattctgaaacttccctggaggtctggagcggaatcagccaggaaagctctggaccttcccctgctgcctttctgctctctcctgtttgatttgtttttgaaacctattccctccttttgtccgtgaccaggctctgatttcacctgaagttcatgacctgagtctgtcgcctcttctgctccttgtgttcagctcatctgtgacttctttctcagtctctccatcacctcaccaattcagtgacttcccaaagacctttacctcgtggcatttcaccttacataaaacccaggaaagagagagaaaataaaaggccattcacgtatcctcctatctccaggaatccccatgactctaccagttacgtaggggccagagagtcactaacgatttcacagcggtggggtctccatgttttgtgttaaactaatggtttccctccctaagcgctgtaggtcactcacactgatggctctcttttgtttctttccacctaatgtagtgcttttaaataccttgaagtagcttaacaggattattaaataaaaagataaagcagtttttccacggacgattcaaacacatacacttattcaaacactcttagggaaggcaagccttgggtatttttcagcccttcgtaggagaaagctcacatgtttagggttgtcatgggactggac

SEQ ID NO: 93179 - DNA, 1010 bp, Homo sapiens
tggcttggtatggtggctcacacctgtaatcctagcactttgggaggcgaaggcgagcagattgcatgagctcaggagttaaagaccaacctggacaacgtgttgaaaccccgtatctactaaaaatacaaaaaattagcccagcgtggtggcgcacacctgtagtcccagctactcgggaggctgaagcaggagaatctcttgaacctgggaggcggaggttacagtgagctgagatcgtgccactgcactccacctgggcaacaaagcaagactctgtctccaaaaaagatatatacgtatataaatatatacatacacacacacacacacacacacacacgtatgtcctttccactcacaggttgccggcagcagcggggggaggggtccaaatgagaacatgtacatgaatgtgtttgcaaacaaaatgaaagctgtttgcatgttacttcctgccctgcaagccaagcccttctagagccctggcccagtcacgcagctcactctgtctccaccactctgtgccagcctcttctttccctcccattcttggtcttgttcttaggatgttctctctctctgccctgcacgcccccttccttttttccttttcttcctctctccagtcttggaagcagcctaactccttcctttcaagtatgatcttgtaccactgaactgaggcccactggctggctctggttgatggagaaaaagtactttcttccttcctcaaagaggtcaggtacttgagataacgtattttctgtctttgaatctccaggctcaggccacagggtcaccacatacatcgcccacccatggaggcggccggccaatgcccatgccagtgcgctccacgtctgccggctccacccccacccactgtccgcaggactcgctgagcggagtcgggggagacgtgcaggaggccttcgcacaaggtgagtttctggagcagagttcagcggggagctgaagggatgtgcaaacacggacaagattcc

SEQ ID NO: 93180 - DNA, 1066 bp, Homo sapiens
attgttttgtgtgtatgtgtttcagtttcatttagttctgctctgatcttcgttatttctcttctgctgggtttgggcttggattgttcttgtttctccagttctgtgaggtgtgaccttagattgtctgtgctctttcagactttttgatgtaggcatttaatgctatgaactttcctcttagcatcactttttccgtatcccaaaggttttgatagattctgtcactattattcagttcaaagaatttttaaatttccatcttgatttcattgttgatccaaccatcattcaggagcagattatttaatttccatgtatttgcatggttttgagggttccttttggagttgctttccaattttattctaatgtcgtctgatagagtgcttgatatgattttggttttcttaaatttactgagacttgttttgtggcctatcctatggccattttacatttctatcagcagtatattagggttctaatttctccacatccttgccaacacttgttattacctgtcttttttattatagtcatccttgtgggtgtgcggtgatgtctcattgtagttttgatttgcatttccctaataatgctgagcatctttccatgtacttactggatatttatatatctttggaggaatgtctattcagatcctttgcccattttaaaatattatttgtccttttattattgagttgtaagagttctttatatattttatatatagatcatgtatcatatatagtttgcaaacattttctccctttctgggggttgactttcactttcttgatggtattcttcaaagcacaaaagttttacttttgataatattcaatgtatctagtttttctttcatagcttgggcttttgatgtcatatctaaaaagtcattgcctaggccaggcgcggtggctcacacctgtaatcccagcactttgggaggccgaggcaggtggatcacgaggtcaggagatcgagaccatcctggctaacatggtgaaaccctgtctctacgaaaaatacaaaaaattagccgggagtggtgacgggc

SEQ ID NO: 93181 - DNA, 1445 bp, Homo sapiens
ctcaggaagctgaggcacgagaatcacttgaacccaggaggtggaggttgcagtgagccaagatcacaccactgtgctctagcctgggaaacagcaagatcctgtctaaaaaaaaaaaaaaggtcaggggcgatggctcacgcctgtaatcccagcactttgggaagccaagcgaggcaggtggatcatgaggccaagagattgagactatcctggccaacatggtgaaaccccatctctactaaaaatacaaaaattagctgggcatggtggtgcacgcctgtagtcccagctactcaggaggctgaggcaggagaatcatttgaacccaggaggcagaggttgcagtgagccgagatcgcgccactgcactccagcctggtgacagagagattccgtctcaaaaaagaaaagattcactgacgactgatagatgtattacttcctggagattactacctgctccagcacttttcctgctcttttccacttttcattacagaagaaaaagggccaaaaatgtgatgcacttcattgtcatttaacaagtatttattaagaatttacctgtgctgagcacagggattcagaggatggaatttaagaagtgagatagtgctgtgatggagacacacaagattccgtgggagtatctcagaaagacattgtctcatcctagaggagatagtagtgagactgatgcccaggggaccagcaggagccaatcagacagcatgggggagagtagtgctcccagcagagggagtggcaagagagagcagagtcccatcaacagagtcaagtgtggatgggcccacacttttgcttttttgtcaaaaccaccaaggaacagagttggttgacatcccttgcgtgatgtatatctcatccaagatcggctccggtctccaggcttcctgaacccttagcctcaggcctggcgaaagcccatgcatattggtgagctatcacttgtgcctctgacccacccaggattgcaaactggtattaccctacacaaaccagaattcacggagggccctgacagctctgtcctggcttcattttcatccagtgtgatcctaacgccaagggctggggcataagacccatggagaaataacacctgcccaggagtcgtagcttttctctttcaactgctctgaacaaacacaacttctagaatctggtttttatcttcctcagaaggcatgccctaggtaatgatcccaggaagagggtctgattatttccaggctgatggtgggcaggaggtttcacttccagatactagagctttagacacatgtggctggccaccctgcctacccctcttgtctcatcccccatcatcatttcaatatcaaagtatttgcaaaggttcagtgtcatgctgttatgaagcagcctggatgttcacctgggtcctatgactctgatgtgcg

SEQ ID NO: 93182 - DNA, 1111 bp, Homo sapiens
aagggaagtcctatttttggagcccctactaagtgccaggcatcatgctggggccacccaagcatggccaagaacagtgcagtatcattttcctactaaagacactgcctttctctccgtgcagctggtctcctggccagttctctctgccacagcatgtgcgtccctgcctctgtgctcagatgcagagctggtgaaggatccccgtgtcctcagggcaccttctctggcattttctatacctgttttggctccaacaagagattgtttttatacataagagattttcataatccctgtattctcctttctcacatttccttactgggaatgaaattgactgtcccctggaaaatcacggttagtgtcagtcatcagaagtcttgactgatccatgttccttttagtctcagaaacattgtgctgtgatcccaatatgcttagttttccgccagcagtttgaggcaattagcagacccagggaccagtcctagcctgtctactgattttgtgtgtgaccttgtgacctctcttgacctcagcctcctcaaatgaaaaatgaatgttggactaaaacaagctagtttgctggggtcatgaaccctctgattttgtaatttctgaacacttttcttggaacatgatgcagagctttctcgggttctcagggtctttgctgatttgaaaatgaagagccagcagtctagagagcttatcagattgtaatgtttcactggctctacatttgcaacagaattgtttccaactgttatacaagggacctctgtattgagagaacctgagtcacagggcatttattgtgtttagttattggttagacccatgattggcctgtgctggactcaagcctttgttacagcttgtactacaacaagattccactccttatatcaggaaaccttaaaacactgagtagcacattgcagagcttcccttgcttctccaggcgaattgccctctcctggcagctgaaacccagaggcacaagagtcttttgtgcctatcattggacaacatatccccatccttggagccacctgactagttgctctacctttgcagatttctaggtgtttctcaggtttcctgt

SEQ ID NO: 93183 - DNA, 1011 bp, Homo sapiens
tagctagtattacaggcgcccacactgggctaatttttgtatttttagtagagatggggttttgccatgttgtccacactggtctcggactcctgacctcagttgatccgcccgcattggcctcccaaagtgttgggattacaggcgtgagccatcacgcccggccaaaattttaaaaagaaaagaattgtaaaacacttttaaaatgaagagtttattagatgtgcttcccaaaactggctctgtaaatccattatagagaacttttgatagtgtccaccttcttgcttcattccccttagggatttactgcttactactaccaggatctctttctacccagataacactctgacaccaaatgtgtaggtttcttacaccaaaaaattcagttctctgcagacaccagctgggtgtcctacgatttaattcaattctgacactacctggagttagggcagagcccacaggttaagggctctgtcccacaggagtgcctcacacttcagacaccaatcacaagtagtggttcttcagattacccacacttctgtccaacttggctacaaatcagggctcccacaaccccttcctcaggctcaataatttgctgtaatggttcatgaaactctgagaagcactttactcactattactagtgattttaaaggttattataagggcacaggtgaccatccaaggtgacgatgtacatagggcaagttccagaagggtccaggagcttcagtccccatggagttggggtatataccacctcctggcatatagacatgctcaccaaccggaagctctctgaacccctcagttagggtctttatgggggttccattatgtatgcatgattgattcattcattggccattggtgattaactcaatctttagcccctctcccctccccaaggcctggtggaaggggctgaaactttcaaccctctaataatgccgtggtctttctggcaaccagtccccatcctgaagctatccaaga

SEQ ID NO: 93184 - DNA, 1054 bp, Homo sapiens
caggccagagtacagtggcatgatctcggctcactgcaacctccgcctcccaagttcaagtaattctcctgcctcagcctcctgagtagctgggactacagtcacgcaccaccacacccagctaatttttgtatttttagtagagacagggtttcaccatattggccaggctggtctcgaactcctgacctcatgatccgcctgcctcagcctcccaaagtgctgggattacaggcgtgagccaccacgcccagcctacccatttttttaaaaaacacaaatgtatacatgttttaggttaggaatataaaacattatacttataatttctagctaggagagcaatgggaccatagagtaaaggcgagaggaaaggaaagaagagatcagtagtgaggggaggaggtgagaagagggtacggaggagacagactgtcagggggaaagaagatggcacatggcatcaagagtggccgacaacccagaaatctgatggctttcgtggaaccaaagtgcacttgttttggtttttcctaggtttggttttgcttttttctttattcacacagagtttattgcttccatctctggcgtttctgcatcagtaggtacacttacatgggcaaagctgaacaggatgcaaatcaagcccagccattacatgcttcttccaggaagtgacacgcatcacttcctctccatttcattggccagagcaaatcacatgaccacacttcacctcaagggggctgggaagtctaatcctccagtttatctagaagtcccagagaagcagatgttggaaatacctcccccaagtagacaaatgagtgagactgttggagggagaggaaggagactacttatccttccagctcctgatggtctcatccccttgttatgaagtattcccttcctgatgatccagggtgtcacttcacctgttgttgctgaccactagcatcccctccttctcttcagccctccataccccagagatgcactttgcagctgcagctacttgctgcaaacctacttccaacagtctgcccag

SEQ ID NO: 93185 - DNA, 1027 bp, Homo sapiens
ctgagttgctaatgtccacattcagcaccaggggaaattcgtgcatcacatgacatcgcctcattaaagctgtcagcataactttaccaaacaagttatataacaaccaagaagccactggtacaggataatattcagaatgtgacatgtaaaaattgcaataagtagaatatattttttatgttgttgaacaaaagaaaattgaaagaattaaagcaatccaagggcctagaagcaagtgaattctctgatacctgtgagtaaggctactttaggacagcccatgaatccattcctcgggttgttctgagctccttgagaaatggccccaactgggtttttggagtgaacctggttcaatacagattgccttaggatgttcactgaaagtttcggcttgctctggactcccagaaaacgttcaaagaatcgggttgttacacaggtggtttcattgtaaggatgaaaggaataggtttggggaagtaaatcactgagttgaagcttcagagatgtccttccacgtgaaccaggaaccactcaggatccaggaatcagtttatttgccttgaggtcttctgggttgaagcaaagagaggggaaaggtaggcctgtaggtgaatgacttggtacccagtaggagtcctgttacctgtaccacaggttggtcagcaatcaaaagctggcttaaaatatttctgcagatgtctgctgacgtctgtaggggtgattgttttcaagaatttgcattaaaatacttgagagagaaataaaatatgggatagatgaagcaaatgtgtcaaaaatctttgtaactgtttaacctagtttgagtatatggaaatacattattttctctccttttgcctatgttaaaaatactgttactacatttttaaataagttaaaatagggaaccacaaaaatgatacctatatacttgaacatttctctgcatgtcctcatgtatatttggatgtaggaccaagcccattcactgagtgtaggtcctctggagctccaggtt

SEQ ID NO: 93186 - DNA, 1107 bp, Homo sapiens
caggtaaagagaatgaagtgtatgcccagcggggtatttcagcatatgtaaaggccctgaggctggaggtcgcatgacctgaaagttgacattgtggctagaatgcagagaacaatgctggaatgaagtcagacaggcgggctcatgcaggaccatattaaacaaaccagtacgtccattttggaaatgcgtaccaatttatgttttatcttcatagggaaatagagttacgaaagctgcaaatgggaattcttgctttgtttctcccccaaaaagtaacttatccctttgagtttgtttagatttcaaaatcctttccttgaaaatctaatgtcagctcacgtatctgactctaacattacaactctaaaggttagttagtgaaatggaacagaatagaagaaaaagcctgagaaagaaacagaaaagtgctatttggttagttaaacctcagacatgccctcagtcagtcacaactgctctaggtattttagacattaaaatgtataaataaacttgttgagatgggccgtgctatggttggattttaaaaattaagtatattttatgccgttatatagtcttactgagtttacatagtacttttaaaatgttgtcaataaaagctccaaagccatttgaccttgaaaagatttcagtactcccttactgcaaacaagataagtctctttacacctgatagtttctgatgccaattctttaattcttctggaaatgatcgttgttagaatgaatactgatatgtttgggccctttcatcttgggtttattttgcagagtgtagttatcttataactattgagccactcaggaaggattcttcttgactagagttctgttatacagaaactcctaatcctctaatctcacattgatacaagtgctttgcataaagtgggtgtagtgctcgaaagaatttatttataacctgccagataggtttgtattgatttttttcaaagaccttcttccacattgttaaataatttgagcagccagcagtgcgccctgtagcatgcttcagcgtccgtgccataacttctccctagatggggagcggggctgcagaaacctctgtgggctgac

SEQ ID NO: 93187 - DNA, 1018 bp, Homo sapiens
aagaacccttccctcatccagataccacattgtctgatagcctgtctgaatgggtccttagatttttagagtattggtactcttgttgaaaagtaatgcattaaactaattaactccaagatggggctatagatgtagaatgagcatagtaaaggaagagaaaggggcatgaaaaggggaatatttgatgtcatggaatctttccagctttacagtgtgtttggcctgccctggcaaggccaaacttttgcttagccagtgttaagtatattttttctcagccctctgtttttcatgatgctttagttttctcttggtctttttgaatttgagatcaaggtctaaaaagtcatcagttttaaacatttggttagaaatccctgcctcagactttgtgggtgccctgtgttttctcaggccttgcattcaaaatgaagtgcccctttgatggtggaggagcagcggggatgtgctgccagtgaggaatgacaaatgtggcctcctcatttctctaaatcccctttttttcagaagaccattagtatctatgacccaggcctctagttcttttattaccattcttttatgagcttttcttccatctgttctttctgagaatggaacaagaataagggatgtttaatagacacttgttgcatttttatttccttggcagtgttctggacagtcctagccgactggatgaggaacaccgtcttatagctcgctatgctgcccggctggctgcagaagcaggaaacgtggtaagttaatggaggatcccaggagagtagcagaaattagcattactttaatatgcaaatggaaagggaatagtagacatgaaatttaggagaacaggtacctcggggacactttccacttttccacatgctaagagtagaaggaaacttcctcaccctgataaagaacacctacaaaaacctacagttaagatcacacctacagtttaaattttgaaatatttccccctaatattgggaacaattcagagata

SEQ ID NO: 93188 - DNA, 1093 bp, Homo sapiens
atgaaaaagacttttaaatattatactttataccgttttccatagttttcctgatatgactaaatagcatcactattctggggtatttatgtatctctaaagcttggagaagtagagttttcttttctttttttttttttttgagacagagtctcactgtgtcgtccaggttggagcgcagtggtgccatctcagctcactgcaagctctgcctcccggcttcatgccattctcctgcctcaacctcccgagtagctgggaccacaggcgctcatcaccacacccagctaatttttttgtatatttttagtagagacggggtctcactgtgttagccaggatggtcccgatctcctgacctcgtgatccgccggcctcagcctcccaaagtgctgggattacaggcatgagccactacgcccggctgagaagtagggttttctaagcttctaaatatgtttaataggcttaccctctaggagggaaggaagggcctgataattgtgtgcactgcatcacagagtgtctcctcatccaacagatgatttctttgcacactgtcccagcctcttggtctctaggaacagagttgtttcaccctaggcaagacaaattctttattatcactaaaggcaattgtccagagtgagcaaaagtttccatggtaaaaatagcagcagaatgtttgacaagagactgttacctagtaatttagcccaataagatttatggtaggtttagctaaggccctgaagtctcaccttggctccctgaacaaaaattggtggctggtagccctgggagaacatgatgagtgagtgagtactacatgacttcttgattagtaatctaagaagctgagcttcatacttcttccgagaagtcagaacttttctggctaactaattctgaaaatgaaagtcaattcaaacagaagaataaggatcctttctaatcattgaccttaaaacctctcatcaacacaagcttctagtttctggctagaaaacatagccaattaaagcagtctgtcatccacactcatgtataaatgacaaataggatcaaccttcctaaggagatagaatgtgat

SEQ ID NO: 93189 - DNA, 1132 bp, Homo sapiens
tcggtaaatatattgaaaactcagtacaactaaatatttactatttggccactctgtgtcatgcaattcagttttgtcccccaatcacaattccaactgtgactacattgaacttgatgcatttatagcttatatttgtaggataagtcattatcctattttctgaccttataggtaaacactttagagtttatatctgttttctaaaataaccacatattagggaccctgtcattgaccaagaacacacaaaaagtgctttcatgagccccgaagacagaaggcaaggcaagagcattgttccgaaacagatttctagtgttcatgtctagcagcttctttattttgcacttgaccctgatttaacttgttactcctggcttatttcttaaacttggctttataaactcgtgttgaccccttgtcagactccaaaggggccagtttcttgctgtggttctctttggactcccgtccttgcgctttggccctcggtcgttttgtagacttacatactaccttcaaactcagacccagtggaggagcagctgaaatccatgtggccactgttccaacatggacagttcagacaagcatattgcagcctggaatggtcctgttagattaggagcaccctggagttgatcctgggctggaaggtttgccaggaagcaaagtatgtttgttccagagttgcttttcctgggagcttcatcctgttatgacaacttggaatggtgcagctatcttccttagtttctcaccttcatagcaatgaatccctaggctacctaaaacttacctaaggcatagtagggttcgagagccactttggaatcaaaacagacttatggttgtaagccactttagttcctaacatccaactaaattcaagaatataagacaaagactcccgaactcctctcagatattggcatgtgcacaggtatataactgacctcagaacacttcccagccaccacatggtacacacaagggcagcggttggcaaactacagcttgtgccaactcctgcccttgtgtataccatgtgtatacttgttttgtaaataaagttttattggaacatacttgtttatatattggctatagctgcttcccctaccatggc

SEQ ID NO: 93190 - DNA, 1057 bp, Homo sapiens
cagtgagcaattgagattgggccgctgcactccagcctgagcaacagagtgagtgagactccgtctcgggaaaaaaaaaaaaaaaagatttttcatgcacttcgtgttgggaaagaggtcatttgacaaatttagatagcatcacgactgctacttcatcaagacgagaccccgctgggtagataagcacaggaaaggtgagtagtggtgaacagttcttagagagccccatgtcactccaggtccttcattctgtccataacctggctgtgccagagaacctatagagcctggcatgtcattgggcttgtttgtctctctcacacgccctcatgggacagtactattttttctcattagcttgtaatacagcgaaggcacacactattttctttcccctaaacagagttgattgcatcaagccacaacctatgagacagtgagctgttggaaggatgttgtacttccttgccctttgtggctaaagtcctttgaggagagataatccagatggggagtgtccttacattctataaatccatctcttccacgctagtgccttgacattgtgtatttttttttagtgacagaggagaaaaggaacttaatttgctgagaattatttatggtgtgctgaaggatcacattagagaagagtaacattgcttgccccatggatctgagagtctcagtcaggcatttagagtactgttatactgatataacagcaggcatgtgtttacattgctataacaggacacagctttacatactgtgatccaaaattgttgtcttcaggccgggtgcagtggctcacacctgtaatcctggcactttgggaggccaaggcgggtggatcacctgaggtcaggagttcaagactggcctgtccaaaatggtgaaaccccatctctactaaaaatacaaaaaattagctgggtgtggtggtggatgcctgtaatcccagctacttgggagaccgaggcaggagaattgcctgaacctgggaggcagaggttgcagtgagctgagatcacaccactgcactccagcctgg

SEQ ID NO: 93191 - DNA, 1049 bp, Homo sapiens
atcacagatcaccataaccgatatgatgataataatggagaagtttgaagcattgccagaattaccaaaatgtggcacagagacaccaagtgagcacatgctgttggaaaaaatggcaccagtggccttgctcaactcagggttgccacaaatgttcaatttgtaaaaagcacagtatctgtgaagcatgataaagcaaagcacaataaaacaatgtgtgcctgtattaaaatggctttctgactgggtgacaaggtaaagagtttatcttattatctatagaatatagcagaatgacaaaaatcactatgtttttgtttttttaagaccaaggacaatagagatgttgggggaaactaagaaaaggaataaaacaaaagtgatcaagtcagaaactatccatatgtggactcagtgcatggattctcttcccacctgtgaaatgagaaaaatagagtttgtttgaaaagcaagaattaatgatagtttcaggaaacaactagcatgtatgaagtctttgtgagaatttcaccaagtcaacacaagaatagttttttctccagcgttttttttttttttaagacagaaaagcagagtaattgaaaattaacacataatcttagagaactgcagggtccttagtgttggcaggtgtccagagcctgtctgacagcctgggcagaccgccagttttcagctgcttctgggttgggattagattccatttccactcaagcatttaaggtaagcctttcaccagttctaactcagattagtacaaacagaaagtttgagtatttccaagtccatacttaaataccttagtttgaaaaatagaagctgacagaagcataataactaatagtttgtttcttcttcgcgttggactgaggcttgaggtcctgagcgtgaccaagcgtcacatccgtcatagaccatcggcagagccgactggaaggagcaagtttggggaaaaagatctcaagtgcaatgttgtcgtgttcagattgagatgcttgtgggatgctgggagtgaagacaagctttgt

SEQ ID NO: 93192 - DNA, 1052 bp, Homo sapiens
agaattctttctaacagtcatcactcagaaacaagaaaaccacaaagacattccagcccaccccctagtccttcctggaaaaaaatacattttgtgccatatgtaccgattgctttggattaattcagctatagaaatgctatagaaattttgactatataatacatagtgcttaagacaatgatgtttgttcccattggctaaaactcctacgtcagtgtttatcaaacctgactgatgagaagaatcacctgggtcacttgttgaaaacagatttctgggacaacatcagacccagtgaactggaatttctgaagataggatcttgagaagctacatttttattccagctgattcttatcatcaagcaagtttgggcaatagcctgacaaggaagctaacgagtaaagtgtaggactaccctgaagagagaagttagggacttaataaatcagagtggcctgataacacattacccgcatggagactcaggacctgaccaggtaagagtacttgcctttagccttgctagggcactttccagcagcaagagagtcaggccactgcttctggacagagctgagtggtacagggcaccagagcatggactcttgagccagactctttctgagttggaatctggctctttgcttaccttgaaatgttcttgtcttcattttttttttttttttaaatttggagacactgtctctgtctgtcacccaggctggagtgcagtggcccaatcttagctcactgcaacctccacctcccaggttcaagcgattctcctgcctcagcctcccgactagctggaattacaggcacctgccaccatacctagctaatttttgtatttttttttttcagtagagattgggtttcaccatgttggccaagctggtctcaaactcctgatctcaagtgatccaactgcctcagactcccaaagtgctggattacgggcacgagccaccatacctggccttgttttcaattttttatctctaaaatggggacaaaaataatatctaccttttggggtttatgtg

SEQ ID NO: 93193 - DNA, 1056 bp, Homo sapiens
aatttaaattcttatgtactaaaactacaaagcaaaagccaccaaagttacgtcctgcagtagtgtgcttataatcagttgcatctctggtacccacagctcagtggccctgtggctttgtgagggagaacctcttgctgaatttacttaggcttgaagtatcgatttctacccccctccccaagggttccccccctccatgggtccccacctccccatgggcctccccttccccatgggtcccccccctccccatgggtccgtctgtgcttaccgcgaatgatgattggtccctttgctcttaccatgcttatcgtcgtttcccttgtttcccctagttggtcattattaatataaggtaaatgtcttttctttcagtcctcctcgccctctgactaatatgaatgacaccatggttagccacatgtcctctggagtgcccactcccaccaagaggtacgtatgtcttgtgccttcgacttgggtgttggcctctgctactgatttgcgatgcccctgccagaaatgaggcctgaaaagcaggttgttccacagggcagaaaggactggtttgctttctcttcctttgaccgtcttttagtcttaatttctactttttattttccttttttcccccaccgactcacaaatatagcaactgaagtttggctttcagtggtgcctcaggtggaaacttcatttgtgacaagcagtggtggcagtgtcagagcagattaggcacgtttcagatccgtttttttaaccttaaacaatattttggtagtcgtgagtttcaacagttttgcctttgaattctttgtcaaagatcatttttgctctttgattagactgtgtaaattgaattaatcccttataaaattttctcctgaatcattctgtgtatgatttataaacatttaagttggaaagcctgagtctctctcttttggttatgcaaggagtttgctttaggggccttcaaggaatgagaactgtgtacttctttctcctctttatttaatttgctcttctccaaaaattctctcaggcaggact

SEQ ID NO: 93194 - DNA, 1536 bp, Homo sapiens
gattacaggcatgcaccaccatgcctggttaattttgtatttttagtagagacatggtttcaacatgttggttgggctagtctcaaactcccaacctcaggtgatccacctaccttggccttccaaagagctgggattataggtatgagccaccgtgcctggcctccatcaaaaagttccgactctgatcaggaaattaatgttaacatcttagcaaaaaggatccagaagcatcaaaggagggagttcttgccaagagtacatagagatgtccagaaggaaagttgacattacttgatagtgtgactttatagtaaacatgagggaggaactgcagaaatgaaggaccacagatgaccttggaacaactggaggttcctttctgaaaggcccaatgatattgatgtaatgaaacttgatttgtatttgaaaagatgtttttacactcttgtcacaaagtttttttcttttttgaagttcctttcattcttttgaagggttaattccttactattttctgctttgacacagaaatctcctgcaaagaagctgagccatgcaattagtaaatctttggggtgtgtacccacgagagaacccccgcatcctgtttttcctgagcaaccagagaaaccacttgaccttgcacatatagtgtaagtatacccctggatgtgcatgtggatcacactgaaatgggggccttgtgaaattcctgtggatcaaaaccagggatcacttaacatgaccattcaacttctcaggtttttactttcttttgtgggaacttaagacttcaagctttcttctctgtaaatcaccgttaagtgtccacatggaaatctagctcctgattgctgaagcctgagtaatatggcagcctccagaaacatgagcccattgaagagccattattgttctggttttagctgggctgccttttgtgattttgggttcattccttaaatcagtggcagagatctttttctctatagcagtaatgcccatagggacttaaattaatgtagacaacatggaaatgaaaatcaacttaatttgctgttttttgtattgagggaaaattaggaaacataagactatattctacaaataaaactggtattttgtatgtatttatttatatgtatttagttgaatattcatgctagtaaagcaaagctagaggagaacaataaagttgagaaatagagaaagaacaaagtagggaggaagagaaacagtgaagggtaagattcagcctgtaaactgctttcttcactctgaattaaatgatgatactatgcttccctgatgaataaatttggtagagttttggatcacgaatctttatcaggtgtcagaagtttttctgttggagtgggcattcattttctttcacctccctgatggaaggtagtttgactaaatgagctctagagaatcttgatcttttttccttttttctttcaattatttagatacctgtttatatttattaaaataatccatgcatgtgaattacaaattcattcatcc

SEQ ID NO: 93195 - DNA, 1067 bp, Homo sapiens
cctggtattcattcagtgacatctcagttccaggccctggagagtgccaccatacacagaagcacatgggaagacctcttagtcttccaactctcatactccctctaactccagtctgcctttcttgggatcctggctgcctgtggatctacttccatagtatttgtgtgctctgctttttttggttttagctgactagaacttttgtttacctaaacctgaaatattggtcacactccttcctacttcagttctgccatggaacccattactgcatttgagtgccagagaactgtctgctgtctgtattcgagaagcaacttctaatacaaagatgacttataacacatgaaagttttttcttacagagtaatgttttgaaagcttttacagttatgtctttggtctgagactcttatttatgtcttccactcacaggcagcactatgacagtgttaaactatttgcagttgcctaatacactatattttcttagttttatgtttttgaatctgcgattctagtttcctttatctcctcttctccccatcctcccagctttcccttaccaacctctgtatatcctttaattagctcaggtatcactactttttctgattctccgagtggtttgatgtgtctcttcatggcccgctatatcacactgaatacctcttttaaagcacttttcacactgttataatcatcttcatagaatctgcttatttgtctatatatttcattagattgtaagtcctcagtttattttcagcctttgcatcccaattacctgctacacataatcaacgtttattgaagaactttatgaaagttggcattttccacttgttccagttttaaattactttcgattttggaaatgttcattttatgcccagccaacttgcaaaaaatgtaggagattgataatattcagttttggcaagggtgtacagaggagaactcttgaagattcttggtaggagtatgaatagataaatgcaggtgacagaatttaaatgcatgtaacctttgacctaacagttcctcatataggaattctccca

SEQ ID NO: 93196 - DNA, 1064 bp, Homo sapiens
ctctgagaacttggtctggcagggtaggttgatgggttgtgaaggttgtgcagcccctctggagggtatgccagagcccacctggcccagaaggatatcggataaggaagaaactcctgctccggctccaccgttgtatattgggagcaggaagggacggtgcagatagttttttttttttttttggcgatggagtctcgctttgtcgcccaggctggagtgcagtggcgcgatctcggctaactgcaagctccgcctcctgggttcacgccattctcctgcctcagcctcctgagttgctaggactgcaggtgcccaccaccacgcctggctaattttttgtatttttagtagagacagggtttcaccgtgttagctaggatggtcttgatctcctgacctcgtgatccacctgcctcggcctcccaaagtgctgggattacaggcgtgagccaccgcgcccggcctggtgcagatagtttgcctttttagttcatagattgcatcttaaggagttctgtatgatccttatgaagaagactgtgccatatccagagatcctggatgcaccgactgaattggactgcacgtgttctgcctgggcatgtgtggcatggtgggaggaggcaagggtgctctgtgcataagaaaagggaacaaaaaggtacctgaagattgaagtttcagtagtatccacggtttcctttgcttaaattccactggagagaactagtcatataggcccatctggccacaaggagggtatgttgtatattatatatatatatatcgcttctcagccaaggcagtttgaagcaggtgtgcctctgtctttaccccccactgccgatatacattgaccaaatagaatggtctccaaaggaactggctgaggcagaagtcctcagatggaggaggctgggcacctgcatggatggagcacagcccttctgccaacctgcatgggactctaacatgagcagagtagcaagtggagtcaggaacttagggctggggagattggaggttgaatagggaagtcatataggccttgttgagaaaat

SEQ ID NO: 93197 - DNA, 2880 bp, Homo sapiens
ataaccagtttttattttccctttggttgtcttaaaactcaaccaagaaaaagcaaataaactcacttcaggaattaaagaaaaaaggaaaacaaacttcaacccacatctacacttaactctagttccttcatctctgaaaatctgttaaagatcctttttttttcctagataggtttctgttataattaatgataaaattttgttaaactgaatatcctatcctgggtcttgttgtgttgtgaattccattttttttggtggtggtggttgtgaagagccacttttaaaatccaaaaaaaggaaaaaaacacagtagtttcttttctttttcattgaataaagaaaatttacagattttcaaattgtttctttttgctttcttaaagtacaagtacttcactatgttaattgttaatgttttttccactggttttttttttttgtgtgtgtgtgtgtagagtctaattctttacactgggatagtttttgctgttttacctttcatgatgactgagtttgctggtatatttctactgaaaattcttattccggatgttggggctaagagaattgggaacttcttattccccctggtttgaatttcctcatttggctaacctataactcttttaaaaatgggggttttgtatttgtttagagacaagtgactgatactgctttatgatttgcatgttttcatctactcttgaattttttcattgagttataagatacatacagaaaagtatacaaatcacaaatgaattcttacatttctgtttgaccctcacagcactattgtgaactaagtcttatttgcatatgttgttattcttatttcagcttgttttatgaattcctttatttttgttaaagagacttaaatttttttaaaaataagcattgttatcctgcataattttgaagctagtgtgataaacgtattagttctgaattttgatggatgtatgccttgtgtatggtagatgcatactggtaaggctgagtaaagaggtttccagctaacaaaaagatgtgctatcaatttaatagtaatttctttgagattgtcggctgtgtttatactaacgttttgaacaaatgtttctatatgctcatacgtgagtttaagtgtgtgtttaaccagctagtataagaattttcattgtagatgtgacatatgagttttaagtagtacctggaagtttattttgatttttccaaaaatttctgttgaatgttttatctcagtagctatgcagtataattcattcttttagtctttggtccattttgtttgcctttattacaaagaaaatgccgtatggtaccatatctgagatttatcctgtctgttcattctttcattcaaaatttattttttaaacacctactgtgtgccaggtcctgtaagaggtatttgggatacatctatgaacaaaccggacaaagactcctgccctgtggagcttaagttttaatgagtgtgaaagagactgctggagcttgtcagcattacttttttcctattcttgttggcacatgtctagactacacttttcagccttcgtgtagctaaatggaaccatgtgagtagttcttgccagtggaatgcgaacagaatgataggtgtctttccagaagaagacagttaataaatagcagggtgccttctgtaccctctctgctatcttggtggaaagaacgtcattaggactccgcggagggtgaaaccattaagcgaaaggtaactgggtccttgaatgatggatggagaagaatatccagcaacccacttgactgtgatggaggcatgataagaactttgcgttaagtcactgaaattttagtactagaagtagagttctgttaaaatcttaagatgtgtgttattgtcttagcagtcacgtggcacacttgatgaggaaactgacattggagagggaaagtcagaaacccatgttatatagtggtaaccaatttggtaaatgtgtcatctgtgataatttggaaggcacgcctcacacccaccgggctctaggtcaagtgttggaaaagatcagaatgtgagactgttaatggtaaggtgacataggatagagatgagcttagaaagaattggctagtgtacaagcaataaatgaaagggaacagagaaagctctgactcttggggcagtgaaaggaaaaacagactgcttccagaccctagagagaaagccttaagagttgagaaaggctttaagccacaaagtcctagtagaccttctcagttgaaaaaggtgacccagtcctgtggtaaagatcagatgaagggtatggtctctttttcttggctgattatcagaatcccctttggttctgcctgcagagattctgatttattggtctgaggtacatgaaaccctggatataaacagtttttaaaagttccccaagtgggccgggcatggtggctcactcctgtaatccgagcagtttgggaggccaaggcgggcagatatctgaggtcaggagtttgagaccagcctggccaacatggtaaaaccctgtctctactaaaattacaaaaaattagctgggtgtggtggcgggtgcctgtaatcccagctacttggaggctgaggcaggagaatcgcttgaacctgggaggcggaggttgaggttgcagtgagccgagatcgtgccattgcactccagcctgggcaaaaagagtgaaactccatctcaaaaaaaaaaagttccccaagtgattctatcatacagccaaagccagaagcaactgaccttgttcatatggcctccaggtggcttctgttagttgaaagcaagtggcaaagaactacattagtcttaggaaagaactttttgtgtgtgg

SEQ ID NO: 93198 - DNA, 1064 bp, Homo sapiens
ctttttagtagagatggggtttcactatgctggccaggctgatctcgcagagacttattactttaaaaaggataccaagaagtaggctgggcatggtggctcacacctgtaattccagcactttgggaggccgaagcgggtggatcacttgtgatcaggagttccagccagcctggcaaacatggcaaaaccctgtttctactaaaaatacaaaaattagctgggcgtggttgtgggtgcctgcaatcccagctacttgggaggctgaggcaggagaattgcttgaacctgggaggtggaggctgcaatgagttgagatcgcaccactgcatccagcctgggtgacagagtgagactctgtctcaaaaaaaaaaaaaaaaaaaaaaaagaaaggatactatagtagtcatatcagatcatacaacttcagctataggcttttcctccctaagattccagatgattgtttcttgtttgagcccaactgatttttagccatgacttcctgcttcctctttgatttatcaaactcatatctctaaaaaactgtatatatgctatatcaactgctaaaactataattattttggaatgatttaaagaaaaatagccaagatataatttaacagtgggttccctttttttttcctcattttttttccttcaccattttgccttgaaactattcttggtgtccctcccagtaatttgacataaatctttgttttgctttgagttaaaatggtacttatctcttagtgacttcttaatttttcctgttcttgccatcagtttatctcctcctttaggttgttggagtttgttaaggggaaggccattgtgtttctagtaaccttccctctctccaggctcttgcctttcttcattcctcaaaagagaacgaggaagagccaagagtccacttttatccccccggaagaataaaataaacatccatactgtttttattttctcgctttcctatccatacttcagaataaaattttctcagccttttacccaactatggctttagttcacaagtacctcagattaaggattca

SEQ ID NO: 93199 - DNA, 1024 bp, Homo sapiens
aaatatctctgtaactatactcagaagtttgcataaaaatgttttaacctgaaaactttagaagtgtccctttcaagacagttaactaaatgtcatacatcatttaaatgataaggcaatgggtaaatatttctatgttgcacattataggagtttttgttggaaatgatgaagttggagactgtagcaatgatgatctatagctaaattattttattttctcatgttattttattgatactggatttttcatttttaaggggttactcctctccccttttaaaaatgggaagaggtagtcaagggtggaggaagggaagtgagaatggcatgtagggtaatagttgtcagtctagattagaataacaaagagcaacaaacaaacgcttgtttctaagaaaaaatatgagactgcatacagtgataaaagcagtctcagtgttttatagagggaggcataaatcatggtggtttcgctcagtggatcaggcagctgttaaaaggattagaaatgaagaatttgtacaaaacaagatgtttaatagaacgttaagtgaaaaaacagatgatgtattcatatctattctgttcacaagtatgtagaaatatatatacatctggagggaaatagagaaaaatgagaattgtgggaatgcatgatttgcattttattatagttcatattaatattaagctcttaaaaataaggagaaatgcaaagaatgtgttcaactcaagagcaaaaacaaaataaaaagataggggacaaaaagagccaacctgcctttcataaaattatttattgagtcatggaattttagagatgggaagcctctcctaacaggtctcaaaatttttggtctcaggacttcattatactgtaaaaattattgaggaccccaaagagcttttatttatatgggttaagtctgtcagtatttccatattagaagttaaaattgaggctgggcatggtggctcacgcctgtaatcccatcactctgggaggccgaggcaggtggat

SEQ ID NO: 93200 - DNA, 1063 bp, Homo sapiens
gtcccagctactcaggaggctgaggcaggagaatggtgtgaacccaggaggtggagcttgcagtgagccaagatcacaccactgcactccagcctgggcaacaaagtgagaccccgtctaaaaaaaaaaaaaattgctagttagttcaaacagtaatgttcaaagctaagtgtaatatctttatctttgatttgcttatgtcaatcaggatttgtcatcatttccccaaactagaaacttaaaataatcctaacttttaaacttcctttattccgtaatctagtttgccatcaactgcagttccttgcattgaaatgccttggacttggcctcccctgtccccgcacacactgtcactgctgtaatccaggctcccccacaacctcctttgtgcattgtttacaaggtttcctagctggtgtctccaattccattctttttcttttattcattgtgtgccggtcattaacagtctaattgccttgaaacctagctttctaaaaatttgatctctacttaaaagtttttaagctaaatccagattgcttccctctttcatcgttttcttttataacagaaatactcttcctattcagtctttatttttctttttttctcactataaattggctgttgtagaattttttcttcaataccctgtttcctgcttatcaccggtaagagatacaggctgcatgctcctgtcatagacttttatcctactcttctttagtgccccccagtccctatcctcaacctgttttgaccccatcattccagatcctctctttcaaggcctagcttccaaatgtctttattttagaacttgacaattcctgcttatgtgtttttgtatctattctaaattatattttgaaggagtgtggtgtaatggtatttattttggagtcagataggtgtggttttaaacttgatttggcctctgaactttttgaccttaagcaagttaacctttctaagctgtaatagtagagtaatgcttagtgttagagtttgttgcatgagagcaaaaacccggaataacagtatcgtaaacaaagtt

SEQ ID NO: 93201 - DNA, 1040 bp, Homo sapiens
ataggatgatacattctttttctaaacaaagaaggtatagctctcattattgcaaaagtgttttactctaagttacaatgaaacattgtgaacacaagcttttaaaaattaacacaaaaagcacattcttggcttacctgtgataactttaacaaccaactagtgaagtttttatctgctgtgaaaccagggcatagttgagtgaatgaagccgtggacactttgggtcaggggcctcggtgatattgtcttggttctgctggtggtgtgcagcattaccttaggtgattcatttatgttcttctacatttcgtctttccagttcctaaagaagaattaatgttactatcccttcctcttcacttttcttacagtggtgtattagaagatctgagacaggtgtgattgagcttcttagaataaacacgtggtaacataaaggttgttacagtaaaaacaaagatgaatgtactataaaatcttcatagtaagatgcaccctgttgtttagtatgtaacaagaaaccattgttgtaatatcctgatgtaaggttatgtttctgaattatattcaaaccaggtggcccctcagttttgaatacttaagaactacagctgtggatttaatgggtttaattaataggaaattcacttcaggttcatccatttgacctctgctacatagccaacagaaattacatagaatgtttctaaaacttccagaaaattcaggctagctttagcattcttcacctagcataggtgaagtcttaattctacaaatgaaaaaaaaaaaatccagggtttctaaatgtggtaaaattgtaacagacaaggtcaggaatcaacttactgggttgctcagtatttagtgatacattcgagtccttttgtggtttcagatagcaattatttctaatataatttattttgcagtgagggccgaggcaagttgacggtattttcagttaaagctatgttagcaaccatgtgtggtggaaaaatgctggacaaattgagatgtaagtattttcatattat

SEQ ID NO: 93202 - DNA, 1074 bp, Homo sapiens
atgaggtaagtctcttctcaggaagagttgcaagtgtgacctggctctcttgctagtgtgctggactctgccacactttcctgtctgtctgcatagatagcaacagtttcttttctgcagcaaggaatagatacagttttgtctctttgaaggaggagagatttggagccagaaagatttacacaactgcagtgtgattaattttctgtaatcttttattatgtcctttgatttatcactgccaacaaaataaaagctaaagtcttactcttgcattcaaagctctatgttggtggttctcagctctggatgcatatgaaaatagcacaagggactttttcaacataagaacaggatggggtttaggcatctgaatagtatctttattctcataccttattgaggatttgtatgggtttagaactctaaaaatacacaagaaatgatcctgttgatttctacggaaatacccttttgtgaattcaattgggatttgcgaaataataagaaatatacatgttggtctgccctcagtccctggcacagagcccctgagacccttgtaatttcctgagtgataggggttgtaggagaatcttttgttctaacgtttgatcgctgcccgggttcctgagacagagctcctgatacccccttgtagataggtggtagaatcttttgttctagtatttggactttgaccgcagttctttacactgaactcctaatacctttgtaacttcctgagtgataggagcatcttttgtcctaaggaggccactcttaggatatagactgtttgccaggggagctaatcatgtgattgattagagagttgggactttaagccccactccttaacctccaagaaggaagaggggctgaaggcagatcaccagtggccaaagatataatcagtcacccctaggtaatgaagcctctattaaaaacccaaaaggactaggtttggagagcttccagatagctgagcaggtggaagttcctggagtgtagcacacctcgggaaggcatggaagctgtgtgccccttcccgtaaaacacaccctatgcatc

SEQ ID NO: 93203 - DNA, 1076 bp, Homo sapiens
gcccatgcctgtgtcctgaatggtattgcctaggttttcttctagggtttttatggttttaggtctaacatttaagtctttaatccatcttgaattaatttttgtataaggtgtaaggaagggatccagtttcagcttttgacatatggctaaccagttttcccagtaccatttattaaatagggaatcctttccccatttcttgttttcgtcaggtttgtcaaagatcagatggttgtagatgtgtgctattatttctgagggctctgttagacctggttttgccatttattataaacaaataatcttgggcaaatcacgttacagctgataaattctactctactttaagtcttactcacaaatcttaacttaaaattctctccgaagagtttatcatgccatcctagatcgaagtgatgtttctttctccagtggtttctcaaagcattattttttacattgtgagttgttacccattaatgcttcatgaaatcattttgatgggctgtagccagaattaaaaacatataataggaaaaaaaaggaagaaaaataaaatattagaatgcaacttatgtggtaaggctaaatgtgttctgatatctggatgtatctatgtgtttgtgtgtgtacatgatgatttaaatatatttctgtgatgatttaaatatatttatatatctagatatatgtatgtgtttgtgtgtatatgtgtgtatgtgatgatttaaatatatttctgtgctcgtggtcaaaaagttcgaaaaccactgccttagaacaactctcgtttttataattcctgccataattattcttgggaaacagtagtctacgtgtggagtgttgagagcctgactaggctagtggcattagtaatataaagtaaaagatgcattgttctaaaggttttattttgttacctttcacgtaggattctagagttgatctgaaaaaaattttgagactgtacaggataagtagtagtcagttttcaagtttttccatatgtatgttcagttgttcctttactttttgttgaaagggtcaataaacagaagaaaataaacaat

SEQ ID NO: 93204 - DNA, 1050 bp, Homo sapiens
tacaggctgccacagactggaaggggacctttcaggcaaccggtccgttccctcatttcccaaatgaggacacttatgtgcagaggcacgccgcatggccacagccacggggcatggccacagtcgtattctgtggttggtcaggctgggacaggaatgcagcttttctgactctaggcttgggtctttctcacgatgctgccctactcccctttcctaatcatagttcactcactcacctcataagtgttcctccccctggagttttctccgatgagcagacaggatatcaggagctagactagcagagttcctgcacatactggagatgcacgtgtttcctatccttttctccctctgttgttgttttaattgacccaccgtttttaagaagtcctagctgactggtatactatgacaatacaatagaatggagtcatttcctagcgtttggaaactaaatggtaaatctagttgagcatttctgtttgccttttttcaggtgctcagaattttgatgtcatacgactatcaacttacagaacagcctgcaaattacgatttgtacaaaaacgatgcaaccgtgagtcatttctactcatttctgtgatagctggatagagttctcaatattagaaaagactttaacatcttttagttgtattgtaatgttaattgaattatttttgtcttaagtatttattagtatgtaagctttgtaatggaagaacttgtcattttacttctttgtccttcaaaatgtttaacaaactcagtcatgtaactagttttgaggctgttgtagtattaatgttctttaaatgggagaatggatttctctgtcacttttattaaggaaatgctttatgtaaaattaatacaatttatcagctgctggaggaaaagaaaaacaatgtttttgataaaggtataattggaattgattttcttcattaagcttaatgtaacatgaatcaaccttttctataaataattgctaccatgtggatcataaaataaagtgtgtgtgtgtctgtatatatgtatatg

SEQ ID NO: 93205 - DNA, 1085 bp, Homo sapiens
aagtgttaatgagagtcttagtcatcactaactttttttttttttgagacggagtcttgctctgtcatccaggctggagtgcagtggcacgatctcagctcattgtaacctctacctcctgggttcaagggattctcttgcctcagcctcccaagtagctgggactataggcgcatgtcaccatatctggctatttttttctatttttattagagactgggtttcattgtgttagccaggatggtctccatctcctgacctcgtgatccacccgcctcagcctcccaaggtgctgggattacaggcatgagccaccgcgcctggcccctcactgacttcttaattaaatggacatccaaagaaaaactgacagggagatggtgggaggtggtgaacttacataagaaatttcaatacttggatgctttgacgtagctgagagctggcagggttaagaaattaacaaaaagatggaaaggaaataaaggctatttaacacaaaggcatgtacagagacatcctggagacacttccaaagccttctctccttttcctttagtctttactgtgggagttacgtaacttctgcgtgtagacgtagtccaggtgtgaaacactctattttctatgaatagaacagagtgtaagaactaacaaggatccaaactttttgctgcactctcttcagatcctacttagctccatgatttaaggtctgatccagcaccacagttttgggacctgtgttctttccttattccttgaggcctcatgttgccctggagggggcgatgtgacacaatagaaagaaaatgggctctagcgctttagcatcgtcatggtcaactccgcagattcctagctttgcaacttcaggccaagttacctgaccacttagactttagtttcctctctacttctaacacccctaatcctgaaaatctcctcaagctcagcacggtcttgtcttctcacctacttttaaaaagagcaatagtctccaaagtgggaggtatgtaaaatgatcctctaggcagggtgttacaagaaaatatgagcaatcaagttttaccagtatttgaccc

SEQ ID NO: 93206 - DNA, 1049 bp, Homo sapiens
gacagggtctcattcctgtcacccaggctggagtgcagtggcgtgatcacggttcactgcaggctcgatttcctgggctcaagcaatcgatcctcccacttcagcctccctagtagctgggactacaggtgtgtgtcaccacacctggctagttttttttttgtgtgtgtgtttttagtagagatggggtctctactctctatttttagtagagaggccggtctcaaactcctgggctcaggtgatacacccacctcggcctcccaaagtgctaggattacaggagtgagccactgtacctggcctacatttttaaaaagtataagctactaactttctaactactactatacaactaattttccatgcattaaaaaagaaatgagaaggaaggaccaagcatttgagttcatctacatcaatagaatttgattagcaaaataatagaaaataattttaagctgtaacatatgcaatgtatgacatgagttcacacgatgaagggaagggatgtcataggtgcgattgttcactatcattttccctgcagaattaagaacagaatttgacatgaaggttatgagtacacagatttgcatcttggcaggccagtgtatcacctcttaaacaacagttgtacctagacggaggggtgaggcaaacctgtcccatgtcctttctgtgagatgccatcctgatctcctcacctcaagtaagccagctcccttgtccaggaggaaccacccacccaggcttacacctggtgtgggttgtgggggtgctgacaccacccgcttatttgaaccttgtttctgttctgtttccttttgttcagcttacacctccacagcagacctagtttcctccctgtagtggtgttcccagttaagggaaatggtgtcactgtgccccgcggctcctctttgaattaaagcatcttggtttcaaccatctctgctagaaatggttatgtgcttggctttcctaactagctggactcctggtctgtgctgcctggcagcactcactgacttacaccaacaaccagg

SEQ ID NO: 93207 - DNA, 1183 bp, Homo sapiens
gtaatatatattttaatatctgtaaaaagtgacagtggaagactttgaatttctcatatatggtatgtttgatgtaggacctcactgttaaggcacaaattatttcaaaggaagttactctaaagacactcagattatttcagaaaaatgcaataaggggaatagttttggggtttattttttattttaaaagaaaattgacttatttaccacaagctatttttttcccttctggctgtaaggtttgtacagactggtttggtaaatgctaaacttttgtgtcttttgcctttttaaaggaattgttaacattggaattgagggtatgtacagagaagttggtgtcaacaccatttaaaaagtcatattttttcacaaatatagaaaatcattttacataagaattttaagtatttgcaataaatatatgtatatagattgtatgtattcctatattcttatttttcattttattattaagtaaaagatcattaaaagtgaaaataaaaaccttggagttttttggtgaatcttgaggtttaacatacatctgagagtggcgtgggtaagagtcctcagttactgccttatactcctatgggatggttcccacagattgtatggaagagagtaaaatgaggaacttggtgataaatcagggtagtgtatttcttttggaatttaagtaaaactgattaaattttccttatctgtctgtctccatgttttctcccttaatctgttttgtctcctaaccccctaacattactggaaaagtgaagaaatgcggtgcagcctctttattaatgtgcccattgtttgctcctaaatcaaagaatggtaaggaaatatctcgggggaaaaaataggttttcctttctccacagtggttgacatttactgccaccactttccaggccttaggggagtgtgaagaaatagtttcttgaagatgatagaaatttttttttttccgtttcccagttctctcagaagtgagtttcatagccagtcatgtccttcctgcccgtctaatctggagaggtcaaagagcaaggaaaataatgtgaagagaaacacctgtgccttgattaggttctatttcagcatttgacacttgaattttgaactcctctgggtcaggaagggtagctatggaaatgaggtctgagccagttggtag

SEQ ID NO: 93208 - DNA, 1809 bp, Homo sapiens
tctttgatttaggagcaaacaatgggcacattaataaagaggctgcaccgcatttcttcacttttccagtaatgttagggggttaggagacaaaacagattaagggagaaaacatggagacagacagataaggaaaatttaatcagttttacttaaattccaaaagaaatacactaccctgatttatcaccaagttcctcattttactctcttccatacaatctgtgggaaccatcccataggagtataaggcagtaactgaggactcttacccacgccactctcagatgtatgttaaacctcaagattcaccaaaaaactccaaggtttttattttcacttttaatgatcttttacttaataataaaatgaaaaataagaatataggaatacatacaatctatatacatatatttattgcaaatacttaaaattcttatgtaaaatgattttctatatttgtgaaaaaatatgactttttaaatggtgttgacaccaacttctctgtacataccctcaattccaatgttaacaattcctttaaaaaggcaaaagacacaaaagtttagcatttaccaaaccagtctgtacaaaccttacagccagaagggaaaaaaatagcttgtggtaaataagtcaattttcttttaaaataaaaaataaaccccaaaactattccccttattgcatttttctgaaataatctgagtgtctttagagtaacttcctttgaaataatttgtgccttaacagtgaggtcctacatcaaacataccatatatgagaaattcaaagtcttccactgtcactttttacagatattaaaatatatattacttaaaatatattactggaaagctatttttaaaattgatcttcaatagttgtatcaaatgtaaagcattaaaaaaaataaagtaaccaagaatctacgaagctattgcttcaactttaggaaatgttttacctactgttctctttcaataggtttgtaggtattgaaacatggtaggaaaggcccctgcctatcaccatgtttctcaaagtctctttggactattctataaattgagctgaaaactacccttggccaagttacttacttagcacacagttgtaaggagatggggagacttttccctccttgctatgatgtgaaacctctaggtcaaagagaaaacactctggcactgctcactgatagtgagttctagaaataaatagcagtgtaatgaccagagaagtctccccactcctcacccccattatagcaaatcacttcaccagagagttatttatggctctctaaggtggagaaaggcaataataaacaacagaatgttaactgtcaggtcattaatatgtatgactttgcaccttcacctggaaggcaatgaggtcttcctttggctatttaaatctgagataagctctaaaacatgtacatccgtatgccttcacagcccaataagtatgctctctccaccccaagtttcccatttgccagctcttattcttagaaatgttacatgaaataccacagatagcttcagtatcttgagcataggggttatggaacaagtaggacaaacaactccaggctatttggctttactttctgtttaataggatggagaattctaattctccaaaattatttaagattcagggagacttatttactagacaacttagaatctttataaacaagactgagactatattattgatgctatctcctggggtgacctgcagtggaggacatctgaaggctagataggggtgcacgggaggcgtatgcatcaggca

SEQ ID NO: 93209 - DNA, 1038 bp, Homo sapiens
ctacccttaacttagggatgaacagactataactaggaaaggaggaaaggtatcagggatttttaagtccgtttagagagcaaaccatattgtgcctcttcatcttgacccaggctcttatagataggtcctaaacattgctgttcactagattatcttaacaaataatactcagctaaatatttgcatttaggaatactcctaaaacagatattgccaactagatacactgcctcaatcttgaccagacaagagaacagttaagttctctcagttgggtagtaacttgaataccagtctatttatcagttggtttcaacacagaggtttcaagtggaaagccattcatcttaaaagctgaacagaaaaattaaaaaaaaaaaaaacacattacaatctggccttttagaaaatgaagcagtagaaacaaaacctttattagtatggtattccagcagcacctttaaagcaatctttaccttagttttttgagttgttttacctttcatcccaatctgaaaagttttaataaatgctgagcttattcttagggtatgacctggcattatttccagtgactagtcaggcattatgcctgatgcatacgcctcccgtgcacccctatctagccttcagatgtcctccactgcaggtcaccccaggagatagcatcaataatatagtctcagtcttgtttataaagattctaagttgtctagtaaataagtctccctgaatcttaaataattttggagaattagaattctccatcctattaaacagaaagtaaagccaaatagcctggagttgtttgtcctacttgttccataacccctatgctcaagatactgaagctatctgtggtatttcatgtaacatttctaagaataagagctggcaaatgggaaacttggggtggagagagcatacttattgggctgtgaaggcatacggatgtacatgttttagagcttatctcagatttaaatagccaaaggaagacctcattgccttccaggtgaaggtgcaaagtcatac

SEQ ID NO: 93210 - DNA, 5173 bp, Homo sapiens
atgtgtatgggcatggtgggggctcctatagatcacacattgtcttccttccagtgctgtctagaagcctgtgtaatttgagataatccagcccaagtgtgtgtgtgtgtgtgtgtgtgtgtgtgtgtgtgtgtgtgtgtggaacagagaagagcaagtattttcccctggaccttggtagtaaagctaagaactaaaagacagtagtggtatgggtggctggcttgcttgcttttctcttctttctcaaacataaatacactttttaaaaatgcaaataccatagaaaactttgtatcataataagcacttgtaatagtggcattaggagggagttgagataggaaaagaggtgtggggatttggggtgagagtggaagcagtcgtctttggcaccaatagaaaaagtggatgcaaggaccctagagacaaactagtattgctgtctccaaggtttggcctctcggccatagaccacccatgtttgtcacaggtactgtagtgttcatctgtttttaaaatgtgagggctaatgaagttttgttattcttacaaatgaaaactaagctctgttgtttttttcccctctacttctttcagatcccggtctccagaatctcccccatgccgtttcatccatcgcaggtctctcccagggctcgttttccagtctccatcactagtcctaacagaacaggagccagaactcttgcagacatcaaagcaaaagcccaactggtcaaagcacagagggcagcagctgccgctgccgccgcagctgctgcagccgcctcagttggagggaccattccaggacctggcccagggggtggacaaggtccaggagagggtggtgaagggcagactgctagaggaggcagtccaggctcagacagagtcagtgaaactggaaagggccccacactggaactggcaggaactggaagcaggggaggtacgagagagcttttaccctgtggtccagagactcagccccagtctgagaccaagaccaccccaagccaggcacagcctcatagtgtctctggagcacaactacagcaaacccccccagtgcctccaacacctgccgtcagtggagcatgcacaagtgtcccatcaccagcccacatagagaaattggataatgaaaaactgaaccccaccagagcaacagccacagtggcctctgtcagccatccacaagggcccagtagttgcagacaggagaaagcaccttctccaacaggtcctgctctaatctcaggtgcctcacctgttcattgtgcagctgatggcacagttgagctcaaagcaggtcctagtaagaatatacctaacccttcagcctcatcaaagacagatgctagtgtgccagtggctgtaactccctcccctttaacatctttattgaccacagccactttagaaaagcttcctgtaccccaggtcagtgcaactacagcacctgctggatcagctccaccctcgagcactttgccagcagcttctagccttaaaaccccaggaacttctttaaacatgaatggacccactttaagaccaacctctagtatccctgctaataatcctttagtgactcagctgcttcaaggcaaagatgttcccatggagcaaattctgcctaaacctctcaccaaagttgaaatgaaaacggttccactgactgcaaaagaggaaagggggatgggagcgctcatagctaccaacacaacagaaaatagcaccagagaggaagttaatgagagacagtcccatccagctacgcagcagcagctgggcaaaaccttgcaaagtaagcagctcccccaggttccaaggccccttcagctcttttcagctaaggagctgagggactccagcattgacacacaccaataccacgaaggactaagtaaagcaacccaagatcagatccttcagactctcattcagagggttcggaggcagaatcttctctcagttgtgccgccctcacagttcaacttcgctcactcaggtttccagctggaagacatctccacaagccagaggttcatgctgggttttgctggcagaaggacatccaaacctgcaatggcagggcactacttactgaatatttctacctacggccggggctcagagagctttaggaggacccattctgtaaaccctgaagatcgtttttgtctaagcagccccactgaagccttgaaaatgggatatacagactgtaaaaatgcaacaggagagagtagcagcagcaaagaagatgacactgatgaggaaagtactggtgatgagcaggaatctgtcacagtgaaagaggagccccaggtttcccagagtgctggcaagggtgacacaagttcaggacctcacagcagggaaactctatctaccagtgattgcttagctagcaagaatgtgaaggctgagataccattgaatgagcaaaccactttaagtaaggagaattacctgttcactagaggccaaacatttgatgaaaagaccctagccagagatttaattcaggcagcacagaagcagatggctcatgcagtgagaggtaaggcaatccgtagcagccccgagcttttcagttctactgttcttcctctgcctgcagacagccccacccaccagcccctactccttccacccctgcaaaccccgaagttgtatggaagccccacccagatagggccaagctatagaggcatgatcaatgtctccacctcatctgacatggaccataactctgctgtaccaggtagccaggtatctagcaatgtaggtgatgtcatgtcattttcagtgactgtcactaccatccctgctagccaagctatgaatcccagcagccatggccagaccattcctgttcaggcgttctccgaagagaacagcatagagggcacgccttcgaaatgttactgccgcttgaaagccatgatcatgtgcaaaggctgtggcgctttctgccatgatgattgcatcggcccctccaaactgtgcgtctcctgccttgtcgttcggtaatgagactagaaagagatacactgtaaaggagggggaagggaagggttgaccagttgggttttttgcgtccttttggaatcacagaaataaacaagtaggtttcagttgtcttcagagacaaatgttacttaatcaggaatacaaagtacagattttttacattttagaggaagagcaccttgtatagtaagtctaagtcaagcaagactttgtgaatttgtgacaagtttgcacttacaaaatcatgtaaatatgtcacattttgtttaacattatttttccaagtgtttaggtaataatgtattactttgaattcagattaatgttctactacttgtgactgagaaaagtttaatgccggcatggtaaaaggaagctgtctcccttctgacatttcctaggaagctaggaaaaggaaagtgaaggaatggtctaaagaaatgaccattcacactgattttgtctggacagtctggccgcaggttattcatagattattcagcctttgcaggacttggattcagggttttactcagtccctttaccttaggtggaatcttcttaaattgaaatttttggtaaggaattcatttcacaggtagtgtttcagactctgaaagccctgacttggttcttggcttctactgtactagttactagttactggtactgttgccaagcaatctgcttggaatttgtggatccctgctgttccctaatcccaccccctgccctgagacagtgaatgtagtccgtgaagggagtgcctctctgggaccccctgtgttgttacaggctgtgcagtgcaacaattccagcaaaaataccctatccccgcacttagtcattcgtggtaactaacaattttgaaatactcatataaaatgaacaggaaagtgttagtgattgggtgatttgagctacatcttgttgagcaaggggagtgaaaccacagaaactgttaaattgaacgtaaataactttggaaaacagttttgacactagaacaaggtcgcttctcttttcctcttctctcccaacctgttaacctagtgctagatagtcagctgctgttgcaggtagaaaagctcaccaatgccacatttgttcattctgttcaacctgttttgacctcccaggcatctgaacaggatgacatcatcttattatatcttactttacacatacgtgtatgtacacacacacacacaatacaagacatttttcctgttttagaaaatatagcccttgtttggattactgctgtctgagcactagaaatttctaatggaaagaggcctctgaatggctaagggaacatctggaaaggaaggaaaatgagccctaaaggttttttggttgcttgtttttgtttctttttctttcttgtttccttttttgtttttaaatccttctctagtgactgaagaaattgtgagtacataatatttaggtcatggttaaggaacattaaaataaacctgcagtttaacagaattttgtattaaatgggggagtgtcaatttgcatcatttgcatattgatttcaagtctcctaatttggaatgggtaaagtacaaatgttaatgcaacatagtacagttgtatttgtccttcatattcaggatgtgatatttacaaaatgcagaacagtttaaacttgttaagtcacattccagattaggagaaaatgggcaataatcatctctgttttgcccccattctactacccaccactgcccaccccacccccacatcacacactcttcgatgctttcccacagcccctgctccgctcctctccgtaagaaactcacttcactgtttttcacttttcacttctggcttttttgtggcccaaggccaatataggattaatatctgtgttccagcttcagccagaacgatatgtctgtccatctttctcctttcttccagcacacacagctaagagataagaaggctgcaaggattggggataaggagtatattttcaagccaagaaccagtagaaaacagaaataatggtgctcccaaatattcagtaccttgggcaatccaggaagggtttaaagagacctgttgctgcatagaactctccctgccctaccccttaactccacct

SEQ ID NO: 93211 - DNA, 1049 bp, Homo sapiens
tctattaatgaatgctttcgcaacatgggctatttttcaactggaatatttcttttttcccctttttagttctggcctgagccttgaagattctaagaaattgacagcttctcccagtgatcccaaagtaaagaaaaccccagctgaacaaccaaaatccatgcctgtgtcagaggcctctcttatcagaatagttccagtagtctcccagtcagagtgtaaagaagaagcattgcaaatgtcatcaccaggcagaaaagaagagtgtgaaagccaaggtgaagtgcagccgaacttctccacatcttcagagcccctgctttcctcagctctcaatacacatgagcttagcagcattcttcccatcaagtgcccaaaggatgaggatctcttggagcagaagccagtcacctctgctgaacaggaatctgagaagaaccatctcaccacagcttctaattataacaaaagtgaaagccaagaatctttagttacatcgccaagcaaacccaagagtcctggggttgaaaaaccaatagtgaagcccacagcaggagcgggtccacaggagactaatatgaaagaacctctagcaactcttgttgatcagagcccagaaagcctcaagaggaagtcttccctcacccaagaagaggcccctgtgagctgggagaagaggccacgtgtcactgagaatcgccagcaccagcagccatttcaggtctcaccacagccctttctcaatagaggggacagaatccaggtgcgaaaagtaccacctctcaaggtaagagaatggagagaattagaaaagcagagatcgtctgaaccctatgtttttggtcatacctactaaatttcaagtaaattgtggtagttcttaatgcagaagcagttggatatatttgataaatatgtaactatggtcttacacaaataaaatgatagatgggcatttagaactgcagtcctacatacaggtctttactgatgtttgcataaggaaggtacctgggcatctaatgtaaaccacccctgtgctcactact

SEQ ID NO: 93212 - DNA, 1208 bp, Homo sapiens
gcctggtacaatttgtggaacaattagaaaactgacaactccagaataactccctacctttttactggaatctcgaatgctagggccatagcttttctttatgcagttagaggtaaaaagcctaaaattaacttgccttggagaaactgatctttaaaatagtaaaaatgcccagtggcatagtttattgaaagcacatcactttttcttttagtggaaaataaattggaagttctaggtaagagataaaataaatctgtatggagtgtgatgcttggagcgtgaggaaggtaccacagggaagcccagcgaaaaggctttgtcagcctcagctgagtactgaaagctacctggagtggtgtgcaaacatatttttatttcacctaatggcatttaggtcctcctttacagtgaggaggtttgaggagtttctgttactttcacatggtagtattccaattcctgcgtgagtctttcatgatttataaatagttacatgttgcaaatagcatttttctattgaatatccttttttgggtacattgcaggtgagtttacacctgagatgcaggtgagaattcgacaagagattgagaaggagaaaaaagtggagccatggaaagaacaattctttgaaagctactatgggcagaggtaatattaggacaggttctataaaccaaatgttaattcctacatataagtcatgtagtgctttatctcattaccttctcagaaaatctaggccccagtttccttctgttttgttttattttgtttttttttttgtctcactgattcttctttaggaagaagtttttttcttattatgaatcacgggttcacagaattagattactcatcatactttacccttaaaactgtcattgtaggtgaaatggcttctttaaaaacaaattttttagctgggcgcagtggctcacactataaccccagcactttgggaggccgaggcgaactcctgaggtcaggagttcgagaccagcctgaccaacatggtgaaaccccgtctctacttaaaaaaatacaaaattagttgggcgtggtggtgcatgcctgtgatcccagctacttgggaggctgaggcaggagaatcgcttgaacctgtgaggcagaggttgtggtgagccaagatggtgccattgcactccagcctgggcaaaaagagcaaaattccatctcaaaaa

SEQ ID NO: 93213 - DNA, 1111 bp, Homo sapiens
atatatatataaatttttatttacattttaatcctttgtgtactcagttttttgaaagattgtaaccttctggttgtggacagatttcctgaaactgctaggctattaaatcataatatttttagccaatgtaaattaaaatcagtgaaaaaaaaagtcatgagaagaggcaaaggaagtcagtatgatttgtagatttgggttttctttcttagacattcttcatatcatttatcataaactttctcagttttttgggggaaataatctagtctcaaacataaaatgcagttttagtatggtagaagacccatttttacagactttattctatttatgcagagaaggtagatacattgtattcttttatcctctataaatgaacaaaacttgttttgttagtcttagaagaaaattctaagatcttaagtgttaccttcttcgtagtgtgatatttaaatgcttacaattgtggattttttatactgcacagaaagctacagtttatatagaaacaggacttgtgagggaggcccaaacgattcttctctgtttttgtaggacaaatgaaaagaactaaatgtgctgacattgacgttgagacaccggactccattctggttaatacaaatctgcgagcactgatcaacaagcacacattttcagtccttcctggagattgccagcaacgactgcttttactactcccagaggtagatcgacaggtgcgtcattgaactccttaagattttaaaaatagctgtttatgtatacttgtaaagtggtattaatggtactaagtgagaagtaagaatatttttacataagtttcttaataggcaggtttttttaaggcttaggaaaaaaaaattctcctaccagaatttcaagatgacagaattattttgactgtattaggatgtaagcatccatagaatgaaggtgaggaggaagccagacatggtggctcacacctgtaatcccagcactttgggcagccaaggagggcagatcacctgaggtcaggagttcaagaccagcctggccaacatggcaaaaccctgtctctactaaaaatacaaaaattagccaggcgtggtggtgggcgcct

SEQ ID NO: 93214 - DNA, 1856 bp, Homo sapiens
atgactgactttaaagatggtctaatctaataaatatttggaaacctctaatcagcaaccttaaaatctgatgtttccaagaggctcaaactaaactcttagccagttttctgtaaaaataacagggtttcctaagaatacatacaacctttgagtttcttttggacatgtctgtaaggcctttggatcttttgttgtggttgcttgtttgtttctactctaaactttctagacacagactctgtattgtattacataattcagtttgataccataagctgattctatgggcctgccagactcaatctgaatcttacagaactgcatttttatgagaaaggaaatttaccactagaagcaaatagtatgctgggaggaaaaacagggttttattttactctttgactttaattttcaaactcaaaacacattagggagggtcacattgcctcatacataacttcatttagtgaatgttgaatgattgattaattgattctgtctataatctcagtgctaccagtctttatacgtatttttttctcctagcaacatgggaaggaaagcaatctgatggacagacaggcagccctcaaaactcaaactccagcttttcttcctcagttaaagtggaaaatactttactaggcttggggaagaagtcattccagagatctgagagactccataccagtaagtttgcttacaaagacttcagttttcattgccatgatttatcagctacatgtttgaaattcatcagctacctggcttaggtacttataacttagatttgagttacatagcaaagattagacataagttttttttgttgctaacataattactgttaagaaatgaaaagtaacaggaacggaattgatttagtatgtctttctcctgctatcccctgtttacctttgagctcttgactatgttcatgttcttcctgtcttcctcttaacaaactttatttcagagaaagatctattatcagtcattttgtggtttatttccctttctgccaataggttgctttgtccagcattattcatgttttatttctgtgtaaagaaagatagaagggcgtatgattaaatatatatgacagactgaaatttcttctctctattccttttgaaatcccactgaaatgataatatagaaatacaaaagatcaaatccatacaggtgaagaaaacaaggagaccacagctgggcaagagatgtcagcaaattttgagagatgaaaactggatagaatttttcactgagctgaagagcagttgccagggataaagcagccacataaggttgcagaacaccgggaaggctcaagaattggagatacaatgtattacagaagagaaggggggaattttgtttgaaagttagtaagaagcagtttgatgccttaccccagcaggagacaggaggtttattttgaagtgaaatttcaaccagagaaactccacattcagggatatcaaacatagctgggggcagatgaggaggcactgtactgaaatctggaaaatcaagtaaaatgtaaatactgtaaatactgaatagggattctcctccttggcttccaaaatgctactaacaaggcatatttctaacaccactacttccttcttcctcccatcgtgttcgagcttgagattggtggattggtacctaaagacattgaatagtcttagaaaaaagtctgcaggcaaatgtataggttcccagataagcagagatcatcttgataatgtttcagtaaagttgaagaaatttcttagaaaaatctgtcaaagttaaaaagaggttcagtaggagagaaaaagtaagaaacttggaacaccaat

SEQ ID NO: 93215 - DNA, 1024 bp, Homo sapiens
ctacataggtttgatgcagatagggctctttttgttataaggcttagaatttcatttctagaaatgattgaaaacgtactgtctctgctttacaagactgggaagtttttggcttacctagtgatttttttaagttccaaaaaatgctaatgactttttcacatttatataaaggaatgatactggcaaaaactatccaaactctaagaatcatttaggccttgtgtttagttggcttaatttaaattgataagaacagatactacacttgatcttagccaaaaggccaagaagcgagagttagcttaatttaggtttttgtttgctttgatagatttcaaagaaattgaacgatcagcatgcttcttgccatttaaaaaagaagtaatttatattattactaaaaaactgattggttttgtttcttatagtctgttttatctttataggcgctaaagcagcaacagcagaagaagcagcagcagcaatgcaggccaagcatatccatctcctccaaccagcatctctcactaaagactgtcaaagcagccagtgactctgtacctgccaaacctggtaggcagtttgggcagtttttcaatggaagtttctttttcctagtatttttatgttggttttcctgatttgtttatgacatcatttatttttaaattatatttacttacacaatccttgtactgccaaaacatcaatataaatccaggataaatgggaaaagttgtgtgcaaaataatcatgcagttattaaaaaataactcagagcccaggagttcaagaccagcctgggcaaaatagtgagaccctgtctcaacaacaacacagaaaattagccgggtgtggtggggcacacctgtagccccagctactcgggaagctgaggtgggaggattggttgagctcgggaagtcaagactgccattagccctgatctcaccactgcactgcagcctgaatgacagagcgagacactgtttccaaaaaaaaatgttagcactgggatttg

SEQ ID NO: 93216 - DNA, 1129 bp, Homo sapiens
tttttgagaccaagtttcgctcttgttgcccaggctggagtgcggtggcatgatctcctcaccacaacttccgcctcccaggttcaagcgattctcttccctcagcctcctgagtagctgggattacaggcatacaccaccacacctggctaattttgtatttttagtagagatagggtttctccatgttggtcaggctgttcttgaactccgacctcaggtcatccacccaccttggcctcccaaagtgctgggattggaggcatgagccaccgcacacggtcttgtgtgtacttttatgacatcttaaagcttattgcccttaccatgggatatcattttgctatttgggccttttcagtccaactactatgaataggggaagactttagtaaacattcattcttcaagagtcatcactagcagtagtgattataatttttttttaataagggtactgaatcagcaatttctgtatttatcgtaaacactactcacatattgtttaattttatagaacataaatatctacttgctgtttaagaggtatagattcttaaagaacccttgttcgcataagacccactcagatctggctaaactctgccaggcaatataaaacagctagtgatgaagtagagagtggttacatcttatgcaaattcaaattgcttccattagagacatcttaaaatgccctctcacgttggtaagcctgtaactgttgatttaaaggatgaaggaatgtaaggattaaaactgtggtagagttttgaggtcgaatggccttaatgtctttattttaaactgccaacccaaggcccttccactgtatcgtgttgtcattagatttactgtgagaccatagatactgtcttaaaggccctagaatctttcctaagttttatctgatttgatgagtcattcttcagtcaattctattgaaaaagtaataaatgaaaagtaatgaatactaacactcatcccttccctatcctatcatccttcattagaactttctgaggaaaaaaactgaaaagggaggctgtttgcagtaaaactccaaaaagtacatcgttcccaaaagtgtttggtcatagttcttactccaggtagcagcatatgattg

SEQ ID NO: 93217 - DNA, 2515 bp, Homo sapiens
tttttattttaattttttcgcttcttttcacaagtgttgattctcctcattttaagcttttccttttaagtttggaattgtagatctaagattaggagccaagccaggtcatcaagtaagggaagcaattagcaagattcatgttttctggatgggattgggacagggaaatcaatattaaagaaagtcttgtaaaatgggaatatacttggggcccttgcttttcaagagccacatatgctgctctttgaatagtggctgttgtatctgtgtttcttttgcttataactaacggttattaatggctgtctctaagaatttgaggtgaatgtgttaagatgtaggaagatccaagaattaaccatagaaccctattgtcagtagccgaataggtagatatgaataacataaccttgctccacactctgcataataatagaagacatgaacaataaggtaatatcaaattgaatattgggtccaattgtttttgagctgcttttcatttattccttttctagaaattattataatattgattatttgtcctcagtttacagtaagatgagatgctctataaagctcttttctggttgcaggtagtctataataaagcctagaggaaaatgggcggtgtgtggtatctagaaggtgaggtgagaggtgcgcatgatgtcacatgtgattcatgtttaagcagctctgatattctcaagaaatgaatgccaagctaccaattatgaagaatgatttagtctctcatagaatatgcatctgtctttcatgggtcatacatgtgatatagataccatataatttgtaggtatatattatatatttgtggatgtttttgtagtccagtgcaaattaaagtgacagacatgtagccagcagtgagtatacagcaaagcagttctaaatcttagttatcaataaaggtaaagcaagctaattgtgcctattactttttcttatttcgggcctttactctcaatctgacatcactttatttcaaatgcattgtaagacaggaagaacactgagatagtatcaaaacccacttccttttatgtacaaaaataaagagctctgacagcaaaactgatacttctagttgaaaatcgatagaaactttcttgatatatgtatacctttcagccaaataggaacagagaatagaactttgaaattcagtccaatattaaaactagtttattgatttctgtgtaaagtggaagacttaaaagtttgtagttttggttgctagttttcagacaggatacacaatgttcagagaagagttttatggaattccaaataaaggtaaggtggaataataacttcagaaaaatgaatacgaaaatcactatttatattgcttttttatgatcatagctaagtgaagtctctgccttttccccaaaataaaatattgcattatgaagcaactgtaggactattatttttatcttctgatagaaaaagttttgtttagattttggtctgcttttaaagtgtcttaagaatgaaattaattacataaagtataccttttctctgtaaggaatcactgtttcctctagtgtgaactaatgttaattttactgcttgttcagaactactttaaatcaggaatttgatatatattgtgtctggagttatttaaaataccataaacctatctaccttctaacatttacatgtgtgttaagttactgaatgggtatgattatgtctccttttaaaagtatactggaggcaaaactttttttggcaagttaacttagatggagagagacctttaggagattttctcttttcctctgaggttattattggtggctgaattggaggttttagcactgtgttgtgttaaagatggctacactgttagggctttggatagttagactacccagaagcaaggaaagtgttgaggtgtggcctttcccatttaggccaggggactctgaatataatcaggaaacaccgcctgcctagtttggagtagattgcacttggtgttggaggaagggacttagaactaaaaaggatccattacctctaaagaaagacctgttagaataaaaactctccctcaagagaaacataactgtttctaaagatcaaaatcatttcggaaacttcgattattatcagtgcttcaacaatcaattcttcaactatatatagttcttaagtttcaattttgttaccaatccttcagtgtctgatctctccctaatacttcataggggcccattaaatgtctttgggagaaaataaaaatttaagtcagagattatttacttaagcttttaactcaaatgcatctactattaatagtctgtatctttttgaccttgttcgacattataatcatccattgaaatggaaaattctcaatgctgtaataatgtatgtatgtaccttttgacttaaactcagtgagcagtatgtaaatatccagcaacgagaagctactgcagtgaactatgtaaaactgactgataag

SEQ ID NO: 93218 - DNA, 1005 bp, Homo sapiens
acctgtatctggatttcttttctttttgacatgtggagttctagttaggaatttaattttgattttattttaactttaaatagccacatgaggatagtggctaccacaccagacaacattctaggttttacctggatttgttcttaaggtcttaagtcatccatagccttttaggatgcttttattttacttgcctaaactttgagcacttaatgctctaacaaccctccttaggaaaagaatgcttttcatttctactagcaaacactgaatttagtctgctggtctttgctcttattccgtttggtgtctacttcataactcacctgaaaagctttcgttagggaataatgtctgttgctgcagcttccctggaatggattttccagttaaggatatgaattattgcctaattactgctaattattctgtagcttcttgtcagagtctattcaaagagggcaaatcttgtttatcccaatatttataatttagctgtacatggcaaggcaaattttaaaccaactcttgatgattcctttacaaggactgacatgttccagagcaaaacagacattcaagattttttctagcttgaatatccttttagatttgagtgatgataggtgagttgtctttggagctagaagctcaggttatgttggaatactagactcattcatttaagtcccttcagaatggttactatgcctatattagaaaaatagttataattcactaccatccctctgttaatgtttttgctactcctggagagaattgagataattgatggcctcatctgttctctgctatagctactacatacataatttgagcgaactttgtaatcagagaatcttagctttaagttgataaccacttagagagctacccagacctcaattgttaggaataaatggaatgaaagcaagacaaagagggtgcttctgactagttaattgttgatgtgtggttttaaattaatccctgtcagtagtgaaa

SEQ ID NO: 93219 - DNA, 1054 bp, Homo sapiens
caccctctgaaaggccccagtgtgtgttgttcccctctgtgtgtcatgtattctcatcatttagctcccacttataagtgagaacatgcggtatttggttttctgttctggtattcatttgcaataggtcatttctttccattgtctgggtgtgccacagtttgtttatacattcacctactgaaggacatcttggttgcttccaagttttggcaattatgaataaagctgctttaaacatctatgtgcagattttgtatgtgcataagttttcagcacctttgggtaaatgctaaggagtgtgattgctggatcatatgattaagagtatgtttggttttatagaaacttccagtctaccaaagtgactgtatcattttgcattttgcatttgcaccagcagtggatgagagttcctgttgcttcatgtcctcgtcagcatttagtgtggttattgttgtggattttggcctgataggtgtgtagtagtatctcgttgttttaatttgcatttccctaatgacatatgttgtggagcaccttttcatttacttgtttgccatctacatatcttctttcgtgagatgtctcatcagttctttgacttattttaaaatcaggttgtgtgttttcttattgttgagctttaagagttctttgtatattttgagtaacaatcctttatcatatgtcttttgcaaatattttctgtgtcttgtctttttttgttttgagacatagtctcacactgttgcccaggctggagtacagtggagcgatctcggctcactgcaacctccgccttctgggttcaaaggattctcctgccttggcctcccgagtagctgggattacaggcgcccgccaccacacccaactaatttttgtatttttagtagaggtggggtttcaccatgttggccaggctggtcttgaactcctgacctcgtgatccacccgccttggcctcccaaagtgctgggattacaggtgtgagccactgcgcccatccagcccgccgcacctgtcttgtctttgtattttcttggcagtt

SEQ ID NO: 93220 - DNA, 8056 bp, Homo sapiens
cttcaagtattatagcactattttaaaatatttggttggtgcaaaattaactgtggtataattattaattatattttatatttttctatagattattatatacctgaaattctagtaaagatgataaatatatattagaattaataaacatttaaccaagttgctacatataaatattcagaagcctacttaataactttttaagtgatctcatgataggtttgaatacaagagacaatggcaatgtgttagtttcacaattaagattcagtctggtgcagcagtatacaatggaattattactgtttatttgaatctgtgtgtgtttgtgttcttttttctcattttacctctggacatttgtaaagcttgtgctaaatagaatgtttacaaaatatgtttgtaatacttctgtatttttcttgacttaaatgttagatactggatcagcattaaggaattactattttgtagatacatggaaatgatttttacatccattttctccatggcagcccctttctatattggtagacttcttatagtttataagatatgtttaagtcaaaggagtattgactaattaattttattttgagtgttacataggatattcagagacagaaattaattgttgtgttccttatcacatctcttctttgttttgcagtgggacttctcctcttgcatgcctgaatgcaatgcttcacacaaactccagaggtgaagagggcatcttctataaggttccaggtagaatgggagtatatactttgaaggtaaatattttgttggggagtcatttagaaagaaaaaacaggaagtgaccacatataaatatttgactcgtagggacagaattctgttcttgaagagcttattttcaggaagaggtaatattttgaaacctctacccaatacattttttaaaaactaatctataactaactataggtagatcagagaagtaactttattttttattcttgatgataatcttatctagaaagaacgaaattaaaatgacttatggccaggcgtggtggctcacgcctgtaatcccaacattttaggaggccgaggtgggcaaattgcctgagctcaggagtttgcgaccagcctgggcaacacagtgaaaccccacctctactaaaatgcaaaaaattagccagggcgtagcggtgtgtgcctgtagtcccagccactcaggaggctaaggcaagagaattgcttgaacccgggaggcggaggttgcagtgagccaaaatcacgccaccgcactccagcctgggcgacagagtgagactttgtctcaaaaaataaaataaaataaaataaaataaaaaataaataaaatgacttctagtgttttaaggagccccacaacatttgtataataattgtttctttggagcattctgcttagatgctttacattacattctcatttcattctctctcacaattcacagttggggtgaataccatttaataattttttattgctgtttgttttgttagataagtacaaaaagacaggaaaaagaaatatgattacaattaggaaaatgtatatttttctatagactattatatacctgaaattctagtaaaaatgataaatattccatttttatgatggagagccccacaacatttgtataataattgtttaagaagcctcacaacatttgtataataattgtttctttggagcattctgcctagatgctttacattacattctcattttattctctaccacaattcacagttgtggttattattccgtttttataatggagaaagtcaaagttcagaagattggattttcttgcccagtgttgcccatatagtatcagaaccggtataggaacccagatctgactgaattcccaagcccatattctttctaacataacaagcttgctaatttctttcttttctttctttctttcttttgacagtctcgctctgttgcccaggctggagtgcagtggcacagtcttggttcgctacaacctccgcttcctgggttcaagcgattctcctgtctcagcctctcaagaagctgggattacagatgcccaccaccacgcccagctaatttttgtatttttagtagagatggggtttcaccatattggccaggctggtctcaaactcctgacctcaggtaatccaccctcctcggcctcccaaagtgctgggattacaggcgtgagccaccgtgcccggccttcaagcttgccaatttcaaattcctgcactgagaagagacctttacttatcaataacttttcacttacgaacaggaaaaccaactcaaatgagtttgagtaagacaatttattagcttatgtaactgaaaattctaaggaaacccaggctggatccaggaactcagttgacatcatcagggtttggtgtctccacttccttttgacttcgctctcagtcagagtttctcctcatcatatataacttcagccccaacctgcactctgcaagctgtaaatctgaagagagataagaactaaagcaggagcctctgactttattctgatttggcttaattggtttggcttcgcccacatgagtatacctgaattatcacacttgtcaaatgattggccagttgtagatgtggttgagattaagcttgctcaagccaggtgaattgaggagagagttttccccaaaggaaatttatcagctgaaggggaatgaatgcttggtaggcagtgactgtgtccatgcatatatgtgttaccttttagctttgagctgcagtcatcactgtgcccaatggttgtgtagagcctaacattagaaagatctaacctacctacccacctgcctcctttttatatactttgttgaatttcctggggttacagggctctattctcacatggaactttctgtatttctttttggttttagctgttctagaccttccatactgtttaaaaaatttattaaatgcctattctattgtagagattggggggaaaaaaaaaccaaagtgttttccctattctcatacaccgttaagtacaatacttctaacaccagatgtgtggaggtttctcctcacataccaagcaattctccagcagacatcagctggatgtcctttaacaattagagttccagtctgtggcccgttaggaacccggctgcacagctggaggtgattggtgggcaagcaagcatgactgcctgagttctgcctcctgtcggatcagtggcagcatgagattcttgtaggagtgcgtactctattgtgaactgcacatttgagggatctaggtcatgcactctgtatgagaatctaatgcctgatgatctgaggtggaacagtttcatctgaaaccatcccactccctgacccttcagtgaaaaaaattgtcttccacagcaccagtccctgatgcagaaaggttggggaccactgctgtaattcaactccattctgatgctatctatctatctggagacagtgtcagattccacaggttgagggctcagtaccctcccatccccttcagatgccaactgtcgcaagtcccaggttgtgacctgtacttctgactgtctggttataattggggttccctccttgggtttgattaatttgctagaatgactcactgaactcaggaaaatgctttacttacatttacccatttattataaaggatattacaaaagatacagatgaatggccagatggataagatgcttagtgtgaggtttgtaggaaggtacacagagcttgtgtgccctctccaggcttgccaccctccaggaacctccatgtgatcagctaaatcattcattcattcattcattcattcattcattcattttgagatggagtctcgctctgtcgcccaggctggattgcagcagtgcaatttcagctcactgcaacctccgcctcccgggttcaagcagttctcctgcctcagcctccagagtagctgggattataggtgcttgccacctcgcctaactaattttttgtatttttagtagagacagggttttaccatgttggccaggctggtctcgaacccctgacctcaggtgatctgcctgccttggcctaccaaagtgctgggattgcaggcatgagccaccgcacccagccgtgatcagctaaatctcaaagctctcagaacccaatccattgggtttttatgaaagcttcagcacatatgactgattaaattattggccgttggtgatcagctccaccttcagtctcctccctccctgagattggggagtgagtgaaagttccaaccctctagtcacatagttggttcccctggaaactaacccccatcctgagactatgcagtagctcaccaagaggaagaaaagatgctcctatcacccaggaaattccaagggacataggagctgtgtcagatgctccttttactcaggaaattgcagaggtcttaggagctctgtgttggaagctgggatcaaggaccaaataatagcaaaagattctactagtaacactattgcttaggaaattataacagctaaaaagagctctaggccaggaactgtagtcaggaaccaaatatatatttcatactatatcacaatattacctctgtgctggacactatagagactgtaaagagggttaagctgtggcccctgagctcttgaagctcacattatagttcctaaaataattgcctgctctcaaaatgttctttgcttttaaaaaatgtgataatatagagaaataagaattaattttgaataaaggaatgtagccgttttttgttgttgttaacttgtaagatttgagctggactttgtcagataagtagtaagaagaagggccttccaggacataggaatagcttaagcaagggcacagttggaaagattcagagtggacttgaaagtagagtaaattggagtgattagaccataatctttgcgtggacttaagtggtaaagattccagtgtggtaaacgttaggtagagatcaaacattggaggcctttgaaaacctgactgagcagtttgtgtatgggttgttgggtggtagatgtcacaggtttttcaggagaaaagcataatcaaatccaagtttaagagaataactcaagtaggatagatttaagagtgaagcaggaaaatttgtcagaaaggtggttatggttgtttggaagaaatactcagggcctgaattaagagactagtaaaagagatggagacaaaggacattagaggaataaatagaatatgtagcatttggagtgggtaaaaggggctgaaatgattctagaatttggggcataggcagttgatcctgtacggatcacatattttaagaaaagaagataattatatttatatttcagatacttgttgaacctatatgacaagatgtctggctgacaactaactctataaaagctgtcctgcattttgaaggaaataatagaaaaatatagggtgtgtattttaagaaagtgtataacataagagacggctcagagagaaatggcactaggacataaatttaaatgaaaaatacctaacttaactagatcagagtttatagtcttggctataatgtcatacggatgtcagttttatgtaggagggtcacatttttgtgtctgtcagaattattttttatctgattgttaaaacgatgtgggaaaataaaatattggaggtaaaaagaaccactgatagttttatagcttagaaataacattcacaggctaggcgcagtggcacacgcctgtaatcccagcactttgggaggctaaggcaagaggattgcttaagctcaggagttcaaatccaggaccagcctgggcaacatagtaggaccccagctttataaaaaaatttaaaaaattagccgggtatggtggcacacacctgtagtcccagctgctccagaggctgaggtgggaagattgcttgcgcctgggaggtcgaggctacagtgagctgtgattgcactactgcactccagcctgggtgacagagtgagaccctgtctcccaaaataacaaaaaaccacaaacactcactagtgtgtttagccatacatgtgtatttttatatattatgtaaacacatagtagctgatattttttgacctcttatgttgggcgtgattctaagcattttacatttattagctcatttaacttgagctaattgaagaatgatcttttaaggtaggtactattatccccaccttatagatggggaaactgaagcatgaaaggttaagattttaactgcacaattaggagagggtaaagccaggaagtcttgttttctagtctttggtcttggaactatcctgttattatatctctcacatgctaagctgacgtagttatcctttctgattagcattctctctcagtgcagaaaccaaagagtttcatatgatttgttaaatgatttctttctttttctttttttctgtcaggaagaaccttcatttaaaaaaagatttcttttttatttaattcttgctacttactaaccaatattcaggaaccaattagattcaaataatgcactatctcttactgtctagactcttactctgtaattgaattcagagtacatagtggtacttacatacacacatggacatacatatatttaatgaaattattttatttagttttttgagacaggatctcactctgtcacccatgttggagtgcagtagtacgatcacagctcactgcagcctcaaacttcctgggttcaggtgatcctcccaactcagcctcctaagtagctgggaccacaggtgcacaccactatacctggctaatttttgtatttttttttgtagaggtggggtttcaccatgttgcccaggttggtcttgaactcctgggcttagtcctcccaccttggcctcccaagtagctgtgactacaggagtgttcgttccaccatgcccagctaattttttttttttttttgcattttttttttgtagagacgggtttcaccatgttgcccaggctggtcttgaactcctggtctcaaacattctaactgccttagccacccaaagtgttagcattacaggtgtgaaccaccacgcccagccaataaaattattatgtagtttttaaaatgtaagagtatttaatcatttacctggactcatatctacccaatttttgtctaatttaagcctgtgttgtgcctgcatatgaatgttgtatataatttttatcttcggatatagttggaaacattagcttatttgcctcaaagagatgacaggaattcagaaaatattgctggttctgctactgaatcctatagtaacaaaaattagtgcaattaagttgcaacattgcatatcagaagttttaatttctgtttgcttaaatggtaatgattaatcctaattggatgcctacattttcagaaagatgtgccggatggggtgaaagagctgtcagaaggttcagaagaaagcagtgatggtcagtcagattcccagagttctgagaacagcagcagcagcagtgatggtggcagcaacaaggagggaaaaaagagcaggtggaaaaggaaaggtaaatccacctgatccttcaataaagtactaaatgctgtaggacaaatgcccttgttagtagttcctcttttcccagactccaggtcagtcagtcactttcccttaccctctataacagtcctgtcaaggagagttttctgcaatgatggagatgtttatatctttactgtccagcacaacacagtagccagtagctacatgggcctattgaatacttgaaatatggttattatgaccaaggaatttaaaaaataaaaatgctttcttttttagagctgtttcaggttcacaataaaattgagaggaaggtacagagatttcccatgtacccctcccccgccacatgcacagccttccccactagccacattctccaccagagtgctatatttgttacagctgatgaacctacattggcacatcatcaccca

SEQ ID NO: 93221 - DNA, 1012 bp, Homo sapiens
ccgagagatggatgagcagatgagactgatggaccataacctgaagtgtctgagtgatgctgaagaaaagtactctcaaaaagaagacaaacgtggaagagatcaagattcttactgataaactcaaggaggtagagacctgtgctgagtttgctgagagatcggtagccaagctggaaaagacaactgatgacttggaagataaactgaaaatgtaccaaagaggggcactctgtacaaaggatgctggaccagactctgcttgacctgaatgagatgtagagcacctcagtctcaccctgctgctgctcctccctctgaccctgattccatctgaggccagcctacccaaagctgacctttataactggaaggctgctttctcctttcgctgcccccacctcccctgtgtctttttcgctaaactgtctctgcctcttcccagagattccagctgggctagaggctgtgcacctttgggaacaacacttaagggaatgtgaacacaatgcataatgcctttaaaagcatgttgtgatgtacacattttgtaataccttttttgttgttttatagcaaccatttgtaaaacattccaaataattccacagctctgaagcagcaatctattcctttttcacttttggaaggtgacttttcagcttaatgcatattgccctttccatagagaagaggaaaaggtataggcctgccttactgagagccaaacagagcccagggaaagaatccattatgggaaatttcactgctctgtaaaaagtaccccccaaaccagaaaggtgattccaggaggagttagccaaacaacaacaaaaacaaaacaaaaatgtgcttttcaggttttcagctttaagatatctttggacaatgttatttcttttttttttttcattagaagtgaccaaattaaaatggtaagacctctgaaactaaatttttgtcccaactctgccccctctcaactgcctgcagaatggatcatgtgcccctt

SEQ ID NO: 93222 - DNA, 1253 bp, Homo sapiens
cctactctgaaatttttcttacaattttcacatctgtctcagtgttggtgtcctctaattgtcttctttgattcagatagcgattttccattgaaccctggatattttggctatcatgttaggggatgtccagtcttatttaagctggcattcactgtgcttacttaggtttaccatgcaggtcctggactgttttagtggattgtggttccaataacagtttaattttcagatcctttgcagtggtatttgggtctgcttgttttatctggtgccacagaggctcccattgacctctgctgcttcttattgatctctgttgcttctgtttgaggcggtgggaattttcacaggctgggttgcctgatgcctgtagatgtggacaaaagggagtcttcagcctgtggggacagacaggcttcctggcaggatcccctttgcttgagctacttggctgctcagcatcttgtgagagcgggaggtgttgtagtctcaggcccacaaggacaaagaggcttcctgggctggactatttttgtgatcttctcccacttgcttgtgccatttggcctcccctagtctagtctttatttttgagacttgagggaacataaacttgcaacgaaagtcatttaataatctcctaagatctaccataactaagttacttctcttagttgggaaatgccaggaattggtaaaattaatgggtcaaccaactacttcaaaactctgaatctcaatataaatggctacatcaggactggtaactctggttcaaagtagaaaataattgtaataagtagtgttagctgtttagatatccaagctctgtttgctaaatcaacaagaataccaagtaggacaaaggtataaaattgcgaaatttctgtcttttggtttacttaattgaatctgttgatttttattctctctctccagctgagttctttcagaaccatgcccatagtttatattcattcataagtattttgttttcctcactaatactccttttacctcagatgataaaccctcgtgtgtgtgtgtgtgtgtgtgtgtatgtgtatgtgtctccctttctgtgtttctgtctctgtctctctgtttgtctcaggcaggagtgcagtggtgtgatcatagctcactgcagcctcgaccttctgggctcaggtgattctcccaccatagcttctgtagtaggtggtattacaggtgtacactgccacatctggcctactttttatttccta

SEQ ID NO: 93223 - DNA, 1795 bp, Homo sapiens
agtgtatatagcaagggaaataaagtcaatattctctactacttttcagcagaaatccttatccctgcagagtagatcatttgattatttgccaagctgaattgccttgaagtgatttcattagaaagagcttagttttagaatgaagaacattatttgtattgataatatatctaaggttggaggattcctttgtggttaagcctgcatcttcctcctctttttctttttaaacattttaaaaatattttttgtagagatgaggtctcactatgttgctcaggctcatcttgaattcttgggctcaagcaatcctgctttggcctcggcatgaggcactgtgcccagccatcttccctatctgttagttgcaatctgctttcaagcccacaaacctggtagggatgtcaagaaggattagtaatgaaaaaaatgacaacaaaatgcttggatattgacagaaaagagtattcttatccattgtaattcagatccataagagctccattatgtatcacagggaagctaataaaccttaagtccacagctgatggcgttatgatggctccttgaaattgaaatgcatgggaagaatattaaagaatgggaagtattcattgtatccacatttaaatgccctaacagttttactctgttacataatcaaattactgcaactgttttctgaagtagtttagactgtttagctaaatttgtttatctttagacattttgatatgatatttttggctaatttataaattttaatgaagaaattaatgagggggttactaatttggggaattgtggatattgctgggatgggaagggacagtttaatttttggttttattgttgctttgtaagaaaaattaaaagctttttttttccttctttcattttcctgcactgcattccaactccagaaggtaagaagtattactttattctaaagaagtattatgcaattataaagcacacttttataaatttaattgaacttacctttggatgcatgagttttactttataaaactaaataattagtccagaaactaagtaatatcgatattattatgttagtgtttattcgttaagtgtgctttgtttggttcttgcagtttgtaattattgtttgatcataagtttagaaatccgatctacattaaggtttattaaaatcaacatttgacttataaaagcgttgggatgccaagtattctgcagagtaataatgaaagtatttagtagactggaaacatgtatattaacatttgctttatggctgtaagattgaaaatgtatgtttgtgctcttaatttagataaaatattggtaaatcggctgggcatggtggctcacacctggtaatcccagcactttgagaggccgaggtgggtggatcacttgaggtcaggagttcgagactagcctgaccaatatggtgaaactgcatctctactaaaaaatccaaaaattagctgggtgtggtggccggcgcccgtaatcccagctactcgggaggctgagacaggagaattgcttgaacccacaaggtggaggttgcagtgagccgagatcatgccactgcactctagcctgggcaacacagcaagactccgtctaaaaaaaaaaaaattggtaaatcctttaggggcatgatacttaaaaccagggcagaatgggttaaaaatcagtctggatcctttactgaattgactttttgtgtgtgggcatggccttttagattcacctccactatagcagttcccgtgttacacgcctgtgagacctg

SEQ ID NO: 93224 - DNA, 1223 bp, Homo sapiens
aatggtgttagttacttatttctaaatggtacacaacattttaaatgttttgctattgatttatagtgactagtttcctgtctgatttgagaggttctgacaaattttttaagaaatggatgtaaccatgaaatcctaagtagaggacccagctaacctgtacccacaatcctgatacacttgagactgtgagataaatttgtgttgttttattctgtatgataataaaacttacaaataaaatgaatctgtgttgttgaagctgcataatagcaatctaatagtaatactaaaatttgggagtatgatagagcagggttgtcttaaagaaggtttgacttgggtattctaggacgatggataaagtatttacaagtgaatgatcggcaagggcattccaggcagagggaagagctgaaaagaggaaagactgaaaaatgcagcgtatgtttgatgcatggctaattaacctgtgagtgttgtgtagcataatggaagacaaaaccagaaaaggtcggttgggccaaaatgtggagggttatagaagctgggctgacaagtattttctgggagtaatagagaatttttaggcaggagataataatgtatctgttttaagcagattggggcatttgtgggatttattatagagggcaggaaagactggtgggaggagataaaactttcttttgtcgtctttcacatttttctcattgcatacctttttttacctatacttatcccacttgcagcttttcaacacctttacttaagatttttttgttttgttttttgtagagcctgtgttgcccaggctggtctcaaactccaggcctcaatctatccttattccttggcctcccaaaacactgggattacaagtgtgagcctctgcacctggccttctacttttctgcgagcctcctgaagtttccacacataaaagaggtcttggaatactctgtagcacaatacaattctcatttttttttagatagaacctgtctctactaaaaatacaaaaattagtgccaggcgcggtggctcacgcctgtaatcccagctctttgggaggccaaggcgggcggatcacctgaggttgggagttcgagaccagcctgaccagcatggagaaaccccgtctctactaaaaatacaaaattagccaggcatggtggcacatgcctgtaatcccagctacttgggaggctgaggcaggagaa

SEQ ID NO: 93225 - DNA, 1688 bp, Homo sapiens
agcgccaggcgtcagactacagctactgccggggcctccttggcgcgcatgctcctgcggagaggcggagaccggaagggcgggggcgtggcgaggtaccgcagaccgccggctcgatagctcagcggccgggcttgggaggcgggggcgcgcccgcgctcgttcgcgcggccggctgcgtacagtagtgacggccgcgcgggagcggtcacatgaccgtagcggcagcctgtacagtaagaacccaatatggcagcggcggtagcagtggcaacggcagcaagaggaccggccgccccatagacccccccgcgcaccacccccgccgcttcctctgcttgggtgcccccccggtctgacttcccttttctcccacctttcccggcaccgcgggaaaagcagcgcagggcagagcaggcagggagggcggccggagcccggacacgggagcctcccagtcagttcaagacccgacatgagggaaaagggacgtaggaagaagggcaggacctgggcggaggccgccaagacggtaagggggagggagcgaaggggaaggccgggaggattttgttcccttgtcgcccgccagtcgcagggaaagggaggtcactggcccagggacccggctgaaggggcacaaaaccgcgcggagagggcggcggttagtgtcggggttgcgatccctgtgggaatggaggcgcccggcggaacgtgatagccgcggggccgtggcgtccctcggcgtctgcggcgagtcctctcagtgttttgaggctgtcttttggggtcgagccgatatcacctccgctctgtggtagccctcgccccggcacggggaagtctgtggtgcttgcacggtaaccggttcttctcccttgtgcggctggagagcccccattggatgcagataggagaaggcttgtgcgtgcatccagccccggaaaggagaggggagcgctggagctggatagaatttacccgttacagcggacgtgcctgtgaccccgggccccctgtttgtctggctcccggagcagacgagagatcacgaggcttttgtttttgtttggtgttggagccgaaagtgcaggaggtgtttagaaacgaagtaacaggtgggacttgtagaatttttttttttcctgtttccgtagagacctactctgaacaaggcagcaatgcatggtgggacgtgtagtttacccggccttcacgttaccctagccaaagggatggtgccctaatgaagttgtaattagtgggcaaaacaattttccccctaattgtgttatgacgaaatttagaggtagattttaaaaagtggaatattgaggattagtgagaacttttaccatattttaagaagaaaaaattaaaagcatgttgtatgcagaaatgaaatggcaggagatagtgaagttcatacatcgttgagggtgcagcagaaaagtaatagggcattaaacggcagcattttaatagtggaaagtgagaggtgttcacccctttaatggtgattaatgccggtaatacttcgacaacgtagcccttcttagtgaacccttattagatgccatatggtttattttttaatgagttttttaaatataaaagtaatgttcactgtggggaaatttggaaaattataaaaaagtataaagaagaacatttaaaaaaaatcacat

SEQ ID NO: 93226 - DNA, 1051 bp, Homo sapiens
gtcacggagcttgcttttttttttttctttttttttgagacagggtattgccctgttgctcaggctggtctccaactcctgggctcaagtgatcctccccaccttggcctcccaaagtgctaggattataggcatgagccactgtgcccagcctgtcatggagctttattcaagtagagatgagagagaaataaatagacaagacaatatgggatatttataaattctaggaagacagtaaaacaagctgatgtgaaagacaatgactgggtggaggcattgttagatgacaagaaaagcctctctgagaatttgatatttgagctgagacagaagtaaggaagacaaaaagcaactagccctctaaggatcagggtgtggagcattccaatgagagggaaggggagtttcaaaagccataaggcagaggagagagtttggaatgtcaacagaacctaacaaagatctagaatggagtgaagtggagagggatctgggaagatgtgggagaggtaggcaggactgaggaagtggaggaggaggtgggagatttgcagagagagagaatgtgtgaaaaagttgctttggagaatggaggaaagaatgtattggggaagtgtagtgggactgcttggcagcgttgacagtccttttgagaggtgtggtcctgaatttaaactagaactaattggcatagtagatgttctgaggattaggtaaaatgaacgggaggtttggattcatagctgatgctcaaaaatgttaactatcacaagatgtagaaaatattagaatgaaggagaggaaaccaacccatttatttttgctaccatttgcaactcaggaaaggtagataacacgctatgtgttctgatcttagatttaagactaactttttcttctaaagtgagatttttgcttctggatttttattttattttattgatttttttttacagaatcttgctctgtcacccaggctggagtgcagtggtgcaatctcagctcactgcaacctccgcctcctgggttcaagcaattctcatgcctc

SEQ ID NO: 93227 - DNA, 1034 bp, Homo sapiens
gacagggtttcaccatattggccaggctggtctcgaactcctgaccttgtgatccacccgcctcggcctcccaaaatggtgggattacaggcgtgagccaccgtgcccggccttaattttttataatttttgtagagacaaggcattactttgttgcccaggctggccttgaattcctgagctcaaggaatcctcccacctcagcctcccaaagtactgggattacaggcatgagccactgcacccagcttggaagtgaatttctttgatcagtcctttgtagaactagttccttgtattccaaatacaggaacttgtttcattttagtatatacacgaaatgtgcttctctagctttttcagtgctcagacaaaataaagatgtctgctggtaaacttctaagatgttttaaaatgttaattcacaacatttggtacctgggaacaactctgcagcctaggatatcacatctattacaactttaaatataatctccttcacaatgcagtaatggaaaaaatcacacctgagatttcctgtaatttcatctcactgatgagatctttttagacaaacccctttttgaacctccttaaggtttaatagttgtgatatcagaaaagcacttcttatggagcagaaaagcagaatgaatgagagttgaacagaacaggatctggagaaaggcttaaggataggatgttttatcactggggacctggggaagaggggctgggagacagctaggtgctgagaggtgagaatgacaactggttggcaggaggctagtgaggagttcagcaagggataagtgggtacaccaaccagagggcaacaggcaatggcgaggaacccgagagcaagcaatgtgtgggattctaggcacagagtctgacagcagcgcttagacagttccaaaggttgagatgaataaggaaggcccccactgggcatggcggcttacgcctgtaattcctagcactttgggaggccgaggcgggtacatcacctgaggccaggagttcaagaccag

SEQ ID NO: 93228 - DNA, 1051 bp, Homo sapiens
aatagtgtgagtctccagttcctagaatatgaagagtgctgtcgttggggtgaaaccatgagactgacagatctgcctgaaatggggggtgtgggaggtggtggcgggggttattctctttccttcaggaaatgaacccttcttacatcattcaagttctgctctgaggatcaagcttgggtctgatttaactcagcgacactgtcatttctgcttcattactggactagagggttgagccacccacttgccatttgctcctgtccttccaggaaatcacaattttcatcagagcccaagagattatttgagactcaggattcagatcagaggttcgactgtggctgggacaggagttgtgtgtagaaattcaccaggtggcctgagcgcagggggacctccagggctgcgttgagcagcctctcccactgacctctttctcgtttgtggacaaagcagcacgtatcacctcattcatcacttggacacatcgcctttgcattgtcttgtcacacctccctcacagtcttatagcacaatatacccaaatcagcccccccagtccgagggctgggcccgaggtatggtcggaggaggagctcctgcctgcggttttgtgtatgtgtgtatgtgtgtgcgtgtttgtgtgcgtgtttacctccacaggggacactctacactcagtgtaagatctgctgggaacagggccaccaggagtggctggatctcagtctctctgtctctctttctctccttttccttttggtgtatcaaatatttgattgacaaagtaagggccttgattaggaccaaattctcgtgtgttgctatggtctttatttaggacaacaattaacaatgcagtggcccattcttgtcactctacacatatgactatacgggacatatgtaatatataaatatatatataaaacattcccctctgtccccttggcttcggatggaggcctttctgttgagctgaaatgcacctgcagctgggtgctgccagcagcttgcaggccccagccctgttccaatcaatgcagtt

SEQ ID NO: 93229 - DNA, 1116 bp, Homo sapiens
gcacagtgactgggcactgttcaagcctggcatgatattcccaccacaggctgaaaacataatgtttctggagttggatgtgtcccctccagctgtctttgagatggaattctctcacgaccaagaacaagaccctcgtgcgctacacatggagaggctcatgcgattggacagctttctggaaagaccttccacgtctaaagtccgaaagtccagatcctggtcagtacctccatggtcccaggcagcactggacccaggaggcaggggaactgcaggcgctgggtgatgctaaagagggttttgctggtacccgaagggcaggaagggcaaggggtgactggggatgtcagaaggattcctgcagcaacaggatggggcaaaggagaggacccactttcctgtttcctgtatttccctaacctcccctttcgcctgcgtcatctcccctgcaggtgccagagtcctcagcggcctccaccttccaccacacatgcctccctggcctctgcttctctgcgccctgcaacagtggcggaccatgagtgacaaccatcacgtcaggctgcccatccaatagactcctgggatggggcagccaaccctggctcatctcatctgccgcttggtgcgtgtgcgtgtgcgtgcatgtgcgtgtgcgtgtgtgcaggggtgagaatctggcagatggtgcctctgcctgctcttcttcgcctcctttatttaattcatgttatttattcgcggagctctgttcgtgttggggagatgccctcgcctgagccgtctgggcctaccgtggtcactgcgtagcctctttttcttctgacttgagagctcccccagtcagatctcaggcttgtccccctgtcagctgcctccagaagggaaggtagccagtgcctgagaagacagtcccttttctacccaccgcactccataacctccatcttctcccacactgatggcgagcagcccctgagcactttctgggactgggagactgcttggtgttccctgaggacaagagacatcctgacagtgttgggcatctgctccccgtggacacagccccactctccactttctgagcctcagacaacctcattcagcctc

SEQ ID NO: 93230 - DNA, 1041 bp, Homo sapiens
actaaaaatacaaaaaattagccaggcgtggtgccacatgcctataatccaagctactcgggaggctgagacagaagaatcacttgaacccgggaggcagaggttgtggtgagccaagatcatgccattgcactccagcatgggcaataagagcaaaacttcgtctcaaaaaaagaaaaaataaaataaagtaaaattagccaggtgtggtggtgcatgcctgtaatcccagctactcgggaggctgacgcaggagaattgcttgaacctgggaggtggaggctgcagcgagctgagattgtgccactgcactgcagcgtgggtgacagagtgagactccatctcaaaacaacaacaaaaacacaatatactctaatagaagtgatgcaggtgtgtctgtctctcgaaacatctgattgtactgtacttgcctattttcagaccacagtaactgagactgtggaaagcgaaaccacggatgagggggacaactgcactagcttcagttgtcaagctgtattagagcaaggagaagaaaattccagaacttgcagtctgcagggcctcctagctacctgaatgatatttaggtcctcatgatgtcatttgctgtttgtgttccacagaaatcctttctaatatagcctctttcctacagcagtagcagccagatgaagaagcggccaacatctgcagtgggctacaagaggcctatcagccagtatgctcgggttgccatggcaatggggtcccaccccaggtacagggtaagaagcggagaggggagaaagagcctacgggagggaggccgggcgaggtgtctcacacctgtaatcccagcactgtgggaggccgaggcaggtggatcacctgaggtcaggagttcgagaccagcctggttaacatggtgaacccctgtctctactaaaaatacaaaaattagccaggcgtggtgatgggtgcctatagtcccagctacttgggaggctgaggcaggagaattgcttgaacctgggaggtggaggttgcagtgagccgaga

SEQ ID NO: 93231 - DNA, 1051 bp, Homo sapiens
tttttgtcactgtccactttgctatgtctgatgactgcaatttgcagtatttaatatttatttcagaactttaaaaaatacaaaaatagaaaaggcaagtaaaaaatggttctaggattttttttttttttagatagaattttgctgttgttgcccatgctaaagtgcaattgcgcaatcttggctcacccctacctctgcctcccaggttcaagtgattctcttgcctccgcctcccgagtagctgggattacaggcatgtgccaccacgcctggcaaattttgtaattttagtagagacggggtttctccatctctactctccatctccagcctgttggtcaggctggtctcgaactcccgacctcaggtgatccgcccacctcggcctcccaaaatgctagtattacaggcgtgagccaccgtgcccggccagttctaggattttttatatgaaacaagtttttaaaattactctttttaaagccaagataagatggttagaataaagtaaaaacaattccacggtaattgaaatcccagttgtgattctgacttagcagagagagtctggtggggcacagtagggggcagggagctgctggcctggatctctgaggtcatctgccccatgtccctcatttcaccacagaaggttgagggcagggaggtccttgaacaaggcagctttcctcatttcaggaaccatggggtctgaggctgcagctgtgaagcaaacttctccactccccagagaaaaggtcctttcttcagcattggatcccaccacttgccgcatcacttaattagggctaaaaaacaaacagaaaagttatttctctccaaagcatatttaactaattagggcgttgttccatttgctcaactcaagtgtggaatattttgctttatttcggcctgtggtattctggggatgagaacactaagagctgctcgaagtgagaggaaaaaacattgtttgtaagaaattacctgaagtcatgctgtcccattagaaagcttctgttcaaaaaacattcttcctccacct

SEQ ID NO: 93232 - DNA, 1049 bp, Homo sapiens
acagagaaaaggacattgggcttggagttagggcggtggtggtcaaatatcactctgccatttactggctccaaaccttgagcaaatcacttcgcctgtctgggccttagttttcttttatgtcaaatggggatcataaccattatctcataaggttcttgtgagcatcagataggacgattaaggtaaaaaggagttaacccagttgaggcacatggccagttgcatctgagactcctgtctcctgcggaatgtcacagataggtggcagtggcagggcagagcctgtttggcttctctgtccttgtaaaatcatacttgatgctatctttccagaagagtggctggctgggcctggctgtctccattctagctttccacgtcagtgctttatgagtactggggcctcctttctccccgctctggttttgcactccatttgctcctggaatagttaaaggtgagtctctgagtatccccggctgtgtctacaagctggcattgtccctgtagtgacctggctgttgtcacagcagctgacctgcctctgatacctggaatcagagccttagtcaaattgggaagttatttggaaagcacatagtcaatataagagcagctagacaggtggggcgtggtggctcacgcctgtaatcccagcactttggaaggtcaaggtgggtggatcacttaaggtcaggagttcgagaccagcctggccaacatggtgaaaccccatctctactaaaaatgcaaaagctagctgggcgtggtggcaggcacctgtagttccagttacttaggaggctgaggcaggagaattgcttgaatccaggaggcagaggttgcagtgagccgagattgtgcctctgcactccagcctgggtgacaaaatgagactgtcttaaaaaaaaaaaaagagcatctagacagattccttaattaggagactcaggcttcaaggactccacttctaggcctttgtttcccatctataaagcatgggggttggggttgatgattcccaaagtccccttggttaccctgcc

SEQ ID NO: 93233 - DNA, 1033 bp, Homo sapiens
caaaatcaacctctcattatctgccctgggcaacgtgattgctgccctggcgggcaacaggagcacccacattccctaccgggactccaagctgacccggctgctccaggactccctgggggggaatgccaagaccatcatggtagccacactggggccagcttctcacagctacgatgagagcctctccaccttgcgctttgccaaccgagccaagaacatcaagaacaagccccaggtgaacgaggaccccaaggacacactgctgcgggaattccaagaggagattgcccgcctgaaggcccagctggagaagagggggatgctggggaagcggccccggaggaagagcagccgcaggaagaaggccgtgtccgccccgcctgggtaccctgagggcccagtgattgaggcctgggtggcagaagaggaggatgacaacaacaacaaccaccgcccgccccagcccatcctggagtcagccttggagaagaacatggagaattacctgcaggaacagaaggagcggctggaggaggagaaggcagccatccaggatgaccgcagcctggtgagcgaggagaagcagaagctgctggaggagaaggagaagatgctggaggacctgcggcgggaacagcaggccacagagctgcttgcggccaagtacaaggtaagggccccagaggagctgggcactcgagatgtccccgcaggggatcccggcaaggaggctcttctttgagagtctgtgacctggcctgaagtggaggttctccctcagcaccgcacactgccctcctgccaaatgtgcccccagagcagccaggcaaattgctgtgataccgggctgccaggtacatgcacaggcacacacacacgaagcaacgtggacaggcggtctctcaagccagtgagcttggggtggtctgacctgctgtgggcatttcctgctggtggcctcaggatcagtcaggtctgtgggatggccaggcagcctcttgtgaatgtgggttcttgttccttcacagcc

SEQ ID NO: 93234 - DNA, 1070 bp, Homo sapiens
ggctcaccacaacctctgccttccgggttcaagagattctcctgcctcagcctccctattagctgggattacaggcatgtgccaccacgcctggctaattttgtatttttagtagagatgggctttctccatgttggtcaggctggtctcgaactcccgacctcaggttatccacccgccttggccttcctaagtgctgagattacaggcgtgagccaccgcgcccagccttggtaaattattttgtgtgtgtgtgaaatactgggttgaatcacatgaattctcattttgtaggttaataatgacggcatattgacttcaggccagatcgccggatatcagctgagtgactcttacaagtccttctagatcctgaagtggattaggtgccgcagttgctgctcgtgttgaatccagaaccgtagccagacataggactggaggacgagcgaaagatgctgaccgagtctggagatcctaaggaggaggaagaagaagagggggaattagtgtttctacatcaggatcccctaacaacagtgagagagcaatgccagcagttggagaaatgtgtaaaggcccaggagtggctggagctctgtgatgagtgtgtatcctctcaatcacatacagaagaggattgcacggaggagctctttgactttttgcatgcaacggaccattgcgtggcccacaaactctttaacaacttgaaataaatgtgtggacttattccccacaggcttcatcacctgggcatcaggatatttccttatggttttggatatgccatttgtttcttatttctgtaactgtaagttcacatgaacctcatggattttggcttagtctggtagcttctgtgtaattcgcagtgatttcatcttaataaagttctgtgatctgcaatctgcaaaaaaaaagaaatgactgcatattggcaattacacatagtttaattgaataaaacacattcagaaaggtgcatggtacataaacacacggcttaaaaaagtattattatttgagacggagtttcacttttgttgtccaggctggaatgcaatggc

SEQ ID NO: 93235 - DNA, 1025 bp, Homo sapiens
agcatttctccttcctggcatgggttcacctcagccccaattcagtggcagctctgttggttcagaggggtgaggtatccaagaggaggaagcttgtacaatcctgctagcaggggagggctgatggtagggtggagtttcaaaggaagcctctgacatctgacaaaggctgagtcagttatattgccccatctctgaatctggcttctcctgctcctctaccctacccatcctgccttccagacacaccaaagttctttttatccctgaccatgacaggcatggctgctgtgtgcagcttcataggttgtgcactgcacagttccaggaggtgctattcccatagacaaaggagtgaataacaactccaagaatcatgcacaattgtaccaggcagccccgagccaagcccttttatgacttccttcctttccacatattgcttcccctgccacaactgcccttgtttgcctttcctccccccatttctttatatggtgcaacatctaacacttagttctcaaattctgcccaaatataatcctggtgaacacaaacataacagaatgcatatggaagacctgacatacaggagtctcgaactggcacattgccagctcattaagcttggtagttttattatgcctgtggggtgttctaaaaggtaatgtaagtaaagtccattagaacagctaagatgaaaaatacacaatactaagtgttggtgaagatgtggagcaactggaactctcatacattgctagtgggagtgtaaactggatagctactttgggaaactagcggtatctactaaagtagaagagatacctagtcatgatctagcagttcctagaaatacatacacatgtactcctagaaatatgcatacatacataggcttcaaaaaaagtgcaaaaatgttcacagcagcactatttataatagccccaaactagaaacaactcaaatacccatcaaccttagaatagatgaataatatggtatattaataaaatggggatggg

SEQ ID NO: 93236 - DNA, 1509 bp, Homo sapiens
acgccggcgtgagagggcacggggaaaaggtggctctggccggggtggctcggtttcctggggctatgtaactgagctcgtcgacttaggggtccttcttcgctgccctcgccgcgtgctagcagggagtttccgctcgggagagagactgtcctcacgcccgctgcgcctcctcgacggcagagcaggcttgctcgcccgtgggagcgtcccggccgagaagccctgaggggggaggggaggccattttgtcccgaccgactccccggaaccgggcggacgggctgggagaggctgcggagccgcggtcgccgccctcggaggcactggacgccgccactgtcggggcttcctcaaagctgttcgtaggtcgcccgcgccgtctcgagcctttttcccacgcttccccggtcctccggcctgagaacgcccgagtgaggagttggccgtagtgagagggaccgatcccttggggccgccggcggcgagagcccgagccgctcctcccaatggcgaagaagacgtacgacctgcttttcaagctgctcctgatcggggattccggagtggggaagacctgcgtcctttttcgtttttcggatgatgccttcaatactacctttatttccaccataggtaagacctgtgggaggacggtgtacggtctcggtagctgcataccgtttattttactccagacatcttgcttcccgtaatatacgcctttgtttcagtgattccgattccaaacgacacatccaagttactgtttgaatcggcatcgagcttactggggcggggtcttcccatgatttccatccggtcttttgctttcgagtctcccactatgctcagtgccttctgttacaaaatatgcatcatttaaccatgttccagaaccttatttcttcaggcgactggactggctttttccacatttgcgtggaattagtagatgtgtgatatttttaaggtatttatttcagtggttgcgattgaagcagtactagctatttgggaaaggcctgaatttatactttggggcaaagaaaagattccatatggtgataacttagagtaaacttgagggtttctgagaagaataattaaggtaaattagaagggaagagtgagttgccctcattcactaatccattgatgtgtcaaacaatcggaggctcttcgcgcttggggtgggactctggcatatttgcctcagtgcttttcgagacatcaacagaagcagtaatctgagggagatgatcagtttctgtcctcaaacccaacggagtgaagtcaagctctctcttctattttatttgactctagtatttacaggaaagtattttgccagtcatagccctatggacttataatgcactttcaccatgtttcagaattacttagtgtggaagtaagagctaaagagtgacctttttaatcgaatttcccgtttaggaaaggaaaagggaaggctctaggaaagtcccttttgaatctggttagaaa

SEQ ID NO: 93237 - DNA, 1407 bp, Homo sapiens
aatacctgcttcattctcacaaaagaaattatactgaaattaaattggacaagtgattttttaaatagatttttattttgcttaccttttttgggaggcaaattatcataatccttatttccagagtatcatactgttttcttggtctgtcataaatttcatgaaacttagagcttgttctctaacttgtgggttagagaatactagcacttagcgctagcacttccctagcactgtttgcttttaacactccacttttagctgtagctggctagggttaggtgatcagatgggtcagcaaatatttattgagcacctaatgctgggcactgtttttaggcactgggaataaatgatgaacacaacagaccccttgaggagcattccggtgagataatcataatagtgtggaagatgctacaatagtaagcacagggaggaagagtggctagtctaaatcgtgaggagtttgagtaggcttacgtggagatgatacctaaaatgaagtctgggccgggcgcggtggctcatgcctgtaatcccagcactttgggaggccttggcgggcggatcacaaggtcgggaggtcaagaccagtttggccaatatggtgaaaccccgtttttactaaaaatacaaaaattagctgggcgtagtggcaggcacctgtagtcccagctactcaggaggctgaggcaggagaatcacttgaacctgggaggcggaggttgcagtgagctgagattgtgccactgcactccagcctgggcaacaaagccagactccgtctcaaaataataataaataaatgaagtctgaaggactaataggaatagagtcagaggggtaggatagggcctttctggaaaagggagcatagaacaaatgtatagtaaggttgaggatttaattcatgtggtcaactttatttatttattttgagactgagcctcactctgtggcccaggctggagtgcagtggcgtgatctcggcccactgcaacctccgcctcaggggttcaagcaattctgcctcagcttcctgagtagcagagactacaggtgcccaccaccacacctggctaatttctgtatttttagtagagatggtttcaccatgttggtcaggctggtcttgacctcaagcaatccaccgccccagcctcccaaagtgctgggattacaggcgtgagccaccacgcctggctgtgtggtcaactttaacctatccttaggaacagtgtggagtaggaagcaaaacattaactctgtctactccaatctttttgtaaagggtgcatgcccccaactaaaactcaatcctgtaagataatggtataatctttttgtagcccttttacttgggaagatgtgtgatgattttggatcaagtctgctgggttggaa

SEQ ID NO: 93238 - DNA, 2139 bp, Homo sapiens
gtggctcactcctgtaatcccagctctttgggaggccgaggcaggcggatcacctgaggtcggaagttcgagaccagcctgatcaacatggagaaaccctgtctctactaaaaatacaaaaattatctgggcgtggtggcgcatgcttgtaatcccagttactcaggaggctgaggcaggagaatcgcttgaacccgggagacagaggttgtggtgagccgagatcgtgccattgcactccagcctgggcaacaagagtgaaactctgtctcaaaaaaaaaaaaaagtgtcaatcataatatctaccacatagggtagttgtgaggattttaggggttagtgagagtaaagcacttcacatggtgccaggaccaggcactttgtaggagcacagtgcatattagctatatatagaatatgtgactcttctgctgtggaggtgtggcagaacatgttattttatggattgaacatcctgcacaccgtggtacccaagtatttgttggtgctccactaaacaatttctttttttttttgagacggagtttcgttctttttgcccaggctggagtgcaatggtgtgatctcggctcactgcaacctccgcctcccaggcttaggtgattcttctgcctcagcctcccaagtagctgggattacaggcatatgccaccacacctggctaattttgtatttttaatagagacggggtttcaccatgttggccaggctggtctcgaacttctgacctcaggtgatctgcccgcctcagcgtctcaaagtgctgggattacaggcggaagccaccacactgccctcctttgtttgtttgttttttttttttttgagatggattttcgcttttgttgctcaggctggagtgtagtggcacaatctctgttcactgcaacctctgcctcccaggttcaagcgattctcctgcctcagcctcctgagtagctgggattacaggtgcgcaccaccacgcctggccaatttagtatttttagtagaggtggtgtttcatcatgttggtcaggctgctcttgaactcctgacctcaggtgatccacctgcctcagcctcccaaactgctgggattacaggcatgagccactgcgcccagcctagactctgacattttcatactttcaggtaaaaatgttttcacatataagatgttgaatagtgtaagttgagaaaataaatgattctgagtacagcttgaacacatacatgtattagctctgtgcacaggtttaaaataccattgggcggggcgcgatggctcacgcctataatcccagcgctttgggaggctgaggtgggtggatcacgaggtcaggagatcgagaccatcctgccaaacatggtgaaacttcgtctctactaaaaatacaaaaaattagctgtccgtggtggtgggcgcttgtagtcccagctgctcgggaggctgaggcaggggaatggcatgaacccagaaggtggcggagcttgcagtgagccgaggtcgcactactgcacttcagcctgggcaacagagcgagactctgtctcaaaaaaaaaaaaaaaaaaatctaccattgcgtttaaccagtgccgttcaaaagaaataatgtgagccacatatattacttttaatagccacttttttttttttttttttttaagatatagagtcttgttctgttgcctagactggagtgcagtggtgcagtcttggctcactgcaacctccgcctcctaggttcaagcaattctactgcctcagcctcccaggtacctgggattataggcgtgtgccaccatgcccaactaatttttgaattttttagtagagacagggttttaccatgttggccaggctggtcttgaactcctgacgtcaggtgatccgcccaccttggcctcccaaaatcctgggattacaggcatgagccactgtacctggccaaatagtcacattttaaaaagtaaaaaaattttttttctttttgagatggagtatcactgtgttgcccaggctggagtgtagtggcgcgatctgggctcactgcaacctccacttcccagattcaagcaattctccctgcctcagcctccctagtagctgggattacaggtacccactaccacgcc

SEQ ID NO: 93239 - DNA, 1051 bp, Homo sapiens
tggccaacatggtgaaaccctgtctctaccaaaaatacaaaattagctgggcgtggtggcgcatgcctgtaatctcagctactctagaggctgaggcaggagaaccgcttgaaccagggaggcggaggttgcggtgagccgagatcgtgccattgtaatccaacctgggcaacaggagcaaaactctgtctcaaaaaaaaagaaaagaaaaagagaaattgaaaggttgtttgaaaaataggcttaagagagttactgcttttggatgagaagatttcagtggttgatttgaccataaccatcttggtagtatgagctcaggaatgcgttacttattagtgatgtgggaattacatggatttgtccccaaagcacaagcttttagtgggctgcttctatactggatgtgctaccttttggtgtcattaatcctttctccaccacaggcttactcattttttaacagggaatatttttcactgggaattggagtctctcggctccatgtaagaaatcaagttggtaaaggctcttgtccctaagagaggtataatacatacattttgttgtcaggatgattttgctaagttttggaagagtaggttggttccactaacctgcatttaagaaatgattgattaggctgggtgctgtggctcacacctgtatttccaacactttgggaggctgaggcaggaggatagcttgagctcaggagttcgagaccagcctgggcaacttagcgagaccccatctctacaaaaaaaagcttttaaataaaaaattagctgggtgcggtggtgtacacctgtagtcccagctactcaggaggctgagatgggaggatcacttgagcccaggagtttgaagctgcagtgagctatgattgtaccatctcactccagcctggatgacagagtgagattctgtcttaaacaaaaaaccccaaaagaccatccagagtgcttgtctcggtagcatatatactaaaattggaaggatatggagaagattagtatggtccctgcgcaaggatgacacgcaaatttgt

SEQ ID NO: 93240 - DNA, 1202 bp, Homo sapiens
tctttcaactttttttttttttttttttgagacagagtctcgttctgtcgcccaggctggagtgcagtggcacaatctcggctcactgcaagctccgcctcccgggttcacgccattctcctgcctcagcctcctgagtagctgggactacaggcgcccgccaccacgcccagctaattttttgtatttttagtagaggcggggtttcactgtgttagccaggatggtctcgatctcctgacctcatgatccgcccgcctctgcctcccaaagtgctgggattacaggcgtgagccaccgcgcccggccgtctaacagtagaaggttgcccaggcagagctgtggtagcagttgtgaagaacgaaggagtaggagcttgttgagtgttgatttacaagtaagagaccattatttagcacaaaatataaattgtatgattagctgaagagatttgcctgggaaaactgtttattgagatggttaagtcataaaggaggagtttcatttttatttgatttgatttttgtagagacagggtcttgctgtgttgcccagactggatcaaattcctgggctcaagcagtcttcctgcctcagcctctaaagccaccaaggccagctttttaaaactttattttatatataaaaaaagagtttaaaggattacaaaggatgttgaggttaacaggacatctgaacccagaagactaaaagtcttgtaaaggtcatagaggtgggtccttcaaatagatgaataattgagggtttatgaaattagttcattaaatttggactgtaagaaaaggaatttgaggcccggtgcggtggctcacgcctgtaatcccagcactttgggaggccaaggccggtggatcacctgaggtcgggagttcgagaccagcctgaccaacatggagaaaccctgtttctactaaaaatacaaaaattagctgggcatggtggcgcatgcctgtagtcccagctactcgggaggctgaggcaggagaattgcttgaatctaggaggcagaggttgtggtgagccgagatcacgtcattgcactccagcctaggcaacaagagtgaaactccgtctcaaagaaaaaaaaaaaagaaaaggaatttgaaaagttgattaaaatgaaattttagtgaagaaaactcagtcttaagggaaatctgaaatgagaaaaacgtttttat

SEQ ID NO: 93241 - DNA, 1046 bp, Homo sapiens
ggcaggagaattgcttgaacccaggaggtggaggttggagtgagcagagattgcgctgctgcactccagcctgggcgatagagtgagactctgtctcaaaaaaaaaaaaaaaagagagagtgatggattgaattgaagtggttaagcagtggagagaatgcatttgtaaacatacctccttctctgttagcctcatttttatttctattaataggtacagatttttagaagtcttattacttcagggctgtgacagtgaagcagcaactgcaacaacaaattcttgccctgtatgcacctgtgccttacctttcccaaacatttttaggctttttcttctgttattcaactccatattctctagtcatatgtttctaaactttaaaaaaacctagtcttagaaacactcttcttgttatggaagatgagaatttaatactcttacaccaccagatattcctggcacctctttcttaatcatttcaattagtaataaatattttggttaactgctaagccaagtagtgtactataattgcattttctttttcggacaactttttgtttttttgtttttattgtagtttacagttcgttgttacatttgcctagatttcaaggcactgtctcttctttatctcatgtagaattgtcagatccttttgtttttcatataaattctaatactgtttcctccttcccactcccaggaaaaatcccccctggaacttttctgttctgaactggttgctctctaggcaattttgtctaccctttacttcacactgttgaatggatttcatttcttcctctttgttggtttggtaaagcaatttcttagtgctatcttagaaaggatgcatgggagctaaatattttgagatcttccatgtctgggaatgcctttcatttggttttggctggatataggttgaaagtatttttaaaagatactgtcattttgtcttctggattttagtgttattgagaagttgagagttgatcttttaaggtggcttagtttgtttctgcgcatacttttataa

SEQ ID NO: 93242 - DNA, 1056 bp, Homo sapiens
ctgttgcccaggctcaagtgcagtggcacaattaaaggctcactgcaacctctgcctcttgggttcaagggattcttccacctcagcctcctgagcagctgggactacagttgtgtgccactatgcctggctaattttttgtgtttttagtatttttgtatttttagtagaaacagggtttcaccatgtgcccaggctggtctcgaacgcctgggcttacaccatctgcccacctcagcctctcaaaagtgctgggattagaggcgtgagccaccatgcccagcccaaaacttggtcttttctgtatctatttttcctcctatcctggatcttgtattactcaggtttaaaattggatacatttgctcagtgttgcatacttggtgaatatctggaatcaaacaaacacagacaagtttaaaaggtgtgagcgtttttactgtgattaattttagtatagccaaatgtaaagccacagttacagtttacctttttttctgcattgtaggaatagacttcaagatcaaaacagttgaattacaaggaaagaagatcaagctacagatatggtaagtgatgctaatttactttatgtagcagaatgtcaggttccttaaggtttcacagtgaaattcttttttgtcacaggtttagattctgtgagacttttgtttttaaagcaggcagtcaggtgacctttttgtgcagtaaaaaccattgcatggacttaagtccatgagatctaataatcttttctacttaccgtgtgaactgaggcagattatatactcattattaggctttttatcttcatatgtaaagggagatagtaacacccgtctcaatggattgttacaaggattacatgaaataatatatgcaaagtttttagtgaaatgcattgcgaaaatgtttgttttctttaatatgtttttaactttttatgggcattatttttattagtttgtgttaggtttgcctgaagaagtacaaacctttgaatttgtatttgtctgaatcatagaatttagaattataatggcaatattttccagc

SEQ ID NO: 93243 - DNA, 1043 bp, Homo sapiens
cccgaccttatttttgcttttttaaaaaagatactaaaacatgtttgtaagctgatgagatgatccataaaagagcaaaatgatgatacaaatgagagggcatagttacaggagcaaaatacatcttacacctttggctttaagcattaaataatggaaaatactactatttacatttctgtcttattatttataagtgaggttatctttacaacttttggttaatgattctaaatgtaaatatgactgtactatggtatagttctctaatgttctaaaaatcctacctgcttttgtgttacattatggaactaaattattaaataaaatgaaattttaagagtttctatggtgtttgctagtgcttattcaataaacttgagttttatgtgtcacttcctactgttttccctttcagattttcatccagtatgggtaggttattaatttccttcaactaaaaagtttttatatatacttaggaaaaactattcttgttttgtcctttatgtgaaatgtagtaatatcaaaatgcttaatagaaattattggctgtttatttcagggatacagcaggccaggagcgatttcacaccatcacaacctcctactacagaggcgcaatgggtatcatgctagtatatgacatcaccaatggtaaaagttttgaaaacatcagcaaatggcttagaaacatagatgaggtaagacctagaacttgtataaacccttcatgaacacacatttgtgtgcttggttaggaagaataaatattccaactgatcttcaggatataatgtactgttgaagtcattattattgaagtatttctattttctaaaagttaatgttggccgggcatggtggctcatgcctgtaatcccagcactttgggaggctgaggtgggaggatcacctgaggtcaggagctaaagaccagcctggccaacatggtgaaaccccatcactactaaaaattataaaaatcagctgggtgtggtgatgtgcacctgtcgtcccagctactcaagagtccaaggcag

SEQ ID NO: 93244 - DNA, 1174 bp, Homo sapiens
aaagagagattcttttgatgttagattccatatgaatttttggatagatctttctatttctgcaaaaattgtcattgggatcttaaggggacaaccacttgtttttaactgatttttctgcatggacctccttgtgccatagcagcacagctatttgagagtttaaggctctataaaatgtttaattaaggcttctatagggtagtatgcattataaaatctgaaatgatccagcctggatttagattatgcaagtttctttgcttgtatcttctcttttggtaagaaagaacatacctagaaagtagacagcctcctttagggaggaaatagtatttgacatggatatgtcttgggaattgcgtttcttttgctaggtaatctaagaatttgtgtaggcttttagtatggagtagttttagggtgactgctttaaaacttcaaagctatagaaatgaccctctaaattgagagaataaagtcacttttaaagactgttaagccgtaattcatggtagtatgtaaaagtaaaattttatttcattttagcatgccaatgaagatgtggaaagaatgttactaggaaacaagtgtgatatggacgacaaaagagttgtacctaaaggaaaaggagaacaggtaaaaatctgaattaaactgatactctgctctgtctttgtaaaggtaatgctacttttgattatttttatagtaatagtgatcgaacacactaagctaattacatagtttttaaaatgcttgttggaaataatattttatcatttgagtgaattttttttcagtgcatatttaacatgtatgggagaatcaaatgtgcccatagtatttttagccttatttaaactacaaagagagaaaaatataagtcattaatcctcggtttttaaacttaggactttaaggaaatgtatcaattagtatggttctaaaatgtgacaatcaggagcctatggtgagcagaaattagaccctgaggagtcaggttgagcttctcataagtttgcccccagtgtgaagtatctgacttagaatatctgaaataaacttttggggtaaggagattacttttcttttgtttgttttatgaaagagcttgacttgctgaaatattctgtgttatatattctagttgggaccactgccttcagaataa

SEQ ID NO: 93245 - DNA, 3488 bp, Homo sapiens
tttttatacagatgggggtcttgctgtgttgcccaacgtggttttagctcctggcctcaagtgatcctctcaccttggcctctgaaagtgctgggattacaggcgtgaggcactgtgctcagccatctatatccatttttaacatgaattagataactacattttgctccactccttttcacttaatcagttgaggttgcctttttaaaactatgatacagtaataaaattggtctaaaaaggcagataacagaaaagggcagttttatttctgtgacgttacatatacctaacactggtttcatacaacttgctccacaatgccttttaagtactaaacatattcagaggtcagggctagaagataacaaaatctatttaagagttagagctgagaagatttcagaagctttataaaggcatgccaggaaatgtctacaatatttcacagcttggaggaagcaggcaaaaagaaaatcaaaacaaagcttccaaatctttactttgcacggaggggaaacctatctcctgtgattgtagttgtattttgttgtataaattgacataagaatattcctgttgaatcgtgattttatccatggcagtgttttttcatgagttattttccttgtgtgtttgttgcagacccctgtaaaagagcccaacagtgaaaatgtagatatcagcagtggaggaggcgtgacaggctggaagagcaaatgctgctgagcattctcctgttccatcagttgccatccactaccccgttttctcttcttgctgcaaaataaaccactctgtccatttttaactctaaacagatatttttgtttctcatcttaactatccaagccacctattttatttgttctttcatctgtgactgcttgctgactttatcataattttcttcaaacaaaaaaatgtatagaaaaatcatgtctgtgagttcatttttaaatgtacttgctcagctcaactgcatttcagttgtattatagtccagttcttatcaacattaaaacctatagcaatcatttcaaatctattctgcaaattgtataagaataaagttagaattaacaattttattttgtacaacagtggaattttctgtcatggataatgtgcttgagtccctataatctatagacatgtgatagcaaaagaaacaaacaaaagccaggaaaacactcattttcgccttgaatatgtaaatgggattaattttgtcctgtgccttatgtggaaaggaacttctttggttttccttttttgttctggtggaagcatgtgcaggagacatatcatccaaacataaaccattaaaatgtttgtggtttgcttggctgtaattttcaaagtagttaattgaggacaaagggtaatgcagaagtgatagctttggtttgctgagtcttgttttaagtggccttgatatttaaaactattcctgccaccatttcttctccttggccacttcttccttgcgtctccctgcatgctgctttatttgcttctccctccccaaccacctcatggtatatttaagagtgaaagggacaaactagtaggtttgtcaagtttaatataaagcactgatgtaacttgctaggtaaacggaaagataagttctaactgcctactatccaatgtcagttaattggtgtcttcccccctcatttgctctcttccctaaaatgtgtcccagatgccttcatttgctgttttacttctatgttctgcttttcctcctctctttgttcccttcctgtctatccattgagtttatgaaatggaagagttaactgcatgcactagtgtttggagggtgttgtggtttgtctttctaattaggtgtatagcctattcactttcctagaataaatctcttaacctaaatttgagtagtctgcattttggcaactcctctagcagcttggtagcctagtacaggttgtttttttaaaaaaggaaaagcaggaaggaggagtgaattttattaacatgtttgccaaatgtattgagatttggcctctgaagaacactttttcagtgttaagtttctttaccttaagattcagaaatactttagaatattattaattttaagtcctgtctttacatccttttggaaaacttgtattaccatgggtttggaaaaaggacaacgaaaggcttttcatgtaaagataagatctttagctatctctaaccctgtccttttttcactgcattttttctagttttgcttcattgcttatcattaggatagggtaagtgaagtttgctatgctgctagcatcctaagatgatacctttgttgaaagaattgtgaatagcatgattcatttctagcagaggctgagtttaggacagcagcttccattgagaagtctttctgtgtcgtgaatagcattttaatgacctcttggctcacataagcaaacaacatagggacgtatctgctatgaaaatccacaaatttttcagatagtgccctaaaaacaattttatatgcctcactggttgttattcttaggttattcccacacttgactttatcattgtttactactagtaaaaagcagcattgccaaataatccctaattttccactaaaaatataatgaaatgatgttaagctttttgaaaagtttaggttaaacctactgttgttagattaatgtatttgttgcttccctttatctggaatgtggcattagcttttttattttaaccctctttaattcttattcaattccatgacttaaggttggagagctaaacactgggatttttggataacagactgacagttttgcataattataatcggcattgtacatagaaaggatatggctaccttttgttaaatctgcactttctaaatatcaaaaaagggaaatgaagtataaatcaatttttgtataatctgtttgaaacatgagttttatttgcttaatattagggctttgccccttttctgtaagtctcttgggatcctgtgtagaagctgttctcattaaacaccaaacagttaagtccattctctggtactagctacaaattcggtttcatattctacttaacaatttaaataaactgaaatatttctagatggtctacttctgttcatataaaaacaaaacttgatttccagctgtgtggtttggttttcatttatttatggaattggaagattacttctgaaaaaaatgtggaatcgcaaactcaaagagttgacaaaaatgggaaatcactgtcaacctatggaaaactggaaaggcaatttcaagaactgtctttgctgagaaactacattaaaaaatagaattatctctgggatcctaaagcggaatcatccttgtgccaaaataggagatgccacgatcctaatcacacctggcttacactagttggatgtgcctaaggccactacagctgaggtcacctgattcctcagggggaccaagctgggctcctca

SEQ ID NO: 93246 - DNA, 1061 bp, Homo sapiens
taagtcctgggatacatgtgcaggtttgttacataggtatacacgtgccatggtgctgtcttccattttctttgtgaccaccatacctgaacaggaggaccactcctgatgctggcatggtgctttccaagtggaaggccctcgcacgtgctccttggtctctgcccagcatctaggtgagaaccaggccacgtctggtgaaggccctcccctgctccagccttctctggcaagttcccagagagccgctggaaggacagattctccttggccccttcaccctcccagatctttattatcatttgtgagcagctgactgttgctgatgtcaaagagatactgattatcttctcggcaccaggccctgttctaggtgctcagtttcatgttaattagggcaagttactctccactttttccatgggaaagtttggttcacccaggcagcatcttctctgagggccagcaccaaccggcccacagagctccccatgcacccatcccgacttccattctgcatctgcggctctggctttcctccccttttcctcttcttctacctaaacatctctttctgttggcagctcatcagacgaagacatccagttccgcctggtgacaagatttgtgaatgaggcagtcatgtgcctgcaagaggggatcttggccacacctgcagagggagacatcggagccgtctttgggcttggcttcccgccttgtctgggaggttggtctcgcaggttgggaaggaagctcactttagcctggagcccgtgttgcgtctccttcaacgaagtcctctttctctattcagggcctttccgctttgtggatctgtatggcgcccagaagatagtggaccggctcaagaaatatgaagctgcctatggaaaacagttcaccccatgccagctgctagctgaccatgctaacagccctaacaagaagttctaccagtgagcaggcctcatgcctcgctcagtcagtgcactaaccccagctgccggcagtgctggttctccaacagagtggtgtctagatttatcagagtaacgaga

SEQ ID NO: 93247 - DNA, 1981 bp, Homo sapiens
aaataaataaaaaaaaaaaaagattacaactacagaataacataaaattatatatttgcgataagcaaatataaaccatgtggtctcagacacactttggctgcttcccctgtcataggtagagaattaccagaactcctcttttgttttgccattctagtattcatgttatttactcctcttggcaaatttaactggtttaagagtgatttagtttacgtaaattgggcatttggaggcattctatggtagaaagaatgtgtacttgggagttaacatgtctttgaatgctagcaccctcccttatcaagctatttgaccacaggtccctctaagactaaacaacttgaaagtctccctcaaaatgggagtaatagaataactacctcacagagttggtgaaaaacacaggtgtgctctggcccatggacattcaataaacgttagtttccttttcttcccatctaactaggaatgtgttttttctagattgaatgacaaagtgaagaagaaagctctaacatcatttgaaagggattccatcttcagcaacttgactgggcagcttgattaccaaggttttgaaaaggccgacatggtgattgaagctgtgtttgaggaccttagtcttaagcacagagtgctaaaggaagtagaagcggtaagcaaggggctgttgtacttgaatcctagtgtagtgaacagaaaacacagagattttttttttaaaggagctataggaaactcatgattgcttttataaaaaggactattcaaaggctgggcatggtggctcacgcctataatcccagtagtttgggaggctgaggtgggcggatcacgaggtaaggagttcgagaccagactggccgatatgatgaaaccccatctctactagaaaatacaaaaattagccgggcatggtggcacacacctgtagtcccagctatttgggaggctgaagcaggagaatcactggaacctgggaggcagaggttgcagtgagccgagatcacgccactgcactccagtctgggtgacagagcgagactccatctccaaaaaaaaaaaaaagactttttgttatcaaacgttaagtttttatgtgtgctcatgcacactgcatatgttataaaggtcaaatctaaattctaaaggaagaaaatgagggtgcgttcaccttattcatgtaggagctctgtcacccaaacatacagataacctcacagagtatagccagatgctttgagattttttggttagccgaaagccaaaaacaaacctcttcaggtctaaggctgcaaaggaaatagggaagacagttcgtccagatgcttgttctgtggaaatgctgctttggcccagctcccaaatgttctccataggcacttcttgagatgggctgacatgaacaaaacaagtacttgaagtggggagtaggaagagtaagccccgagaaggagtaatagcagtaattcagggatgaggtaggaccaaggcctaagctagtctacagttggataaacagaatgtgggttactgaaaggtgaacatgaaatgattctgacttggcaacatgctggatataatgagcagtgagctcattacaaaaaataagagtaccacagagcaaaactccgtctcaaaataaataaataaacaaacaaacaaacattatcttctcttattgcccatagagctaacaaaacccattccttggacaatcttccacaggcatgatctctagaccaccccgtttcggttgtcctctctagtatcttcctcatgtctccgtgttctactgctgtgtttacaactatcttttcacaattctgcaatctgggcagggctctgcagagacagtggtgcttaagtccattgatttcaaggctggggtcactcctgggctgcattccgcaggaagctcggttggggcacctcactgcttcccccacatctctcatagtccatcctcacttag

SEQ ID NO: 93248 - DNA, 1029 bp, Homo sapiens
gcctttcacaaaacctgtccctggcgtcaaaaaggttggggactgctggactaggagcaataggctatcccatatagcctagatgtgtagcaggctctgccatctgggtttgtgtaagtacactctgcgatgttcacacaacaacaaaatttcctaatggtacatttctcagaacatatccccctcattatgtgacacatgactatattaattaagaaaacctgtgcctggtcctaaactataagcagaatttgattaaccagaatatggagggaaaaacaattccgcatatggtatggtgtgagcaaaggcaaaagcaaagccaactaggacactgtaagtagacgtgcttgattggagagtccggggctttttaacctggggtccatataaaattgtgtgtgcatttttctcttgagagcttctctagctttcagtagattttttaggagatctacggcccaaaaagaggttagtaaattagaggaaaagtatgaaaaaaaggctaaaaaggtaaattctagaaattattaaatgccagcctaaggaatttcagtttattctgtgagcacattcctgctttataaataatctttagacccttatccatctcaagttgctactaagttacattttctaacattctaattttctttcatttgttcaaaggttgccatttcatgccaatacagaatagcaacaaaagacagaaaaacagtattaggtacccctgaagttttgctgggggccttaccaggagcaggaggcacacaaaggctgcccaaaatggtgagtctaacatcccctttgtgaagctatatgccctctttagatctgttttcttgtataaaatgcataatatgggcattcattgtagaattaaaaaaccaaataaaatatgagtgtacaggatcagtgacagactttattcctggtacttattttttcaattccacagatttttttttttttttttttttgagacaaaatcttgctctgtagcccaggctagagtgcagtggtgtgatc

SEQ ID NO: 93249 - DNA, 1100 bp, Homo sapiens
aactcaagtgatccgcccaccttggcctcccaaagtgcagggattacagggatgagccaccatgcctggcctatatgtcttatttgtatttcatttttttcttaacattatgcagattttttccatgccaataaatgtttgtagacctatttgtttatagcctacatatgattcaaactctgaggatgaccctgagtttctcctttgagaagacctatttttaaaggaaggggtgcttgtagtgggccaaagctgcctgaatagaaagctactgacttgctgggagaatgatatttcttactctcttctaacagtatatttctgccggataagtatatttcttataatcaaaatagcatttgatggtggtacgtacatccagtgcttcaaatttaaacccttacctgtatatatttccctttggcaggtaaatacactgagtaaagagctacattcagagttctcagaagttatgaatgaaatctgggctagtgatcaaatcagaagtgccgtccttatctcatcaaagccaggctgctttattgcaggtgctgatatcaagtaagttttaggaaacttgaagtcaccttttatcttggttaatagtgtgtttcttaggcctaataatttctccttttaaaagaaagtagaagtgctgggcacagtgacacaggcctgtaaaattgaaaatgtacgtatcaggctgggtgtggtggttcttgcctgtaatcccagcactttgggaggccgaggcaggtggatcacatgaggccaagagctcaagaccagcctggccaacatggtgaaaccctgtctccactaaaaatacaaaaattaggcatggtggcacacgcttgtaatctcagctactcaggaggctgtggcacgaaaatcccttgaacctgggaggcagaggttgcagtgagccgagatcacaccactgcactccagcctgggtgacagagtgagactgtcttaaaaaaaaaaagtatatacacacacacacacacacacacacacacacacacacacacagagtatatatatatatatatacacacacacacacacacacatcatgtgatctagagaaatctcac

SEQ ID NO: 93250 - DNA, 1027 bp, Homo sapiens
ccatgataaactttctttattaaggccaactgattagcaactttaatcccccctttgccgtgtaacctaacatattcacaggttctggggatgtatatccctttgtgggggccagtcttcctcttttagtatccaaataatcatctgacctaacaactgaaatggaaaaaatatggcagtagtcatatggcctagaatacattgtacagatttggggtttttgttgttgttattattgtaaattacagctttgttatatataaaaggtactacagaaattgtttcgcaaattaattttgaaatgtcttttcttacaggttatatatgccgcaattttacagggtcttctgctttgctgagtaagtttaatttctttttaatgtgtatgcttacattgctttttggatttatgttgcaataaatatgtttacaaataaatctttcttttctttttagccagaacccatattaactatggagtcaaaggggatgtggcagttgttcgaattaactctcccaattcaaaggtatctcatttaatttgcagtttttttctgctaaccgcattatgaatctagtcctgaatgggaaagatgtatcccatatttccccaaatctaccaatctggcagtaatcttacatgaatttacagttttgacagttatgttaaactttgacagattgccaagggagccagttttctaaagcagaggttcttgcgtaagaattcctcttgttgaccttaggtgccaccagcctcctggttatagtgtagaatgaggaggtgacttattagagaagaaccagagtacaagctttgtttataagactcaaaatttgcctacccatcttaaatatgaggttgttaatccattttcttcattacttgcctgacataagtcactattcatagtaagttggctgagtgaaatgtggatacttggctcttaagcttcctgagggatctgaatgactcaatgcaattcacatattggaaatcaagttctgttcgaattgaaacttcttt

SEQ ID NO: 93251 - DNA, 1052 bp, Homo sapiens
tttcttcacttaatgatacagcttaaaatggttccgaattggtgcataatcatttccttaccttttacagctgcatagtatttcacaggggtgttgtagcatggtttacttacccattttcctattttttggttattctaatttttgactattacagtaacaatatggattatgtcctgtgtgtgagtaatatccatgaagtcagttcatggaagtggaattgctggttcaaacattagtttcagttatagttttcatggataattaccaaattgccctccccatggactgtgccagttctcttggcagcagtatatgagaatatctatttgcacatactcttacctacacagagtatatatcaaacctttgaatctttgctactttgagagacaattatatctgtggttttaatttgaattcttcttatgagtgaaattgaacatcttttcatatacttaagaaccatttgtatttccttttctgtggtctgttcatattctgtgcctatttgtctgctagtgttttccttagtaatctgtaggaactcattgttagaaatttagtcttttttggaggggtgggggaaagttgttaatatattttacatattttttaacatatagggttattatatgttttacttttttattgttttgaaacaatacagtatcaaactttgaaaaagttgcaagtgcagtactacaaactttttttagtagcagttgagattaagttgctgacatgatgcttcaccatccctatttagtgtatattcccttcagatacaaacattccacaaagccttctacataatcatagtacagccttcagaatcgtgaaactaatactaatggttttattatcacgcctagcagtctctctgcttctttgaccctaaaggagaggagcacacactctagaggtagacttcctaggttcaaattccagctctgggcctggtgcggtagctcacgcctgtaatcccagcactttgggaggccaaggcgatggatcacctgaggtcaggagttcgacaccagcctggccaa

SEQ ID NO: 93252 - DNA, 1013 bp, Homo sapiens
cggtagctcacatctgtaatcccagcagtttgggaggctgaggcgggcagatcacctgaggtcaggagtttgagaccagtctggccaacatggtgaaaccccatctctacaaaaatacaaaaattagctgggcatgatggcaggtgcctgtaatcccagctactcaggaggttgaggcaggagaattgcttgaatccgggaggcagaggttgcagtgagccgagatcacgccattgcactccagcctgggtgacagagcgagactccatcttaaaaaaaaaaaaaaaaagtaaaagtcatcagactttatatattttaattagtagtttttgtttttaaactttatcttaaagctgtccagaccaaaacgaagaagacgttagccaaacccaatataaggaatgttgtggtggtggatggtgttcgcactccatttttgctgtctggcacttcgtaagtatgacatgatcatattatttttttccttcttttaagacactttcaaaagtagtctttgtaaatgtaacccagtaggtaataatattgttagtggactaatatttggatagcagtcccatgaaattaatatagaataagtcaagacagtggtgaaataatatggcaacatttgttttttatccttctcatgaataagtctagcgtagttttacttgaaacagctctattttgaaaacctagaggtccagatagcttgcttccaacagagctgtcctttccttttctggagacaagtacattgtccctgtttctcctcagaagtttgagtgctgaagatgtgggccatgggcattctgaagggcctatataatccactggtttggcctcctggaaattattaaaattggagttgatagggctggtccaaacccccagcatagcacaaccccaagtgtgtgggaccagaatggtcctagaccagctccagaattccctagatccaaattgctcttctccttggccttttgtgcttcttttctgtccccgagtgaagg

SEQ ID NO: 93253 - DNA, 1088 bp, Homo sapiens
tgtaggtgttggcttgattgcttctggccagtgtgatgtgatcgtggcaggtggtgttgagttgatgtccgatgtccctattcgtcactcaaggaaaatgagaaaactgatgcttgatctcaataaggccaaatctatgggccagcgactgtctttaatctctaaattccgatttaatttcctagcacctgaggtaaggcttgtgtttgcagggcatcccactgcagagatttagaattaggtatggcagtgtggactctgctatgctgtaataggtgtagattctgtagttacaggaaagggttaattacttgctcaagatggaaaaaaaagatagtggttagaaaactttaatttgtgagccctctttagagatcctctttagagatcctctgcttgtcttggacttgattgattaatggtagacaaatagattttaacttttccaaataacacagaacaatcctaggtgttagcataacaccggttaacagtgtacctgctccttggatatctcctttcccagctccctgcggtttctgagttctccaccagtgagaccatgggccactctgcagaccgactggccgctgcctttgctgtttctcggctggaacaggatgaatatgcactgcgctctcacagtctagccaagaaggcacaggatgaaggactcctttctgatgtggtacccttcaaagtaccaggtgaaatgaaatgcttcatgacacttattagggagttctgaattgctcctaaaactcaaaaacatcccgagtgatttttccataagtatgttggttctgtttccaaagtattcagcctttattcttaaatatggatgcaaattttgatttatgttgtaacaataggttaacattttttaatgtttctataagagtgtccttttaagatctgagcactaatctcagcactttgggaggctgaggcaggaggatcgcttgaggccaggagttcaagaccagcctggtcaacagcgtgagacttcatctctaattaaaaaaaaaaaaaagaaaaacagagtctccttttagatcttgctgatatattttagttcttacatacat

SEQ ID NO: 93254 - DNA, 1122 bp, Homo sapiens
aaaatttgataatatgataattataaaacactttccttctagtgaataggtaaggtttatatttcatttgtttttgtaatttttaaagcatatttctgtggagaagatatataaggcttgtggttccatagagttaaaaaaattcatttttttaataggaaaagatacagttaccaaagataatggcatccgtccttcctcactggagcagatggccaaactaaaacctgcattcatcaagccctacggcacagtgacagctgcaaattcttctttcttggtaactgtcaatgttatttgtatttagtagtgacttttctatttctgtactctctgtagaaaagcctaatataactttttgtgtgtgttatgaatagagggttaaaaatatagttattcattttaatgtgaaagtggagtcattaaaaaaaaaatagaatcacggttttaaggcccgagaagtcacctaatccagccaccattctgccacaaaagctcttcctttcaggcacttaaccagtcaaaaacttctattgcttatggtgggccctggaaatgaaaagaatagacaattgcaatatagtgagatgctgtgatggctgtaaggcttaggtcgaacccctgacccagatggggggacagtcagagagtcttcttggaagaggtaacacttgagcagcaaatcttgaaggaagagtaaaagccaactcaggaaggattttaaaaggcatttcaggccgggtgcggtggctcacgcctgtaatcccagcactttgggaggttgaggcaggcagatcacctgaggtcaggagttcgagaccagcctgagcaacatggagaaaccccgtctctactaaaaatacaaaattagccagatgtggtggcacatgcctgttaatcccggctactcgggaggctgaggcaagagaattgcttgaaccctggaggcgtggaggttgcggtgagccaagatcgcaccattgcactccagcctgcacaagagcgaaactcccatctcaaaaaaaaaaaaaaaaaaaaaaaaaaaaggcattttggacaaagggaatagcaaatgcaaaatcaaggaagtatgagagcaaggggttctttggggaaaagtta

SEQ ID NO: 93255 - DNA, 1139 bp, Homo sapiens
tgtttattatgagcagttctttctttttttttttttttttttttgagacagagtctggctttgtcacccaggctggaatgcagtggcacgatctcagctcactgcaacctccgcctcccaggttcaagcaattctcctgcctcagcctcagcctcccaagtagctgggactacaggtgtgtgccaccacacctggctaagtttttctatttttagtagagatggggtttcaccgcgttagccaggatggtctcaatcacctgcctcatgatctgcccgcctcagcctcccaaagtgctgggattacaggcatacaggcatgagccaccacgcttggccatgagcatttatttctaaagttacctcttctgttgattcattttgattattatgatacttttgaacagccttctctaccctcatcctccaaaaatgagtcagcgtgtgtatgtttgaattatgatttaatgatggatacagtgaagtaagtgttgttatatagaatcactgtataagtctaatgagttaatagattcaggtacagatatataagatggctggagaaagacctccagacaggctgaagaattttaacattgtgctggttaacatttcagactgatggtgcatctgcaatgttaatcatggcggaggaaaaggctctggccatgggttataagccgaaggcatatttgaggtaaagtaaatgttcaaacaaatcatctctgatttctttattttattaccaaagctcacctctctatttttttacctagggattttatgtatgtgtctcaggatccaaaagatcaactattacttgggtaggtagcagtttgtatccttggactataatcacaagtatttgattgcctatgttttattatactggttaataaatgattaacactggtttattatttatttgtttattacactggtttgagagtatattaagccctgagttcataattggtttatgtggtggtttttttaaaaaaaataatagtaatctggccgggcacggtggctcacgcctgtaatcccagcactttgggaggccgaggtgggcagaccacgaggtcaggagattgagaccatcctggctaacacggtgaagccctatctctactaaaaata

SEQ ID NO: 93256 - DNA, 1004 bp, Homo sapiens
ttgaggtcaggagttcgagaccagcctggccaacatggtgaaaccttgtctctactaaaattataaaaactagcctagtgtggtggtgtgcgcctgtaattccagctactcaggaggctgaggcaggggaatcgcttgaacccgggaggtggaggttgcagtgagccgagatggcgccattgcactccagcctggtgacagagagagactctgtctcaaaaataaagtaaatgaaataaatcttacgtttaaaagccctttttcatggattttcctcagagactttgcagaaaccaaggggtcagttatttatcagttggaacattttggactttatgatcacaaatgctttttaatctgtgtaacttcatctacagaaaaccatggtccattaagactagagcgatccctctatctcttcatgccaggcttctaccagggagataacctgtacacattactcacgagcatagtgcgtaatccacatagggtaatgtctgcagatttgagtatgtgttccctaattctttatctagcatgtagagtataaataacacaatactggatgcttttatggatgaacaaggaataatacctagcacctttcttctagaagtttatagtatgaagagagaagataagatgcatctgagaaactagattaaacttgacattgtttgatcaagagccacgtgagcaataccaacatggttggagacagaggagaaatccatcgtggtgaatctagagcagggtttctcaactttggcactaacattttgggccaaacaattctttgttttggggggctgtgtgttgtagggtgtttagcatggcctctacccatcggatagcagtagcaacaagctcctccccacctctgccccaggtacacacggttggtataaccaaaagtatctccaggtgttgccaaatctgatctagagcaagaaaaaacatggaacatgaaaacagtgtgtttaaaataaagccagagagggctg

SEQ ID NO: 93257 - DNA, 1024 bp, Homo sapiens
tcaaaaagcaaataaagaaattaaaataaataaaaaataaaataagcaagccagagaggagtagtctaccttattatgaattctttcaggacaacccccaagtcagtcaaaccttcctatccctgctctttttttgtctgcttgtgccttttcaatgtacttaacatgccaggtgtggtagctcatgcctgtaatcctagcactttgggaggctgaggtgggcagattgcttgagctcaggagttcgagaccatcctggacaacatggcaaaaccccatctctactaaaaatacaaaaactagctgggcgtggtggtgggtgcctgtagtcccagctactcgggaggctgaggtggaagtatcacctgagcccgggaggttgaggctgcagtgagccgtgttcaggccactgcactccagcctgggtgacagagggaggccctgtttcaaaaaaaacagaaaaaccaagtacttaacagtttgttttgaactccagtgtatacttgattgaggacaaagaccatgtggcaaatctttaaacctgcagtgttcaacttggcactttgtaaataatagtttcttttatttacttttttgttttttagagggtgtctaaaaattctatgctaggatttagactcatctaaactaaggacatagctagtacatagcactgtgcatagtgctggataaaagatattctacttctggccgggcacagtggctcatgcctgtaatccagcactttgggaggccgaggcaggcagatcacgaggtcaggatatcgagaccatcctggctaacacggtgaaaccccatctctactaaaaatacaaaaaattagccggacgtggtggcgggcgcctgtagtcccagctactcgggaggctgaggcaggagaatggcgtgaacccgggaggcggagcttgcagtgagctgagatcgcgtcactgtactccagcctgggcaacggcgaggcacggtctccaaaataataaataaaaaaaataaaaaaagaaagata

SEQ ID NO: 93258 - DNA, 1072 bp, Homo sapiens
aatgtgaaaaggaattttcagagaaaccaagtcaaggactggtggtggtgaaacttcttgctttcttggaaagcaagataaggtgctatgctttctgctctctgacatttccaccgtctcccagccatctagcaatggctaccctagaaaaacctgtttcctaccctttggtgtgggctgggtatagaaagaggaggcttctctccagcactttgccaggaggccctttgccacaccgtcctcaatccaccctgcttacgctgcccctgagaaagcctagttctcacctggcagtgtcgcttcctcctttgctgtgttccaagatgcagccttcatttgtggcctaggaaggggtgggaaggcccaattgcagggcagttattagtattgtcaactctcccttgaagaggttgtatctgttttactttctcacatgcactcctgcctgtgctgcaggaatcctagaaattttgctctcagctacagtaactcccatgagtactgatcccacacttttccttcaaatgctaactggaggcagatttttagatggagaaaccagagaaaagagagtcagcaggagtccaggtgataatcaggaacccaggaccctgatcctgactgctctgaccaggctgctcattccactggtggggagctggaaccggaaaactgttcattctaaaaaacaaccccaatcttctctcagcttctggctgtgcccatgtcctctgaggagggccatggaatgccttctgacatgctcttggatgcacagctgaggatctgaaggcagcaactcaccagggagatggtggagctgggggcttgggcgcggcagaagcgtttgcgcaaagcttcttgtatctgcgggagaggtaaatgctctgcttatgccagccacggccccggcctgcgggctgcaagtgaggcagggggttaggtgggcagacttaccttcctgtccatgaggcaaccaaacaataggatgaagacgccctgagaagagggacatggggataagctggtcaaggaggaagggatccacccgaatcaacatgctccttctgtc

SEQ ID NO: 93259 - DNA, 1067 bp, Homo sapiens
agtgtctaggattacaggcacgcaccaccacacccggctaatttttgtatttttagtagagacaggtttcgccatgttggccagggtggtcttgaacttcggacctcaggtgatccgcctgccttggcctcccaaagtgctgggattacaggcatgagccactacacctggcctgttcacccttgtgattgcattactgactaggagctgtggctcgctgtgctgcccagaattttgagagaatatcatagcactttctaccgaatgcgtgttgcctttgcaccatcgtaaagttgaaaaattacgagtgaaactgtcataaatcagactgtactaccaggttaagaggggagaaaggcattatggaacaagagagcaatggagtgtaaagtgatgaaggcctcggtattttctgggaaccacaagaagttagataaggtctttagacataatggtggagtggcaggagatgagactggagagggaggtggggtgctgtcagaggggaatgatttgatgtaaaggacttctggatttgatcctgtagatcactgtgtggttcaaggactgttggcatcagaatcacttcgggagggtctttagcaaattcctggctctctttgggagatacagattggatagattgcggttatttccatctttaacaaatacctcaggccaggtgcagtgccttaggccttaattccagcactttgggaggccaaagcaagtggattgcttgagcccagtagtttgagaccagctgggacaatatggtgaaacccagtttcaccaaaaatacaaaaattagccgggtgttatggcgcatacctgtgtcccagctactctggaggctgaggtgggaggattgctgaagcctgggaagtcaaggctgcagtgagctgagatcacgccactgcactctggtctaggtgacagagtgagaccctgtctcagagaagaaaaaaaagccaaatatcttaagtggttcttaggcacattatagtgctataggttttggggagccactgtttaaaattgaaatctagacaggatcacatttcaat

SEQ ID NO: 93260 - DNA, 1022 bp, Homo sapiens
cctgtgatccttgatttgaagatacaagattggcagaacatggtgactgactagctggaggtggtgtagagggccacataaaagacggggaggagtctaggatgactcaggttctggtaggatgactgggtggatagaagtggtagtcactgaggcagggttttatgaaacagcatactgttttatatatataattttttaaaaaaatacaatagtgttttgcacaggtcacttctcttggatgggaccacatgaaagtgtggcttatggacttggaattaaaacaaagaaaacttgtaaagaaatctcatttgtgaatgagttgtcctctattagaggacatttctgtaaaaatttcaaagatacgaacacttttccttttagagcctcaatagaacatgagaaattcttgatattttgattttcatttattatgactacaagctgactacaatacaatatgttaattatggcattgcctggatccattacagttaattgaagcataacttatctttaattgtacctttgtcaccttgactagatttggggaactgccctctgttccctgtaagtacattaataaggcttgaaatgtattctagttgtcttagatagtgatttatatatgtctggcagaaagaattatttctgcagttggcagagacaagaaggatgggtggaaaactgcagaaggggagagatttagtggtaagaagatggctactacatttttaggtgctatttggaggaaacatcttgaattggatcttttactgccttctgaaataacagttcactgatgatggcttgtttctctaactgctgtagtgcttaaatattaagaaattctttgctaaataagagtttgcctactgcatacgggaaactcggggaaaggtgtgccattcaaagacacccgtgggaaccaaggcacagagactggaaagaccctggtatgttagaagcacaaggaagtggcgggtgtgtaagtgaccaggccgagccttgggagctcagtg

SEQ ID NO: 93261 - DNA, 1111 bp, Homo sapiens
tttgagatactaattatggcaatgggactgaattggagatagcacttcttcatcattgccataaagaaacttaattgtgtgggggtgtgggaggctattttgatttttttttttaacatatcgtagaatcttaaaattgagagaaatttcttttattcaaactgttgcccagtgggagaatgccttctatagcatccttattcagttatcttccagcctcttctgacacacactctgaggttacatgggtttttgggcagggccaggggtccagttgggcccctaagcattgagaacttctgaacttagataatgtaagtgtgttggttcaggtacttgaatgcttttcaaatgttggaaagactagttttggaagtgctttgctaatgaaatttttctttttttctctcttatttttttaaattgacgtccagtgtcagctgattgtttgccaaatgagtagtacccggtgtccaactttgaattggttgctggttcctctcttcttggttgtcttagtggtaaacctaggagtagcctcttacgttgagagcattctcctgtatacattaacaactgcttttactctggcccacatccattatggagtacgagtggtgagtaatctacagcaaaatgggttcaatttggggcttataaatggcaccaataaatgcctccgagtagaaaggaggcaatggaaaattttaaaaagaaagttgcttattatagtagctgtaagggttttgggatattctctaaattttggataatatccagatgtttaatttcagatattgtttctctaatgagtatgttactgtaataacaaatgattttaaagctggataattattgtgaggaattagttattactgtaagtgggtatgtataagccatcttcttggtgagtagaattgtaaactgagcctttagttatatgggatcagataatcacatttgttaattatctatttcttcacttgcttctttagctttaggggcatttttattgttcattaacaaaatttggaaagaaatgtaattggttgtgtagtgctttttccctcccactgcccagtttgctaagcagttgtggtgagggagatta

SEQ ID NO: 93262 - DNA, 2425 bp, Homo sapiens
aggcctctccaaattcatagatctagttttgtactatttcatcgggattaggaatgattacttagaaatgtttagcaagctgaatatagagtctaactataaatatgattacttgatctagatgctacaggtcaactaatcctatagtttttcagatttggatgtgaatttgagtgctctggagggttctcaagactagattttagttctaagtcctaactttcccatgttagttctagtacttccatttagctgtctagttctatagctatcctaatccagaaaaaccttttcagtatttctcatgatttttgccgtgtcaataaattgttatctctagggggtaaattctgtgtgcttttaaaaaacaataaggtacatatttgtcactgtctcatgttctgatttttcataggtaaagcagctgagcagccattttcagatttaccccttctcattgaggaaaccaaactcagattgactaggaatggaagaaaagaatattggcctgtaataatctttctttgggcacaaagaagtactgtaaataaatgcttgtaaatatttcctccatcaccattgaactagactgatctgcttgacagacgtgggatctcagtatggtacttggacagcaggaatgatacatataatctgaacttgggaaattttggacctactaactctaagcctattttattttttataaaactatgtgacattttggttgagcagaatgtacgttagaccagcaaaatgttcctaatggttctaacttcgtgagtttacaatgttgtgattcatgcagggttaaagatgctttgtttttattttttaagtaccaaaattggtttcagaacactgataacactcagaaaaccacagtgtgttttcatatttggaactttgtaatagcgggagtagcagtagtccaaacctagtatagggaaaggataaaaataagtcaccttcaccaagagatgccaatgattaccaaacaacagacagttgccaaatactggtttctctttcccctgaaaatggcttttgttctcaaatgataagagagctaatacatttagctaatattctagctctctttattatggaacagatcttgatagatggtttaattttctcctaaagagaaataatcagttgagaatttgagaatgggttgtaattatcgctcacccattgggatggttcattgtttaaatatggcattttccccccttcagctgcaggttcctgagatttggtgcctgtgagctctgattgtaggaatgcatgtgacagtcccagtcctatggtaatgacttaggaggaatgcagataaaagtaccttgtaagataaatataaattggagttaggaatttcatgaacctcactatgaccaaaattaattttttgattcagtttgtctgtctgtctgtccttcccctctcttcttttttcagggtgaggtgctgtgtttcttatttcatacgagataaaacagagagaagttctctcttctccagcttgtccatttccccacttgaagaaaacttttgatatatatgccttactgagtacatgccccctttaatgttaacatgacttggagtaatttctgaggtttactgacaaacataaaaatccctttaattgtagtgtagttgttctataaaccatattttttcatgatgtggatattttcttctatttctttgtcttcatttaatttggtggtggtgaactttacttgctgattttcttttatttttcactgaatgaagtttgtgcttgaatgaagagtgtatcttaaaccccctttttttggacaggctgcacttggataaaataggcaccactgtgttgatatgtaattaaattcataactatttatgaatgtgaccattgttaaatttaattatagtgtatttctttcttgaatttcagtctgctgctttgtaaaaaataactgtaattgatatttcatttttaaaatttataaattccaatcattgtcattcaagttattagaaatgagtcacggcactaactcatggttctatactcattttaagaaattgtaaaggttgaggtgtatttggtgactttctctgagacacagatgaacgttggaaatagatgagaaatggatgcagaataatgcagatagtgatcccatgtttgttaattgccatcatggaagtcagagaattaaccaattaagtgacggtaactattttttgtataccttgttctttgtgatctataaaattaaactggataaaatgttaattgggggtagggaaaaagctttgttttaagatttctaagctaattattttaccgttttgttgaccttgtacacaagaatgagattaatctgtattatataagaaaagaactgataaatatttataaaatgacaaa

SEQ ID NO: 93263 - DNA, 1050 bp, Homo sapiens
ctcttctgaaaccactttctctttgtacagatgattattattattattattattattattattattattattattattattgagacaggatcttgctccatctcccaggctggtgtgcagtggtgcaatcatggctcactgtagccttgaccttctgggctcaagcgatcctcccacctcagcctcccaagtagctgggaccacaggcgtgcaccaccacatctggctaatttttatatttttttgtagagacagagttttgccatactacccgggctggtctcctgagctgaagcacctgcctcagcctcccaaagtgctgagattataggtgtgagccactgtgcgcagccctctttgtacagtttcatgtcctaacattgacagattctggtgagaggagtctagagagagtgtttggcaccttctgctcctgacacagtttgtggccagacttttacatgctcttttctaggagttaaaaacaaaggatgaccagtatgtgaaggatttgaagaaacagtcagatgacatctgcctgcttctggagcggatggaagaacaggtgaagaatgtgatgaaaacctttcgtgaggagctctataacattgaggtaacagggtgtgaaaagacctggtttctgctcttggagggcccctgggaggaggtctaggtctgtcctaataatctaaggagggccctacatgacttctctgtccgctgatttctgtttctgctctcaggttttattaatttatttactcattcattcatatgacaagtacatatcaagtgtctactatatgctgggcactgttccaggggcctgggggtgcagctgtgaacaaaacaaagttcctggtggaaactgtatgctagtaggaagcagctagacaataaacaagttactaaatatattattttacaggtggtaataagtgttttgaaggaaaataagacgagcaagaggttggggaataaaaaagggggattagcactccataagcataaagcctgtgtgaggcatttacttgtttctttaaggcaatt

SEQ ID NO: 93264 - DNA, 1028 bp, Homo sapiens
catgcttgttaccggctccatcaacacgctctcggcaaagtgagtctgggccctgccgggcgtgcgggccctggcgaccccggcgctcgttctacgccttcccccttcttggccctgccctcctggcttcccctgctttcccacttgctccggtcagttcgcgcgcgttatgaccacccaagggatgcgaggcccggggaaatgcggagcggggctgcgccccggacggggggatccgagccccggctttgatttgctgtacagcctccgctcctgtttccacgtcttttaacaggagggttggccgattcctttccacggcccttccagtgctggcgtccaagcctgagcacctccctccacgagctgggagagacccctggacttgtgcacatgagccgcagtagtggctgtgcaggccgagtgacccagtgagcgtggaggcctcaagcggcagacagggaggtgccccacggcccctcaaggatgaggggttagagctgtgctttgaagcttaggtgggatttcggaatgtgtctgagactgtaagtcaaggaaagtctacggaaaggccagatcaaagtcgattgtaaccagcatcaaatgcccaggttagattttctctcataatcagaaaagtgcttttgagctggggaatgacatgttgaaagtgatatgattgactcaatgacatgaggagtggtttggtgcaggaaaaaccactccaaggctgctgcatagcagatgaggggaactaggaggtggcagtgagaagagaaaggaagggacaactggtggcagagaccaggtgtgaatggccacaggcctgacccacatgagcaagaaacaaggatcactccagggtttctgcctgggagaagaaaagtgccattaactcagacagagagggcaagtggccagttcagctctgatgtatgggggtgagaggggggacagttcccaggaggttagggactaaggacccaggcagtcatgagactgagggacagggcctagcctcccctctg

SEQ ID NO: 93265 - DNA, 1002 bp, Homo sapiens
aatccgatcactttgggagattgatacgggtggatcacttgaggtcaggagttcgagaccatcctggccaacatggtgaaactccgtctctacaaaaaatataaaaattagctgggcatggtggtgggtgcccgtaatcccagctacttgggaggttaaggcaggagaatcacttgaacctggaaagcagaggttgcagtgagccaagatcgcgctgctacactccagcctgggtgacagagggaggctccgtttcaaaaaaaaaaacaagaacaaaaacaaaagacaacaaacaacaaacgttgtgaagaactgacagcaaagtgctgcccaccttaggggtcactgctgtcatccccaggcaaactggggctggatttttgttctagcctgtgaggctggggtcttttctgattctgcgccaggagtcgaaacctgtctccaatccaggatgagaagcctggctttctgccccaaggtacctgcaggcctgagcatctcaggctgggcaaggcagcccatgctgctgacacccaatcccttgggctgtcagcctgccccaggccctcagatacaaagagataccatttccccagccgggagcgctgccagccaggcctgtctaggcagacctacccgtggagaaagcgaagacaacccctgtgggaggtggggagctcagcaccagccctacagtcagctccccaagaagcgccccagccttggggaaggacaggccccgaggggtttcccctatggaccaacttgttctaccagcagggggccctcagactcaggtgggaagtaggactcatggaaatgtggcctcagcttccatacctgccccctacagacaaaaataataataaaataaataataatccttgcctgaagcttctgatcaaccttcatggcctggcaatagctcccttgtccctcctagaggaaacttggctcctggcctggggattcccatctctctgacttcacttgctctgggca

SEQ ID NO: 93266 - DNA, 1677 bp, Homo sapiens
gtaccaccacgcccggctaatttttgtatttttagtagagacggggtttcaccatgttggccaggcggtctcgaactccagacgtcaagtgatccacccacctcagcctcccaaagtgtcgggattacaggcgtgagccactgcgcccagctatatagaaatgctttctactacattgttataagtgggtctgactactgtaatgttcatgagtgatgagtgtaaatgatacctcacgatatatacaatgactgtaatgtgatcatgagagtatctgtgatttctgtgcattacagaggcacagacacagtgacttgaggaaatgccaagttaaaactccttgaggtgaagactgacccctttgagagggagccccactctggggccgggtcacccaggtctgggcctcttgacattgagaggtgtgagcctcttcactagcaccagggtaggatgctgacagggtctgaccttccctctctctcctacagatgggcggacaatttcatggccgagggctgtggagggagcaaggagcacagcttccagcatcccttcctccaggtatctggccctgtccctcctacctcctgtctcccgggcctcagaccaggcgccacccccggccatgaggccaggctgtttcctgacttaggagtggaggtgtctcctgctcccagaagagccatccacttctctctttccctccccagagcagaatccaaggtttagaatagggcaaagagcaccatcctctgcgaaagtcctggcaagtggtcatgtcctcaccacatccaagtcaggacacgtggaaaacatcagccctagtgacaaaagtcagctctctatccactgggagcccagaccccaattgggacagggcagacaccataaatggaagacactgttcgttgaactgagaatcaggagactcaaatgtcagccccagctctaccagcaacttgctttgtggccttacataagtctttgagcctctcttgggtctaggcttctccacctgcgatttgactaggggttggcctagatggatggttttcagacagggctctgcacagccttagggttcatcaggatgtatgggggctttggggcagacctaggaggctgtctctagcctccatggcagctctgcatttgtctattttacatattggggttctgggtaagctcttgtttgacaaaagtttgcattaaaaaaaatagttaaagatgatccccgagatcccttccagctctgaagtcctcgggttttcatccctgcaggcagtgggcatgttcctgggagaattctcctgcctggctgccttctacctcctccgatgcagagctgcagggcaatcagactccagcgtagacccccagcagcccttcaaccctcttcttttcctgcccccagcgctctgtgacatgacagggaccagcctcatgtatgtgggtgagtaaccaggccaggctgagaagggctcaggggaagctgtggctgaaggggctactggtgaaacagccctatcccacccacctccacttcatcccaccattcccccagacttcacacgcacaggcacacaggcaggactgatcgagcgcttactatgagcttggcatgtctatcaccaaagaccccttagtgacagatggccttcgccttgggaagct

SEQ ID NO: 93267 - DNA, 2262 bp, Homo sapiens
tagaaagctgtgtttttccaaacttgtgaaaataatgtagtcagttgcagctggcagttctttttttaaatgaatagaatttttaaatatcagagcattgtatactgtaagggtaatgtttttatgagtgtgtgtgtgtgtgtgtgtccatgaacctgtgcacacgtgtactgggtcacaatataaaatgtatttcttactcttgatccagtcaaaaaaaccctgagtaaaagtggagaagggacagctagaacccatctaataggccacaagctcctgatgagagactgagggacgtgaaaggagggagctggcatgaggaccactgggagggaatgacccgagatcagaggaggctaagccggtgggctgtgctgggggtctgggggaaggtggagagtgtaactgtttcctctactccccaggcctctttggctttgtgatcctctccctgctgctggtgcccatgtactacatccccgccggctccttcagcggaaaccctcgtgggacactggaggatgcattggacgccttctgccaggtgggccagcagccgctcattgccgtggcactgctgggcaacatcagcagcattgccttcttcaacttcgcaggcatcagcgtcaccaaggaactgagcgccaccacccgcatggtgttggacagcttgcgcaccgttgtcatctgggcactgagcctggcactgggctgggaggccttccatgcactgcagatccttggcttcctcatactccttataggcactgccctctacaatgggctacaccgtccgctgctgggccgcctgtccaggggccggcccctggcagaggagagcgagcaggagagactgctgggtggcacccgcactcccatcaatgatgccagctgaggttccctggaggcttctactgccacccgggtgctccttctccctgagactgaggccacacaggctggtgggccccgaatgccctatccccaaggcctcaccctgtcccctccctgcagaacccccagggcagctgctgccacagaagataacaacacccaagtcctctttttctcactaccacctgcagggtggtgttacccagcccccacaagcctgagtgcagtggcagacctcagctctctggacccctcctacagcactagagctaaatcatgaagttgaattgtaggaatttaccaccgtagtgtatctgaatcataaactagattatcatagttatctagtttatgagtcataagctagatttgattcttcaaagaagaaaagtcagtgagcaaatttaaaccagaactaagcattatattttctttttttttttttgagacagagtctcgctctgtcgcccaggctggagtgcagtggcacgatctcggcggctcactacaacctctgcctcccaggttcaaatgattctcctgcctcagcctcccgagtagctgggattacaggtgcataacacacctgggtaacttttatagagatggggtttcaccatgttggccaggctggtctcaaactcctgacctcaggtgatctgcctgcctcggcctcccaaagtgctgggattacaggcgtgagacaccacacccagccataactaagcattatgttttctaaaacttctaagatcctccctaaacccgtctggagacatgggttttagcccagactctgcctcaaactcattgtagctcccagcacattacccagttgctctgggccttggtgttatgctctgggaagtagatgttgatgctgtggccttagtgccttctggccccagcattccatgggcctgtgatcttgaccaacctgagaaaacagtaacagcccatccactggaaatacccctctgcccacagcaccacccttctgtgctgttttttttgttgtttgtttgtttcttctttttgagacagagtcttgctctgttgccacgctggagtgcagtggtgtgatctcggctcactgcaacctcccgctcccaggttcaagcaagtcccctgagtagctgggactacaggcgtgtgccaccacatccggctaattttttgcattctttaatagagacggggttttgccatgttggccaggatggtctcaatctcctgacctcatgatccacctgcctcagcctcccaaagtgctggggttacaggcatgagccaccacgcccagccttttttttttttttttttttttcttgagagacagggtcttgctctgtcacccaggcacagctt

SEQ ID NO: 93268 - DNA, 1018 bp, Homo sapiens
gcggcgcgggcccatgacacgccgcagagggtgctggcgcccggtcccacggctcctgctcgggctgccgggtccgggagcgaaaggctggcttctggggagcccagagaacgctgtgccgcgagcctcacatgagccggtgcttggcagaagtccgcgccgctcgcgttcaaatcgctcgctccgcccacttcacggccggcgttttttaaaacccgaatccagcgactcccagtggctgactctggaacgccccttacgtagagcgactgcaggtagggccaatgagagtatgcaccgagacacaaatatagcggcgatgataggaggacaggggagactgatggtaaaatcaaccaatagacaactaaagagatggggcgggaaattctcctgccccctgcttgccaatctggttgctggtctttgcgggaccgtactgacgtcctcaggtgccctccagtcaaaacaccgaagctcagtttggaacgtggatggtgtgtttgtagaacgtgctttctagaaaagtcgctttcctcaaacattttatgctttgccttagcaacgcagagatggcttttaaagatgaggaaacagacccatagagaatgtgacaaccccgtgtcgtatctgcgactctcccaggaactatccacagatatactcagaatccagttcaactgcataaactttgctgacgcttggggtcgcggggacggcgggatcggcggggctttgagaataaggtccgggcagggcaggcctcggcactatagcaacgcaatcgtcccaaaaaaatgctctcttccctttgttggggataataaaaattcaagtcatgtcccggtatgtagaataaggggaattttaattttctaaattttatttcttgcattttctaaatgttctacagtgaacatgtaatcaggaaaaatgttataaaattagtgatttcatggaacccttgtgcattgctggtgggagtgtaaaatgctgcggctgctgtgaaaaatagtat

SEQ ID NO: 93269 - DNA, 1058 bp, Homo sapiens
tttaaaagccatctctgcgttgctaaggcaaagcataaaatgtttgaggaaagcgacttttctagaaagcacgttctacaaacacaccatccacgttccaaactgagcttcggtgttttgactggagggcacctgaggacgtcagtacggtcccgcaaagaccagcaaccagattggcaagcagggggcaggagaatttcccgccccatctctttagttgtctattggttgattttaccatcagtctcccctgtcctcctatcatcgccgctatatttgtgtctcggtgcatactctcattggccctacctgcagtcgctctacgtaaggggcgttccagagtcagccactgggagtcgctggattcgggttttaaaaaacgccggccgtgaagtgggcggagcgagcgatttgaacgcgagcggcgcggacttctgccaagcaccggctcatgtgaggctcgcggcacagcgttctctgggctccccagaagccagcctttcgctcccggacccggcagcccgagcaggagccgtgggaccgggcgccagcaccctctgcggcgtgtcatgggcccgcgccgccggagccgaaagcccgaggccccgaggaggcgcagcccgagcccgaccccgacccccggcccctcccggcggggcccctccttaggtaaccggccgcggccccatctcgaagaggagaaaaccgaggctcgcaggcggagcccggatctcccgagtcccgatcccgtggcacttccctgttgggggacaacgcggttccgccgtccggcatccgctccgggcacgggcggtgccagccctgcgaggggctggagcaggcggttccgaaagcgggaagggaccggcttagccacttggctcctaacgccgtcttcttgttaggactagtggttacccagcgcccaccgcccaccgccaaccaggcattgcctcccactgttcgtgcgttatctcagcttcatattgtgcccattttacagctaatgagaaagccgaggcacaggccagagagcttgagcagagtcacacaacttg

SEQ ID NO: 93270 - DNA, 1221 bp, Homo sapiens
ttatccgtcaacatgttatttttgtattttgtttgttcaacttatcagatgttcactcatcttgatccttggttgtaattatggagcaactgtgctgttttttctttaactttattttcactaacttattttctaatatttcttttgttctatcttgttttggtttactttaataactctgtaatacttaatttgactgcttggctcagataccttttagtgttcttgttttctaataggaacactttaaggctatgcattttcctctagtactattttggctgtatctcataagttttgggatatgggctttttattgttattcatttccaaatagtctaatttcaattaagtttcctcttcaacacaggttagttagaagaaactggtttttgattcatgagtttttaatttccaattagagaatttggcttttttgattcctacttttgggaatgtttttaaaattattttcttttttgttcttgttggaaccaggatttgagccaaaggctctgtctccacagcccaggtgcctgacactgacactgagttaggccacaccttacacaggtctcagcttggccactaatgagggctggccaaccatcttcacctcgctgggcctcaggatgatcaagacaagggaattgtactagtctctcagattctttccagctgtaaaaaacaaaccaacaaaaaatctaaaaccaaaataactgagcttccaatctaggtgggaaagatctaagacttgtacaaagtcctgcaaagcccagaggagggcggtcacccatctgtttggaaggatcaggattcgggaaagacttcatggaagagttagcatttaaaatcaactgcagaggatcattcactcattcatttaacaaatgtttatttagcacctatctgctattttctaattgctgaagatagcagcaaaattactatatatcaggttggtgcaaaagtattgtggtttttgccataactgcaatgacttttgcagcaacctaataaaacagacaaaaatccctgctctgtggagggtaggcacatagatatagtctagcaatttgacagcttacctgactcagccaagctgcgaggcaccacctattttccactgaacttacctttcttttgctcaggcgcttcctcccatcaacacagtcggcggagacaaggttggctaaaggagatccgaaagcttcagaagag

SEQ ID NO: 93271 - DNA, 1030 bp, Homo sapiens
agtttttgactgtataaataggaactctctcgtttgtccaccttagatcccttttcctatcctgggagattgcctctcatcacccaattactggtgatttccccatcaccagtaagagatccgccagttcctaagctcccaggagtcaacacctgctcctaattgggtcctaagattaagagccaggaaaaaataatggaaaggaagattcactggaactcatggagagcatcattgtcccttgaatctctcttctgttactccctactcctactcctccccttccccactccttcacaggcaagagaaatatgtgttaaattcactcgtggtgtggacttcaattggcaagcccaggccctattggccctacaagaggtaagaaggcaccaaggcacaattgggtgagggctgagtgggagaaagaggcagcctagaattctccagtgctgactggagtgtcacatgctgaatctgacctctggaaaagaacaatgaggtaacctctgagggtttggaggctggattctgcgtggtgatagcagaattccctggcaaagttcagtctcattctgtgaatagtttcctacaatcctttgagccctcagagattaagtttagcaggtttccaaaaaaaagcagcccgtggcccttcatctgtgtccgtctttttctctttctgtctccaggcagcagaagcatttctagttcatctctttgaggacgcctatctcctcaccttacatgcaggccgagttactctcttcccaaaggatgtgcaactggcccggaggatccggggccttgaggagggactcggctgagctcctgcacccagtgtttctgtcagtctttcctgctcagccagggggtaagctcatcctctttcacaggactggggctggaatttctcaagtaatttcctttctccatccatagtcccttgtcacctcgccttccctttgttctctagtaaaggttgatctagttttgactgcctgggacaatgtggtttgtgcccttttgtgca

SEQ ID NO: 93272 - DNA, 1071 bp, Homo sapiens
gttgccatcgtggctcactgcaactcctgccttggcctcccaaagtgttgagattacaagaatcagatgacctcattttgattaagagaaaactttctaataaactttctaataaaagagaacactttctaataaaaactttctcttttttgattaagagaaagttttcttacttttgaaaatggcttgttagtaagtgtgcttccttaatttcagggatgataccggggactctccagagccatgactagatccaatggattctgcgatgctgtctggactttgctgtctctgaacagtatgtgtgtgttgctttaaatatttttcttttttttgagaaggagaagactgcatgactttcctctgtaacagaggtaatatatgagacaatcaacaccgttccaaaggcctgaaaataattttcagataaagagactccaaggttgactttagtttgtgagttactcatgtgactatttgaggattttgaaaacatcagatttgctgtggtatgggagaaaaggctatgtacttattattttagctctttctgtaatatttacattttttaccatatgtacatttgtacttttattttacacataagggaaaaaataagaccactttgagcagttgcctggaaggctgggcatttccatcatatagacctctgcccttcagagtagcctcaccattagtggcagcatcatgtaactgagtggactgtgcttgtcaacggatgtgtagcttttcagaaacttaattggggatgaatagaaaacctgtaagctttgatgttctggttacttctagtaaattcctgtcaaaatcaattcagaaattctaacttggagaatttaacattttactcttgtaaatcatagaagatgtatcataacagttcagaattttaaagtacattttcgatgcttttatgggtatttttgtagtttctttgtagagagataataaaaatcaaaatatttaatgaaaatggacttactgttacagcatagagattatactgtactttttgtgtgttaaaaataagttctttatttgtttgcaaac

SEQ ID NO: 93273 - DNA, 1040 bp, Homo sapiens
cggtgggcttacccctcccgggctaggacatcctcctctcccccttctgtttctgcgtgaggcgcacaaaagggcggggagccgggtgagcctggggcccggccgcaggggacgcggcgggaggtgtggtttggggttgggaggtggccatcggggctaagccggggcgctcttggggtcctctttgtacgcccgcgaagcgccgtgccgggccttgctcatagtaagcgtttaatgcgtgctcgcggggttgcaaagccctggggtgaggaggcggctcggccgaggggtttcgcgcctagcacgcagtgggccgctttcctagccgggcgcggtgcagtggaccgctggagggctgggcgggggcgcctctggccgggggccagtcctgccggtcccaggatctgcgctgtccccggtcccacacaccacccagatacacaccctccgtccttctcgcctccgagctgggatctgcccagcctggacccgacccggcggtctgttccaccgcccggctaacggagcggacgcctgcagaggactcgcccgccgcctccgagcctcccgcctgagccacaaaggcctcctgcggctgcccagcccggagcgggcgccgagccgggtccctcggctggagcccagcgcgggagcccgccttgcagcatcgatctcagcgggcaccgacgtcgacgccccgggcctggggacggggctgtagtctgagctggagagaagccgggagagggcgaggggaggcctcggttgagaaaagatggggatggggaaggctggggagctgggttaggacaggtagtgggtctcggggagcagggagtgggaactagggtttgaggaggaaagagaaggggcgggggcgggtccgaagaacgagggaaggagctcggtgcaggtggcgcccggcgaggctggttctgctgaagaatggggaggggaggagggatgcaggcgggtggaggccgcctgggtttgaggagggaggacgggagcgaggagaagacccgcgctgtgcgggggag

SEQ ID NO: 93274 - DNA, 1046 bp, Homo sapiens
tcttgaagaagtctcagtcactttctgggtgtagattgtgcaactgtcagtaaagtgacagagaatgactaacgtgaaccatcctggccattaggatgcagcagagatcttcactgatgagtgttggactggatttgggaagaagacgctaggcagagggatgagtgtgaagctgcaggaagggccaggcacttggagagggacctacttggctggcctgtgagagcagggaggcttgggcagcaggggagagggggacagacgcccaaggtggccggggtcaactaagcacatccgtactcccctgtttccacctcttcctgactcttcgcctttggggtctatgtgctgaggggagtccaaggctgctggtctaaagaagggggcccaagagggtcagaaatgaggagaccttgtcttcatctacatccgttcacagaccccctcgttgccctgagcctccagaccaccctcagcaatttttctttcctaattaaaatcagtgacaatacaatgatgagttttgaaaatacatttagtgtttctgtatatttaaataagaaaactgtgtgcataaatgcaatgtgtttttttcctccttctgattttgtattaaaataacatctcttgttccttctttctttggaaacctttgttcacatccttcatgctccaaatagccaacaaatagcacagaaagcatggtctttcctcctaactgtagagtcctctgttctttgttaagatgtggagatagggttttgtgttcttttttttttttttttttttttttttaagacgaagtcttgctctgtcacccaggctggagtgcagtggcgcgatctcagctcactgcaacctccgcctcccaggttcaagcaattctcctgcctcagcctcccgagtagctgggattacaggcatgcaccaccacgcccagctaattttttgtgtagagacagggtttcaccatattgaccaggacggtcttgatctcctgacctcgtgatccttccgtcttggcctcccaaggtgctagtattaca

SEQ ID NO: 93275 - DNA, 1097 bp, Homo sapiens
gaggccctttgcacacaggcttgggctcagggagtcagtatctggcgtggagtcctgggcctgccctcagcaacagaggagttggagcttagagtcagggcttgtccactgtcaggcatcccaacctggaggctcagtatgttggactctacacctgccttctgggtttggttcttggcctgggctggtggtggctgggggtgggaaagaggctaccagggactaggaaccaaggagatctggccagcctttcagggaatagatgggggataaattgtatgtccttataaaaataatttgggtgtctgtcatcagttccaattccacctctcctagcaagagcaggtaaacatgaaaaagaggaaatgctggcattccagatgaattagacgggcaggcaacccaaattctattactcccatttacttgctttcaagagatgtagacgtattcatctcttttatcggtaggtatgcagcaggtgctccacagtcaagcatcaatctcagaggaaaggcccatttcctctttttctttaggtgaatgaatttatctgcactttttcagactcaaccatcaggaaaagccttttgaaccccaaataatcatttgcttcatgtttccattcattcatcaaaggaaggtagcagccaagtaggccaggttacagagggtgttctgctcccattttgtagccatttgagaagatgctgccttgtccagggccctggtgaacagaatggaggaagggggccattgactacccctcctggaggtagccccatcacttgcactcttcagtgaagatgatgccctcactgggtgcgtcccagtgcacggtggagtgggggtgcctctcactgagatgggggccactggaggacgaacctggtggagatagagcatgataagcttggttttagatgggatgggttagaagggccagcaagatatcaaagtagagagatccaattggctgtagatgtccagattaatggttttggggtttgtttttgtttttgttttttgagacagagttttgctcgtcacccaggctggagcgcaatggtatgatcttggctcactgcagcctccat

SEQ ID NO: 93276 - DNA, 1051 bp, Homo sapiens
ggagtgaaaattggaagtaaacttaatagtctatgcagctctagaattccatacttctgattctttctttctctttctttctttttccttccttccttccctttcttttctttctttctttctttctttctttctttctttctttctttctttctttctttctgtctttctttctgtctttctttctttctttcatctctgtctcccaggctggagtgcagtagtagtgcaatctgggcccactgcaatctctgcctcccaggttcaagtgattctccttcctcagcctcccgagtagctgggattacaggtgcgtggcaccatgcccagctaatttttgtatttttggtagggacgggggtttcactatattatccaggatggtctcaaatttctgacctcaggtgatccacccacctcgacctcccaaagtgctgggattacaggtgtgagcgagccaccgtgctcagccacgatttattctttctaatggcatttaactgtctggattttttcccattctgcctgagatgacagacacatgtttttgaattctgttgtttgcatagataaaataactggatgatcaaagtttttggcgaaacatatgggcatatgggatatagccagaagtctttaaaggaggtgacatttattttaaggcccagttgttacttacattgctcatttctgtctagtgtgatgtcttagtttaggctgctttaacaaaactaccgtagactgggtggtttaaacaacagaaatttattcctcacagttctgaaggctgggaagtccaagatcaagttgaagctgagggttgctgttgagggctctcttcccggcttacagatggacgccttcttgctatgccctcacatgtcagagagagagatatctctctcctgtctcttcttctaaggacactattcccattcatgagggttcacaaaggcctcccaaaggccccacctccaaatactgtcacacaggagattaggcttcgacatatgaatgggacacaaacattccattcattgcatgtagtgag

SEQ ID NO: 93277 - DNA, 1031 bp, Homo sapiens
ccgctggctgtaggggaaagttcctcctcttctctgctcacttaccctgaccatggaatttgggctttgataggagggatgggaaactggaaacagtgagaagggactttgaccttgaccatgctcaccttcttgtaggaacatgcttgccaactcagccagcgtgaggatcctcatcaagggaggcaaggtggtgaacgatgactgcacccacgaggctgacgtctacatcgagaatggcatcatccagcaggtgggccgcgagctcatgatccctggcggggccaaggtgattgatgccacaggaaaactggtgatccctggtggcatcgacaccagcacccacttccaccagaccttcatgaatgccacgtgcgtggacgacttctaccatgggaccaaggtaatgctcctgtttgccaaaggtggcttcctctttggcttttttattctgcttctagggctgctccagactagactcatgtgagccaggtgctcccagtgtattgctggcaggagaagggtgtgtcagggccactgtggcaactacaatagggatttccggcttaacgtcacagatttccatgattatagaaaaggaggcgtttaggctggttttgctaatcagatcatttacccaagtacccaggctgagaactgattttatttgtatatctttatgtcatgtaatacaaacctagaggaagagaataagctggtgtttgttattaagtaggggagtgggtttgtctgatgggcttctttatgtatgataaactgaattaaattcccaaagactgaaagacaaatttgcttcttctagaggatgagacagcttctattacctctcctagcttgcttgttatttttaaaaacaaccagaaaattgctggtggtgggctctcttttcagagtgagttaccatggacaatatttaacagttactgagctggacctgagctactgtaagttcctgaatgccaagtacaaaaattcagaagaaaaattaggaggaaactacattctgcaaa

SEQ ID NO: 93278 - DNA, 1041 bp, Homo sapiens
tctgggtttataatagaacagtaatcccaaggaaaatctcacccgaacgattagccaagaaagaaggagagatcaagttgcatctttttgttcttgtcagacagatagcggggccctgaaccctgcacacaacaccccacccccgccccgccccaccccagctagcgtctgcttgttgatttggcagcagcagcagctggactaggaaaacaaaacagttgaaagcctggcctttccgagaacatctgggcctccattgtacttgacctccagggatttctctccagtacttctttagcccacgcctcgctggccccagcctctgaaagaggctgtggcaggctctgcctggctcccctgctcacagcctggtcacttgaccctcctccctgccccaggcagcacccccacaacaccccaccacctgcaggccccgccctccccaggcccagaactagggtttccagacggtgccaggaccacctgctggctaacaatacagacctcattccaaaaaggaggttatctccgtggggtggcagggggagagggagtgaggagggagagtcagtgacaccaactgtgttcagaaggaccagaattttagtctggttgtggggtctcatattattattattctgcttaagtagatgttgcacttagtctctttcatatgtatctagtattacagagtaaagaatgttcttacaggctcttgagctccacccaccaatggctctccagggccaggtgaaaatatcagaatcaggtttttaaaactacaagcattcataagcaaatcaggtatgtggcaaaataaaaataaatataggtaccagcccctcactaagatattgatagcgaggacagacacgtgcaactgaacaagcttcctatgtgccttttctgcctccctatccctacaaacatattttaaggaccgctgtctaggccagtgattttcaccctttggaagcaaattacatcagaactgtcagagacgtgtgaaccagagcagctccatcttaaataggggctggg

SEQ ID NO: 93279 - DNA, 1047 bp, Homo sapiens
tgagtggggaggatcatctgagcccaggaaagttgaggctgcagtgagctgtgattgcaccactgcaccccagcctgggtgacagagtgagaccctgtctcaaaacaaaaacaaaaacaggagtttgaggttgcatgagtagcccacatcccagggccagttggaccagaaggcaggtttctcagcctttcaccaccctgttcaaggcctcctgagacctcgggactgaacaatcacccctttcagcctgtggcctcttggttggctgtatgcaaatatttctcttgctattctgtggccccaaattttgctggaccagatgagggtgtctcagaatggatttgcatcaggcaggcagctgagcgaggtctctgcctgcccaagacagtagctttatgaaatgctgctcctccctgcaggaataactgatgtcagcgccttagagctaaacagtttttactatgtataaatggtgtttgtaaggattagatgagatgatgcatgacaaatgcttcacatagtccctgtcacagaatacatatacaataaatgctagtccccaggctgggactacctgcttccaccccaggctcttttcttccagttccttgagaaaagatccaccgactttggcttcacaatgaaattgctccactgtgcaccgagtgcccatgctacctgtgtccctgggcttggccagcaggcaccctggcaggccttctctgggaatcggccctcacctcccagctcgttttccatgctcgttcttcctgctgccctaccacccctccggcctagctgtgggggctgggattggcatagctgggctcctctctccactttcttctgtgactcacctgtaggctgtaaagagccctgtgaaggcttcatgaagtgacttcccctcccctgccacctggaggacatccctctaccccctccatcggtacttagtctgcttgtagagggtatattagttttctgctgtgtaactaattgcctcaagttcagcaatttaaaacacccatttattaactcacagttctg

SEQ ID NO: 93280 - DNA, 1002 bp, Homo sapiens
gcctgcttgtggctgcacgtggcttacagcagagatcaagtgcatcccagctcccccgacagcctcccatcctgggccagacatgtccagggatggcagtgtggcctgactcctctctgcaaatgtgctcctaaacttcacactccctaaactccctcactaccaccacctccacccacacaagttgacaaactttgccgatgtgatggaatcagattaatcaaagtccccacagtttggtcctaatcagacctgcctcagcccgaacctcagcctgttctctgtcttccaactgtgcccccgactttgctacaccatttcctaccttggagcatcctggcctggtcaagtcatgcctatccaccactcacagccttcctatcctaacatgacctttccttccactgggctgcttttgcacttgctgctctccatccgcatcgaggaatactatctcttgctgccttgtagtctcatagtattttgaagtcatttctgttaaaactgaacttttctcctttcctgtttcccagctggactctaagctccttaagatgcttacatttcttcttctggagcatctgatacacataatagagggcacatagtctgcgcattagtgctacctacaaattatgcttcttgttcctcatgaatatttactgggctcctactatgtgcaggcactgggctaggtgccttatatgctgtatgtcatttaattctcatagtaactccatgagggaggtattactatctccgttttacaaatggagaaacggagctcaaggagattaagtaacttgctgaagatcttacaactaataagtgacggagctggaatttaaacgtagatctgcctgcctgaatgtctgattcttgtcaggatactatagtgagagcaaagtaaggtcaggaagtgggaccatgccctggatgatgtggtaaaggctgtagacccagaaggtaggagtggaaagtaaaaggaagtttaggagtgca

SEQ ID NO: 93281 - DNA, 1081 bp, Homo sapiens
tggtacatattcaaaaagccaactctatgtatgtcttgcctaagaggaaacaagtgcttgaacatcagtgtgtggtgtgggcttgcgagcctgcagctgggggagagtttgctgatccagtgaaactcttgtttcgaggccttggggtaacagcggtaataattattccagatacttatgtgcatgcccctcccagctcatagatgctctcacatccattgccacctgaccctctggggacccctgagaagtaaggtgcaggtcagggggcacgtggctgctcctagattacaaccaacacgtgggaaagtcaagaccacctcctatgcttccaactccttcctgaactattttcagttcctgtccttagacccaggcaaaaggggcctcttcccagggctctggactttagggtcctcttcgggccctccaacaacttgtacccctgccccataggtctggggattgtgtctacccagaccccactcacccattcctaaactacactctgggtccctagaattccctgagaaacagccctgagcattccagagcctacaaaaccccgaatctctcctcctgggggacagaccaccaatgtgtgcataccaggctcaaggacagcatttttgcagaaggtggacagagcttaggtctgcaggctgcaggatcaattcaggataggcgcgtgtgggctgggggcaggcacagaggctgaggccaactatccctgaagtgtagctcagaattttaaggaacttgaggattctaagggccaggcccttttggcctttatgaagatgtatttgacagagtaggaggatagagtatattctgtgtaatggttttttagcttgatctaacttttgagtgtttagagaatcagcacatgatcctccttttctcctcttgccctgggacccacagtatgaggactggtcctggctcttttatctcactgtgctgtttccaggttcctcttttcctatccaagcctgcagaggtactgtgggagtgcaaaggaaagcaatctagagccacagaaaaatgaaacaatttagtgtgtaaagctcaatataca

SEQ ID NO: 93282 - DNA, 1089 bp, Homo sapiens
caccctcacttctcccttcactccccctttcctcactcaggggctgagaggacagaggtggtcagccggggagcagaggtggcgaaggggctcatggcaagtggcagccattggaacaggggtgaggacccaggcctgggaaagccaccagggatgggggaaaccatgacgccgcctcctggtgcagtgcacaccatctctatccctgtcagccctcactgggtcatgggccttgggcagatgtcaaagagcccagcagcagcggtggtggccagctgggcagagcatccttgcttgggctaggaaagctttaccttctctgagtgcctccgcctgagagatgtgtgacccgtggcaccagggaaccacgtcttggagtggtccactgtaggccatgcgcttcatccacccccagtccctacataggccctacccttgcccgggagcttctagatagaaatcagaaagagattcaaggagccaaatgagcggtcagcccccaccatgcactccttgccccgtgcagagctccagccagcttcgtcaccagccccactggctcctggttggaacgaaagggtctctggttgcactgaatgcagctctcaaactggtcttgtacttgctgaataaatactgttgttcttgccttagctgctctctaggtttgtggggttaagttgccagaaaattgtgctactgtgtgtgcgtgtgcgtgcgtgtgtgtagtgctaggagtccacagtaggtctctgtcaagccgatgtcgtgatgagggcttttctgatactgacccagaagccacagaaccacaaggaaacccaaaccccctccagctgctgaggcgcaggcacagcctggggtcggatggagcctccagcaccccagcacccaggtgacttccccactcccctgtaaatgtcatggtgctaagactgtgtcaaccccaagacgacacatggtcctgtgctttggccaccgtttgaggcaaaaactaaacagcccgacacgttgtgttctggtgcaggtttgtattaaactgtagctacttctcacttggactctgttgtgtttcttcaaagaggaggg

SEQ ID NO: 93283 - DNA, 1037 bp, Homo sapiens
tgaattacagaggtgcaaagggtacgattttttaaataagctttttatacaacgttcttcatggtgatctaaccaactttcaattagagtaaaagtttggtattgacgaagaatcattttttataagaaggaggtctgagcatgtttaatggcagaagggaaaaggagttatccaaagaaaatagtacacagacaagagagaaataaagcaaaaaggaatgatctttaggatcccagggaaaggttcctttgaagagaagagggcatggctctttctacccctgacttttagggtgaagtccaggatagattactggggttcctcctaagaaaagacctttctttctttagtaaaatagagccaaggccacttgctgaggtgggggagggagagggttggtggggaattgagttcttgaaggtctgaattacccacagtgagaaataagtctgggcatatgagagatgaataaaggtcttattgtgaatgctgcattggacctatgaattcataatgggctgagtctttaaagtcctctggccagagaagcagcagtgagtggggacgggcaccaggaatgggtgttgcttggcatgttcagggcaaggtttctgaggagtcaaaacttaagatgcagtgaagtagctggccctaaggccggaggtagaggaagggccacaagttgaagacaggcgctggttgtcagccagaatgaggaggcagaggaattacaggggccagtgggaacggaaaacaggtttagaatatgagggatgagcagtaaggaggccactgacagaggaagattttcatattaaaatttggcagaggcttcttttacttttgttcatctttgtataatgtttacgtttctaacacagacgtgtaaccactaacatttcttaaaggaatatttgaaatctcaggagtcgagctgtgccttccgggtgtggctggattgctgagatggatgaaggagaaatgaagatggagctggatcatggagcctaccttgaaaaggtgctgggcctctaag

SEQ ID NO: 93284 - DNA, 1108 bp, Homo sapiens
atgtgagctaggcaagatgaggttctccctgtaagttttcgaggtgagagcgtgggggagggtcttctacagcactcacctttggtccttctcaggcagactaagctggatgggcctttggtttgggccagtaagggtattccgtgcagccatcaatcatagcactggtgcctgtggagacaccggccactggagaagatccagaggatgaatcacagcagtagacatggtatggggattagaggtaatggggcatgcttgtttgaatggagagtgagagggctgtgggagatgctatggaagatggaaatggtgcttgtggagtgttggttggagggagagtgggaagctgaggagccaccgtgtgaaagagtttccacctagaggtaagaactcaggagggagtgccccggtaatagctacccttgaagtcagacggaattacttgaagcggtttggcttcacatcaagaccatcaaaagccaagttcccattctgctcctgcctatctctctagctctggaaaaaatgatttcttcctcagaagtaaataaaatttcctccttgtatatcagtgtaatgtgggaataaaaaaataaaaaatttcctccttgaagaggatgaaaaagcattaattattaatgtttattttcatatttacagatgaaagacatgctgagttcaaagaggtagagttgcgactgaggaagagaattaactctcagcattaaaattatccactagaaaatatttatgcctgttttgaaaagtctggctgggcgcggtggctcacgcttttaatcccagcactttgggaggctgaggcaggtggatcacctgaggtcaggagttcaagaccagcctggccaacatagtgaaaccctgtttctactaaaaatacaaaaaaatagctgggcatggtggcaggcacctgtaatcccagctactcgggaggctgagacaggagaattgcttgaacctgggaggcggaggttgcagtgagccgagatcgcgccattgcactccagcctgggaaacaagagcaaaattccatctcaaaaaacaaaaaaagaaagaaagaaaaagtttctaggggttgaatacaaag

SEQ ID NO: 93285 - DNA, 1025 bp, Homo sapiens
tcagagccctaccaccagtgttgggcattggggctaggctggagctgggctctgagcccagagctggtggtggtttccaggcctgtgggagggtgacagtgaggctgtgctgccgctatcacctccggagagagcggtgcatgggaggtggaaagcactggacctggactgtggctcagttgagggacacatggcatgtacttttaccacacaagtttatttaaataaaagtgaacacatatgcaggctggtgcccgaggggcagggggtggggagggcaggtgggaagcagacagacaatggggtccaggcagagtttgtgtggtgaaccaggctgctggagggagtggctgggggcctcagggcagcgctgggattcagtgctggggcagggggccttgggtgggtgagcctggtgccaggaggtcatttccatccctcacatgcccccctccctttccctgaccccctgggcctacagcactacctcctcagccccctctccctctcctgacatcagccttccccttagctactgagaagccaaaagacaaaataaattagaatgggtgagtcctaccccagcccccagccatggggaagggaagccaagccaggcacactgcgccggagcccgtgctgtcagctctggaaaagaacaggtaaagtgcaaggagaatccagtaagtaaaaatataccaatgactttgtcaaatacacagctgctggctgtcaggagcaggtggctggctggggcgggtggcagcagcaccctgggaagtgttgggcgacacagcagagagacaacggaaataaatagggtgggtgtggacaggggtcccaccaactgggccagcaccacccaggacgggcttctgcctgctttccggccccatgcccccaagcccccctcgcctggctccccagtgctgcagcactgacacaaagcacccggccgaccgtgttaggaaaggactataatgtgggagtggagcagggagggaggcacggggaagctgtgcagt

SEQ ID NO: 93286 - DNA, 1044 bp, Homo sapiens
tctctactaaaaatacaaaaattagctgggcttggcagcgggagcctgtagtccctgctactcgggacgctgaggcacgagagtcgcttgaacctgggtggcggaagttacagtgagctgagatcgcgctactgcactccagtctgggcgacagagcgcggccctggcaatcaatcaatcaattgatcaataaaggaaagaaaaacagaaacagttctaccaagtctctcaatgccgtggccttcacatcgacgctcaatgaacgttctcagaagggaatctcctctcctcccggcctcttcgcctgggcgggggccgcaggctgccgcggaagcctcttcccgatgctcttcgctcaggagagcccggcccaggagagggactacaagtcccaggctgccttgcggcgggcgccgggcgccgggcgcgcggtcctgcgaggagacgtggcagagtgcggcgcgctcgcgccggaccggaaagccggggaagtggccgaggagggagggctgcgagccatggcgaccaagacggcgggcgtggggcggtgggaggtagtgaagaagggtcggcggcctggggtcggcgccggcgccggcggccgaggaggcggcaggaaccgcagggcgctcggggaagcaaacggagtgtggaaatacgacctgacccgtgagtacccgccctgccccgccgcctaccccaggcctgtccggcagggtcgcagcgagcggctcccagaacctgggcgcgagctcgcaggcacatccccgagcgccacgcttgcgttgtctctttggagcctcacgggaggcagacagctccagggaaggttgcggtcctcacctcccagatgagtaaactgaggcccagtgaagttggataccttggccagggtcatgtgtcagaggggctaggattccggtcctcagactctcagttcactgcacacactctcccagctgcccagggccctagctggtctctctgggcaggtgtctgagctttgaagaggtactgtggatcattatacacggtgccccctct

SEQ ID NO: 93287 - DNA, 1455 bp, Homo sapiens
gacaggctcttccctggagatgaattaggtggcagtgtggggaaagggaccactgataggtgaggccttggggactcaagggtggcctgcctttctctacctatcttcaccccagctgcaatccagaccacaagcaccctttatgagcggggctttgagaatatcatgaagcggcagaataaggagcaggtcccaccccctgctgtggaacctaagaaaccagggaacaagaagcagccaaagaaggtggcaactcctcccaaccaaaaccagaagcagggccgcttccgcagcctggaggaagcactgaaagctgtgagtgtgcctagacatgagacgcagaaagaatgggggcttgagatttagagaagatgagaggagggggaggtggatgggcagctgagatcctatgggatttgaaacactttaagggttgagaggagttcaggaaaagatggaaaccccaggggaacagaatgcctgcacttagaatagaaaggaaatggaaaatttatagggaaacatggattggtaagaggaaagccttgaagacccaggaacaccagggaggagatggagaaactggttatgattctctgtcctatggaaatactgatctttcattttctgtcttgtcctctgttttcctctttttttttttttttttttgagttagagtctccctctgtcgcccaggctggtgtgcagtggtgtgatctcagctcactgcaacctctgtctcctgcctcagcctcccaagcagctgggattacaggcgtctgccaccacgcctggctaatttttgtatttttagtagagatggggtttcactacgttggccaggctggtcttgaactcctgacctcaggtgatccgcccaccttggcctcccaaagtgctgggattacaggcgtgagccaccgcgcctggccctctgttttcctcttgaacatgtggagggcctgagaggatagggcctgagatcagcattttcagctgtcctgttccattcttaaagatgtaggtacagcagaattgcagcattccatgttcttatgcttaaaaatggaatcccttcttcctactgccacctagttcaaccattttcccacccctaccccatttctttactccctcactcacaactcgccatggtggggggttgggggattgtccctggcagctggatgtggcagacctgcagaaggaactggacaagagccagagtgtgttctctggaaacccatccatatggttgaaggacctggccagctatctcaactacaagctacaagctcctctaagtgaacccacgctgagccagcatactcatggtaagtccttccagcttcctcaagctcagacaagttcaaataaattcaaaaagggtggtataacagatcccagtgccccacactgtcctgatttccatgggtgatttgggctggtctcaaa

SEQ ID NO: 93288 - DNA, 1195 bp, Homo sapiens
tggccaccctgggatgagggttgtgggtctaagctttcatccccgaaagttgacacagctactcacgtgcatactcaaaaatgttccactttccttccagaggtgaggtgacctgggactgcatgaagacacagctcagtgaggctgtccactggacctggctttgcctacaggacattacagtggctttcttggactgggcacttgccctgatatcccagcagtaggccctgccttcctggccactgatttctgcatgggtagaccatccaagactgcagcgggtagaaggtggcagttcttcatgggagtctttttaacttggtgcctgagttctctcctaggcaagtggccagttgcctccacctcagttcttccatctttggtggggacagggcccagcagcatctcagcctcctacccacaattccactgaacacttttctggccctactgcacatggcccccagcctccatccttgtgctggtagcctctcacaactccgcccttgccctctgccttccacttccttccatctcatttctaaaccccaaacagctcatctctaaaaagatagaactcccagcaggtggcttctgtgttcttctgacaaatgattcctgcttctccagactttagcagcctcctgttcccattcttggtcacagctctagccacagcagaaggaaaggggcttccagaagaatatagcaccgcattgggaaacagcagcctcacctccacctgaagcctgggtgtggctgtcagtggacatggggagctggatggaaatgcctctcacttcaaaatgcccagcctgccccaaatgcctctaagcccctccctgtcccctcccttgtagtcctacttcttccaactttccattccccatcatgctgggggtcttggtcacaaggctcagcttctctccactgtccatccctcctatcatctgtagagcagagcacaggcagttgtgtgccttgggcccagggaaccctccatcaacctgagacaggactcagtatatggttcttgggtatgccctaccaggtggaataaaggacacagatttgatttctagcattcttgtctgcatcctcatatagaaattcccctagttatggttcagaataacaaaatcctgggcccttgccctcctgaagactgtagccgtggctgtaattaagctcc

SEQ ID NO: 93289 - DNA, 1002 bp, Homo sapiens
ccaaagtggcccatcggctctcgagcagggtttgcgcgtcgcggtcgcaaagcccctgtgagtgcaggtaccgcggcacaagcgctgccccggagctccaggaggcggcggcgggctcggcgttcgcggtccaggagaaaccaccgcggggtgttgggaacattttgttaaaaagccgggaagctcagggccggtgtggcctccgttctggcctgagaacccggactttgggcagcttcttttccttgcctttgggtctccggctttctcagctctgtgaggtcccatgggtctcctgccctggcaggttccttcagctggagaaagcgggggtcatggctggatgaggttgcggtaagcattagagggctatcagcagcatcttatcgcagcggagccttcgatagctcagttggtagagcggaggactgtagtggatagggcgtggcaatccttaggtcgctggttcgattccggctcgaaggacttcgtctgtaatttttaacctcaatttaattcaattatcccataaggggaaaggcttggaggcctcctgtgacttagcattcgtactgccgtcagtccatagggaacaccgtagtatgtagtatacggtaacgctctttctgcgttcaatgtacatgtggtaacgtgttttagaatgttttctgcttaagcacacgattatatgcttgatttttagaatcttgcacatggatgccactgtattgtactctgctaaataaatgtcctgaactgtggttgatccactggtcagtgaacagtgcagtgaacctgtaaggcaaagggaaagaactaagcagcaggcgggggattagctcaaatggtagagcgctcgcttagcatgcgagaggtagcgggatcgatgcccgcatcctccactcagcttttgcgtccgtcacactacagaacacaaaacgggagggattcccggcgcagtgggctacgtgtttcattttagagacacaagactgttaagcg

SEQ ID NO: 93290 - DNA, 2045 bp, Homo sapiens
ccacgtgagtctgtgctgtaggaaaacaaggactgaagcaggttctagaggactgggccagtgaaggagacactagtgtagatgaaaaggagaccgtaggagactgacttatcaaatgagaggctgaagctatgttaggaaagaaagaattgaagacagggcctctctttgatctgctgtcacccttaccatagaaccctaaggagcttcctcagggtagctgcctccacccagatgggcctgcagtcatcctagtttggttcctttctgggagtgccactagatatgatctcatgctttctcaggaagatgagatgggcttgcctttattagggtgcaagaggactgggaacacagaagccagaaggctgacagaatttcactgagatgcagggcatgaggggaaatgggaacagtccagacaggctggggaagccacttaccggtagtgtccccggaccacaccatcggggttcaacatgggaatcagcttaaagacgaagaggcgacggagggtttgggcccggggatcatcaggtcggaggatgaagtccagaaagccattgaagacaaagctagatggagtctcccctgggtgtactctactgcttaagaagaatatctgaggtagagaggagagcagacattaagtcagttaccctgtagttctactttgacagtatatggggggtgtcatggatgaggcaggaatagccgctggatttccagctggctgaatctgcaagtggagcaggggccatcacccttgccgcacgctgcgggcggaggccatgtccaagatgcctagagataacatagtctttagctataaacagtacctggtgctagagaaaagccaaagaactacctttatgctatttccactcaccctcttgcctgcgaaacggaatggtcgaggggtgctggtatcaggaaatagctgctctagacggggctctcgatcttctcgaagcccatggcaggaagtgatcgtcagcagatctacacgaagtccatccagagaatagcaaaggagctcccgatggtaatagatggtatccagggggctacagggaaaaaaaaattaagccaggagaagtccctaaagtcctagtaagaggtaggccttgtcaccagcccaggatctgtaaaatctggtccttcaccctaacctttggggccttatagtccctcacaatgttaaatgaggctaaggatttgagtgggtttacattgccagaatgaagagtacaggacagggtgaacttgttgttccccagtttgtggcttcctagaatagattacttaatgtagtcggagttgttctccgtgggggcagataaaaaaggtatactgagtcacataatgctggctaaactctggataattaatgggagctgggctagtaagaggtctgaactgggcaggtgaaagagtggagggcaggtgtcgatatgctgagatcagggtcatacagaaacatagttttcaaaggtacccaaagtcctgtctgtacattctgtacagaaaaaagacggatgaaagtatggttcagagctctaagagcaaattccagaagtagtggaggtgctgtctgatccaggactgtgtggcaggagtaagaatggggctggcacctgctatgggtagggtggttctccggaaagcgctggtctagctggtttagcagttcctggcagtcactgtaggagaaggggtagcagaaggcgaagaaggtggtggccccacggccctccacgaaacgatgaacaaaggataacacaaactgcgtctctgtcatctgaagagcagaggaggaagagggaggggcaacatgccattgtcagaactgagctcctactgggaccaccaggaactgacctcacacccttatcacctttaccaacttccctccctgtgacactttctatatgaaaagtggctccttctaggcttcctgaggcaggggctcatcttggactctagctaacactggagaaaaagctgatacttaaacctgttgtcccacctgcttcatacttgta

SEQ ID NO: 93291 - DNA, 1050 bp, Homo sapiens
gataatccacaggttgggtggaagctgagatatagttgatgaaatagcttccctaaagaaaacaccgtagctgggtgtggtggtgcatgcttgtaatcccagctactgaggaggctgaggcaggagaatcgcttgaacctgggaggcagaggttgtggcgagccgagatcgtgccattgcactccagcctgggcaacaagagcgaaactccgtctcaaaaaaaaaacaaaaaacaacacccagttcagggtgtttgagagggagggaaccaccttagtcttcttaaaagagaacctcacaattagcattattgtctttagtctaggactctaccttggggggactctctgggtatatggtacagtaccaaggtcagctgctagttgctatggattattagcactttcatttgtgttcacttttttccaagtgattgcctcctttgaccacctaagttgtcctctatggttctgtcctggtatctgttcaggcgggacactgataaaggtctttatgtcttagctacacacttgaatgcaactacaacactggacgctcagtaaacagcatccctgctgcctgccatgacaatgggcgtgccagcccccctcccccgccggctttcccctccagatacactgtggaactatttgagcaggtatgaatacatggtgtaagtgggaaaagggagaaaccttacagtctggaaaggccttcactcttagtgcctgactctaaggtcctttgaagagatattcatcactatggccgtctcaccactatgattattttcctcagttaacaggagcataactacaactgtaatagtattgaaaggatgaacaggcactatatctgaccccacatcacagagaatcccctagcacctctgagtcagattctttgcctctgggcttgtctttctcattctattggatttattagtttctgggctcaaaagcaccctgactgtagtggtcttgatgattcccattatcctaatagaaagagctggccaggtgcggtggctcatgcctataatcccagcac

SEQ ID NO: 93292 - DNA, 1091 bp, Homo sapiens
aattagccagacgtggtggcgtttgcctgtagtcccagctattccggaggctgaggcaggagaatcacttgaacctgggaggcagaggttgcagtgagccaagatcgcaccactgcactccagcctgggcaacagagcaagactcggtctcaaaaaaaaaaaaaaaaaaaaaaaattagctggatgtggtggcatgcacctgtaatcccagctactcgggaggctaaagcaggggaatcgcttgaacccagggggtggaaggttgcagtgagctgagatcacaccacttcactccggcctgggtgaaagagtgaaactctgtctcaaaaaaagaaggaaaggaaaagaaacagaagaaaaactttaagcagatttaccatgggaaactaggccactggagcatgagaagatacaagttggaacagctgtgcaatcttggagaaaccactcttaaatagcctcagtttacttgttggaaaaatggaaacaacatccatcccatagcgtctttgtgaggattaaatgaaatttatatatatgatattatcttgttcactgttaaatgctatgtaaacataaggcattattattatttttcaaacacagtgcacaagtgtcctttcctgatgaagatagactctcaaacaatggggcctggaagcagataatcaagttgcctgtcagggatagaatatctcaatggtcacagctggtaaggaccattgccctctcctccatggcttctctcactagcagtcagatttacacagccactgacacagcacatgtctggtctgtaccaacagctagggtgcaagctgggaaaagctaacaaggatgagtatgctggaagaccagcaaagctcttagccccagctgacaagcctccatactctgggcaagacttctgtagtgcagaggccagtacagtattgatttgtggtttagcgtatttccagaagtggcactataacaatctctccccctccgcaatccaggttactcccgttaattttctcttctttttccctaaaggcccatctgtttctggtatataattttgacccagaatcttatcaggcagggtctca

SEQ ID NO: 93293 - DNA, 1063 bp, Homo sapiens
tacaggcgtgagccaccacgcccggccgagacaagcattcatttggttcccaacttcttgctttttattcattcaacaaatacttgctgttcacttactaagtggcaggcagaggactagatgctaagggcataagtagatgtgttaggagacacttcctgaagcttttgtttgcagtggaaaaagtagccttaaagccctcttagttcctctgtcttctaccatcactgaatcctgcccccttttctaatacttatctctcttttccagatgctggtattggctctggtcatctcaccccgtttcctgtccaatatgtacagttcacagacagtgtcttacacagtcttacgtttattcccatttgtagaaacacacagttgttgccattgtctcagttaagctcataatcattgttctcaagacatttcagctactgctctcttcacctaatatccttggtgacgggcttggccttttgcatacccacctaggtacacaagctttttgtcctctccacccaccagctctgttcctgctcctggctgtcatttctcactttgggaatgtttctgtcaaactatgtcttacctatttttcaaattatttcttaactgaacattctttggctaattactcttgtgtttatccaccacagtagttccccaaaccctcaggatgtttacagtgtttgtgcgctctcatgttgtatttactgtcctgtttcccctattaagtttcaagtcaatcaaccaggaattacttagtactgactgtgcatattttctattggtagggggaagtaacagagaaatagaatacatgtccttcacctcagggggctcaatgcagtgttgtgcattggaagcggggcagggaggatgtcaataaaatagtgattaaaaagtgcctagccggacgccatggctcatgcctgtaatcccagcactttgggaggccgaggcgggtggattgcctgaggttgggagttcaagaccagcctgaccgacatggagaaaccccgtctctactaaaaatacaaaaaaaattagcgggtgtggtg

SEQ ID NO: 93294 - DNA, 1393 bp, Homo sapiens
acacacaggaccttggcacaagtcaagtaactgctgctgtaaacagtgagaccttagaacacccattctgactcattcaaggggagatcagtctcccctcagacctcttagacctttgcccagtactatcctaccacccccaaaatggaacatctggctggttgccataagataccatttcataacctctggaagcagagctgatcacatcactcttgcactcttgcttgttctttctcacttgcttttaccctttcctggggtagggtgaaggtttgtcccttaatatggtttcagcatgcctgtgtgtgtagatatttctcaaattatctaaactatttcctctatcaagttcatgatttctgcctactgtgcactgtcagctggacatcatcctgacatccattttaatcacagaattacttggctctgggccctagactatctctgtcattggtggtagctaatgttttaggttatttgactatggccacgagtcttgacttctgttatcctattggcaacctgtgccaacaactctcactagccccctaacatctggttgtttttgacttttttttttttttttgagacagtctcgctctgtcacccaggctggagtgcagtggcgtgatcacagctcactccaaccttcgtgtccctggctcaagtgatcctccagcctcagcctccctagtagctgggcctacaggtgcacaccaccacacctggctgatttttgtatttctttttttagtagagatggggtttcaccaagttgcccagcctagtctcaagctcccggactcaagtgatccagccgcctcagcctcccaaggcacatgagccaccgtgcctggcgtttttgactcttgaccaccgtcttaacctataattggtacccagcatatctcctcataatagagtagcttccatcctgagatctctccctttcttctttattcatacaagtatcgattttttttttccattcaattttttttttttccattttggtttggaaccttttttttttttttttttttttgagacagtctcactctgtcgcccaggctggagtgcagtggccgatctcagctcactgcaatctccgcttcccgagttcaggtgattctcctgcctcagcctctggagtagctgggattacaggcgctcaccaccacgcctggctaattttttgtatttttagtagaaacggggtttctccacgttggtcaggctggtctcgaactcccgaactcagtgatccgcctgcctcagcctcccaaagtggtgggattacaggtgtgagccaccgtgcctgacctggtttggacctttcaaaagtattcttgtcactgcctgctaattcccagtgtggctgggaagatga

SEQ ID NO: 93295 - DNA, 2017 bp, Homo sapiens
tcggagttggtggcagggctgttcctagcagcagcaaccaaatgtgttacctggggaatccgggacccctcctggcggaaactctcctcggacaggtctgggcagaaagagaggagaagctaagggcaggggcagggaaagccaaagctagcaggctaaggttggggtatatctggcagggacacaggttgaaagcaagcaaatgacctggctgatggggatggtggagggcaggaaggggactggacagacaggcactcaggcaccagagaagctctctgatgtggccaagggtagatgcagtaaagcagtgctgagcattttccctcccactacccagaggaacagtgccttgctgggttctgccagagtagctatgctggagacccaaaaatattacctgcaatcgagtcttgatgcagggcatccgagctccagtccctagcagacctttcccgattaccatgacagcctctggtttgtctccagaggacaagagtgagcaactgctccctagggaacagaggaaactgatcagggtaggggtcacagagaagaggaggtaacttccaaaggatcagggtttcttaaccttggcacgttgacaatttgggttggataattctttatcgtggggagtagtcttgtgcattgtaggatgtttcgcagcatccctagcctctaaacaatttatgctgtttcctcatctcccccctcctcagtgtaacaaccaaaaatgtctccagatgttgcctgatgtcacctggcagcaaaatcacccctggttgaggctctagtctggtggtccaaggggtggagcagcaactccaggctagaatcggaacgcacccaagcttaactcctgtgtcagtttatactgccgcaatcatatgtttagcatttgaggatcaagtcagctctacccaggactggtgggttcagtgctacccattgaggagagttgacaggttgggagtaggggtctttgaatgaggtagaacatgttggactagagtcttaaaatcattcccatccctttctttatatagctgggtctataatttaaaggagaagagatggctttgtgtgaatgatacggctacacacagcatttagcagtgttgacaggagaaagtaccgtcatgcttttttcattctcctgttttgtctagtgttgcccagctcctggagtcagggaatttgcataagtagcattttgcaggtagacaaaagtcttcaggttcctcaactgataaaatgagattaagtgtgtagagcagtgcctggcacatagtaaatgttcagtaaatgttaactattgttttattacacagacacattaataaattccagcttcctatacaaaggcaccagtgttagaggtttaggataccaagaggataagtgatgcccctggtctcccaactaggcttaaagaacctggcctggccatggaggaggctggcaaacccagatttcagtggcagtgggtacagacctggtatgttgaatgaatcaggcagtagacaggagcccagcttgtgtgaggaggctgggccagaactagtaggagctggggatggagcgaggctgcctgcaggacgatggttcaggggctgctgctgccgtctcctgtcctggcttcggggctctgagtggaagagatacaagcagataaaagggcaaataagtggggcactatgaggcagccttcactgacctgctggcttccgtggtcaaaagatgccagttttcaagcttgtcatcagacccacatccctctcctgaagtaactattaatataagatgggtagaaagacctactatttattacagttatccattctccaccagccttcatcctgctagtttttttttttttttttttttttaaaggtttccactctgtcatccaggctgaagaagtgcacaatggcacgatcatggctcaccgagcctcagcctcctaggctcaggtgatcctcccacctagcctcctgagcagctggcactatag

SEQ ID NO: 93296 - DNA, 2960 bp, Homo sapiens
cccctgtccccgccgtccgggccagggagagggcactgagggcaggacccaaaggaagcacctggttgggccgggccgggaagcgaagggtgggcagcagtactgagggccggggccggaagggggttggagtatcccgccggccccgccgctgcaccctcgccccagcccactcctcggctccggggaggcggccaccacggcttcgctagccgcgtcccgagccacgccagctgcagccagctgtgcggtgccgggcccaggcgcgcgtccgcagccccgccccaccccctacggctggacctcccaccgcagccgcgcccgaggccccgccccagccgcggccgtaacgcgccgcgcggagccgacgagacggcggggctagagaggccgtcccgaccgcgccccccgccggaagcggcttgttcgggcctgagctggcgctacgaagttccggtccaggtctctgacttcgggcttgttcgctggtggcgtcggagccgagccggactggtcaggtcagaggcacgcaggggccgtcccacgggccagccccgccgtggccgtggccgtggctggcccgtggggcgaggacgggttcttgcgagggcgaggagtgcgccagcccgcagctcagcccctctcttctccgcaggatgatcacggacgtgcagctcgccatcttcgccaacatgctgggcgtgtcgctcttcttgcttgtcgttctctatcactacgtggccgtcaacaatcccaagaagcaggaatgaaagtggcgctttctccgccccaggtaacggcccggggctgtagcgcccagtccccagagctgagtggcgaggccgcgccagggctagcagggttcgaaacttacaatcagaaagtgtcgggccaagcatgatacagtccagaactgggcccctttgtctgcacagagtagagagagagcgcgctgtcctctccccgtaacctgttccctgctagaatgggagtgggttgcctaaccctcacagtctccagtaggtagatgcccaagttgggagtatagttgtaaggaggcactgacaccggtaggaacgaaggtaccgagggaaccatccaagtatgaggatttgggctcttaaatagccctcattttccccaggttgtttaggccttatttgggcagattttttttggtgaggggggtgacagatgtagaattctgtttccatgttctgaggccaggggttggctgctgacccaaactatagagaaggaagggggggctttggagccagccttaagtgtgggtcacaagtataaagggaacatggatgggcgttacttcctgaaggattccccagaggaaagctgcagcattttccttacctcaggtctttccccctcttttctagggttccaggacatagtctgaggcaagatggagggtatgaggggccttcacacttcacttcatcccttctacccatcacaacatacaaagcaactacacctggatttttccaaacaacttttatttcctcagagtcttccttaatcctatggaacaagaagctgccactgaatagggcccagtataggggcttgcttttctactccctccccccaatataaaaatatagacttttttttgtggtcccaaaatcttgtgctgcggagggagggaaggggtggcaggtccctgttttgttctgtctcaaggtgatactctgtaatgccttggacagcgtggctggcattccaaggacttaacggctgtcacatggaatcagcggcctggaggggaactagcatatttcccactgttaccccatcttggggctatatcctgggcttgaacataaaggcattatcagacccggggagaaacagtcagtgggggagatttagggacaaaacaaacctcaggttggcccaagggacccctgctgtaacaattccaggatggggagtcagatagactacaggatataggagaaaaggcaggggcagagcggggccgtgggggcctggcctgaggcagcctgcaacagaaaagagagaggaatcagggctgtgaaaactctcctcctcttctgttctgctaaccaggggctgggaagtgaaagaagtggagcgagatgaagatgggtaaggatgggcaagttggttactgcacagtggtttgacgctggaaccagccagctcctagaccttaggccctgactaaaagttgttttcttttgctttggattgaagacttggccatggtgggggaaaaaaaaatcagggactagattcttaatggaagtacatttagtctttgtgctcaaaaggagtagggaagcagaaaattattctgaatgacagaaatgggaatgaggggacagaagtgaggggtggtgtgagggactggacccaagtgctcaccctggtgtagcagagcaggatcccagctccagctcactgctctccctggtccggggggtaggggatgtggggcctgaagagcctttcatccctctgcgagtcggcggtgagccccggcccaacctgggcctagcctgtgtggacagggtttgcgctaagaggctggattcttccatgagttttttgcttttagtttgcttctagagtttccatgcataagagtgttgtagtatagggatcagtagaggtactgggacattgaattctagctgagagggtgaggcaagataatagccagagaagtcctggattcagtccatgactatgcactccaagtctataactaggggtggcaaacggatccagcatttaaccgccatggctacaccatgactaaggtctgggtgagtagagaaacactgtgtagaaagatagtggagggttggtagacctctctcagagccctctatgctttagcccctgccagagcagtgtacacttcacccatccagtcagcctctgcctatactcagctttacctagcatgg

SEQ ID NO: 93297 - DNA, 1050 bp, Homo sapiens
tgctacctctgctgcctgctgacggcagctgcaggggccgccagctaccctcctcgaggtttcagcctctacacaggttccagtggggccctcagccccggggggccccaggcccagattgccccccggccagccagccgccacaggtaagagtctggatcccagcccgaggcttgggtggtgaggaaggggtcagaatgccacctctgcctggctctctgctgtgtccgctaatgcagggcagagggggagtgagaagcccatccatcaggtggctcctcacatgcccaccttcccacggggccttttccaggaccccctgaacacatatgttccttgggtcacctagggggtccgctcccacatgccccagggaagctgccctgaggggagcgggccaggccttcctgccagctgccctctgtatcctagccccagagcctcagggagaacttttgtccccttctagggctcccttgaccccatccagtaatccataattctgacaccactccagctctgttccctccagccctccagccagacacagatcagaggccggagtgaatggggccaggagtatagaactgcaatccccaagaggggcaggctcatcaatggcttattctctacttaaccccaagctggcctgcccgtcttctcctggaggggtggggtggaagccagtgttcagatcacccacagggcccgggctggctatgcgcacacagcatgccaatctggggactgagacaggcccagaaagggacacacatgattgtgtacattcagaggctccccgggaccccaccaccatgaggattgactgctctgtggttttccattctgcgcgtctccccatcttgaaaagtctttatctgctcctgctacacaggaaagcgtgggggatagggagggtggcgatgccaaagcccttgctctcactgatccccaagggttctgcatctttggagccttcttcagcccctctggtagcccctgggccctcctccagggcatgtatctttggtccttggacccagagggggt

SEQ ID NO: 93298 - DNA, 2229 bp, Homo sapiens
aaagtataggtcaattttatgtcatggagcaaactgggtctatataaaactgggcagtgccaccaggctcagccagagacctgtcccttggctcccagcatggaaggagaggggtctgtgacccatgttgtcctgccactcactgggctgttttcttggatctctaacttgtgtctactaggtgtggcctcatctggcctctacctaaccagttgttttatttgggttttcatttaaagtctaaggtagccagctgcaaaaacagagtctgagggagttaaggatttggttccaaggagaccagaagagcctccccactacagggtttttggaattttgggggcaactccctttgggtctggggagaaaactgccaggagattggaggcagaaggttggcaggctgggccctgagggaggctctctgcaaggctggtcctccccttcctcctccaggccagactctgaagtgcagcatcagctcctgcccaaccccttccagccaggccaggagcagctcgggtgagtagggtgggccgggggtgctttcagggagaagaccaggcccagggctgcagactcacctctcccgggctgattctccacttttctgacagacttctgcagagctacctaaagggactaggaaggacagaagtgcaactggagcatctgagccgggagcagggtgaggggctgggctgatggggccagggacgggaggctctgggcagccagatctgggactgacctcggctgccccattgactcctgccttctccacctcccccggcacctcttctaatccagcttctcttctctttagttctcctctacctctttgccctccatgactatgaccagagtggacagctggatggcctggagctgctgtccatgttgacagctgctctggcccctggagctgccaactctcctaccaccaacccggtaagctctgctggatggagatccccgcataaaggagacccagcactttggggctttggtctttctcatcataactcttttggtgagtcctctgtaaaaggagggctcagagcttgcacggcagggatgcaagggtgtgttagggagggtcagaactcctgggaacatctctgtccctggagaccccacagtgactctgcttccacaggtgatcttgatagtggacaaagtgctcgagacccaggacctgaatggggatgggctcatgacccctgctgagctcatcaacttcccgggagtagccctcaggcacgtggagcccggagagccccttgctccatctcctcaggagccacaagctgttggaaggcagtccctattagctaaaagcccattaagacaagaaacacaggaagcccctggtcccagagaagaagcaaagggccaggtagaggccagaagggagtctttggatcctgtccaggagcctgggggccaggcagaggctgatggagatgttccagggcccagaggggaagctgagggccaggcagaggctaaaggagatgcccctgggcccagaggggaagctgggggccaggcagaggctgaaggagatgcccccgggcccagaggggaagctgggggccaggcagaggctgaaggagatgcccccgggcccagaggggaagctgggggccaggcagaggccagggagaatggagaggaggccaaggaacttccaggggaaacactggagtctaagaacacccaaaatgactttgaggtgcacattgttcaagtggagaatgatgagatctagatcttgaagatacaggtaccccacgaagtctcagtgccagaacataagccctgaagtgggcaggggaaatgtacgctgggacaaggaccatctctgtgccccctgcctggtcccagtaggtatcaggtctttctgtgcagctcagggagaccctaagttaaggggcagattaccaataaagaactgaatgaattcatccccccggccacctctctacccgtccagcctgcccagaccctctcagaggaacggggttggggaccgaaaggacagggatgccgcctgcccagtgtttctgggcctcacggtgctccggcagcagagcgcatggtgctagccatggccggctgcagaggacccagtgaggaaagctcagtctatccctgggccccaaaccctcaccggttccccctcacctggtgttcagacaccccatgctctcctgcagctcaggg

SEQ ID NO: 93299 - DNA, 1556 bp, Homo sapiens
attgctgccttggctaggtagggggtccctgagggagcttggaaaggagtcctgcctgggtccctacggaccggtattggggtatgagggttgctgcacaagcctccaggacaatgagctctttattgtttgttgcagtgaatccggcaccttcctaggcctgggcacagtcactggctctgttgccatctacatagctttctctctccaggtaatgggtggaggttggcatggccctgtgggtggactgtaggcctgtctctaccctgagtttgcaggaaggagtctggcccatcctatcgagggaaatcctgggggtggggaacatgctttccagaaagagagttcccagctaggcctttcctcactggtattccttctgcccacagtgcctctactacgtgagggaggcccatggcattgtggtgacggatgtggcctttctacctgagaagggtcgtggtccagagctccttgggtcccatgaaactgccctgttctctgtggctgtggacagtcgttgccagctgcatctgttgccctcacggcgtgagtcattggggcagggcaggcaggcaccaccccacgtttaatgaccagaaacgtgccccccggaggctgggctctttgtgccactcctcctttgaagggttctggttttcaggctgggaagcccttttgcccgctgacctcctccctttccctcctgcagggagtgttcctgtgtggctcctgctcctgctgtgtgtcgggcttattattgtgaccatcctgctgctccagagtgcctttccaggtttcctttagcttccctgcttcctgggaatcaggagcctggacactgccatctctagagcagagtggaggcctggactccctttgctcactccattcgggtccacagctgaggttgccgctgacaagatgaatgggcactgcctgcccttctagtgaaaaggcttggctatggccctgtgtgactccaggtcccaggaaccttgccttcgtcatctgtggatccatccagaacagcggtatctgaagcccaggccatactccctgcctcctttcttctgcctaccagaggctccagagttgagcttgtccttatctagaaacatgtgaagatgcccaagagcctggaggcactgctgtccttcctgcagaaacagtttctcctcctcccctcagccttgtggccagttcctcttcacatgaagcccctggcatttgctggggaagggactggcctggtacttgctgttagggcaggaaggggcaaaaggaagacttgggtagtaatctgggggttcagatgggtagcactaagccagctggcctaaagatgcaataagttcctaggtagtctacccttaccttgaggaatgggaaaatgaacctcagcccattaggcaggaaaagttgatatttaataaacaaggaaagagtgaactgagaccccaaatggtactcttgtcagctgtttctgtcctcagaaggtaagagagccctgaggtcaggcagcccctctgggtcctggaagatggctttggcgt

SEQ ID NO: 93300 - DNA, 1192 bp, Homo sapiens
aggctggtctggaacctgcccaaacctgggggccggatgaggggctattcagctcctagggcctgcccaaccctcctcagaggtttgtgcaccacctgcaccctggtcagacctggggtaacactcaacaagttcctccccagctctcccatccccagtcttttccctctcccccaccacagctgggctatgcctctttcagccaccacccaaagtcttcacacctgcaggcctggtagcggtaaggtgtgctggaaaaggtgggtccattttcttgccagtgcagctgtgtcaccagctgatccttctgccacacagaggccttaaggtcccggcccacggttaccaactagttaggaataaagattccaaggatggacagttaggggatccacttactgggcaagcagcataagcacctcctctctcctttctccatcctcctcccacccccagcccctcaccttgccatcaggccctaaagccaggtcttcaatctccccttcgtgggctttgaactccagaaccttctccaggctgggcacctgtagccaaacaaccaccatggttaactcaggtgtccagcaagtacactgtgactgatgcccacgccaccccttctaatggcccctcaatgcaagcttcattcacaagtttcccagatgccacgttcaacttctcacaattttgatcctgttgctactgacattcaccctccctaaccctgcaaacccacaccttccagacacggacgtagccatctgttcctccagtggcaagcagggtattatcgtggttgaagcacacaactttctgcagtggatcggagctaaagtctgtctgcaccgcctgcaaattctctaccctgagttctagcccctcgtgctgggtttccgctccacatttcttctctgctggggctgctcccttcctttgtcgaggcccctgctccttggaacctgtaacacaaacacttggccaggttccaggcttctacagtaaggagtactggcccctctctccatggcaggtgcccatacaacttctagcttgctaccaaaaccctacttccagacccacttctttagagacaccaagagtgaccttactcgttcaaccctttccccaagggggtagagagggagctcctcaccggccttctctgccttgttgccctgctgttgatgtgcct

SEQ ID NO: 93301 - DNA, 1029 bp, Homo sapiens
catcaacagcagggcaacaaggcagagaaggccggtgaggagctccctctctacccccttggggaaagggttgaacgagtaaggtcactcttggtgtctctaaagaagtgggtctggaagtagggttttggtagcaagctagaagttgtatgggcacctgccatggagagaggggccagtactccttactgtagaagcctggaacctggccaagtgtttgtgttacaggttccaaggagcaggggcctcgacaaaggaagggagcagccccagcagagaagaaatgtggagcggaaacccagcacgaggggctagaactcagggtagagaatttgcaggcggtgcagacagactttagctccgatccactgcagaaagttgtgtgcttcaaccacgataataccctgcttgccactggaggaacagatggctacgtccgtgtctggaaggtgtgggtttgcagggttagggagggtgaatgtcagtagcaacaggatcaaaattgtgagaagttgaacgtggcatctgggaaacttgtgaatgaagcttgcattgaggggccattagaaggggtggcgtgggcatcagtcacagtgtacttgctggacacctgagttaaccatggtggttgtttggctacaggtgcccagcctggagaaggttctggagttcaaagcccacgaaggggagattgaagacctggctttagggcctgatggcaaggtgaggggctgggggtgggaggaggatggagaaaggagagaggaggtgcttatgctgcttgcccagtaagtggatcccctaactgtccatccttggaatctttattcctaactagttggtaaccgtgggccgggaccttaaggcctctgtgtggcagaaggatcagctggtgacacagctgcactggcaagaaaatggacccaccttttccagcacaccttaccgctaccaggcctgcaggtgtgaagactttgggtggtggctgaaagaggcatagcccagctgtggtgggggagagggaaaaga

SEQ ID NO: 93302 - DNA, 1055 bp, Homo sapiens
tgcctcaggctcccgagtagctgggattacaggcgcacgccaccacgccctttgtatttttggtagagacggggtttctccatgttggtcaggctggtctcgaactcctgatccgcccgcctaggactcacaaagtgctgggattacaggcgcgagtcggatttctttattaaaggttgaccttcatcaacctccattggctccacctcctccgcccgcgccccgcgccccgcacaaaaatggcgaagtcggtgctgggcgactctgcctccgcgccaggggtggagaaccgaagccccgccccgggaaacgcggccccgcggccggctagtgctgacgcgtgtcggcgctcctgcgcctgcgcggagggagccgcgagacaggtgcgcatgcgcagtgcgcgtctgcgagaccgacttggacggagccgagctgaggctcggcttcctgctgatggtcagggttttggcaactccccggtgtgagaggggtagggagtgctcccggcggcgacggggccgagttcaccagccgccggggcagtagtcgaaggcccggcgcggcatgtcctgggtgccgcggtgcgggcagtgaacgcgcgccgggcgggatgggccggcgccgggcgccagagctgtaccgggctccgttcccgttgtacgcgcttcaggtcgaccccagcactgggctgctcatcgctgcgggcggaggaggcgccgccaagacaggcataaagaatggcgtggtgagagcgcagggccactggggctgggtcttgctgcgggctggcggcgattccagggtggccggggggtcgcggggcgggccacactccagcttcgggccctgcccacttctgttgggaagacccgcttgcctgacgcccaggggcgaatttcagtcgagaactcagcgggcggaggagaggcttttaaggtaaagtgaaaactgcacacagctgcagagtcgccaggaacgcttcagctccgcctcagagcagctccaggggtcttatactggccttttccgggaggtcttgcctgccctctagcagc

SEQ ID NO: 93303 - DNA, 1036 bp, Homo sapiens
tttctcactgtacatccacctttttactttctccttacttatttgatctcccctgaggttcgagaatgggggacaagggacatcaggctggattctgctacaggcagaggtccctggaagacagcaggggctgctgtggcagattcgcgattccttcagcccgccttctcctaactagctcttggaggatgtgatgcaactcaggaacaccatggtccttgccttcagagacctcatgtctagcatggggacagacgcgtgagtaacccatgggaggcaggctagcatcaggtgaggggtagccttcaaagtccaactgacggcttggattttcatcccaccccaccacttaacggatgtttgacattgggcaagttatttcacctcccagtataccagttcccacacatctaaactgagtctctttttttcttaaaaggttgctctgagaaataaataagatgcttagcacagtgcctggcacacagtaatctatgaatatcgaacttctgggaaagtagccaggctgtgattgtaccaatcaaacagggacccatgggctctgggcctgcgggatttgaagtcttcacgaatgaaaggcggagacctgaaggatgggcagtacctcctggcagagctggaggaaggtattctggggcgtggaaaggtaaatttaaacacagagtggaaatcggaggcatatttggggcatggcaaatcgcgctctgtggctggaaggtcacgttcattggcaaggggaggaaaggcctttcagggatgtatgcaggcagccttctggcacagacgaaggaggttcaagtcctctccatggacgtgagctccaaagcggaagtcacaggtccaccataggaccactgttgaggttaggcatggccggaaaggagctcccttccccactatcctcctgccttcttcagcatgggcctcctcccaaggcttggccactcccagcatccagcacccccacctctcagctgggttaggaggcaggcggaggcttttcgcgggggctgtg

SEQ ID NO: 93304 - DNA, 1038 bp, Homo sapiens
tctgtgtttgcaggaccacctcgacactggcctgtttcctgagaagccgaggaatggtgtgctgggggacagcagagacaaggaggccatggccctggatggcacagcctatcaggggagcagctccacctgcatcctccaggagacctccctgtgatgttgactcaggaccccgcctctgtcctcactgtgccaggccatagccagaggccaccctgtagtacagggatgagtcttggtgtgttctgcagggacaggcctggatgatctagctcataccaaaggaccttgttctgagaggttcttgcctgcaggagaagctgtcacatctcaagcatgtgaggcaccgtttttctcgtcgcttgccaatctgttttttaaaggatcaggctcgtagggagcaggatcatgccagaaatagggatggaagtgcatcctctgggaaaaagataatggcttctgattcaacatagccatagtcctttgaagtaagtggctagaaacagcactctggttataattgccccagggcctgattcaggactgactctccaccataaaactggaagctgcttcccctgtagtccccatttcagtaccagttctgccagccacagtgagcccctattattactttcagattgtctgtgacactcaagcccctctcatttttatctgtctacctccattctgaagagggaggttttggtgtccctggtcctctgggaatagaagatccatttgtctttgtgtagagcaagcacgttttccacctcactgtctccatcctccacctctgagatggacacttaagagacggggcaaatgtggatccaagaaaccagggccatgaccgggtccactgtggagcagccatctatctacctgactcctgagccaggctgccgtggtgtcatttctgtcatccgtgctctgtttccttttggagtttcttctccacattatctttgttcctggggaataaaaactaccattggacctagaatttgggctcctgtactgtcttcacctgctctt

SEQ ID NO: 93305 - DNA, 1561 bp, Homo sapiens
agcttccctgcagagccggccctgggaagacccctctctgaggactgctgtgtacctccgctctgcttgcagttcgtcctgtactttgtgatggatctcctgaagggcctgccaggcctgccagggctcttcattgcctgcctcttcagcggctctctcaggtacccactttaacgatttccctcaggcctggtgcacctgacccctatttggtacaaggtgatgggtggagcggggtgatagtgggtggggaatccctctaagtttctcactgtgcctgccccatctgtgtgcatgacaagggatagctcatctttgtaggccacagcacaacagagatacccctgttttggttaagagttcttttatggtaccagaaattgatctactcgaatgaaacccatatccacattcaaaaaaggactgtgtccttgccttccaggcccgctctgaggtggcatcaagtccaactatgaggaggtttcttggtggtacctgtcatctccccgctttaggacaccatttcctccatagagtcccatagagctgacaattttgcctcgctcaactcctcatcctcttcctctttttcagcactatatcctctgcttttaattcattggcaactgttacgatggaagacctgattcgaccttggttccctgagttctctgaagcccgggccatcatgctttccagaggccttggtggggttatgcttcctcatctcttcagtctgggtctttctaagcttcatcctgaccattgtcatcagtttgctgtaaaacacccactttatccggggctcagcacttgcctaatgaagcacacaaccttccctgcatgcatggttgtttccatctcagggcatgtcctagggaggtctctgagtcacataggagtgaggacttggtgggaggaagctggggcgtgatgtaatatgccttttgtttccagagagacagaggtggtagtttggctgggcagggagccttgctttaccccattgcttgtgttaactcacaccttcttgtttcctctcctgtccttttcccccagcctttggctatgggctgctttgtctaggaatggcctatatttcctcccagatgggacctgtgctgcaggtaataactatagagggtaggaagcaattttaagggagagaaggaattgattgaaacaggaagttgagaagggcagctatattgaggggaatgaccggggggcaggcgtaagagattcccctttgatggaccgtctttactgtgaacagacttgcaagcagccagaggacgcagggtcattcctgggatgttgtaggctgagagagagctaaggatcagcctcagagaactcaaaacacatccctctccatcagccccctagcagcctttcctgccctctggagttcttttttttttttttttttttttgagacagagtctcattctgttgctcaggctggagtgcagtggcgcgatctcagttgactgcaacctccacctcccacattcaagtgattctcctgtctcagcctcctaagtagctgagggactac

SEQ ID NO: 93306 - DNA, 1010 bp, Homo sapiens
tctgaggattgtggtgtattcttgggggattaacatttcttgtgcaggagttagaaaatcaactttcaactttcccatgttttcagttccttctttccaactccctcccgcacagagtgccaagagtactttaggctgaaaggctaatccatctaggaatgctgttgaatatgagctccctcttccctgttctggagcctctagggctgagttggagtttgggggccatagggtgatagggccatttggaacacagccattggttccctgaaggggccagaacaaatgactgctgagcttcaccccacccccaattcctgatctctcacctcagctactcatagagccagatcctcagctctgcagctccaggcaactctgcctcagaacagggattgcttctccaggtaggtgtctgtccccagcaggatacgaccactctctttggctggtccctttgcctctcagctccgtgactgggttgcttctctccagaatggagaatcgtcattctgaaaccctgactccagcatggtgccctctcacctttcccctctcacttttgaatccagccgctcttcctgcgtctgctgttgactgtgatgttgcaggtagaggggctgagaggtgggtggcagcacttatctagtggtgttggggagaaccttaagaaaggggttggcctggggacgcctgaaatggagtctgtggctgccacagaggcagtctcactgatgatcagttagaagggtgacactggggatcacaggaggcgagggccgaggccaggggcagtaggggaagccctgctgccattagtctccatgctgtgtttcctgctgggctgtggcgccaggctgggctctgctggcttagtgtattgtagtgactgggtctgtgccttcaagtggggctgggaaattctgctaagaaacttaggctagagtttatttttcttttggtactcgggtggagacctaagaaggttgttgaatttcacagctgtgcat

SEQ ID NO: 93307 - DNA, 1030 bp, Homo sapiens
tcagtaaacatggcggcacggcgagcggggcgggcagggggcgggcagggggcggggcccccgcgggctcccggccagggctctcggccgggctctggctacccacgtgtggagaccgggcaggtgggcctggagagcgtgagccggtgccgagaggcaccggggagcggcgtctgagccggggcggggacaagggggcggggaggggcggagcgagccggcctccggcgtgggtctgagatcttaagtgcgagcggtaaggtggtggtctccgccgcgtagagggaagcgggaaaccgagaaagaacgagggtgagggtgatgagggaagggcaaacctcaaactccagcgggaggacacgagcctggatcgccccgggcacctagtcctcttcacctcaatgctgatagcgcatagcgtcccggagcctggcgaggaggtaggagcgggatagacgcttccctaactcattttctttgccttcccaggaaaagggagcgatgttgatctcaggaagcacaaagggaccttcctagctctgactgaaccacggaggtaagggagtgcgttgctgccccagggtgggccagcgccctgactgaagggcgccaggggatccctgctcccggcgcgacagtgttggttagggccagccagaaagctccttaaagccgacccaagtgatcatctcgagtagccgagccaggcttcccttccacattacccccatggtgtctgcctggaagttcctgaaaggtttacgtttagctggctggcaaattttctaaggtgttagtagctattagcattttaaggagggcccccaaagcctttcacaccttgaggaattataggccccaggacagattttgagggaatctttttggaacagttagtcctgcagtggtctcattgccttttgtaggagtcaatgcgatccactgcagtgtgtgaccaaagtgagttcaggtttttatttttatttttatttttattttgagacggagtctcgctctgtcgcccaggctg

SEQ ID NO: 93308 - DNA, 1053 bp, Homo sapiens
tgtaatctctctacgcacgaacgccatatatcgtgcggtggtagggctgtacttttgtaatgcttgatgagttctttacgtacctgcggtcgttttacaccgcgccaaactagggctgtcagattgagaagtctctgcagaaagcataataaataagttcgaatagtgatcttcagagatgaggaccttccctgtgcgatatctggtactgaaagtgtcgggagctgattcggcgcaggactctggaggaagagatggcatctcctagcctagcctgttacaagggtgggacacgagccgtttatccatttatcggccccgtgttagaggaattctggaaacgtgtactggcagttaattcttgatcgccgtttgttcttttcttggcttttctttctggagttctaatgtttctttctcttctgcagatatgcacccaatgtccagggagcgtgcaaaatttgtcaaaagtggccttttattgtaaaacgacacgagagctaatgctgcatgcccgttgctgcctgaatcagaagggcaccatcttggggtgaggggaagacatccctagatgctggatacaggccattccttagcctggctgcttttatacccttatattatttaaagaatccacctattatggtttcagctgtaatcatcacgcagatgtctaccaaaactagatctctttagtgtcttttttaacctttccacactccaggtacatacgggtacctctagcttcctattaagcatttcctactgagtgcaccctaacttcaaactcaaaatgttatgttttgcttccattctcttctttccttcatctacctaaatacttctctgtattaagcttttagaaaaccaacattttccattatcactctcttgctttaatactatatttagtattaaattttgtctcaggacaaaattcaaaccattaagtaccatactagtcccaacccacttttccaacattatttccaattacttgtccgctcaaacctccataatggtctgcaccagccagatttgcctgccctcaaa

SEQ ID NO: 93309 - DNA, 2045 bp, Homo sapiens
tcctaggttcaagtgatcctcccccgcttggcctcctaaagtgctgggattacaggagtgagtcactacacccagcctaaggtacattaatttaaatttaagtagttacatgtggcaagtggcgattctattggataatgcagaattaaaatgtctaccacagctcctagtgtgtgactctgaacacagctgtgttcaattattagctgaaaagggggttgtgtagtcaaatacaaactgtgccgtggctgaagaaaaagaggaacacacagttatattgattactttatttcctcaggctggatctccagaactgttctctggaggaccctggtccaaactttcatcaggcacataccactgtcatcatgtaagtagttaggtacctcccacccaaaaggctaatataatgtaggttgatgcgaaagtgctaacattgtgtactttgcagagacctgcaagcaaaccccctcaaaggtgacttggccaacaccttccgtggctttactcagctccagactctgtgagtaagggtatgggaagagaatcaaagagggatgatgctgtgagtttagcaactttgcatgttatgaccacatttctctataggatactgccacaacatgtcaactgtcctggaggaattaatgcctggaatactatcacctcttatatagacaaccaaatctgtcaagggcaaaagaacctttgcaataacactggggacccaggtatgctgtcttacctccaaacttctgggaattgtcttttctcccttgtattttccactttagatcagaaagacaaagttgcttaagcgcctttcattcagagttctggggctataacccctttgaaagaaaagatcttaagatatactctattatttgtctcacgtgtgtccgtgtaaagagaccaccaaacaggctttgtgtgagcaacaaggctgtttatttcacctgggtgcaggtgggctgagtccaaaaagagagtcagcaaagggtggtgggattatcattagttcttacaggttttggggtaggcagtggagttaggagtgctgttttgcgggcaggggatggatcttacaaagtacattctcaagggtggggagaattacaaagaaccttcttaagcgtgggagagattacaaggaaacttcttaagggtaagggagattacaaagtatattgatcagttagggtggggcagaaacaaatcacaatggtggaatgtcatcagttaaggctattttcatttcttttgtggatcttcagttgcttcagaccatctggatgtatacgtgcaggtcacaggggatatgatagcttagcttgggctcagaggcctgacattattgttactgtttttatctgtaattttctttcttcttcctttatcctagcaatgattgagagaatctaagttgaaacagataattgagaaatatgcctaatgaaatggataaagtgatgttctctatttctctctggcctccagaaatgtgtcctgagaatggatcttgtgtacctgatggtccaggtcttttgcagtgtgtttgtgctgatggtttccatggatacaagtgtatgcgccaggtgaggaattaggccgtctaactagggatacaaggaatgcatagagcaagtcttctcagaaaggagagccacaagaccaggagctgatacaaatttcctataggtggaaaactatagaattgccctagacaaagtgataggtatattaggaaagaactaggtgttaggatgtggccctccgtgtaacgttgtatgggggtgttttttggtctgttgttcacagggctcgttctcactgcttatgttcttcgggattctgggagccaccactctatccgtctccattctgctttgggcgacccagcgccgaaaagccaagacttcatgaactacataggtcttaccattgacctaagatcaatctgaactatcttagcccagtcagggagctctgcttcctagaaaggcatctttcgccagtggattcgcctcaaggttgaggccgcc

SEQ ID NO: 93310 - DNA, 1392 bp, Homo sapiens
agatgaaaaattgcactcccttggtgtagacaaataccagttcccattggtgttgttgcctataataaacacttttttctttttttttcctctctttctttttaaggaaaggcgccctgcctttacgtgtttcttgcttggggtgggagggactgctttagggcagccggttttttcaggtttcccccggttttgcagtgcggagaccacgggggcccactccccgtggctccgcggaccccgccccttacgtgcccggccccgcccctcacgccgcctgtgtccgcgccgccgcagtctctgctgctgccgccaagcgcgcccgaggctcctacgctgccgcgcccggcttctctccagcgccccgcgccgttagccacgtggaccgactccggcgcgccgtcctcacgtggttccagtggagtttgcagtccttcccgcttctccgtactcgcccccgcctctgagctcccttcccatggcggccctagtgttggaggacgggtcggtcctgcggggccagccctttggggccgccgtgtcgactgccggggaagtgggtaagcaagcccggttaggctgcagaccttatcccactctgtgatgcgcctctcctcccaaccttccccgtccagaccccgccattttcccgccagcgtacccccttcccccattcggtgcccatgggccccagcgccataaacccctcgcgaccaaggcagcctccactggggcgtgctcatcgcgcggggagtgttccgaagggtgccctaccggagcccagccctgcttctttcttgcagtgtttcaaaccggcatggtcggctaccccgaggccctcaccgatccctcctacaaggcacagatcttagtgctcacctatcctctgatcggcaactatggcatccccccagatgaaatggatgagttcggtctctgcaaggtagccacacccagtgctttctctacattccttttcaagtcagtaattgttaactattagtgaagtaggagacgttgacaccctgctgggcatcctgcagaaaacatacccactgaagtagtaaagtcaaggactaagatcactagtaactgtagttaggggttgttaagtgccttgggaggcacagagtgttggaggcctcaggaaaaagctaccgcctttgttaagggcatcaaggctccaggtatagctgaaagcattctgtatgtagtgaaggcatggatcaaggaaaagtaaaagaggtgtaagggaacagccttgtccaacttgttaggcatgcagaagtcaggagaaaaaagcctgcagataagttaaatccggtgggcatggagggacctgaagccaaagcagagtcagcttagtttggtaaaggatccattgaaggtttt

SEQ ID NO: 93311 - DNA, 1018 bp, Homo sapiens
ttgaggctgtagtgaaccgtgtatttgtgccactgtactctgcactccagcctggataacagcaagaccctgtctcaaaaaaaaaaaaaaggaatggctaggtgcgatggctcactcctgtaatcccagcactttgggaggctgaggtgggcagatcacaaggtcaggagatctgagaccatcctggctaacatggtgaaaccccgtctctactaaaaatacaaaaaattagccgggtgtggtggcgggcgcctgtagtcccagctactcgggaggctaaagcaagagaattgcttgaatccgggaggcagaggttgcagtgagcttagatgtcgccactgcattgcagcctgggtgacagagtgagactctgtctcaaaaaaaataaataataaataaataaaaaggaaaatgtcattttcagtgatcatcggggcaccctgggcctgtgggttgtgtttcgtataggagagagcgttgttggtaaatggaaatacctatgcaaaagcaccaaaagtttggtatattgaaggccattcaatgtggctgaatatagggtctgtggccacacaatcgggaaaatgctgcaaagaaataacttggcctgaggcttctcacaatctctttccatctacagtggtttgaatcctcgggcatccacgtagcagcactggtagtgggagagtgctgtcctactcccagccactggagtgccacccgcaccctgcatgagtggctgcagcagcatggcatccctggcttgcaaggtatggtggcaagcaggggcatatttgggcagagcacagcatgcctggatggaaagaatcaaggtttctgtaatctgctgggacctgactctaagattgtgatagttggaaggtttagattggagttgggctgggagaaagaattgaactatcactcagaaagaaaatttccaacacaggaaggaactcccaccttccataatcatcagcttagggctaatcttatttcatcaccaccactggattatttt

SEQ ID NO: 93312 - DNA, 1353 bp, Homo sapiens
aacagggttcacacattgcatttggttgataagtctcttaatctgtggaccttgtaacctatttgaaaacaggtcatttttcctgtatctagtatcccatagtctgcacttacttggttacactcctgtagtgttacttagcgtattctttttttccctttatattattttctataaatggatagatttagagttgttcaattcagatgtgatatttttggcaggaatacttcatggtagtatacttctgtcacaatggcccaggattttgatgcacatagaacagctgtgtgtgactggggctctggaatggaagtgcttctggaagtctaacctcacagatgactgagttgtaggaatgtgatccctaagactgtgctattttgacaggagtagacactcgggagctgaccaagaagttgcgggaacaggggtctctgctggggaagctggtccagaatggaacagaaccttcatccctgccattcttggaccccaatgcccgccccctggtaccagaggtctccattaaggtacagaggtagagtgggagagtgttgcaagctctagcacagtagttatattctgcccacaattggggggtgaacacaggagagaatcaaaggaggctttgaaggtaggagttggtgcaggcatatcttatacccactgagcacagctgccaactgttgccctttattcgtctatttctcagactccacgggtattcaatacagggggtgcccctcggatccttgctttggactgtggcctcaagtataatcagatccgatgcctctgccagcgtggggctgaggtcactgtggtaccctgggaccatgcactagacagccaaggtgagtagctggggcctgttcagggcctcagacaagcagcttgggtggaagatctatcccttggtccaattgctaaaagtcagtaggagttgcagtgaagaagatagacattgggacttaacactctcatgggctgggggggctgcaggtgtgtctcctgtaattgaaatactgattttgatgtcatcttttctgcccactccagagtatgagggtctcttcttaagtaatgggcctggtgaccctgcctcctatcccagtgtcgtatccacactgagccgtgttttatctgagcctaatccccgacctgtctttgggatctgcctgggacaccagctattggccttagccattggggccaagacttacaagatgaggtgggacttgtggggagcagaaggggcccatacttgtggcatgaggggtggggtgtctcaggaatgagaagagagttggtgtttattcgtgttgaaataggagcgggggggttgcaggt

SEQ ID NO: 93313 - DNA, 2901 bp, Homo sapiens
agtgaagagagggtgagcagggcctgtgactcggcatgcttctacctccagatatgggaaccgaggccataaccagccctgcttgttggtgggctctgggcgctgctttctgacatcccagaaccatgggtttgctgtggagacagactcactgccagcagactgggctcctctcttcaccaacgccaatgatggttccaatgaaggcattgtgcacaacagcttgcctttcttcaggtgagcctggttgactgggtctgtgaaaatttgaagccctgtgggccttgatgatggaaaagtaaagcacggcagtggatccgagtcccctgtcccactacccacctcgaggctgccagtgtcatgccagggaccatgatggttttcatgatgcaatctcttcaatagtgtccagtttcacccagagcaccaagctggcccttcagatatggaactgcttttcgatatctttctggaaactgtgaaagaggccacagctgggaaccctgggggccagacaggtaagatcctgagtagaactgggttgtggacctaagaacagggttggctccaggatgggcataaggtggacatgccctgggcaactcctagatgtctaggaggttaagggtattggggatgggtggcaaccaacccaagataccgtttaagcttctgttgaaaggaactccagggtcctgggttctggtcctccctctgctcctcctgaggtgcataatttgctctggactcttctgaaagcgagggagctaatccagttgacctcttgggtccagctcagctctaacattctacgaccttctttgcttccacagttagagagcggctgactgagcgcctctgtccccctgggattcccactcccggctctggacttccaccaccacgaaaggttctgatcctgggctcagggggcctctccattggccaagctggagaatttgactactcgggctctcaggtgaggcatgttcctccccacccttctgggcgtgtgaccctcaagaatggaaagggtcttaaggagaagggctaaggttgcagggaggaaatgaaccagatttggggaatgtagagaaagatgtagtaagaaatagaagtcaattattaggggccaagagtacagggagggaaagaagaggagaatgctactctaaggctgtttgcaattttgcttcttcagcagaggctgagatgccattcttgtccttttaggcaattaaggccctgaaggaggaaaacatccagacgttgctgatcaaccccaatattgccacagtgcagacctcccaggggctggccgacaaggtctattttcttcccataacacctcattatgtaacccaggtatgactggggcaaggctggaatgaaaagaggactgggcaggggggcccagtggtcactgtgggttattaaactttgattgcctctctacccacaaggttctgatgcctgtaactcccctctccatcctcaggtgatacgtaatgaacgccccgatggtgtgttactgacttttgggggccagactgctctgaactgtggtgtggagctgaccaaggccggggtgctggctcggtatggggtccgggtcctgggcacaccagtggagaccattgagctgaccgaggatcgacgggcctttgctgccagaatggcagagatcggagagcatgtggccccgagcgaggcagcaaattctcttgaacaggttggaggggtgtttgggtaaaggaagaatggtggtgttttttttggtagtgttattttcttttttttttttttttttttgagacggagtttcgctcttgttgcgcaggctggagtacagtggcgtgatctcggctcatcataacctccacctcccagattcaagcgactctcctgcctcagcttcctgagtagctgggattactggcatgcgccaccatgcccagctaattttgtatttttagtagagacggggtttctccatgttggtcaggctgatctcgaactcctgacctcaggtgatccacccccccgaccctcggcctcccaaattgctggggttacaggcgtgagccactatgcccagccatgttattttctttatatctttttttatgtgggacaggcacaccttggacagtaggaaataacctgtttgttcatctcttccactcattgcaggcccaggcagccgctgaacggctggggtaccctgtgctagtgcgtgcagcctttgccctgggtggcctgggctctggctttgcctctaacagggaggagctctctgctctcgtggccccagcttttgcccataccagccaagtgctagtagacaagtctctgaagggatggaaggagattgagtacgaggtggtgagagacgcctatggcaactgtgtcacggtgagtgaatgggggaagggtgggcgtcgtgtcaggcaggatgagcttttggaagagcagaggcccaggccaaggtctttgagagttgtatgtccctcagacccaggttaggtgcagccccagaggtaacaggaccctggggtgcagccttctgcctctcctgactctgcttggcagtgacctccatggcaccccccttcacaggtgtgtaacatggagaacttggacccactgggcatccacactggtgagtccatagtggtggcccctagccagacactgaatgacagggagtatcagctcctgaggcagacagctatcaaggtgacccagcacctgggaattgttggggagtgcaatgtgcagtatgccttgaaccctgagtctgagcaggtaagctctaggccctggaactgatagtctagttgttaccccctcttcttgtataatttttggcccttgaggttgaggtcttttgggcttaca

SEQ ID NO: 93314 - DNA, 1016 bp, Homo sapiens
ggttacttttctctcctttctgagacctctcctagacagggtcttctaggccagtgactttattctccttctttgcagtattacatcattgaagtgaatgccaggctctctcgcagctctgccctggccagtaaggccacaggttatccactggcttatgtggcagccaagctagcattgggcatccctttgcctgagctcaggtacgaggatgagggagatatcacagtggggaagtgggtcgggggctgaggaaaatattgatgggacagggaatatgaaaaggacattggcctggatttgtgggaatggaaagagctatccggaagctcaccctttatgcttccttcactgtccttctggcatcccacctgctggaccccaggaactctgtgacagggggtacagcagcctttgaacccagcgtggattattgtgtggtgaagattcctcgatgggaccttagcaagttcctgcgagtcagcacaaagattgggagctgcatgaagagcgttggtgagactcatgccctgggcacccccatggggccccaccatgaccaagaatcttaaatgtcaagagttccctggcatggccttttacgtcctatgggagcaggtgcttgagacatttcaaactaagattatagtccttgtcaggagttggggaggcatctggaaatctgtgttggaatacagaatctctgggataggtgcaagccatcagactatctcatctcatttttgcagtatctcctcctctggcactttgtgctttggtcactaaatgacctttttttttagtatgatgtttacatcagagcagggcatcataaacctttttggtaacaaggaaatttattagtgaatgatgaatggccgtaacgttacccagcagtggcagagcatgttagaattgagttagtatgtttctttgtggtatccctttagttgccgaagaccgtcctctaacacatttcaaccaaaacaaaaatatacgtgtaccagacacagcgc

SEQ ID NO: 93315 - DNA, 1026 bp, Homo sapiens
ggaaaagagctataagttaagatttctttttgtttgtttgtttgttttgttttgtttgagacggagtctcgctttgttccccgggctggagtgcaatggtgtgatcgctgctcactgcaagctccacctcccgggttcacgccattttcctgcctcagcctctggagtagctggggctacaggcgcccgccaccactcccggctaatttttttgtatttttagtagagacggggtttcaccatgttagccaggatggtctcgatctcctgacctcgtgatccttccgcctcagcctcccaaagtgctgggattacaggcgtgagccactgcgcccggccattaagatttcttagttgtgaaacaccatgaatcccaccatcatgtgacttgccttgagaatctcccagagtcttgactataaaccataagcattatgggcagtgccttcttcccaccccttccacctccacaccttcattccttccattctgttcttccaggtgaagtcatgggcattgggcgttcatttgaggaggccttccagaaggccctgcgcatggtggatgagaactgtgtgggctttgatcacacagtgaaaccagtcagcgatatggtaagtagctcccctcccctggcaatacccctaaaatagaccctgcttctcatcgcccccagaccatgagcttgttaccagtaacactagcagcagtcatcattggacatttgctttgtttccactttgctgagaattttgagatgtctcattagcacgcaagggtgtattactagacttgtttttacagatgaggaaactgagacataggttatagaaattactcaaagccacatagccaatgagaggtagacccaggattggtatccaggtttttgcagttacacagcctgtgctctggtgtacagtttccccttcctgagacaagagcagctacttacgctcaggcttttagatgggctggcagtagcttccgtctgtctaccccctttctatcaggagttggagactc

SEQ ID NO: 93316 - DNA, 3830 bp, Homo sapiens
gaggaaggagagtgtgggagagctttagaggcttctgaccttggttccaaggatatttcctctcatctgtgccctggggtctcaaccctctatcagtctgtaccctactctctgggcctgtgtttcagaccctttttctattttagcacagagctggctgttcgcaagctgcgtcaggaactggggatctgtccagcagtgaaacagattgacacagttgcagctgagtggccagcccagacaaattacctatacctaacgtattggggcaccacccatgacctcacctttcgaacacctcatgtcctagtccttggctctggcgtctaccgtattggctctagcgttgaatttgactggtgtgctgtaggctgcatccagcagctccgaaaggtcagagagttcattttctttccactttccttgctattctgttcatctctagcaattgcttggcactaatcctggcatttcctattaattgccgtcccttactttggtcatagagctttggggtgggggtccttttaggccatctctcatgccccacacggtatatgaatctcttccccaacactttgtacctccttccctcccaaggcaggggtcctgtacagctctttcagaggaagctgtgctggcagtctctgaagtaggggctttggcttagtttctccacgattttctccacgattttcctcccacctgactgctaagtacccttcccctccctcttgcagatgggatataagaccatcatggtgaactataacccagagacagtcagcaccgactatgacatgtgtgatcgactctactttgatgagatctcttttgaggtgagggagatggaggcttcctggtagcttgagtggccagggtcgagtagaacagctggctgacctaagattctttgaaacttggtggcggctgagggaagcagtgagcaggaaggctcagattcctgccctcttttgctgccaccacttgtttctccccctgcaacgtaggtggtgatggacatctatgagctcgagaaccctgaaggtgtgatcctatccatgggtggacagctgcccaacaacatggccatggcgttgcatcggcagcagtgccgggtgctgggcacctcccctgaagccattgactcggctgagaaccgtttcaagttttcccggctccttgacaccattggtatcagccagcctcagtggagggagctcagtgacctcgaggtgggctgggacctggtgggttacccggaggctggatgatgcttgggggaaagtgtgaacaactcagctaagctccctgcctcctgtagtctgctcgccaattctgccagaccgtggggtacccctgtgtggtgcgcccctcctatgtgctgagcggtgctgctatgaatgtggcctacacggatggagacctggagcgcttcctgagcagcgcagcagccgtctccaaagagcatcccgtggtcatctccaagttcatccaggaggctaaggtgggaggctgcagacagtgaagtctctgagggcatgctgccagccctggaggagacttccttctctggtccagcagaatcataggcaccagggctgggaacagtgggctatgtggggctcgttaaaggaagagacaatcctagagtaagtgagagaagaaagtggccctatgtcccactgtctgtgtccccccgctaggagattgacgtggatgccgtggcctctgatggtgtggtggcagccatcgccatctctgagcatgtggagaatgcaggtgtgcattcaggtgatgcgacgctggtgacccccccacaagatatcactgccaaaaccctggagcggatcaaagccattgtgcatgctgtgggccaggagctacaggtcacaggacccttcaatctgcagctcattgccaaggtaataaggctaaaggaaagaactaaagggccacagctcttgcatgttctgtgctggccacagtgccatgaagccctgcactgtctcctgccttcatccaagtaggcagggaagctggagggaaagggctgtagctagagctcatggtgttggggcttatgacagtcagtgaccctgaaccctgctcagtctgatcccccagagctgaggacggagaggaagagtctaggcctatagatagtgtcagcaaggccaacctgcagaaggcctgaccagtcttctctgccccaggatgaccagctgaaagttattgaatgcaacgtacgtgtctctcgctccttccccttcgtttccaagacactgggtgtggacctagtagccttggccacgcgggtcatcatgggggaagaagtggaacctgtggggctaatgactggttctggagtcgtgggagtaaaggtaaggaatatcgaaacccttggggttagcagaaaaatagcgggagagagttcactcaccacacagagttgtcagtatgtaaaccaggcactgactgcaaggcattgccggatcgtgggggtaatgaggtggtcattgtcccttaagagcttactttatggtaatgggagggaagagaagttggatccccaaaaaagctttggtatagaacagtccgtggtaaaactacatattcgacctgtaaacagaatgctgcaggagttcaagagacaggaggtgctgcttccaaaaggggtgatctgggaaggcttgagcgaaggggtgctatttgaattgagttttgaaggatggttaaggttttttatttgcaagggcacatcctaagcagaagctgagggatgaccccaagtacgtttggaaagcaggagggcacacagagagggcaggctgaccctgccattcagatgggatcaagcacagggtactgtgtccgtctctgctggtgagggaggaggtcctctcacaccttggccctctctcttccctcccgcccctttaggtgcctcagttctccttctcccgcttggcgggtgctgacgtggtgttgggtgtggaaatgaccagtactggggaggtggccggctttggggagagccgctgtgaggcatacctcaaggccatgctaagcactggctttaagatccccaagaagaatatcctgctgaccattggcagctataaggtatcagaatccaggagggcttcccgagggccgtggctccctgggccagggctgaccttgaaatggaagacaggaagaaaacaatttcatccttctgtttggtttcagaacaaaagcgagctgctcccaactgtgcggctactggagagcctgggctacagcctctatgccagtctcggcacagctgacttctacactgagcatggcgtcaaggtgcaggaactctggcaacctaccccactgctgcccttccccaagggggtgaaaatactgcaccaaagaattatctgggctgggcacggtggcatatacctgtagtcccagatactcaggaggctaaggcaggagaatctcttgagcccaggaggtagaggctgcagtgagctgcgagtgtgcagtgagtgcaccactgcactccagcttgggaaacagtgagatgctgtctcaaaaaaaaaaaaaacaaagaattatctcctattcccctgcttttattattaccattatactagtaagctatattccatgcagaaagcagaatacacaggaagcaaagagaaaagtctcttaaaatctctgtaccactgttctgatatttttccttccaggattttctctgtgtacatgtgtgtgagctcatactgcacctagtccttggtaacccatcttacttagtgtagatatctttcctgccaagaaatacactt

SEQ ID NO: 93317 - DNA, 2467 bp, Homo sapiens
tggcaggtaacagctgtggactggcactttgaggaggctgtggatggtgagtgcccaccacagcggagcatcctggagcagctagctgagaaaaactttgagctggtgattaacctgtcaatgcgtggagctgggggccggcgtctctcttcctttgtcaccaagggctaccgcacccgacgcttggccgctgacttctccgtgcccctaatcatcgatatcaagtgcaccaaactctttgtggaggtaactgagacccatgtgctgggagggagactgccagtgttgatgggaagaagaaagagggaggagtgagtatggaacagccatgctagtaataaagctttgtggctacagagggagagatggtgggtatagagtgtgcagagcctggtttatgggaaaaccacatctctccctacaactcccaggatcacccttcccttaaagctgactgctttccacttgcaggccctaggccagatcgggccagcccctcctttgaaggtgcatgttgactgtatgacctcccaaaagcttgtgcgactgccgggtaagtctttggggagaacttggcttctgaacactggcagcccctggcatagagacctgcagtgtggtgaaggatggctggggggcccactctttgtcctggactgcacagactgtgaagaccccagaatgtttctcactctttcattccttaatccacagtgtccacagtggccttgtctgaggaattttttttttttttttttttttgagacagagtcttactccatcgcccaggttggagtgcagtggtgtgtgatatcggctcactgcaacctccgcctcccaggttcaagcgattttcctgcctcagcctcccaagtagctgggattacaggtgtgtgctaccacaccaggctaatttttgtgtttttagtagagacggggtttcaccatgttggtcaggttggtctcgaactcctgatctcaggtgatctgcccacctcggcctcccaaagtgctaggattacaggcgtgagccaccatgtccagctcacccttcctatttctgaatcttcctgtaatcttgctgcttccattttctcccaggattgattgatgtccatgtgcacctgcgggaaccaggtgggacacataaggaggactttgcttcaggcacagccgctgccctggctgggggtatcaccatggtgtgtgccatgcctaatacccggccccccatcattgacgcccctgctctggccctggcccagaaggtgagccactgcactcttcctggtattggagacccatatgcccctaccagccacccttgcttccctgagcccttttccttctgccccgccctatgggcccaggccactggtgccaggctagcctgtgtgggcatgggtgccagtgagccttacctctgtgtatcctctccagctggcagaggctggcgcccggtgcgactttgcgctattccttggggcctcgtctgaaaatgcaggaaccttgggcaccgtggccgggtctgcagccgggctgaagctttacctcaatgagaccttctctgagctgcggctggacagcgtggtccagtggatggaggtagggagtgtgcatgtggcaggaggccaccacccagtgtctcctggcttgtgggcccctgcctaagtgggctggtagcagtgaggattcaggggagctcctggggactctgggctctgatgagcacagtcagagattctgcacactccttcatcagttctttctgctcccagcatttcgagacatggccctcccacctccccattgtggctcacgcagagcagcaaaccgtggctgctgtcctcatggtggctcagctcactcagcgctcagtgcacatatgtcacgtggcacggaaggaggaggtaagagtacacctgagatcctgctgtccctgttgctttcccagtaacaccaaaggtcagggtagtccttaggggcaggagacagcaggaggagagtctggagacagcaggaggagggtctcgagccagcacccttgcaggtctacatcatcattttttgagcagggatgttggccattgggactttgtgtagggcaaggcatatgggtggtgcctcttctggatcttcccattgttccccagatcctgctaattaaagctgcaaaggcacggggcttgccagtgacctgcgaggtggctccccaccacctgttcctaagccatgatgacctggagcgcctggggcctgggaagggggaggtccggcctgagcttggctcccgccaggatgtggaagccctgtgggagaacatggctgtcatcgactgctttgcctcagaccatggtgagagaatccagcatgtacctcctctgcccagtggggcttgtgggacagccctagcaagaaaatgggaagcaggccaggcctcaggactctactaggacagggtcttgat

SEQ ID NO: 93318 - DNA, 1003 bp, Homo sapiens
aaagaatacatgggtaaaagtgtgggctccagaagatggcagcagtcctgttgcccttgtttctagttcccagaaaaaatgagcattgggagtggtagtgagcataaggaggttgttggaagtgcagtcctggggtgtgagtgacttcctagacatggaggtgattggtcctgagggtaatggctttctttctcccagctccccataccttggaggagaagtgtgggtccaggcccccacctgggttcccagggttagagaccatgctgccactactcctgacggctgtaagcgagggccggctcagcctggacgacctgctgcagcgattgcaccacaatcctcggcgcatctttcacctgcccccgcaggaggacacctatgtggaggtgtggggatgaggcccagagcaggaggggggctctccagccctaggatatgttctctggggatcctttccctagcataacccatgtcctctgggcaggtggatctggagcatgagtggacaattcccagccacatgcccttctccaaggcccactggacaccttttgaagggcagaaagtgaagggcaccgtccgccgtgtggtcctgcgaggggaggttgcctatatcgatgggcaggtacgcaagtagcccctgcctgatctcagtagtgccctcttctgcaccacgttcatttcttcccttcccagcacatctacactgtcccactatgtgcaccactgccctggaccaggggttgggggcacagctcccccaaggtgctttttgtccttgctgacatctacccctttaggacctgagttctctctgctccctcctgagtgccctgccttctgcctgcaggttctggtacccccgggctatggacaggatgtacggaagtggccacagggggctgttcctcagctcccaccctcagcccctgccactagtgagatgaccacggtatccacactactgggctagggggctgggaggtgttagtctcagggc

SEQ ID NO: 93319 - DNA, 1067 bp, Homo sapiens
ctcagccataaatgtatatctgtcctcttgtcctgtttgcagctgaggagccaaaggagaagtcctctcggaaggtagccgagccaggtgagactccaccctgacacacactcacctcggggacctctgatctggccttggtaggaggaaccctctgaccagccttttctgccccatccctcactgcagagctgatgggaacccctgatggcacctgctaccctccaccaccagtaccgagacaggcatctccccagaacctggggacccctggcttgctgcacccccagacctcacccctgctgcactcattagtgggccaacatatcctgtccgtccagcagttcaccaaggatcaggtgcctggggcagggaggatgggaccacccagagctttgaggatttggaaagctggggctaggacctttctagctaacttgggctctttcttagatgtctcacctgttcaatgtggcacacacactgcgtatgatggtgcagaaggagcggagcctcgacatcctgaaggtcaggatcagggccgggggtagggtccaggccatcgcctgcccttgggccgcatcagcgcagggccgcgcagtggtcagagtgggtcttcctccccctgccatcccgtccccttatgctagtccatccctctgctgctgtagatcttcccccacgttttccctccccaaagcaggatttagctggctggggaggccctgagcatgagaccatcgccccactagtggggtcttctggtctgggctgctgcaatcatgggagagagctagggtgtgtcctcctttcccagctcgttcagacacttaatgatgggtggttttctggaggcagagcctttagctcagagtgacaccagtggtggaaacgtcaaggctctgacaggtcacaggggaggtttgggtgcagaagggtcctcacagcacccctcaagtgtcagttggggtggtggtgcctagctggggtttccccagggtggacacgcatacgtacaccttccatcttgctctttccctaggggaaggtcatggcctccatgttct

SEQ ID NO: 93320 - DNA, 1039 bp, Homo sapiens
acggaccagcagctcctttgcagcagccatggcccggctgggaggtgctgtgctcagcttctcggaagccacatcgtccgtccagaagggcgaatccctggctgactccgtgcagaccatgagctgctatgccgacgtcgtcgtgctccggcacccccagcctggagcagtggaggtgaggccagcctgggtactgagatggggttaagaaggctggacccaggggcatgagaacccttctgcccacgttttctgtgttttgggccagatgagtgaggggaccccagaagagggggactggcagttggggggcctctgagctgcaaaagacaggattttccccttttttccagctggccgccaagcactgccggaggccagtgatcaatgctggggatggggtcggagagcaccccacccaggccctgctggacatcttcaccatccgtgaggagctgggaactgtcaatggcatgacggtgagggtggtggcagggtttggatccctgccaggggacgatctagagagggaggcaggaagtggttaccccggtacaggacagctgcatcaaggaggccttcattctgctccagaggcttttaaaagcttggaaatgatgtcggggggcactcagtctgggatccctgtggtgactggattcctctcctagatcacgatggtgggtgacctgaagcacggacgcacagtacattccctggcctgcctgctcacccagtatcgtgtcagcctgcgctacgtggcacctcccagcctgcgcatgccacccactgtgcgggccttcgtggcctcccgcggcaccaagcaggtgagaccctcacagccctgcctggaagccatggagatgtgggttgggcagtcagagcccagcgctgcatccaccatggctctcctcaccctccaggaggaattcgagagcattgaggaggcgctgcctgacactgatgtgctctacatgactcgaatccagaaggaacgatttggctctacccaggagtacgaagctgtgagtgctgggct

SEQ ID NO: 93321 - DNA, 1038 bp, Homo sapiens
gcacatgatagtgcaaactgctctgacaccattcaggaatcacctacttcatccagagagtaacagcgtattctagagatgagaaaaggagaaggacctcgttttttgagaacttagtgtgaacaggaacttgatgcgtattctcatttctcacaccagccttccacccatttcacagatgtggacactggctcagagaagtggtgggggccggtggctcacccctgtaatctcagcattttgggaggctgaggcaggcggatcacctgaggtcaggagtttgagaccagcctggccaacatggtgaaaccctgtcgactaaaaatataaaaatcagctgtgtttggtggtgtgcgcctgtaatcccagctacttgggaggctgaggcaggagaatcgcttgaacccaggaggtggaggttgcagtgaggcaagatggcaccattacactccagcctgggcaacagtgacactcttatctccaaaaaaaaaaaaaaaggtggtagcttgctgggccactcaccttgagactcatacgcaggacttcttgacttaacaacccacctttctgttaaaaggaaaggtcatttctggctttaagggcatccaaaaaccagtgggaaagacaagccacaaatctaagcagtcctgtagggaaccagtttccagaagaggtcagcacagatacggagtcggagaaccctgtgccgtggggtgtgagctgtgtcgtgaggaaggacgaagagtctcctttacagtacagttcgagaggaatggaaattgtgtctgcggtacagtgaggagacactgaacgcagcaggagattcctactgagtattgtgagggttgagagtctgacggaccagaacagggggcttggatgtcaattccaacaaaaatattaatttacaaccacaggtactatttgaaggagggtattaagtataatgctaagtcctagagtgtggaggcctccagtcctgctaatgttaaccctttccagtctttccaaacccagattcctgcctgacaaggtctc

SEQ ID NO: 93322 - DNA, 1053 bp, Homo sapiens
tttttttttgagacggagtcttgctctgttgcccaggctggagtgcagtggcgcgatcttggctcaccgcaagctccgcctcccgggttcacgccattctcctgcctcagcctctccgagtagctgggactacaggcacctgccaccacgcccggctaattttttgtatttttagtagagatggggtttcaccgtggtctcgatctcctgacctcgtgatccgcccgcctcagcctcccaaagtgctgggattacaagcatgagccaccgcgcccggccaggctggtctattcctgggctcaagtgatcctcctgcatcagcctcctaaagtgctgggattacagccatgagccaccatgcccaacccacctataggctttaaaagggtagttggcaattcccagtgtaaaattgcaaagtgtctgtagttctgcagtaatatcccctgggacaatgagggggcattggctggtggaggtgaggagcagagaatgagggccaggatgggatgagtgcttaatggaagactcgtctggcaacagtgcctagaagagagaaaggagccatttcaccatcaggacgccaattaggaagttgttgcagtaaatacagatcatgggtgaagaggttctagattcagagataggaatagatgttataacactgaggagagaggagagtgaagaatgactgcacagtgtgggacctcaagactggaagaaagaagactgatgaaggtagaccagatagccagtttggggtaggggagggctgattccatttgggcatgatacctagctgccgtgggccatctatatggagatgtcatggaggtaatggagctggggagttggagcaagcacaatagagacaggtggcatttatatgtgacaacacaagtgccatgagagcagggactttactcactgatgtatcccaaacaccagaacagggttgagcacatagtaggtgctcagtaaatgtgttgaccgaagcatcaacataaaggtaattgaagcttttaaaatatgcatatttgttcaccaagagaa

SEQ ID NO: 93323 - DNA, 1460 bp, Homo sapiens
gttgcagtgagctgagattgcgccactgcactccagcctgggcgacagagggagactctgtcttaaaaaaaaaaaaaaaaattagactctgtgctttgattttagatctagtgcttcaggccttcccaccatgttgataaaatcccagcccaaagcaaggacgttgagcattttcaatagcccatgcatatttctgtgagccttcctcataatagaaatatctttattatcagattatttttactataaaagcaatatatacttgttttaagggtacaacaaaggaaaagtatataaagtagaaagtgaatgtttcccctgtaatcttactttccgagaaaactgctaatcctagtatggggtcagtatttctacataataacaaaaatggggtcatcttataggtgagatcgtgttacctgtgtttatgactcaaccatgcagcctagactcatctttccatgtcaagaccatagatttcattcctttttaaaggtgaggcttttggactcatcagaggtagccccctccctgatgtccagctgggagccttagcccaggctgggtgagacgccactgcccacgtcagggtgtgggaggctggcgaagcgaagggctggcagtccatcacgcccggcggcaaggccgccccagctgctcgccatgctttgctggttcctgatactttctcattttacgtctcattgattataggccccaggtgacaggatgggggtggggaagagtgaggaaatcgaggagagggaaggagggtggggaacaggaggactcgattttcaccctatgaaatgctttaagccacagcctgtcctatctgtgcgatgctgggtccctttgcaggggaatgctcagggcaggtgaatgccttcaccaagcatccagtccatcttctgcccatagaaggaggagactcagggagggaaaaagacttccccagggtcagccagcacatgcccaggctctcattcccactccaggcccctttgaagctcttgcctagttgagtttctcagcaaatctttcctcagcccttccagcagcctgctgccgctggcactcccgtcctggggctctggggtcagaccctctggttctgctctgcctttactattattctagtcacagttaacctctctgcgtctcagctttctcaattataaaatagtgattacgtgatatcatgggtgtgaatgtgcctggtatatagaaggtgtatataagagttagcttttgggttgaacccaggatgcaggggagagatttcaggagaagagagtggcccggcaccctgacagcagggacaggaagcagcaatcattgagcttattttgtgcaaggcactgtggtgcggacagtatcctgtgcacctgacagatggagaagcaggctcacctgcccatggtcgtgcagctggttccactcggttctgagttctggcc

SEQ ID NO: 93324 - DNA, 1098 bp, Homo sapiens
aggaacccccccaagcctgagccatggccctgccctcaccccactgccaggccgaggctcagccccagactctcagcatctgctgccctgatcacagagacgggaccgagccaggtccataccccttcctctctccctcctaccacctgccagtttccccagcctcagccccagccccagccccagtgggcaagaccaaagtgtggcggggagtggggtgggagtcaggggaatagatgtgactagttcaggggcggggactcccaggcctcagtgtggcagggtgtgttgaaggcctgtggtgccatctccccatggttcatgtggagccacgaacatcctttccctgcagtccatttgtctgtgtggcaggctggctggctgggggcatctgcctgtctatgtgctgttggtgtgcctatgcctgggggaggtcagtaggggccccctccccacatggccctcgctctgtctatgcaggggccccaaagcccgcactttgtccgtgtgtcttagccctgtggttttgtctgtgtgtgtgtgtgtgtgtgtgtgtgtgtgtgtgtgtgtgttcttggtgctgtggcctgtgtgtctctgtgcctatgtggctgtgctatggtttctatgagtctgctccatccatgtgtctgtttgggggtctatctctccatccctctgttggtgctgtgcccttggctatccctgaaagagggaggactccgctgcagctccaccaataaacttgtgtctcactgcatctttcagcctgtgtgctgactcctcaggagggggaagtcaaataggtcacttgagaacaacagaatccctcctgtcccttcccagcctctggagtgacctcccacagacctcctgtcccttcccagcccctccaccctcagatggagggtaaaagccaccagtctctttactccccttcccctggctcacagcatgcctgggtccttggctcagggacagtcccatgtgccctgggcttggttgcaggagaatgctggaaggtaaggagccaaggaatccctgggagtcagtcgttctcagaggtccctgcatgccagtgggcctcaggctggctgg

SEQ ID NO: 93325 - DNA, 1114 bp, Homo sapiens
cagcccactccttcccaggtcccaaagcttccttcctcctccctccagctcctccctcccacctcccaggactctcccagacatgagtcatgttccctgtcccctcttcagggttttgaggggcctctcaggtcatgtttgttcaagatacccctagatcttcctctgaaaggtccctggttgttgggcttaggggtctctttctctgcagcctcaatacaaggcagccgaccccatcagcaccttcctcttctccatctgtgcccttggatccaccgctcccaccctccgagacgttcttcgaatcctcatggaaggtgagtcgggcaccacagctccccatccctgtggccctctctgactttactctcgcagtgggccatcacttttttctttgaagatagtacgggaagaaggcttggctcatggggtctgctgctggaacaaggatttgggcatagggtgaattgtaggggtcaaaaggagagtgcatacaggataggggaggtggaatccagtggtgggggtgctgcttctgggcaggagtagccctagcagtaaggcatgactggtgctggttgcaggtaccccccgcaatgtggggttcgaacctgtgcgggatacgctgttgtcggtgccaggagtccgggcaacccatgagctgcacctgtgggcccttacgctcacttaccatgttgcctctgcacacctggccatcggtgagtcacactggccccagctagttactacctggaacataccccaccccaaacatgggaccatagcttgagttactggaattgtttcagtcttttttgatctgtctctgtttctctgtgtctctctctctcacatagacacatacacacacacacacatgcacgtgcgctcgtgcatgttggagacaaggagtctccatccactggatgcagtgttctgggggcagtttcaccctctttgaagtagcacagggaaccaacaaccctttaaaagatcattagtacctacaggtctagtgatggggcacagttaggtaaattacagcacctccaccctgaggtatcacataactgttaaaaatgatgcttgtgaagactgtacagcaactatgaaa

SEQ ID NO: 93326 - DNA, 1053 bp, Homo sapiens
ctcttcaggtgtccttttgattttggttcagcccctgctacgtcacccctcttccccgctcaatatcggttgttggttgggggtttcggagggccagggagaggaaacagcctttccttgtctctaaacagcatgtagccaccccacatgcccacacccccacacaccaacagccaggcttccttagtgcccaaattatgcagaacaaaagggagcagcctgttgatgggtggccaccttgatgactggctgtgctgtgccttacaaggccagggaatgaatgttgcccactgcccccaaagccacccagcctctgcgcttcagactcacatctccaactccagtccatcttcactcatatgaccattagtcaccgaatcctgcagcattttctgaaaggcatttcctaacctacctgcccctccagggaagctctggcctggtttgttctagacccctccatttcctctcttctcctctcttcctcccatcagcaaggtcatctcagtgctcaggagatatttgttcaagcagtcagtgtatctccctttatgttcctttgagcccatcactttcctcctcagccctcccctgacacttcacgcttagactccaagccacaaacctcgtctttgtcattctacatgtctggaacacccttctccaactaggtctcatctccttaaacatacctttctctgtgaagttctccgagcccgctgtgagggagtgctcccttccctgcaccccaaagtgctttgttcataaccctcctagcatcaacctgtccttatgtagtaagccatttgttacaatctgtctttcccaccagaccaggcttcattatgtgtgctctgcctggtgcacctcattgaatgaatgaggatcggtttcacagcctccttcaccacgccatctcctctggaaacacatccagaatcatacacgcccagattctaagtcttggatggggctttggaaattcaagaaattaatctaccagtatttcagttctctgtacaagcaccaaatgttccccctacctccctcaaa

SEQ ID NO: 93327 - DNA, 1004 bp, Homo sapiens
tgtccgttcaggctggggccgccctggtctttcaaacccagcagtgagcttggacagacccagaggtgtttactccaggtaataggagctctagacaaaatcaggctcttttcctggcttagacctctccctgcttacaacacctctaggatgtgggatatctagaggtctgtgtagctggaggatgctgggaaatgtgaggagaagatgtttcctccttaaaattggaatctttctgatcacctgaattctcctgctagccacaaatcccactcactcttatcttatccttgtccttctgtcatcgtttacctgcctaatccctgaaggtagtgagtttcctgtcactggaagtgcacttctcggtacccttacttgtagaagttctcacagatgctgcttctcctctggctcagatcatgtctactgtgaaggaagcagcacaccggctgtccaaaagtgagatgagcctctatgcagtgctggatcttaagaagggcgcctcacctgaagacttcaaaaaatcctacaggttcagacctcagccctttattgatccttggaatttcccccttaaacctttttctttctgtatctcttttgctatctgactctttttttttttttttttttttgagaggaagtctcgtcctgtcacagagcagagacagagactattgagagtgcagtggcacgatcttggcttactgcaacctctgcctcccaggttcaagcaattctctcacctcagcctcctgagaagctgggactacaggcgtgcaccaccacgcctggctaatttttgtatttttagtagagacagggtttcgccatgttggccaggctggtctcaaactcctgacctcaggtgatctacctgcctcggcctcccaaagtgctgggattacaggtgtgaaccactgtgcctggcctacgacccgtttgtttgtttgtttgtttgtttgtttgttttgagacagtctcgctctgttgcccaagctgta

SEQ ID NO: 93328 - DNA, 1140 bp, Homo sapiens
ggcctctggattcccttctgtggctcactcttgaaatagctctgctttctctcctgtccctttaacaacttgtctcgtcccagatagcagtcttcggacagtctctactttctgctctgcaccctcgccaggctcacgtagttttagctatccctctctctctgtaaaattctccttttgtttcccaaatgactctctcttgttcactctgtgggtagcactgtttgtcccttactccccagagagcagattaattttactgtgggggttgggagacaaggggcatctgcatgacattccaattcccaatttagctcatgtaaggcgagccacagctgtcatggagtgagtgaccctgactcactcaggaatgggtgactcccttgagcaagggcaggggtgagtgccactgcttacagtgaaaggtgggtcagcaaaggtgctgccctctcactctgaaggctcctctcagcccgggacccctgttctggcttgggcccttcttccaggacagtgacacagaatctaaatctgcctgtgtgagaggcacccatacatagctcagggtgggaggaaagatcttgccagacttagagtcagtagcggttgcctcctccacaggctcagccagtgaccctggtcctcctcctcaagactgtgtgattcagaacagcagctccagggactacatcaagcctcttgtccaacacctctggctcatttttgttcttccctggccttttcttatatcaccctaggaaaagaagctcaagaggctagaaatgactgttgtgccaaggcctggacctacctatgagcatgcccccgaggaaatgtgggattctggtccgtgaacacatccctggagccactccaaggactcaaatttgttaggaaattgggagaaggtgagctgggcagaaaggacctgaatgccagggacctattttgggcacccagggaatcaatctccagggaaattttagagcactgacaaagtcataatcacaaggctccgggaagcctctgacccagctccacagttgtccaggactcctactctccaagccaggcttgccccacttgtgagcactggtcttctttttctcctacaagtcttctccacttgatcttaggcaa

SEQ ID NO: 93329 - DNA, 1010 bp, Homo sapiens
ctgtcctcagcgtccgtcagcctgtatgactcacctggctacgtgtgtggtgactcatgctggacagtgtggctatgatgggaactgacacgctgggccctttgcccaggctcagattccctcagggcccataactgccagatggaagattcccccttgtggtcatcaagaatagggagggaaagagtccttatatttccctacctgaggcatctgcagctgacaagggcaggagctagagctccaaggaggcctaggtgccgacatgtggctggagttctgggctcttggtgctggagcccttcagctccacagcctcagtcttcctgaggctatgctgacgtcccagctcagccctgaagcaaaatgtagcctcccagcacttttcccagactttttcagaccatccagacttttcctttcctgctgttcactgtatttggatcaaactacaaataaaaggtggaagtggctttagttcactgagccatttttggaccccagcacagtagttcctaaggtcccatgggatagctcatcacactggaaaacagtacagagatttcagacttagaagaccaggatttgaatcttaaaaccatagcacctagtaggtgcattaatcaggacaagtcagtaagcttctttgagccttagtttcctcttttaaaacttgagtttagggactgggcgcggtggctcacacctgtaatcccagcactttgggacgccgaggtgggcagatcacgaggtcaggagatcgagaccaacctggctaacacggtgaaaccccgtctctactaaaaatacaaaattagccgggtatggtggcgcatgcctgtaatcccagctacttgggaggctgaggcaggagaatcacttgaacccatgaggcagaggttgcggtgagccaagattgtgccattgcactccagcctgggcaacaagagcgaaactccatctcaaaaaaaaaaatcaacaaaaaaaaaatcttgagtttagttatatga

SEQ ID NO: 93330 - DNA, 1030 bp, Homo sapiens
ccagggcagactgatttggaagccagaggcttgccccactgcaccaccctcacttcctgtttctattcggctctcttgaagggttggctgtctttcatcctacactgtccccagtctgttttggagggtggtccccaaggctgtttttaaggggtatgcgtagttggccaagctgtgcagtagggttttaggatttcaaagtcctcaaaaagctgaacagtcagccctgaaggataaaggcattgccccaggaggcctcaacttggaaaacattttaccgtatgcaaagcactttcatatacgttatggcatagggcccccacaaaggtgtgtgagctaggagggttacttgagtccacattagatcacacctaataagtgctgaatcaagactcttaccccagtttttcttggtattttttattgtgaaacatacaaaagaatgattaagatgtgtatgtacagtttaaatggcattaaaactgaacactcctgtgtcagtaatcagctttgagacctcttgagtgcctctccgtaattcacccaaaatttcctgagttttgtttatatcgttcatttgcttttgttatcatttactgcctaaatatgtatctccaaggttagtatattggtatctgatcactccatcctgatccatttggagtgatcagataccagtcactccaaatgcagtgattgagtactaacctcacagaggtaatgcagtgacctacctgcatttgttaccatcttcattttgcaagttagctaatgtaagaggatggcatgaagataagtaagtcttagagggggaatgtcagaaggccttagaacattggggtgcaaagagtgatcacattaagatgaggtcttgcccatgtttagagaaggggaacaggattctagtgatgactggccttctgagaagaggactattggaagggattgggggctactgaaggccagagtggaacagggatcctgtgaccagaacagccctgcatcggcacagaaacttaactgcatgaat

SEQ ID NO: 93331 - DNA, 1032 bp, Homo sapiens
aagcacttgatccattttaggcacttcgcatgtgtcacttgtatgaggtaggtattgccattttacttaatgataaaagagttggagagggtaagctgtctgtaaaaggtcaaggtcatataactagtaagtggtggtgctggggatttgaactcagtctaacttcagaatataactttacagcctaccacatttggtctcctattacatttacttttgtcagttcactcctctagcatgctgttttgcaaatagcattttagttaaatgtttgtgacattgacttctcttgcttccttactctgtttctccaggatttgtggcaggagtctccctgccttaatcataaaggaattgagtaaattgggggtggagctgggcaggtggagagcctgaaagagtgtgcctcctgacgtgtgggctccctggagataagtaaagcctgccagcctgacaagtccattgccagggatattgtagacatttccaacgctctagaaaggatattgctctatattcacagactcttagaatgttagagctggaaggggattaagaaatcacctagcttactggttttcaaacatgcagttgtgggccccgttaaaaatgggtcttttgagaagtatatacttggaaaaaaaagttggagaagcagctgtagtaatgctgcccctctcatccccacacacaaacatctgaaaaatccctagaactgaggagccgagtttggaaagtcaatagtgtaacctccctcattttacagatgcagagccttaacatcaagtctagtcatgaccaaggctgcacagcccgttagtttgggagccaatacctaatgtcttctgaggttctaattccaatgctttctgtggaagaatcatacatacgcagtatttcttaagtggctgtttgcggcaaagcactgaaatagttgctatgaggacgacaaatatgaacgaccccagttttacccactcatgagctcacagttgaggccagtgaagaacctagagacaaaacacgcactta

SEQ ID NO: 93332 - DNA, 1619 bp, Homo sapiens
actcctatggatggctggtatctggggggcagtcagggctggttcgaatccattttgtccgtggactcgcctccccactgggccaccgtatgcagcttgaaagccgagcccacttcaatgctatgttccaaccatcctcccccactagacggcctggcttctctccaaccagccatcgccttctgcccactccctagccttggcccacaccagatccttggagtgaagtcggtcaagaacaaatggcccctatgcacagagccataggaactgggggccttccctggacagtgatcatgccaggcctggacctttaggcctgcctccccaggactccttagatcccactctttctacagacttctgtgatcacagccccctgcgggcaggggggctctccctccaccaactctcaaggctcctcagcctaagactatggctcatgagaaacactcaggcctgacctaggcttgggagtcaaactgctcatattgagcatattgttaagtgggtaaagccaagtaaaggtactgggtgtttttgtgaccacttgtgaatgggtgtatggagaactgaaaagggtatctgcatgaaggctcctgtctgactattccaggatccaatattactgccttctgaaacttcctctttagggtaaccatcatgtatgcccacgagggtgatagtaattcgtgagactgaagttgcttagagtacttctttgaccaaggaataccacagacaccctaccgatagaacagtggctcagatcttacttgctcctgcttacgaagtattcccaatcactggtcatctgaccctacttgaacactcctgaacagtcatgttttttaaaatcttcctttatatcaagtcagagagtatacttctataaatttcactcatggatgttaggaaatctagtcatcttccctgtgattgccctgttaagtatttaaccatagctatcatgtgtttcccaaatcttctctagattaaatatcttcagttacttcaaccattcttttacacgtcatgatttttgatccttcatgatactgtcacattgttgactcattagaatgtttacctacttcagttctatgtataggaggtgtttagaacccaagtactgtaatgtattgttatatctcatcttgttagagtcctcttgtgggatgctgcagactcacagtgactatgatactgcctcctaagcaaggacacaccccagtgatgagaaataggcaaaccatggtcttgaaatgcctaggagtataggctggggtttggagggaaatagttggatgacctcaggaaatagaaaaaaacaggcagctgctttttggagagagtggagatgagatcagtgcctacctggaacaaaaccctctggcattctagactggctgaatatgtagtgtagggactttatcatctgtcagaaaatctcctttaagaagaagcgatcaagaagtttagtcctggccaggtgtggtggctcacgcctgtaatcccaacactttgggaggccaaggcaggcggattacttgaggtcagaagttcaagaccagcctggccaatgtatggtgaaaccccgtctctaccaaaaatgtaaa

SEQ ID NO: 93333 - DNA, 2426 bp, Homo sapiens
atgttgatcaggctggtctcaaactcctgacctcaggtgatccaccacctgcattggcctcccacagtgttgagattacaggcatgagccaccgtgtgccccacctatgctttttaaaagtcccttgacgtttatttatagggagtagagagaggtgcattctactctctgcactaggtgtgttcaccctatcatttttcaactgtagattccagacaaagctattacttttttgttgatgagaattagggttaaaataccaggttgagtctttaagccctggagggagtgttggatagctaatcaggatccccacatcctttcatagtggtttggatctgagggtagaagacaaaggtcctaggagcccagagaaagaaattagagcaaggaagagagaacttgcttttaatgctcacacattctgtccttatttcaggcatggtggttttctggaaccttcccactaactcacccctgcagcggatacggctctctgatggctccttaaagctctaccccttccagtgtttcctagcccatgaccaggctgtgcgtacccttcaatggtgcaaagctaacaggtatggaataggaggtatgtggagggggaaggtgaagactgggacaggctgacttccggatttgtttggatttgaccttctcccgtctttttacagccatttccttgtctctgcggggagtgaccggaaaatcaaattctgggaccttcgacgtccttacgaacccataaactctatcaagcgcttcttgagtacagaactggcctggctgcttccctacaatggtgtcactgtggctcaggacaactgctatgcctcgtacggcaagatggagataggacctctagggacaggccctaagggttggaatgcaaagcatgccagattgttgtggggagaggagggtagagagttggttcactgaggtggtttaaattctggaagaggttaagaagaagaaatgaatctaaagaaaaggaaggtttaaatttatttctcttttaacagttatggactctgtgggattcattatattgacgctggttaccttggtttcaaggcctacttcactgctcctcgaaaaggcaccgtttgggtgagcccccctttcttttgcagtcttcattacaaaggaaaatggctcatttatgcactattagtagtcagaggcagtagttttgggtagaaggagaagatagggatgttgtaactctatcatcagggctgtcggttatggtaaactcatttttgtttgtgtgtctgtctctcagactgtgcagctgttaccagttcatagctctgaatgaatatatgaatgaatgaaatctgtctctttctattagagtctttcaggatccgactggcttgggacaatagctgcaggagatatatccggggagctcattgctgctatattaccagatatggcactgaatccaataaatgtcaagcgacctgtagagcgaagatttgtacgtatacgaacatctaacagcagctgttggatcctaacccacatgccctcccaaattctggtagagtacaaactagtgtcaggtctcccggccctgatatcccagaaaatcttagcacagagttgtatataatcttccctaccgtactgcatctgagcatatatttaaagatactacttttttccatctttaagcctttcctgcccaaaccactttcctctgcttttattctgtcttgagtattatagaacctaatttcatggtctcctttccagcctatatataaagcagatctgataccgtatcaggacagtcctgaaggtccagaccattcttctgcttcatctggggtccccaaccctcctaaggctcgaacttacactgaaactgtcaaccatcactacttgctctttcaagacacagatttggtaagctgaggccaggagaatgggtgtggtattagaaaaggtagaaaactttagtctttgtatagtacgcaagcctgagttcagcacaaagatgtaaaactaaggagcctcggccaggtgcagtggctcatgcctgtaatcccagcagtttggggggattaggcgggcagatcacaaggtcaagagatcaagaccatcctggccaacatggcgaaactccgtctctactaaaaatacaaaaattagctgggcgtggtggcgcgtgcctgtagtcccagctattcaggaggctgaggcaggagaatcacttgaacccaggaggtggagattgcagtgagccaaggtcacaccactgcactccagcctggcaacgcagcaagactccgtctcaaaaaaaaaaaaaaaaaaaaaagggccaggcgtagtggctcacacctgtaatcctagcactttgggaggctgaggtgggcggatcacctgaggtcaggagttcaagacca

SEQ ID NO: 93334 - DNA, 1024 bp, Homo sapiens
attacctttcattaattcctttcttcatcccatctttgatttttctctagatttagctcgatcacagcacatccagagcgctgggatgtgtccttcttcacggggggaccgctctgggctctggactggtgcccagtgccagagggggcaggagcctcgcaatatgtggctcttttctccagccctgacatgaatgagacacacccactgagccagcttcattcgggtcctgggctgctccagctctggggccttgggaccttgcagcaagaaagctggtgaggtggggttggacactgccatgggagggtggttgaggacagcaggatggggtctggacaggatagggggaagggcttggattgggctgagacaaggggagcttacctctggcagccctgcgtcccttcttcctacccaccatccccacatgctctctctctccagtcctggcaacagggcccactttgtctatgggattgcttgtgacaacggctgcatctgggacctcaagttctgccccagtggagcatgggaacttccaggcacccctcggaaggtacttcccagtcaactgtgggatggccctaggactcaaagccaggacaaagaggccctgggaattcttagagttgaaggaacgaaggttggagtgtagtggatggagtttttccagcaacttcatacagtatttcagggactagaacctcaaaggttttctgtgagtcagctgaaggcagcaagcctcagcataccttttaccctttaggctcctctcctgccccggttgggtctcttggctctggcctgctcagacgggaaagtactgctattcagtctaccccatccggaggccctgctggctcagcaacccccaggtgagtagcacagcaaggagaatggggctgctgtagtggtggtcacagcatagcagggcctgtctgtctccctggaaactcctctgggccagtctctcttagcacaaagccttactcagccacacacacaccctgcattgtgactc

SEQ ID NO: 93335 - DNA, 3187 bp, Homo sapiens
ccattacactccagcctgggcaacgagagtgaaactccgtctttaaaaaaaaaaaaaaatggaagctttatttgtttacttgtttattgtctgcttcaccaaaatgtaagttccatgagggcagggaccttgtctgtcttgtttattgtcatatcaccagtttccttttttgtttttaatttttttattttattttattttgctagagaaggggtcttgctgtgttgcccaggctagcctcaaactcctaagctcaagctgccttcctgcctcagcctccctaagtgctgggattacaggtgtgagccaccgcacctggctcatattaccagtttccagaacagtcctgacatatagaaggtgcttagtaaatattgttgaataagtgaataatcagggaacttggttatgagtgtgagaatgagggagaaaagatggggaaataaaaatctgagctagtacaaatagtttttgtcctctactcatttgtgtgtctctgtatgcaggggcagccattttggggggtgctgatggatacctgcggggtcggctatgttgccctgggggaggccggccccgtggggaacatgactgtggtagactctcctggacaagaggtgctaaatcagcttgatgtcaagacctcttcagaaatgaccagtgcagaggcttccgtagagatgtcattacctacccctttgcctggatttgaggattctcctgatcagaggaggctccctccagagcaggaaagcctctccagactggaacagccaggtatgtaccttgtcctcttatctttttattccccatgccaagcttaagatgaaagagcagattgagctcataggatcttacaaacctgggtacagtgtaatcttttccatagaggtttgagttctggtcccatctcacagacccatattcttctccacagatctttcttcagagatgtcaaaggtctcaaagcctagggcctcaaagcctggccggaagagaggtggtaggacacgaaaaggccccaaaaggccccaacagcctaatcctccatcagccccactggttcctggtctcttagatcaatccaaccctctgtccacccccatgcctaagaaacgaggtcgaaagtccaaggcagagctgctgctgctgaagttgtcaaaagacctagatcggccagaatctcaatctccaaagaggccccctgaggactttgagaccccttctggggaacgaccccgccgaagggctgcccaagtgtaaggattgtggggcatagcttggtggaggggggttgggtgaagggatcagggtggggcagatgttggagagagaagactgatgaggtattaggtaagcaggggtggtgtctggattctagggacttgagcagtcctttaggctcttaccgcagcactattaatggtatgtattgctaacttggtttatctaagaattattgtctgtactttatgtcctatgccatttttcacaaactttacccagctctttattgttttactgtccagtatatgtcagtatatatattctgttccattctttctcttgccctctgtgttctttgactgtggtaggatgaaaaatgtattgaacttggagtgagaagacctgggttcagattccacatttgttatctcagtcatctcggccaagtcacataacttagatttctggtttttcatcttccaagggggaaggggaaattaatagagttaattggttaatcatggggttattgggaggctccattgagataaaaatcaaccatgtctggaaacgtgggttctcagtcatatgtgagaatggctctgactctgtccgttcccacagggcacttctgtatcttcaggaactggctgaagagctctcaacagccctgcctgcccctgtgtcctgtcctgagggccccaaggtgagcagccccaccaaaccgaagaagatccggcagccagcagcctgtccaggtggagaagaggtggatggtgctccacgggatgaagacttttttctccaggttgaggctgaagatgtggaagaaagtgagggcccaagtgagagctcatctgaacctgagcctgtagtgccccgaagcaccccacgaggatctacttcaggggtaacctcaatggacaagaaagtgaatggggacatagtaggattttaggggaccagcaaggtactgagaaaggaaggacagctttgacctggtaactataatagacaaaacaggttaaagaaaaaagggtccatttccaaaacatttggcatattagggagagcgcagaagaaggggtatggtaaacaagattattcattcatatattgagtatctgttctctgttaggaaacacaacaaacgtaaataagacagtgtatcctgcctcacaagttcacagtgcaatcagcactaccccaggagtgaacaaaatgatttaggcatataaaggaaagggtaattaactgcctaggcttcacagaggaatgatagttgaattgcttcttgaaggataagtagaagtttgccagagaggatggttttcccataaattgattatggctggagcatagagcctggagtaaagttgtaggcgagattaaactggagaatatgaaaggacatagacctataggaaccaacaaaggctgtttttgtttatggttttttttggtggtaaaatgtatataacataaaatttgccattttaaccatttaaaaatacacaattgaggctgggcgtggtggcttatgcctgtaatcccagcactttgggaggccaaggcaggtggatcacccgaggtcaggagtttgagaccagactgaccaatatagtgaaaccccgtctctcctaaaaatacaaaaattagccaggcatggtggcacgcacctgtagtcccagctacttgggaggctgagacaggagaatcacttaaaccaggcagggagaggttgcagtgagctgagatcatgccactgcactccagcctgggtgagacagtgagactccatctcaaaaacaaaacaaaacaaaacaaaacacacaattcagttgtacacaaactgtacaacaaacatttttaagtagaaaaataacatcagttgggaaaataggtcaaactatagttgacagaagacagctttgccagatgcggtggctcacgcctgtaa

SEQ ID NO: 93336 - DNA, 1003 bp, Homo sapiens
ggtgatacatgcctatagtcctagctacttgggaggctgaggcaggaggattgcttgagctctggaggacaaggctgcagtgagctgtgatcacaccactgcaccactccagtctgggtgatagaacaagagcgtgtctcaaaaaaaaaaaaaaaaaaaaaagtggcggggcacagtggctcaagtctgtaatcctagcactttgcggggccaaggtgggcagatcacctgaggtcaggagtccaagaccagcctggtcaacatggtgaaaccccatctctactaaaaatacaaaaatttagctgggtgtggtggcgggcacctgttgtcccagctactcggaaggccgaggcaggagaattgcttgaacctgggaggcagaggttgcagtgagccgacatcacgccactgcactccagcctgggcaacgatagtgaaactccatctcaaaaaaaaaaaaaaaggaaaagctttcttaacataataggatgttccttaattgtcccatagtctacccaccacccccatccaggtgaaatattgatagcagggcaccagagaactctttgactcattcttttttttaaagacagagtctcactctgtcacccaggctggagtacggtggcatgatctcggctcgctgcaacctccaccccacgggttcaattgattctcttgcctccgcctcctgagtagctgggattacaggcgcctgccaccatgcccagctaatttttgtatttttagtggagatggggtttcaccatgttggccaggctggtctcgaactcctgacctcaggcaatacgcctgcctcagcctttcaaagtgctgggattacaggtgtgagccaccgtgcctggccaactcattctttttaaaaaataaattcatttatttatttacttgagacggtgttgctttgttgcccaggctggagtgcagtggtgtgattacagctcactgcagcctcgacctcctgggctcaaggagcctccca

SEQ ID NO: 93337 - DNA, 1131 bp, Homo sapiens
ataatgacactgatctgactggtcagggtggagcccttgtggcctaatcatctcttaaagatcccacctcttaatactgttacaaatgggaattaaatttcaacatgagttttggaggggatgttcaaaccctagctcttggatttcacaatccatttgatgtttttgaaagtgcaggaattttttgttggaaatttccttctgttttctgaatcacttcttcaaaagggtactcttcatctttctatccttttctttcggtatatgcataggtccttttggcttgtgactaattttgaatggggtagttctgtcagggcttcttatttatcacaggaataatatagatggattttcactgacctttatttaccttggcagtgttataatgtatctttagcacatgtgttttcttgtatcctcagcacctgcctcagagggttggccattgctatagtttataatctggttagactgtagcttcttcaagtgagacagttggaagcttttattttatatttcttatgggatttgtataagcacacttttccactgagactgatgaattgtttattcttaaggcgtatatatagatctgtggggggcggggtcccatcctgggatttgaactatgtctgcccctttgtcacagacaggcaggttattctggccaaaaactggacccttggagagttctgtgttgcttaggtttcgggtttggtggtcagtgatttatcttagtttactttggcccatggttatacaactaattttttggggtttgaagaaaatgaagactcatgacaatttagtcaattcttcaatgtggaaaggtttcttggccagacatggtggcttacacctgtaatcccagcactttgggaggccaaggtgggaggatctcttgaggttaggaattcaagacaagcctgggcaaaatagcaagacccaatctgcacaaaaaaattaaaaacgtatctgggcgtattggtgcacatttgaagtcttggctatttgggaagctggggagggaggactgtttgaacccaggagttagtggctgcagtgagctgtgatcacaccaccacattctagtctgggtgacagagcgagatcctgactcagaaaaaa

SEQ ID NO: 93338 - DNA, 2209 bp, Homo sapiens
gctctctcgggcccatccctgacttcactactggcagaatcctccagcggccggcggcgaggacttctttgtctcccagactccgccttgggctcggacgccgccagggttgcaggtacagactctctggtctagctggctcttccggccacaggcgcggcagtccggccggaaaggccggattcagggatccagagcgcgagcccggcctgggagtccgcctactcccggctcccgtcgaggccgcgtgggatcccgttggccgcgcaggcgtcgatctcccctttttgacactgcaactcccatgaggccctgcagcgtccctggcgccgctgaagacgccctggaactcggctggcttcggagggctcggtgactctggccgcgctgcattatggaatacagagtctaagagaaaactagcccggcaccgactccggaccaagcacacgtgtttaccttgtgcactggggtgggggcgtcagtgaagagcagctaacaagatttcgtcataagaccgcgaccagacaggcggcgccatcttcgaacttagacttccggaaggactttggcgagggtgagtgtatcgccgcagcgggtgtgtggggggccccacaattactcctcccccttcttttgccatagcactaagatattgggaacaaactcctggctccgctcttctcccagccacagcagcgcgcctttcagcgtctgcgctcctacagagcaccatcatgctccgcaccttccctactgtggccaccgtgcaccccccatctctgcaagcctcgggtcttgccctcctcccccacgcggtgtcggtaacgcggaagcctgtgtccgggcgtaggcgctgcatacgtagcgtccctcgaactcggcgaacctacagtagtccttgttagaaaaaccagggctcctctcccgcacaggctaggggagaaatctaccttcacgcccaggactgaagaagggcaggtgatggcccctagagtggttgtgggtcaatctctttcagctgtgtcccagcctcttcctcgaggaggctctttaaccccgagggttgtgccccgcgcgctgcaacgccattggcgtaaccaagggccagttgtgtttccctgtctagtccttttgtcccgtggcaagttggctgcctgttggggaagtcagaggtggcgacttcaactccgtcggaggcaactcactttgttggagggatgtatagggtatggacaaacctctttgttccagaggcatatacaattttaagtcaatcccgtgccatcactatttttgcaatctcttatcaattgtactattgttttctgaatagttctctttaaattgacttacttaaaaagtttaaatgcattagtctcgacctaagcaatataaatgaaaccgtgggtttcatgggctacttataattgtttatgtaagttgaaataaaagcactagtcattaaaatgttcgttttcgtaccattaaaatcatcttgcataccgccagttgtaccctaggaacactttaggaaacaatatattaagctaagcagtgtattcaaagtaatttcatacttaaggtgcagtgttgtgtcattattttttcttggctggggaggtcaagctggcatcctggagcagcatgggaaccagacagattggggtgcaatggaaggttttagaaactcagtacgaatttactgatcatctattcctttactgtgtatccagaatttgtaccattacatcctgctgctgccttccatgagaagtgtattttttttttttttgatacggagttttgttcttgttgcccaggctggagtgcagtggcgtgatctcggctcactgcaacctccgcctcccgggttcaagcgattctcctgcctcagcctcctgagtagctggaattacaggcgcgtgccaccatgcccggctacttttgtatttttagtagagacggggttttaccatgttggtcaggctggtctcgaacttgtgacctcgttatccgcccacctcggcctcctaaagtgctgggattacaggcgtgagccaccgtgcccggccaggcaaattatatgtacaggcaattcataaaagtcatatggatgtccaatatatagaaagaagttgctgacaccaattattatcagtgcaaataaatagagtggggaagaattctttcacctatcagattggcg

SEQ ID NO: 93339 - DNA, 1070 bp, Homo sapiens
acccgtagtgcggggcggggcctcggggcccgtcggaaattgtagtccgattggggctgcgcgcttcgcttctgcggctcagcctccagcccaggtggcgctgtggaccctgcagccgcggagcgaggcagcggggcggctccgtgaccacggcgggcggagcctaggactgagggcgatggctgctgtggccgtggctgttcgcgagggtgagtgaagagccgggcctgcctactggtacgcggagccgacgagctccggacagctagtgccgggccttgagcgcctttgggccccgccgctccgttccagcgccacgctgggctccggtctacacagtctcgagcgcagtcccgcgccgcgcaccggctggttgctgtgaggagggtcggtgacccctccattcctttgatccgccgcgcagtgcgtccccacgcggatccctggctcgcctcgcgcctgccggcggatccgtggtcatgccaacccagcagccggctgcgccgagtactcgtgcccccaaaccctcccggagtctctctggctcactttgtgccctgttttctgatgcagactcgggatccgggatgaaggcggagcttccccctgggcctggggtaagtgaggcttccctcccaagccgcctgccaagcgctacgcaggaggctgtgccagctttattccgccccagctcccatcccgtgtcggtttatttctcagtaaagccaggagattttacagaggtcttgcaaccctagggatatatgattctgtccctggaggagaaacgtcagcctctgtggatgtaagcttgcaacaggtagcttgtggaagttaggaagaactagggatttaaccatgtggaaatcttgtaagcatccaatagtatttgttcccctttggaattgttggggaagagcagtatcctatgtctgtgtctcaggcagtggggagggaaatgaccaaagaagaaaagctgcagcttcggaaggaaaagaaacagcagaagaagaaacggaaggaagaaaagggggcagaaccagagactggctctgctgtatctgcagccc

SEQ ID NO: 93340 - DNA, 1029 bp, Homo sapiens
aagggtacttcagtagagtttgcagcccccctaactccccacccccacccccagaatgaacattgcctcagggcacttctttcttgatttcccttcctttaaatctcactatattttcatttttttttttttaacctgtagttgtacggaagttgcaagagtttgagctgccttatgtgtctgtcaccagccttcggagtcaagagtataagattgtgctaaggaagaggtcagggctgggcctggaaggggaggggtgggaggtgctgtgctggattggattattgggccacatattgagacagaataatctggacaagggggtgtagtgctgggtgtttctgccaggcctcccaagcttcctcccactataccattagcccctgatagttccagattgctcctgttttgcccattttccattctacctcttgccttaacccagcttagccccattacccctttccaccccttggcctcacagttattgggactctgcctatgatgacgatgtcatggagaaccgggttggcctgaacctgctttatgctcaggtgagcttggagctgcctcagaacccttcccctgaagaaaataacgggtgactcactctcccaagaaaactgctgtcgtgtctttgttcccaatttgtggggaagttcctagaatactatcagtgctgctggcacaatatctactctccctacttttattaagctgacaagatcaaggacttactgcagagaggtcgctcaagtgtggggctaggggtcaggctggacagaggtaatggtagacgctttccttggattgctgactgggacctcctactgcctgccccttgtctctactatagacggtatcagatattgagcgtgggtggatcttggtcaccaaggaacagcaccggcaactcaaatctctgcaagagaaagtctccaagaaggaggtgagccctgcctcctctctgtcttcctctaagggcttgcagtggcgcgatcttggctcactgcaagctctgcctctcag

SEQ ID NO: 93341 - DNA, 1089 bp, Homo sapiens
aatctggcggcagtatcaggaaggtaggcagcaagtgtggactgagcagtgagcaggtgtgctccccttgccttttgtcctagatgtgaggcttgtcttgagagggaggggaagtgatcctgccctcaccggcaccttgtgtctgtccccagatgctgcgccggcgggtggggggtactctgagacgctcagacagccagcaagcagtgaagtccccaccactgcttgtaagtattacctcctggtcagaaccctggctctcagccctgcctcacctctcctagtgagtttctgacacctctgcctcttcttccccaggagtcacctgatgccacccgggagtctatggtcaaactctcagtgagttccagcgttggtgaggttgctgtttgttgggggatcttgcacgcccaagatctctgaccccaccctgcctttgttacagagtaagctgagtgccgtgagcttgcggggaattggcagtcccagcacagatgccagtgccagtgatgtccacggcaatttcgccttcgagggcattggagatgaggatctgtaatctccactgcttggatgtctgccctctaccccagaggaatttacagaaacttgccctgtgcctgtgtcccccatgctaggggcggaggggtcttttccttcttctttcctacctaccccttttctcttggccaggggcctcgtatcctacctttccttgtcccctgggctggctgcacagaggattgccccttctcttttcagagctggccctcgatgccaaattagcatttagtattttgcacaaagtctaagggaccatggctgcctgccttggggaggaaccatatctccctctgggccgcttctggcctcttggagccatgggccaaaggccaaggggatgggcagaggtctgtgtttggtctggcccagttccccatcattaaactcagcctgactgctgcctacctctggttccctctcactgcccctgcttcccccatcacagcatggactactatgctaagggtaaggccaaattgcctgccattgccaattcagcatagacatggctttgttagtgtttcc

SEQ ID NO: 93342 - DNA, 1559 bp, Homo sapiens
ctctgtccatactcctctacgctgccttagtgagactggaagattctgactgttgttcttgaccccaggaatgtgatgagcagccaggaagttgtagatttcattcaatcaaagatcagccagcgtgatgaaaatggggagcttcggttattgtcatccattgtggaagaggtgagtaccagggtggagaagagagggtgtctggtctgcacagccagggttcactcttttaatctgagctaagtcggcaatctgggagcattatcagtaattgctgacagacgctaaaccccgactccaaagttccaccttctgtcatttccctgacttagccttatgccttatggactagcaggtgggccgttgtgtgatacctcttgcccattcctctcctaccaccctgactcagcaagccagccctcttgtgggactgtagattcctggcaaggtgttcaaaccctgtggctgagctacccccatccctttcttagctgctggatcagtgcctggcaccagacacttctggggatggtacagggtgtgacaacatgacctgcatcatcatttgcttcaagccccgaaacacagcagagctccagccagagagtggcaagcgaaaactagaggaggtgctctctactgagggggctgaagaaaatggcaacagcgacaagaagaagaaggccaagcgagactagcagtcatccagacccctgcccacctagactgttttctgagccctccggacctgagactgagttttgtctttttcctttagccttagcagtgggtatgaggtgtgcagggggagctgggtggcttcactccgcccattccaaagagggctctccctccacactgcagccgggagcctctgctgtccttcccagccgcctctgctcctcgggctcatcaccggttctgtgcctgtgctctgttgtgttggagggaaggactggcggttctggtttttactctgtgaactttatttaaggacattcttttttattggcggctccatggccctcggccgcttgcacccgctctctgttgtacactttcaatcaacactttttcagactaaaggccaaaacctaatcgtacgcatcgtgtccttttttttctgctgccgtggcccccgacttggtcccatctgtagcatgtggcgagcccccatgtgagtgtgtgcgtgtgctcgtgtgtgtcctgcgcgtgtataggagagcccagagcgagctgctggtaggccggcctggcgggcgtcgcggctgcccctcgccccctcctgcagccagaaatgatctagttcccccagggacaggttgggaccggtctggctggcctgaagcctggagtcgggcaggacgcctcctgcgctgctccctggccggctccccgctgccgctgattggcttgctccccgcctcgtcacaatcacttcccggtcacgccattgaggctcccgccgcggccgcttcccacggactacgcgtcccgtgcgtctctgcggcggcggaagcggaagcgagtacggaggtaccagctggtctccgtagggg

SEQ ID NO: 93343 - DNA, 2488 bp, Homo sapiens
attgtatatacattatcttttgtcattgtgatggggtcttcctggttcctgctagtatttatgtgcttttttttcccctcaagactggagcagttattagccccaatagccaatcattaagcctaaatcctaattcacagtagcattgtgggcttcctggatcctcagccagaatagggtttttacaacttaacaataaaaaatgagacgtcagaggggaagtatagtaactagtgttgttttgattaagaaggggatgaaacacaaaaaccaaaagaagtctgtggaggaggaggagctagggcatgttcttctgagacttgagcgagaggaaccttgggagtgggaggttgtggggaagttagaggctgcaagggctgttgaggtagtgagagggacggatcccatgaggagtctggcatgggggctctgatttagcctcttccctgcagtggacaatgaggaggctgcactgctgcatgaagaggctaccatgactattgaagagctgctgacacgctacgggcagaactgtcacaagggccctccccacagcaaatctggaggtgggacaggcgaggaaccagggtcccagggcctcaatggggaggcaggacctgaggactcaactagggaaactccttcacaagaaaatggccccacagccaaggcctacacaggcttttcctccaactcggaacgtgggactgaggcaggccaagttggtgagcctggcattcccactggtgaggctgggccttcctgctcttcagcctctgacaagctgcctcgagttgctaagtccaagttctttgaggacagtgaggatgagtcagatgaggcggaggaagaagaggaagacagtgaggtaagggcctgtgagggcaggcagatgctgaagttgcagagaggtcctgtttggttgccgtctgtagttttcaactctctttccttctcctattttgacatcatcccccaagacccactgtattctaagctttagtcttgaattcattgagctccatcatcacaggtaccatttgcctttttacctcttcctttgttggtactataacaagcagatctagttctggcttttcagagtctgtctcctagagagagaacaaggagatagttgttaccttggctagttgactgttttcttctctggaaaatttattttctggccacagtgcctgaaagatatttttggctggcagcccttgccttgtcctgggctttttgctagtgactgctaagcccagttcaggatgtcagttgtactcatgctagccctttccatccccccaattttcatgaccatatacttgtatctttcagtgttttgaggacctgtgttcagtcaggacctcttgattctgagtatgagctgtggggagggaggggatcatcccagtctcagcagtctgggatcctccccctggcaggaatgcagcgaggaagaggatggctacagcagtgaggaggcagagaatgaggaagatgaggatgacaccgaggaggctgaagaggacgatgaagaagaagaagaagagatgatggtgccagggatggaaggcaaagaggaggtgtgtggggaaggggagcaatgagtcttgaaaagccacaaggcaggtgtgaatcccctaattttgattttgagacaggggatccccctgatactttaggatggaagtaatagtcatggggatttattctgcaaggggaatgagatggtaagcctttggggttgaattatctaaaaacaagggagagggagtgtgctgctgtctctagaaagatgaaatgtgtgcttctcctgtttgttaaagctcttttgggggtcccagtgaaagcaagcataggtgaacgatcaggagcacatcagtgaggaacgcatgttcagaagcccccatgatgctccttttcttcctcttaagcctggctctgacagtggtacaacagcggtggtggccctgatacgagggaagcagttgattgtagccaacgcaggagactctcgctgtgtggtatctgaggctggcaaagctttagacatgtcctatgatcacaaaccagaggatgaagtagaactagcacgcatcaagaatgctggtggcaaggtcaccatggatgggcgagtcaacgggggcctcaacctctccagagccattggtaagggccaagaaactgggaaagacttctagggtctttctctctgtcccagactacctagtagcaaactttaatcttcctagtgcttgtgcctttcaaagcactttaatatctactacctctgttcttatatttctgtgaaataactaagatgggtagaggtatcattatacataggtatcattatacccatcttatgtaacatttgaatgatgaaaaagacctgtgagtgccgggcgtggtggctcacgcctgtaatcccagcactttgggaggctgaggctggtggatcgcctgaggtcaggagttcgag

SEQ ID NO: 93344 - DNA, 1911 bp, Homo sapiens
gcacatgcctgtaatctcagctattcagcaggcggaggcaggagaatcgcttgaacccacgaggcggaggttgcagtgagccaagatcgcgccactgcactccagcttgggtgacagggcgagactctgtctcaaaaaaaaaaagaagaaaaaatcctttattctggttttcccgtagcttccacagatccaaaagggtcaggtttatttccagtagccaaatattctgccatctggactgagatatctcctaggttgaggttattatagaggtagtaacctgattctttcttccttttctccttcccctttcctcctttgcctccctcctcttttcttcctctgtatttattttatcattccttcttcctttcttatttctaggccatataggccagccagggaaaggttagtaaggggtgacattgatccctatgacctgaggaatattcttcgaccttgagacatgccgattatgctcttcttttcctaggatgctcacaactgtattcctgagctggacagtgagacagccatgttttctgtctacgatggacatggaggtaactttaacagatcatattggtaacattctaggaccccaattccagacgttccagggcaagaacaggtccctttgttcatttactttccagggtctggccctcattatcatttcctgcgtggtgctgtttttctgtattctgtcattcttttttcccagtaggtactgtattggtttataatctcaccaggacttgttttaatccaaagagcctctatctttttttatttttattttttaaaatttttaggctgggcacgcggtaggtcacacctgtaatcccggcacagtggatcacgaggtcaggagttcgagaccagcctgaccaatatggtgaaaccccatctctactaaaaatacaaaaattagctgggcgtagtggtgggcgcctgtggtcccagctgctcggaaggctgaggcaggagaatcgcttgaacctgggaggtggaggttgcagtgagccaagaccatgccactgcactccagcctgggcaacagagcaagactcttgtcttaaaaaacaaaaaagtgtacccagttgagctgattctttatctttttttcactggagaactaagtatacaggtgagaaaagacgagatatttatacccgagagaattgatggtgaaatccatttttttggatcagaacttccccaaacagtgtccttcaaatagggttcaggggtgctaagatatttatcccctcaacccttggggttcactccagtatggcatataaatattgtatcactttctatgtgtggggagcagtgctccaggtgaccttccttcctttccttctaggggaggaagttgccttgtactgtgccaaatatcttcctgatatcatcaaagatcagaaggcctacaaggaaggcaagctacagaaggtctgtctgcttacaccgcccattcctcacttgtgtaggcttttcccttgttctctagcccttgggcttttcctttctttttgtcctctagctgctgctgcttatttactcttgaagaattctgttcctaaaacgagcttattggccgccttttagacttgccttattattcctaggcctctgagctgtttttatctgtgagtgtctcttagtgtggtggctcacactcttaatttgtattccatccttgtgctcaggattgtatatagggagttcattttgtactagtcttagactattttgcttatattcaggctttagaagatgccttcttggctattgacgccaaattgaccactgaagaagtcattaaagagctggcacagattgcagggcgacccactgaggatgaagatgaaaaagaaaaagtagctgatgaagatgatggtgagt

SEQ ID NO: 93345 - DNA, 1031 bp, Homo sapiens
ggccttttactaacttcggaaaacttgaattatgtcagtccctaggttttcctttttattatgcttcgttttctttctctcttaggatttctctaaaacttaatcagtaattctcatttgcctgtaattgtagtttatagtttctttgattgtaagtcatttcatcaatttttttcatcacaacctacctacaaagggcttttctagaaaattttactctggacaaaaggggaaaagaaaaatattggggggaaagtagtagtattaggtaaaacttgatgtgaaactacaaaagagaagagggaaaactgcggtagggaggaaagggaggaagacgggttaaccgtggctttgtgaagagcattctgaagtctaggcaaaagggccagggaaatactctgtctggtattgagggtttctccacctaccgggtgggcttcaggtaacagcgaaatactgtctcccttgggaattgtttcagatccctcgctcctccctgtggttagctctggaatgacagtatgaacttaaatgttttgttttccgattcaaattttatattcataactgaccttaataacaattttataattaggtataaaatttcaggattggagtgtatcctatagttcatctcatctgctttggctccctttttttttttttgagacagaatttcgctcttgttgcccaggctggaatgcaatggcgcgatctcggctcaccgcaacctccgcctcccaggttcgagcaattctcctgcctcagcctccctagtagttgggattacaggcatgtgccaccacgcctggcttattttgtatttttagtagagacagggtttcttcatgtgggtcaggctggtgttgaactcctgacttaggtgatctgcctgcctcggtctcccaaagtgctaggattacaggcatgaaccaccacaccctgcggctcccacattttatagctaagaaattgaggcccagaaaggttaggacactgttttggtggaaagaatttgtaggatcagatcg

SEQ ID NO: 93346 - DNA, 1624 bp, Homo sapiens
tccgcaaaccccgcccgatttggttcaattaaagttgaccagtatttgttccgagcttaggaagtacttggccaggccatgcgaggcctatatgagaagaatgtgagtcttttctgaaagcgaagacctcgatctgtgatataattcgagttaatacaatgtagaaatgtttggtacagcctattctgggtgggaaaagctcaaggatgggaggaggagctgtttcttggaggattgaaaggatgtaggctctcagagaggatgcctctggattgcattatgccacaggaaaagggaataatgttataaggtttggaggagtgagggaagaatgtgaactgcatttggggaggatttctgaggaagctggctggactcggagaatgattgtaagtggtaatattaactagctagcttgataaaaagaagcgccaagatgagtgacttggacttcattgtcgtcctggtgtaacctttggcatcgtttgtctagtctttgtatgcagtgtacattggagggagagagtctggggcactgttgtgttgttgttttttgtttgtttttgagacagagtctcgctctgtcgcccaggctacaagctccgcctcccgggttcacgccattctcctgcctcagcctcccgagtagctgggactacaggcgcccgccaccacgcctggctaattttttgtatttttagtagagacgaggtttcaccgtgttagccaggatggtctccatctcctgacctcgtgatccgcccgcctcggcctcccaaagtgttgggattacaggcgtgagccaccgcaccccgcctactattgttttttttttaagacagagtttcgctcttgttgcccaggctgcagtgcagtggcgctatcttggctcactgcaacctccgcctcccaggttcaagcgattctcctgcctcagcctcccgagtagctaggattccacgcctggctaatttttgtatttttagtagagacggggtttcaccatgttggccaggctggtctcgaactcctgacctcgtgatctacccgcctcagcctcccaaagtgctgggattacaggcgtgagccaccgcgcctggcctggggcactgctactagttagagagctcttactctaagcaggagatgagaagagctgggagtaaggtggtaccacgcagggtggcaatgggaatccagatgaaaggacaaattagacaataacaaataagacagatttggtaataaattgcattcaagggatggagagaaaaggagaaattctccaaactatgacaaaattgattcttttcagccgggcacagtggctcacacttgtaatcccagcactttgggaggccaagggggggtggtggatcacttgaggccagaagttcgagaccagcctggccaacatgtgaaacccgtctctactaaaaatacaaaaattagccaggcgtagtggtgcgctcctgtaatcccagctacttgggaggctaaggcaggcgaatagcttgaaccccagaggcggaggttgcagtgaaccaagatggcgccactgcactccaccctgggtgacagagcaactccgtctcaaaaaaaaaaaaaagattctttaaaaaga

SEQ ID NO: 93347 - DNA, 1074 bp, Homo sapiens
gaggacagctgagaggcctgggcccgtgagctcttgcagaggagttgacacgcagaggggctgctgtccaataaacgaaagtgtcggggaaaaactttgcagggcgatctgcattactccaaagtgaacacactgcatgtctcagggtggctggaggcggcgagaatccccttatgggagtatatgagcttttccatgtgttatctctttaaaacctctcagcggctccgagacaaaactcccagtgtcgcagaggtttcttcatcaataggagtagtgctggagaatcttgggcactgccctcattttgcctgcgaaggaaaaattaggaagggataaaaagtcacaaaaattaggaaggtgggggggataagcaaattccaagggcatctatctctgatgaagggttggtgtctcctgtggtgccctactgtggattagttatttgtgtcctcggtccagaagtttctctggagcccattggctacagctttcctgtattagaattctactgttatttcctactgtagtctggctgggaattttatttagttgttcagattttagatgcattcagtgaatgcagctgctcaaggaagtaactaatagtgtcttaccattttcttagctacttttcagaagaaggaacatgatctctaacagaagttttctggtagattactaaaacaggcagatagtagctttcctggctggctgagttaaatccctctccagcgatcctcccacttcagcctcctaagtagctgggattacaggcatgagccagcgcgcctggcaaatctctctagaataagtcaggatctagaaaataacatagggaaagaatatcttgccagatttcctctgtactgcctattgctctttggtatttactagactgtcttctaataaaaatctcctgagttgagttaaacgtagtgtagattgggggcagagatgggcacaaatgggcatcagagagttctaaaaataaatgtgggcttttcaaaagattggtgtgttgactggagacttctgaacttagaggagcacatttagtttccagggtatcag

SEQ ID NO: 93348 - DNA, 2013 bp, Homo sapiens
cttgcctcggcttctcaaagtgctgggattacagaggtgagccactgtgctcagctggattactaaatttttttttgagatggggtcttgctctgtcacccaggctggagtgcagtggcgtgatctcagctcactgcaacctccacctccctggttcaaaaaaattctcctgccttagtctcctgagtagctaggactacaggcacgcgtcaccacacccagctaattttgtatttttagtagagatggggtttcaccatgttgatcaggctggtcttgaactcctgacctcaggtgatctgcccacctcagcctcccaaagtgctgggattacaggcatgagccaccacgtccagcctggattactaaatctttacagatgtatcctgactttctctgccttttccctctgtatttgccccaaccagtgcaggcctgagtgttccttccagcatgtcggagggggagtcccagacagtacttagcagtggctcagacccaaaggtagaatcctcatcttcagctcctggcctgacatcagtgtcacctcctgtgacctccacaacctcagctgcttccccagaggaagaagaagaaagtgaagatgagtctgagattttggaagagtcgccctgtgggcgctggcagaagaggcgagaagaggtaaggttatggtacagttactcttgggtgagtgaattctggaaaggtgagaactggaagagcaaagtcttaaaagaggccaaccaaacttcaataggttgggggctaggaggagatgatcatatggagtgttaaaatggaggatttgtgagataagtttaattctctttcatatgaatttcttctcaggtgaatcaacggaatgtaccaggtattgacagtgcatacctggccatggatacagaggaaggtgtagaggttgtgtggaatgaggtacagttctctgaacgcaagaactacaagctgcaggaggtaggtgatgctgaaaaggtgaagcctggggaatgttggaacactgatgttagagaggaattggtgttgggaagctgcccgtgaggagagtatgttggggttagatcgtttctggggagggatagggaatggcttctcaggattattacagtgatttgtgactctgttattccactgtctcccttgctttcaggaaaaggttcgtgctgtgtttgataatctgattcaattggagcatcttaacattgttaagtttcacaaatattgggctgacattaaagagaacaaggccagggtaagaattttttccccatatttcctgaacttattgcaaagagactagctacatttattattgttccttttacactcagagattaaaacaaggtagttttgaaacagaactggaatcagctgcaatggcgataagagtagggcttcagttgtcacctatgccttttgtgtggctatagattgggcagaaaatgagtgaacttttgcttctttcttcccataactttcattgcttgttttcattgccctatttagtctaagtaagtaaagctaagaacaaaaggagagaaattttaacaaaccttcaaatttaaaatatgttaacaagggaagggatcatttctactataaggccttttagtaagtgctttgcctccccaggtcatttttatcacagaatacatgtcatctgggagtctgaagcaatttctgaagaagaccaaaaagaaccacaagacgatgaatgaaaaggtatagaaggagagcagacaaagtttgaggctggtttttgggggtggttttaaaaaggactctgttaataatgaagctgatcaggaagggacggaaggagctagtgggagagagttaagagagggaattactgctgacccttggatccaactttgttccaggcatggaagcgttggtgcacacaaatcctctctgccctaaggtaagtagtacctggttagtttcttacccatatttcctgatgtagttactccaaacagatttcagggcact

SEQ ID NO: 93349 - DNA, 2254 bp, Homo sapiens
agtgtggggattatctttatggtgaccagcaggagacctggcccttgctcctcttaacccttgggttccccctgcccttaatttcccagtggcccctctaacagcccagtgcccccacagctacctgcactcctgtgacccccccatcatccatgggaacctgacctgtgacaccatcttcatccagcacaacggactcatcaagattggctctggtgaggggagggagaggttctgggcaggggagcctcgggaatttgggaaccatgggggtaagatgaaaggaatgggggataacagagcaaaattctgaggtgtgggctggtgagaagagaaaggaccttgctaggagtaattaataggagaggccagttaattagtggagagggggtaggatatataatcttacacctttttgaagggaaaattggggttaatacagagatactgataagaggctgggaaagggcaagagataggtttgaggtttgatttgagtcctggggccagaccctgccagaggaggttccaggctgttcctgctgtgagtgctttcgtttgctgtgtattgtatgcagtgtacaacatttctgtgtgctgtgtctgtgtggtatttgtgtgtccatttgtctggggcttggctgctccatcgctcacaacttttctctgttttcctccctcccgcttacgggctgctctgttcccaacagtctttcataggatttttgctaatggtgagagctccctctgccccacttggggctctgtttgtgctccctctgctcccttggcggctgcccagtgcatgcagtcgtgggagcaaaccctcttcccctatcttccctgcctaattatgcctgcttagcttctgccctgccagccctccgcctgcttgccccttcataacctgcttgtttcctgtggattctgcctggctggccacttacctcctggattcatgttctccctcatcatcaggctagttcccagatcatactgtgctcccagattctctgtgacttgtagtcattgtttatgatctgagtgagtccaaattgggcctggtcctggttcctcgttcagctctgtggcagacagtgttgaggaataagggggtagaacaggagtctaaaatgttttggtggattaaaagtggaacagattcaagggtattagctcaattctgagctgttttgagtttcactcagcaaaggtgggtaagaaggaggctacctcctgagctgtatgttaatacttcttatccttatttatccaagttcctgaggtctccaattgtcccagattaggaagggctgcctgtgtttttatgttatttgcagggtggatgaaaaaactaaaaccaaatattttcatgtgagcagggattagaggtacctgggatttagggaaggtgaacgcagtacaagtgaaaatttttccttaaacttcattgcttctagaccagcctgaagcccctgtgtatctgttaatttagtctggtgcttttgttgctcctgatttagggacattagatgagaagcagtaggcctaagaaaggggaggtaggtggcatccatgtgtggtctgtagttcaggacaggaaagggaatatgtttgtgcctgttgagggtcatcagaaaggagacttcaggagagaatttggcttttggggcctctctctggagtgagactattcttcattgatgatggtcagattgtgggtgtctcccctactcccagtggctcctgacactatcaacaatcatgtgaagacttgtcgagaagagcagaagaatctacacttctttgcaccagagtatggaggtgagccttcctgctttctctgccctgtcctcatccccctgcttttgcaccttataacttgaggtacagaggcaatataactgaaacttctaggccttctctaccagcatacaaaatatttttcttttcttttttttttttcctaaggcattcctgccaaccctagcccccaatcctctgattaaccaaagccttctctgttttccctagaagtcactaatgtgacaacagcagtggacatctactcctttggcatgtgtgcactggaggtgaggggactggaggggaggggggaaaggggtcagatgagaagatggaattgggaatggagggaagacaagtaaggcgctggcttggagggagtgattgtgggagcactgaagttcttaggtgtctacttttttttttattcttcctcactgaagatggc

SEQ ID NO: 93350 - DNA, 1032 bp, Homo sapiens
tctttatttccaaagggattcttttttttttttttttttttttttttttttttttttgagacagagtctcactctctctcaggctggagtgcaatggcttgatctcagctcattgcaacctccagctcccaggctcaagcgattcttgtgccttagcctcccgaagagctgggattacaggcatgtgccaccatgcctgggtaatttttgtacttttagtagagatggggtttcgccatgttggccaggctggtcttgaactggcgtcaagtgatctgtccgcctcggcttcccaaagtgctgggattacaggcatgagccactgtgccaggcctccaaagggattctttacccctttgcctgcatgccttctttgacatttaatctgactatcccttcataatatcccactccatcatgccctccagacatgatcccagagaacgctctagaggagatcaccaaaaacatggatactagtgccgtactggctgaaatccctgcaggaccaggaagagaaccagttcagactttgtgagtaactgagagggtctgaaaggggcagattggtcacgaccactcttgaggctctgtaaactgtccattctctgggaatgcttgaatttgctattttgcttgtttctttccttccatctcctttctcttttctcgtccaggtactctcagtcaccagctctggaattagataaattccttgaagatgtcaggtgagagcagagtgagaagcaggctttcttgaggaagcaggcggggttgggtatcctaaggcgttcacagagcccatgtgacctgtcttcatctccctccaggaatgggatctatcctctgacagcctttgggctgcctcggccccagcagccacagcaggaggaggtgacatcacctgtcgtgcccccctctgtcaagactccgacacctgaaccagctgaggtggagactcgcaaggtgggggctgtgtgggtgtggattgtctccatggttgtggtggaagggagagaggacatctcaaat

SEQ ID NO: 93351 - DNA, 1225 bp, Homo sapiens
gggacccgggacggaggcggggcccaggttggggcggggccgggcccaggtacagcggccctgcggctggcgcggcggacgggatgaggcgctgcagtctctgcgctttcggtaacttccgggccctggcgtctcgtctccttaccctggggctacccttgccccgtcctactgcccgcggttaacccgccgcgagccgcctctcccctccccgcccgactcaaccctgccctcccccgtgctttgcagacgccgcccgggggcccaggcggctgatgcgtgtgggcctcgcgctgatcttggtgggccacgtgaacctgctgctgggggccgtgctgcatggcaccgtcctgcggcacgtggccaatccccgcggcgctgtcacgccggagtacaccgtagccaatgtcatctctgtcggctcggggctgctggtgagcgcggcaggcgacccgggcgggggccgggctcccggagagcccagcaggccaaaggctttgtgtcttccacagagcgtttccgtgggacttgtggccctcctggcgtccaggaaccttcttcgccctccactggtgagagggacttccctggagcttttaacgagtaggcttgagtcagggaaatgggggctgactgagcttggtctttcaatagattggaggagcctcagagaaactgggtgtctagtcactgggagagttagccaggcccaggctgctcaccctgatctcctgtccctgccagcactgggtcctgctggcactagctctggtgaacctgctcttgtccgttgcctgctccctgggcctccttcttgctgtgtcactcactgtggccaacggtggccgccgccttattgctgactgccacccaggactgctggatcctctggtaccactggatgaggggccgggacatactgactgcccctttgaccccacaagaatctatgtgagcacattctcttccttcttgtggtctacaaagccttggtcctgcccttttaatttcccctatttgctgcacttgccctactccctcctactccccatccttcttgcttttcaggatacagccttggctctctggatcccttctttgctcatgtctgcaggggaggctgctctatctggttactgctgtgtggctgcactcactctacgtggagttgggccctgcaggaaggacggacttcaggggcaggtaaggaaggcaaacaggaagg

SEQ ID NO: 93352 - DNA, 1033 bp, Homo sapiens
cacacattatttagatattttccattctttttttatactaaatcttcaaaatccagtgtgtgtgaatgaagaaacaagttcataaaagcccaacacaaatagttacagaatgccctggactccttattttaggagtcctttctctgtactctgctacgaagattttacttatgacaaagaccttgaaaatgattttgtcaaaggcggaagtttcaaatgcagtgacctcaggcagcgcaggaagtatctgaaagagttaatgaactgagaggaaagataggtccactgatggctaatcaaaggatctaatggaccatgagccaggttttgcccaggagggtgcaaggttgaaggggagagtaagagaaaaagttggcatctggaggagaaaaatgtatgaaatggatgaggctgaggactcagcggtatttgtctctcctacccatttccatcttctgttcaaccactcaggcagctgaactctccatcaagtttctgcctccccaacgtaatatggaagtcgttctggctgtaggaccccagctgattggaattggaaagcacagtgcagtaagtaggatgctgagatggaacagaaatagatttcacagagatgggtgcaagggtgacatctacacccaggaaggtgtgtgaggtgggcctcctggtgggcatggcttgcagtcctggggaaacagatgggagagctcacagtgggaagactgggagcgaggagaaagtctccacgctgatttcccactgtgcaggctgcagagctctatctgaatctggaccttgtcaaggaagcaatcgatgctttcatcgagggtgaggagtggaacaaggcgaagcgtgtagctaaggagttagatcccaggtaagcttgtaaccccttcttactgcgaaattctcttttacttccttttgtaaagactgggagaaagtcttaccgggagggttggtattctggaacatgaagatggagctctctgaacatcttcacaggtatgaagactatgtggaccagcattat

SEQ ID NO: 93353 - DNA, 1022 bp, Homo sapiens
aggatattggtaatgaaggagtgatgagagaatctgtgcaaagtgctcgataaatgtcacctgctgccattttggctaggaatcatccttgatcccattttctccagacttcccacatgtagattatcagtaagtcctaaggactctgtcttcaaaacacatcctgatgtctccatccttgtgcagaccactgccgtctcccacctgcaatattgcacagcctcttaattagtcgcactgatactgtttcttgtacccctaccatctattcatcccagagcagctgaggtcatttttttaaacatagattgtgtcattttcatgactggaaccttccattagcttactgttttacttagtataaaacccaaactccttgtgtggccttagccctgaagttttttggcctctgcttccttctcatgccagcttcctgcttgcccattagtctccaaccacactggcatccttttggctctgtgagtgtgccaagctcatacctgctatagagccttaacactagctgttcgctctccaggaataacttttccccatcctgccatgactggctttttcttgtattcaggtctcagctcaaatgtcagttcatcagagagacctccaactaccaacttaagtggccccttcagtcactatctataacaggggtatccaatctttggcttccctgagccacatcggaagaagaattatcttgggccacacataaaatatactaacactaatgatagctgatgagcttaaaaaaaaaaaaaaaaaaagagaaaagaatcacaaaaaaatctcataatgttttaagaaagtttatgaatttgtgttgggccacattcaaagccatcttgggccatgggttgaacaagcttgatctgtaatattacattactttattttattttttattatctccaattttactaattatttgtctccaccagaatggaagttctctgagagcaaggccctcatcttccttggtctctatatgtctccagtgacaagac

SEQ ID NO: 93354 - DNA, 1010 bp, Homo sapiens
ccaacataccctaatagtgaacatggtgactctctcaggtgcctcaatgttgtaccatacacacagactgtttcggttctgagctaccagcacgtcacttcctgggacccactgcatataggagcagaagttgaggatcattgtcttagagcagctttcaatatcatacagatgcaactgaagaaagaaaaggcaggtaacacaattacaaggggatgtggggttgtctcctgcttttgaccattttcctaatggtgagatgtggtgagctaacccaccactcaggttcatgctgcatttcaaagcttactgacctgctttctgctgagctggtatatcctaactctggtcaagtaagagatgacccatagaacaaagatctacatcccaggaattttaagttaggtgaaggtcagactttccttcttgaaataactctgggccagagttaccagcttggattacaaatggcaggccactagaaaaattaaattatccagaaatttgtgatgtggctttcactgaaatgaaaagtcatcaggttgtctctttgatctgaggttgaagactctggtgctaccatattgggatgagaatcaatgagggacgaagaggctgtcctccagccagttcatgctatcagataagtgtggctgaaaagcactggacagcaggtctaggtgaaggtcagctaggcatgaggaggaggaatgcagggttaaggaagtttcctgagggcacagactgtgaatagtaagagacaccaacttccaaactcccttcttgactttgttgccataatacaatcacctctgaggtcatacaggattgctgggcgcatggctcaacacctgtaatcccagcactttgagaggcagaggcaggcagatcacctgaggccaggaggtcaggagttcgagaccagcctggccaacatggtgaaaacccatctctactaaaaatacaaaaattatctaggtgtggtggcacgtgcctgtagtcccagctac

SEQ ID NO: 93355 - DNA, 1109 bp, Homo sapiens
tggggcccattgttcattaataatggatatcactaaaacttataaataggctttgatcaagagaccccctgaaaccatcccagccaaccctaattggtctgctctaaatgtgatagtttctgataatgtctagaagattcaaaccaaactaaaatattcatcctctgcagtgaccagcctaactttagtcagaggtttgtctgttgccttccccaccatccacccttgcagtgctcttacacagtaggcattcaaatatacgggtgacttcttagagcatatgaccatcaaggtcattgattcatcagccttgtctcactgctgtattgtatcaggcttatctttaatgtgctcagtgctgccttcgaggggattctgtgagtaggagaagccacttgctcaatagttctagtctgctctgaggtaactccataagccccagagagtgatgacatttctgtgggtctggaccttttgagttaacaacatagttaaacaaaacctctacaattctaaaagagacctagcttcctaggcatcctagcaaaattatgtgtgttggccatactatgtatatgtgtggaatctctcttcttaaccctgtctcctttattctatagtggatctgattggtggctacaacattggcaccgtcagccatgagagccgtgtggattggctggaacttaatgagactggacacaagctcctcttcagggaccggaaacttcgtgtgagaagagctactaaggccttaggcattggctggcccacagagggtgtgagacaagctgccaccagggactgagggaggcaggatggagcacattgtctttgctgtgtcatcaacatggcagaaggcacagaagaatcaacattctctgtagctgataccaaaactgatagcaaaacccatcctttattacctctttttttttttttttggagacagtgtctcactctgtcacccaggctggagtgcagtggtacaatctgggctcactgcaacttctgcctcccgggttcaagtgattctcctgcctcagcctccccagtagctgggactacaggcacgtgccaccacacctagataatttttgtatttttag

SEQ ID NO: 93356 - DNA, 1072 bp, Homo sapiens
tccttgtattctcttctttcttcactgactcctaccatttatctccttgttccatatttttttgctcctagtagcttatttttctcacctgccctggtctttttgttttctctgctcccctcactcttattctgttttagttttgccttgattttcccagcttatttcctgtgcacctttatatcctcttctgctagactgcctagcttgtctgttctttttatttcctttcttttctgatatagcaagactaatttcctttggttatcagcccatttgcactctttagctcagcctcaatctcttctaaaagccacatactttatttcaggcttcgggtgttcaactggatccctcgaagaagcatctgggaagaggcaaagcccaaggagattaccaatttatacaccatcactgccttggcctggaagcgggatggctcacggctctgtgtggtgtgttactagtaatccctttctggattggtgactttcaccaaactagaaaaaaatcctgccttatcctaaagcactgttccctgacactatagaatctcctctttccttttgaccctgacctaaaattctggcattaaaggcaggaaagagaaattcatactttaccctaggtcacaaaagggacaaaaaattgtgtgtaggcagggctagtttttcccttttatcccattaatatgttgtgcccttgagtccaatgattgtagcctctttccttttggtaattccaaaaactgccagctctttcactgccaactcttctctagactctagagcttaggttttgaggatgtctctagatactctccccatgccagtgtactatgtgtgtgaccttttatgctgtcactttcccttctagggcacactatgtggtggggtggaacagtttgactgctgcctccgaaggagtatttacaagaacaagtttgagttgacgtatgtgggacctagccaggtaagcaggatggtagcctactgcactgagaacttgcgtggctcattcctccttataacatttccctgccttctggccacagccatagttcaaatttaat

SEQ ID NO: 93357 - DNA, 2225 bp, Homo sapiens
gatggctcctctccaagagactgtgacggctcctctccaagggactgtgacgtcttctctcagagggactgtgatggcttctctcagagggactgtgatggcttttctctgagggactgtgatgtcttctctcagagggactgcgatgtcttctctcagagggactgcaatggcttctctcagagggactgcaatggcttctctcagagggactgtgatgtcttctctcagagggactgtgatggcttctctcagagggactgtgatggcttctctctgagggactgcgatggctcctccgagcgggactgcgatggcttctcttagagggactgtgatgtcttctctcagagggaccacgatggctcctctgagagggactgcgatgtcttctctcagagggactgcaatggcttctctctgagggaccgcgatggctcctctgggagggactgcgatgtcttctctcagaggaactgcgatggcttctctctgagggactgcgatggcttctctctgagggactgtgatgtcttctctgagagggaccgcgatggctcctctgagagggactgtgaaggcccctttcagagagactgtgacagctcctctcggggggactgcagtgatttctctgagacggactgcgccagcttctctcagaaggactggaatggtttttcctagagggactgcagtggctcctctgagagggactgtgatgtcttctctccaaggaactgcgttggcttctctcagagggactgcgatggtttctccaagaggggttatgacgggttctctcagaaggaccgcgtggggttctctccctatagaagctggggtggttatgctccttgtgtgtgagtttgtctttaagatgtcggtgccaggttctcttcacaggggaaccaggtaggattcttcctcgggcctgaactctggttcctggtgtggacaagttcttagactcctggctggaggtttcatttctatagaagtttttctttgatctgctactactgtccttttgaacagttctcagaggctgccccactgaggcagtttggaaagcaataccactttgggaatctgtgggcttgggcagtcgaagaggtctgggttggaaagagtaagctcttcttggctgttgagctgatctgcactggaccgttcctccccacaatatgtcctcctgcttaatggttgagcctgctggcgttagcttgtcagctgacctcttgtctcttttgatactgcttggtaagcaatagtccctggcattttgttttggataatagtttttgcttgcccacaaattgtctggccttgtcccgtccacaggcttccgcccaacagaagctataactctgtgtgctgtttggaatgcccgctttaggctctgaaaaagcagttgcatgaacttgggttgggaaggtttcttaggttgtctttttaaagaggcagtacttgtctgagttgctccaatcctcttccttcttaaatgggctgctaattccctagaaggactctctattgtggttctactgtttgtgtagaactttctgtgttttctaagtcgcttggtgattctcttcattggatattttgaatcagaggtctttttggttctcactttagcccgtttttcattctgagtgctttcagagtcactctctggtaggttgtgaacttgagtgaattcatagtgcccaggtgctctagtttttgtcttttctactaagtcaggcctgctgcgttgtcctcgcctgatgtagacttgtacaggagcaggggactgggaaggcccagactgcaaatctattgtggaagtaggactcttggaagcttgagtatagattttagctttcctttgtgatggtgatatagggcttctccgtatgacgggtctatctctttcacgatactttgagatttgggatcttttcccaattctcagcctaaagccaagatgcaaccgaacctcaccatggccttcaggagtgcgtacaaggtggagctgtggatagataagaagataaggccccgaagtggtctgtaatttatgatggcaattaagtcctgaacatcggccacactgtaggcagatagggtattttaggactagacctgaagctagaggtggaggcacatcggggggtatttgactccttaagagttttgctgctatttttagctgcagatcttctagcaactggaactgt

SEQ ID NO: 93358 - DNA, 2992 bp, Homo sapiens
gggtctgtaatttctctaagatgaataaaggggcagtaaatgatcttcctgtgcatctggactgagaccactgggcgggtggatggggaaggcaggctggagggacacgaggagttgtgcaaagattcggaatgagagccaggggttttgaggcccagccgaggctccaagctccgccccttcactccagaccccacccataggttcccgggtcccgcgtcgcgatcccagtggggcggggtctcagaggaatcggagggtgactcatcacgtgactcgctccggccgcagccccctcggaagctgctaggcggaagtagaagttcagaagagggctaggcggagccgagcccacatccgggagaggagagcggaagtggcgttggtctggccggagcccttgggtgaaattgttaggcgtggagagggagtgatgtcttccagactcggtgctgtacccgccgtgagtttcttggtttgaccgttatgctttagaggtagcgctgtcgagcccggaacacgcggtccctcgcttttgtcccatgctgagttggttttatcagaggccatcgtaggccccacccttctagatcagatcacctgtccctttttctttacccacgttctgctgcctgttccccacctccttggatttaattcctcgccacattaccattagtttctattccttttacatccccaatgtctctcatatccgttgtcttttcttttggcctcccttttagagcctgggacagggctttgagaatgggggaagacgaaggctctggtattgttacccgcctttgcactgctggaagataggacagcatatttttcctaaaaggtgttgccttcttgtgtttgaggtggtttccccgggagaacttcatttcttctgggcataggggaattcgtctttttgtggtcgaggttcagaggtccctagcactcactcgtgtgcttgtgatttgctagacttcgggacccacaacctttaagcagcagaggagcacgaggatcgtgggagctaagaagtaagtgaggttttctaaggtccttttatgattgtgtcaccagcgctgaccagtagaacttcttcctgtgatgaaaatgttctgtatctgcattgtccagtatcatagccactaacccggtgtggattttgagcagttgaaatgtggctagtgcaactgagggactgaattttaaattttatttgccaagtgagtgaggtttttctaaggttcttttgtgattttgtggccagcgctgtccagtggaacttcttgtgacgaaaatgttctgtatctgcactgtctagtatcatagctactagccccgtacgccttttgagcgcttgaaatgtggctagtgcgactgagggattgaattttaaattttatttaattttaactaacgttaaatagccacctgtagctcgtggctatcggattggacagtgtaggtctaagtctagtgtgtgggagaaaaacctagcttgcaaaaaaaaagtacaaattgtaataaaaatggaaccaaagactcagtggtaattctgtatttctccagacatgaaattcgtgctcataaatacactgatgaacttgggatggatgataaaaatggccgtaagaaatccttgtatttttaaactacttgtctgtaagactggtttattatttagtacactgaaggtgcttagtttttccatggttaatacaaaagaaaacattcttgttaactagacattaaatggattcattcattcaggtgacatttactacatgtttgctgtgcgccagttctgtagtaggttaggaatacaggcatgaaaaacaactagcagtctagaaggggagataggcaagtaggtcaacacagttcattgtaataagtaagtatttttaagtaggaatttaatttagcctttgaggaaggggagtgatagtttggaagggaaggattatcagagcaggtcactcctaagtagaaacttgaaagttgaggaatcatgcagttagtgagaaggagaaaggtttttcagaacagagaacagcatgtgaacgtgtggaaagagttaatgggatagtaagtagttctgtatgtctgggatagaggatgagggattgcagggagagcgtttagagaggttagtaggggctagaccatggaggacctgttacggcatgctaaagtgtttggattttatcctggaagagataatgagggaatgacatagccagatattggtcttaggccactctggcagcattatgaaggatggatttggaagggtactgggaaactggttcagaggttattatgataacctaagagatgaataaagaacatgtagcctatggtgggaacaatatacagggaatacgtagggaacaacgtatagggaatgtacaggtggtgatgatgagaagtgagtaagagaaggaagataggatgtctatgggtttctggctttggccatcaggtgaattttggagtaattcacagaactacaaatttctgaatgaggagcaacatttggaacaaaaacaaataggtttggacctcagatgaagagctggtctgaaatacagaattgggaattatcagctataaaaaataattggaaacatgatgttttcttccacaagctgagagttttaatgagctcttctagttaaagtggttagagcaatgtttctcagtatgtaccttggtcacctagagataattgttaaaaaataagattattaggcccccatccattaaccagatttggaatcattgggtttagggcatagaaatctttacttttaactagcttcctaggagattgtgacatttgagagtcaatggtgagaagtgagaccagagaagagtagaggaggaaatcatggagaacactagcttttaaagattgggtagaattaaataagtttacaaaggataccgagatgaactaaagtacttttctaatgaaatctaaata

SEQ ID NO: 93359 - DNA, 1021 bp, Homo sapiens
caggtatttagctggaaaagggaggttctaggagtccattgaccactcttggagaactgctgctctgctgcatcttgagccacctagaagaatgtctgatgctttgtagttacagagtaatgttttttagctgtcatactgactggtcttagattttggaatctggattcagctgtataccagaaatctctggccaggttaattcatgcaagatagcatccatcctttagctgtggaagctaagtatcatgttgcctaaataagatagggcatcaggttttagggagaatgctgaggcagaaggaagatgagtcagattagggcccacagactattcctttcccttagagataccctttagttgccatccctctgtcagagaaagagagaggctgggacataccaggttacaaatccagggagtcttctgaagggtcatagaacacctttattgcttcacctactttcttttattagatgaatctaggaaggaatgtctacttgggctgcaaagtgatcatttatgtgtactgcttactcttattacaatgaagtgtgataataattgtacatgttgtgttagatcaactattgttattgttaggtgattacaacttacattctgtttttatagcaggcttcttagttttctgcagaggtaaccaacttggttataatgtaaaagaatgtatagaaattttgctccagaccttcctttgtggtatatatttttatgttgtattagtagcaggacccagtgctccataaaggataatagtttccagtacactatccctcatgatgactccttaagtggttcatcgtctgcatcttcgtgtgaaccagtgagtgattttccagcatctttccgaaaatctacctactggatgaagatgagaagaatcaagccagctgctacttctcatgtcgaaggtatcaatatcagtgtcttattctgaagacgggccacttcctaaagttatagtttgagattgttataaatacctcttaaaagtattaa

SEQ ID NO: 93360 - DNA, 1113 bp, Homo sapiens
tgttgatgatttaggggctggtgtaaggattattcaggggagaatattctggatcgtcacaatctcaagggtccttggtggctagccctctatcttgagcaattcttatcctcttgttagcctcaagtcaagattaagcaaaacacattgcttgaatgcccttattattcataaggaacaatggatgatttggaatagataacaatataaaaagaaagggagagtgggtcagttaatgagaagttacaccaacttctctaaaaatgtcacagacatttctctgaggcctgtgttcactgatgatctttccttttgatggtcttgtgaatgatgttttgaagacaggcctagatgttcatttacaaagtgtgctgagtttttgttttgtttttgtatggtacttcagggtcaggtggagtatcagccaaggggaaaaggaaacccaggcaggaagaagatgaagactatcgagaatttcctcagaagaagcataagctttatggtaaggcagtaactttgctacttctttttccttgggtgactgagctttattctttgagggtaaaggaaagagaagccttagtttgagcccttcagtgacctctgagccctttgaattgtttgggagggaatggcctccatcctgcctcattataccctttcattctgtcctgacttaggcagtcagtcggttgagggactgggaaatagggtgttgaagaggaggagagggaagagattttggtattagcaagggtgacatgctgggcttcaagtttctgtcttatgtcagggaggaagcaacggcctaaaactcagcccaatcccaaatcccaggcccgtcgtattcggaaggaaccaccagtttatgcagcaggtatgttttcttttggaagttttgagggatgtagttctcacactctgatttgttgttggtgttgtctgtgaaggaatgaggtactaaagcatttctttaaggaggcagttactaagggctctagtttggagtcagacagacctttgctcaagttttggctcttcattaactttgtgacctgcctcaatttatttaacttcctcttgcctcagtttccctgtctatgaataggggta

SEQ ID NO: 93361 - DNA, 1757 bp, Homo sapiens
gctttagatttttatgtctctaagattcttggtctggtattgggtgggatgccagggcatgtccaagacttagaaaagatcaccatagtcacaagtcattatcaatttaaaggaattggaagaaacatatatttgttctgagttcctatccctgaattctaagagattcagctccttgcatttgagcatctcctacactgggcctgccctgtttaggtgggcctaaaactttgtagaatcaccttacatgtgcttacctggattggtaaagatcctctatacccatctgaaccatactggcctctcgggatgggaggtgggatagggtgtcaggctaacagccattcacctcactgaatcttttccatgttgacccaggtgtcctacaacctaccagccatgggaattgctgccattttccaatctcctcacacaaaatgagcaccatggaaacctgaagcttcaggaggggagagaagtctcagttcaaggcaacaagggagttgtaggcatctaaaccagatctgtctaggaatgcttaggagtttgtcatcttgatcctagtttctgagtccttaaactaggtattacggatggtactcttctaattctggattttgaaggcactttttgcgacagtagatcatagtgggaagaattgtacattggtgcctctggtgaattttgggcatttgatcattttgggggaggaaccaagacaacctggaagtgaagtgaaaggaacataggaaggtagaaagatgtggcatattacctgagaaaaagtaggagactttcaggttgtgttgaagtagggtgggtgattggaacagaattgcactaggatggatttatgttgataatcatccatccaagctggttttcctaaatctattactatattggatctttttccttcttatctttgctgaagtagaattccctcttttcatctctaacaatccctacacatagcccagttatgttgctgaatttaccagtaattcttttttgtttctctcttggaaatagggaaactttgtggctggaaaatacaaatgtcttctatgtcagaaagaatttgtgtcagagagtggtgtcaagtatcacatcaactccgtccatgctgaggtgaggtttttgtaatcctgtgggcctgatatgtaagccacaagagaggtagactttgtccctattgttatggactaaggctgtcaaggaaagtatctctaaagtggttaccagagccattagagttaaaatattctctaaacttagatatataattgtatttttctgtgaaagtatttgaagtcactgtgaggggtgggcggggtggcttatgcctctaatcccagcactttgggaggccaaggcaggaggatcacttgaacccaggagtttgaggctgcagtgagctggttgcgctactgcactccagcctaggcaacagagatcctgactcaaaaaaaaaaaaaaaatcactgtgactgtaagcatccttgaactctttttttttttttttttagacggagtctcgctctgttgcccaatctggagggctcactgcaacctccacctctcgggttcaagcaatactccctgagtagctgagattacaggcacctgccaccatgcctggctaatttttgtattttcagtagagatggggttttgccacgttggccaggctggtcttgaactcctgacttcaggtgattcactcgccttggcctcccaaagtgctaggattacag

SEQ ID NO: 93362 - DNA, 2220 bp, Homo sapiens
gtagatcatttattaaagtccctagaattacgccttacaaaatatgtgcttgtaatagctgctctgtgttggatttctccatcttaaaatatagaatcctgaggtatggttccatatctgtttccttcttactgtgttctgccctaatcatgccttttttccattcttcctccacctttctttatgttcttcactatattttcgactggatgacatttctattttgcctctctaggactggttcgttgtaaacccaacaacaaccaaaagctttgaaaagctgatgaagataaagcagcggcagcaagaagaagaaaagcggaggcagcagcacaggagcagaaggtctctaagaaggcggcagcagcctggcattgagcttcccgagacagagctgagtcttagagtagggaaggatcagaggaggaataatgaggaactggtagtgtcagcctcctgtaaggaaccagagcaggagccagtgccagcacagttccagaaagtaaagcccccaaagactaatcataaacgaggaaggaaataggcagtcagtgtaaaagtgctcctaggaaagcagatgtgatgctgttgtcacggggacctgtgctgggaggactgagtgaagattctttcagctgtttgtgtaaggctgtgactttctcagctccttcctcctgtgtaaatttcactgtcttcccttcttacattttgattcccccctccccttttagtaggttttcctgctattcctcgtcaagtcctcttgtttttttatcttgcccaaagagctccctctcaaggccaactataggctcctcttgccctgtacaaaactaagaaacctctttggttgtcctttccttcctggggtatagaatgttcttggaagctccattgatttagtagctgctccatcatctagcttgtgaaaccattccaaactaattttttaaaaccataactgatttgtcattttgtatttgtgatataacaagtctagaagttagaactgttgtcattcacataataagattactctgtctccttgggaaaaaaactttatggaggctgtttgtcctctcaatatggttttaagattgaaagtaagaaaacggatttaggatgaaaactctagaactaccctatgctgtttatactgggaaatgctttgtaccaagtagcagtgactagacccacagacatgaaaagcaaccttaggagtaaagtgacccaaacattaaaatgacaggaaagagaaagtagaagcagcaataaatactgccccaactttcctggagcccgaggcctcatccatagctatgatcacttgccctctgaagcttatttttgcttctttggttttaagaattgagaaatatcacattgcccctgatgttttgacagtctcctagtgctcctggtagtgccactaagggaaaaccaaggtgcgcattccttctccctggactttaccttacttgttagtctacgccccactgtttccacccatccccttagccaacctctgtctttttgaattttctgagaatattgtcctatcctcttttatatatggagttctctcctctttatatcctgagactttgacaccagatgtagatatttatctggagctggaaagaaaaattctttttctgtacctcatgcctatctggtaatgtttaatgggttatttctctttgagggtggctttctctggaacattggttagagcagctttgttgtcgtgtttctggattctcttccccattttgcgtaaatattggtcttatatattcttgcctattttgtggcatatgccacataaaaaatgaacctgatatagacaagtactaccttttcaaattctgaaaggctattaccactttaactctttgtgctcctccaaatagctttaaaatgtgggcttttgtgaagaccactttcaaacaagggagcactgaaacctgaattggatactgccagaataggtagttttgaaacaagttaaggacatggtatatgcactctgcattttcattggcagtgtgcccttaaagccctttcagtagatgagggttgtcagggaggagaaatgaagaagctatgttaatttctggtgagtaagacctggggaatgtttggcaatgacaaaagaaataaatgactctcagaaagatgtttccagtgttctttgacgccgacctgctgcatgactcc

SEQ ID NO: 93363 - DNA, 1034 bp, Homo sapiens
gttcctgctgcagctgctgcttcctgttttctaagtggctttgagtagccgttagtttctgggcttgctcaattagctgcagtaattccttcttgaactgctggttctctctgttgatgccacaggagtattcaaaaataaaccgctttgctgccaacttcaaggcctgggccttcatattaagctctcttctttttctctttcccagtagcctcctgtctggctcgctcagttgtttctccagtaatcttttctcctggaggagctgggcctgtacttcccgtgtctttgaagctgtctcagcttggactttctttgtctcctcctgtaatgtctgtatttctttctcctgcttttcctttaatatagcaatgtccctcattgcctgcaacttccgcttcaaactggattggatattttccttttgcaagagcgctgttttaagcactgaaatttgttctgcatatctggaggctgattcttgtcttcttcgttcaatctctccacttttttgtaaatagctgttccataccttctcaggttgctctgtgtactcttcagttttgttagtcaggtattccagaaagaatctgttttcagcctggacaagtaacttttctcggtgtagctccctggattcctccagtagctgtttccgctgggtttgagcttgttttatatgcttgttcagatccgtcatttccgccactatcttttctttaagccttgtctctacctttgttagcttctctggcttgacaaaattatttattagactatgatacggtggaaggagccttctggggccctcagcaaacctgaaagaacaaacgagacattcctctgtcagttaatgaaactttaggaagtaagtgcacaactgtccttcattcatacaagagaatatttctgagcaccagaatgttccagacattatgcaaggtgtggggaatccagctagtggtaaaggatgaggaatgtagctcgtcatttacaacgtgcattcactacaaccctgggaggtattacctcag

SEQ ID NO: 93364 - DNA, 1043 bp, Homo sapiens
actcaggaaagatgatgaaagagcctagaaaattatttctactcctgaccacccagtctgtttctgtgaccctttgtagctgcaaacagtgttcagtaagtcataagatctggctttaatacccaggctctgccacttgctagtggtgtgagtcatgggcaagtcacttaaactctctgaacctgttttctccttttttaaaactgaggtaatacctcccagggttgtagtgaatgcacgttgtaaatgacgagctacattcctcatcctttaccactagctggattccccacaccttgcataatgtctggaacattctggtgctcagaaatattctcttgtatgaatgaaggacagttgtgcacttacttcctaaagtttcattaactgacagaggaatgtctcgtttgttctttcaggtttgctgagggccccagaaggctccttccaccgtatcatagtctaataaataattttgtcaagccagagaagctaacaaaggtagagacaaggcttaaagaaaagatagtggcggaaatgacggatctgaacaagcatataaaacaagctcaaacccagcggaaacagctactggaggaatccagggagctacaccgagaaaagttacttgtccaggctgaaaacagattctttctggaatacctgactaacaaaactgaagagtacacagagcaacctgagaaggtatggaacagctatttacaaaaaagtggagagattgaacgaagaagacaagaatcagcctccagatatgcagaacaaatttcagtgcttaaaacagcgctcttgcaaaaggaaaatatccaatccagtttgaagcggaagttgcaggcaatgagggacattgctatattaaaggaaaagcaggagaaagaaatacagacattacaggaggagacaaagaaagtccaagctgagacagcttcaaagacacgggaagtacaggcccagctcctccaggagaaaagattactggagaaacaactgagcgagccagacaggaggctactgggaaagagaaa

SEQ ID NO: 93365 - DNA, 4299 bp, Homo sapiens
tcggctaccgaataagcccgagcagccggtcctccagtggctccgctccccgttctctgtgggctcaaaatgacaggcatgctcctcgttttcttgctgtgtgagccctgccctcgggaccccatctcttctggccttcctccgggagacaaaagccctcccaggctgcagagatcagcgcccttttcctagctcccttcagccttcctctcgcttgctcagcgcccccacttcctcgccactgtcactagttgactcatcagccctgcccgacgctaagaagatgccctggcaaccgccgcgcccctcacccgctcctttctgacgctgtggtggttttcgttcgcagcccagaacattgcggaagtttctctacccatgcggtgtctctatggtcgggtgggtggggccaggaggaagatggcggcgtccgcagctgccgctgagctccaggcttctgggggtccgcggcacccagtgtgtctgttggtgttgggaatggcgggatccgggaaaaccacttttgtacaggtgacgtacacagcatgggtgtagtaggggagcgcaaaaggttgcctccggcaggcggaaggccaggaagaaagggagggaagaggatttggagggtaccggcgcatggctttcgggggcttcccatcaactttagttccttccccggcaaagcctcctcgggccctagccaggttaattaaggctctcttctgcgcaccttcagggcatactcggtccagcttaccacgttgtacaggaattgtcttgctgataaaattgcgtttctcggaggcaagttacaagtaactttaaagattaatacagtgctagcacacaggttttggtgaagatttgccaaatatttcttgcacgcctgtcatgttccattcactggggatatagcgaaaatgaggttgacaagattcattcgtggggccaaatatttaatggaggagatagagaaaacccacatacgaagaatcaaaacaagtaaacaagtgactacgagtaggggaagctttgttagatgggtgatgaagaaaggtagcatttgaactgagagttgtatcttggaggtggacatggtggatatttcaggtagaagaaaatctaagtgcaatattcttaaggcatgggtgttaaaggaatggaagttctctcttgtcccctctttgtctccttccaaccctctccccatatctctgcagaggctcacaggacacctgcatgcccaaggcactccaccgtatgtgatcaacctggatccagcagtacatgaagttccctttcctgccaatattggtgagtaaaccagtaacataacttgtgtgcagtgctttaaagagaatggaaaaggccaggcgtggtggctcacggctgtaatctcagcactttgggaggccgaggcaggtagatcacgaggtcaggagttcaagaccagcctggccaagatggtgaaactccatctctactaaaaatacaaaaaattagccaggcacggtggcaggcacctgtaattccagctactcgggaggctgaggcaggagagttgcttgaacccgggtggcagaggttgcagtgagccaagatcgtgccactgcactccagcctggtcaatagagtgagactctgtaaagcctccagcctgccagtcttcagtgccttcttttttcatgttttctaaactatctactttcatttcctttggatttgcttgcattcctaaacagcttaggtttttttttttttttttttttttttagacagagtctctgtcacccaggccagagtgcagtggcgtgattcacaggtcactgcagcctcaacatcccaggctcaagtgatcctcccacctcagcctcctgccgctatgctgggctagttttgttttgtttggagagacaaggcctctctatgttgcccaggctggtcttgaactcctgggctcaagtaatcctcctgccttggcctcccaaagtgctgggattataggtgtgagccactgtgcccagcctaactccttttaaaaaatcatgtctgcattgccattgtgttgcctttgtcagtaataggcaattagtaagaagcattttttcccccttgatttttgcctccctttttctaggcatgtttaagttgcatgaaactttgcactttgtggagacaaaactctttgccacaactttagagctcctagccctaacattcttcatgatttacttggcatttattctttgtaaggaaggaaaccagtgtgaaagtggaggtggtagaagagaatgctgacaggagaaggctagaaggccagttttactttcctggtggtagggaatgtgtatgtattacattccagttaattcttttttttctcctcagatattcgtgatactgtaaagtataaagaagtaatgaaacagtatccttttccatctactttggtcttgactcattcctggcttcttgtctgtgtattttgtggcttgaaagagtgtttttgccttttccttgtgaaatatacaagcaaaaggatggaagctgattgtgggagaggtaggtgatcagaaatactatttcagcttgagattttagttttcttaccatctccccagatggcaggctgttgtaattaaagagcagagagtatgataggataactgacagctacctgggtcccacaaggtagtattttgccttggaggatcatctgttggtcaccacctctttagactgggaaactcagaaatgagtgagtttagttggattaactcttagtaaattgctgtatgaaatgtgtactctctccgtaggcaagtctaagtaggaagactaatcataatcagcagattgcttggtttatttatgaggatcagagccggaggtgttatacaggtggccttaatgaccaatgccagtgggctgtcactgcctgatgcacctgtattacattttggtcactttgctttcttcattttgcctgaccactccttaaatcaaatgagtgagccagaccttgataatgactgtttccctgtgtggttaagtttgtatggtagtcaaggattaggttgccagtatccattaatggaacactaatttcataatgccgtttgtgtgaatgatagcctaggtatgaactttataatctaatctataagcgatttcagtcctcaacttggtgtctagatatggacttggacccaatggcggcatagtgacctcactcaatctctttgctaccagatttgatcaggtatatctgtctttagtatattaatatggttgtgtaaaaatctgtgactcttaaattccttagcttgatcacattggtaaagaagagcagcaaacctgagcataaatatagaaaataagtaggcattttgtcagacagagaagtagactatgagaaggtgatcagtatggtcagacacttcaaatttaatatttgtgacagctaataaaaatccaaaagacctgggttattttcttgacctgttctttgcctgtggtattaccccgaagctgggatgggggtatttgggagtgggatggactagcagtcatggaatggaaagatgatggggcattttacttgtgataaatatttgtcattctttaggttttctttgtcacctacttccataagagtgttttataatcactggtttttatactctgatgttaggccatgagacaggctgttaacattttgacaagagataacaacttgacattgacagatcaaagtcttcagcttctcagatccttggattgtgccccaagatggtattggagtgctgctgatgtggctgtgttgctttagttcagcctgtttattctttgttgtcctaagattgcaaatgttcagtaggtgattgagggattcagtaggtgatagtgcctgtgaggtatgccaccctggagagggctctgtgattttgtgttgaaatcggaatttgttgtcattgacatctttttcttttaggtgatgaaatttattgagaaggcccagaacatgtccaagtaagtgatgtcagtaacacccatttattactctgtagctgacatatttctaggcttcatggaggatctgggataccatcagcctctgaaagaatatagattgagatgaaaccattaggagtgaaaaaaaaattggcaaatcattaagatgctttagaatatagagctaaatttaatatcatttcatcctcaattactttgatccccaatttacatggcttcttaggagctcttttgagactttgtcccaattcagttgtccacctg

SEQ ID NO: 93366 - DNA, 1022 bp, Homo sapiens
gctatgtctacttcaggtttttgtgttttttttcccccatataataaagtttattgtatcttttgttttttcattttgtaggctggggatgaataaagagtaatgctttctatgtaggcattttgcctagccagtttaaatgttccagttcaattaacagagcaggggatccaccctggactgaactcaacactttagaattgagggttcttttgaaacctttttgtgttccgtttctgaaccctctaaatcagtctgcagagccctccagtctaaacttctgcagtaacccaggcccacgctacttagtgtttctgtccctataccagacgtcccttatctgcatcagtttttatgtagcctctagtatttgtataattcttcatctccactgagaagtctggcatctaatttgggactcctttttgaatatgatgacatttttctctgtatatacaggccaacgcagagagccaacagcagagagaacaactggaacgccttcgaaaagatatgggttctgtagccttggatgcagggactgccaaaggtattggagggtttcttggtgttaggaactaaaaaaaggttacacttctttcttttatttatttatttatttttgagacggagtttcactcttgttgcccaggctggagtctcggctcaccacaacctccacctcccaggttcaagcagttctcctgcctcagccttcctgagtagctgggattacaggcatgtgccaccacacccggctaattttgtatttttagtagagatggggttttttccatgttggtcaggctggtctcgaactcctgacctcagatgatccacccacctgggcctcccaaaatgctgggattacaggcatgagccactgtgcctggccggttacacttatttctatcagcaggattctgtttatatatgagagagagaaagagaaaaagataaaggaaatgtggttttatatatatatatatacacacacacacacacacacacacacacacaca

SEQ ID NO: 93367 - DNA, 1050 bp, Homo sapiens
ttgattttctatttttcccctccctcctcttcttaaataataccctggctccttgataacatttcaccctgtattttctgcagaccttctctgaacttacatttccaccaggaggcttccttagcactccacactttcactgtgactcaccagcacactggatctgctcaaatgttgttagctttcataggaaaaaccatcaccccttccaagctgtgagccagtaaaaaagaatgatgctactagtaagacaagcttcttgaaaattatttccctcagcttaaaaaaatgggactcctagggctatttgccttatgaaagcactttgtgaactaagctattatagaaatgttaagtggtattaacaatacatttagaagaggtaagatcctgcgtttatatgtatcatgagcactttcatcctgccagtttatgatcatagttacttagtgattcaagatcacctttttgaggaggcatatcactgataggtgttttcactgtagacagcttatctcctgtgctgcacccttctgatttgatcctgactcgaggaaccttggatgaagaggatgaggaagcagacagcgatactgatgacattgaccacagaggtgagaggtggctgaggtggcccgtggcaacagagcatctgcttatcctcacattgtttgcccaggagtttcttgctttaagcgtgtagccagtaatagtggataaaggatacagcaccagaaaagagtttcctatattgagagttcctgtcctgcctactggatggttaatactgagctgattacaggcctttcgttggtcttgtgtcttcttatctttaggtcctaacttggtttgagggatccaggacttttgtttgttgttattagtattttgttttaagaatatgtaagggctgggtgtggtggctcatgcctgtaatcccactgctttgggaggccaagtcaggaggattgcttgaggccaggagttctggacaagcctgggcaacatagttagtcccactctctacaaaaaagaaaaaaatagctgggc

SEQ ID NO: 93368 - DNA, 1004 bp, Homo sapiens
acacttcacttgtttctagaagtccagaattttggacctccacgtgaaagaactgttcttacctctgaactgggggctcccataagggataattttcctcagagtagcaaagtttctcttattagagaaatcttgtgactcagatgaagtcagggatagaagacccttggacctggcaggttaatgctgattattccttggcctttcccttgtatttatgcaaggaaggatatactgagctgatactcttccaagcctacaacttcaagttttatcatttgaactcaagtacttttgctgctgaggaatggaatcaaaagaacgtagtctcctggtgaccacctcagatctctattattaggctagatgtatagcctctactcccccagcttcttgctcttgaccctgcactgtaagttgcccttctattagcagccaaggaaaagggaaacatgagcttatccagaacggtggcagagtctccttggcaatcaaccaacgttgctatgaaatatgcctcacactgtatagctcattataggacgtcaggtttgttgaaaaaagtgggcaagacatgattaatgaatcagaatcctgtttcattggtgacttggataaagactttttaattttaactttgttctaagactgcttgtcatgatttcaaattagaaaattatataattgcaaacagcttcacttctcctgttcaacagaggcttaaggccagatgtccaaacttgtctcaataaggaggtgatattttactaaagtttcccacgtgcacatactgactaaatacagagctaggcccagtttgtattgtactctgaacttaatgcaaagtctccttggtgattttcgcaaagtccgtggatttgggtcagaggcacatttcatacataacagcccttataaacgtttgccctgcctccacattttacagtatcttaaaacagtacatttctttcaaagaattttatctctatgagtcagtactccaa

SEQ ID NO: 93369 - DNA, 1094 bp, Homo sapiens
caatcacagctcactacaagcgatccttccacctcagccttccaagtagctgagaccacagatgtgaaccaccatgcccagcttttttttttttttggtagagatggggtctcactagatactgcccaagctggtctcagactccgaggctcaagttgtcctcccaccttggcctcccaaagtactgggatgacaggtgtgaatgaccgtgcccagcctactgttaatttttatagccaaaaaaatgtaatcttttgtcccagttctaacacatttttttacctttatgtaacttttaattaatgacatacacattctctgccaaaccaattttctttacatatctctatcactcataaatgcaaactcagcaccttaaacaaatccctcccattggcagtgaatgttttaaaattctgttattcatgttctgttggcttttccatgggacgtcacaagctgactatccaacttgcttttaacatttccttggaaaattgactcttgcttgccaacagattagtaagcaactctctgaagaatatgaaaggattgtcaatcctgagaaggccacagaggacgctaaacctgtgaagatcaaggaggaacctgtgagcgacatcacttttcctgtcagtgaggagctggaggctgaccttgcttctggagaccagtcactgcctatgggagtgcttggggctcagagcgaacgcttcccatctaacctggaggttgaagcttcaccacaggcttcaagtaagacaaataaacttactcactttgattctgggagatctgccaatttcagtactttttgctttttggaatcaagctcaagaggtagaagaacaaaagcagcagtgggcagaatggaaagtcctaaaacgaatacagtttcacctatctagagatcccagcattcttctctttctaattagtgaagagaggattagcacagctttacaggcattctttaaaataatccctagttaagatgtagatgcaatgtgttgtcacgttgattaccaaggctgattcagctgatccagctggttgggaagatatccccttcctcctttagtattttattttta

SEQ ID NO: 93370 - DNA, 1054 bp, Homo sapiens
agttttaaaaagagtaagtctagcagcagtgtagagaatagatgacatacaaagagagattggaggaagggataccagttagaaggcagcagaaatctctcacgttctatatgtcaaaagttgaaagcataatgccatttagattaatggttcataaatttttccaccaggatcatgcctaagacacacagagtaagaaccacttcttattatctttaaccctactagtttttctcctattgatccagcacagatgtatcaagataccttatcatgccttgcttattgttcaggattgagcgtgatggtagttctggtaatgagttagtgagtgagatgggaaatagggatactagagctccagatgctgttgtagctattggtccactaatgacccaaattctaccctgtggttcagtgtagtaggaattgtcatagtatgacaataaccagcatctaacagttacatttctcttaatttatttagggagaacacctttggtcctacagttttgctgacactgacatttttctaagtggtcacaaatagcctactttttacataaataactggctagacctcgtatttttcactacagaagcctataatctaaagttgccaggatttaaacacattacttttaggttattgtctacatttatcctgagacctcttctcttcttattccaaaatgttgagatactggggagagataccaatatcatcaagccagaccaacagaagttccttcgatttgctcccacgggagttccgtctggtggaagtccatgacccacccctgcaccaaccctcagccaacaagccgaagccccccactatgctggacatcccctcagagccatgtagtctcaccatccatacgattcagttgattcagcacaaccgacgtcttcgcaaccttattgccacagctcaggcccagaatcagcagcagacagaaggtgtaaaaactgaagagagtgaacctcttccctcgtgccctgggtcacctcctctccctgatgacctcctgcctttagattgtaagaatcc

SEQ ID NO: 93371 - DNA, 1110 bp, Homo sapiens
attgtgggaaaatatacataacagaaaagtgtaccattttaagcattttaagagtatcactcagtggcattaagtacattcacaatattatggaaccatcaacactgttcattttggaacttttttatcattccatactgaaattggtatctgttaaacactaacttcattctccctccttcccagcctctggcaaccaccattctacttttctgtctctatgaatttgactactttaggtatctcacatgatgcagtaagtgtccttttatatatggcttatttcacttagtataatgtcttcaaggtttagccctttgtttttatacgtagtttggcagcttgtagaacctctctttcagtagttgatggtgacattttaagctccttgcctacttgccttctttctttttcttttcttttttaaaaacttatttattcatcattttatctacctctagtatctcggaaaaggaaagccaagaactgggaagatgaagacttttatgatagtgatgatgacacatttcttgataggactggcctgattgagaagaagcgtctgaacagaatgaagaaggctggcaagattgatgagaagccagagacctttgaatcattggcaagttttatttatggaagtagctgtggtatttaatagtttaatttttaataacataatgtattatttaaatatgttttatgataatttttaaagtagtagcattgaaatctgatactgaagtataacttttgtggtctgttaatttaatggtaacagacaactagtcttatccaagttgtttgaaaaaaatatggcttgctgctagatcctttccttcaggatattgatccattaattaacattctttggatatgatattacctctctcaaaaggaaaggaaaaagttccaagttagggcgttctgaggtgaaattgactttagccttctggcagtcaagagaagtcaaaggaattttgaagaatgtagtatggtaatatgtagtctgaaacagtatgttcttcaggaaattatcacaaggtgacgtgttaatgggtaggtaacagacaataataggcaggtaataggctacctattagactagaa

SEQ ID NO: 93372 - DNA, 1050 bp, Homo sapiens
tatctttgtcattactacactgggtatcctgcatactgtacccccatccccatgcacacttttttttttaagtgctcagagctattgcgcttaagtgggagctccagataagtaagacactcttcagaggttggtgggaagtagggctttacaccatggatcaatctcctgctgcttatatgttctcctttgccagtgacctttgtactgtagtcatttcatgggtgtgaagtcatgtagcatgtggcaaattacttgactaagggagcagcctcatcatagctctgtgtctgtgacagtcagcattgttcttgtccattcaaaatctgttggtctgaatacctctttcttattgttatatgcttagatattcattttgtggtaatttttattttgccagaggtttctttgtcagtatcatggtatttttagataaaaccttgggactccctggaatagatgtgtataattattctttcttcctaggactgaaactcagactacaggtgcagaaaacaaagctaaaaagcttacattgcctctatttggtgccatgaaaggaggaagcaaattcaaattaaaaactggaacagtaggggtaagttgtgagtcagggtgttaaacttttagcccttgagttatccctgagctaatttttctcttttcttttttgaaactacaaatgactcattccatagtaatgtgagaaagggctgtgggcttggtatgatcacatctttcccagaacttggttcttggattcttttttttttttttttttggagacagagtctcactctgtcaccaggctggagtgcagtggcgtgatctcggctgactgcaacttccgcctcccgggttcaagcaattctcctgcctcagcctctcgagtagctgggactacaggcgtgctccaccatgcccagctaatttttgtatttttagtaggatgggacttcaccatgttggccaggatggtctccatctcttgacctcgtgatccacctgccttggcctcccaaaatgctgggtttataggcatgagccatt

SEQ ID NO: 93373 - DNA, 1050 bp, Homo sapiens
attctttgagaaatgtcttcctccttttcttcaggatctgtttgatggatttacatgccttgtttccttgaaattacgctaagtctaaaatgaaaaagcagcacaaatgacttatttctgattgtctgatttattccttagaagattttgtaatcaattgaaatcctttaatatcatgagttataacagtccagaattcctgtagctggcactcatctgaaataactattttagttccttacaagctattttcaagtgttttgtatttagtaatctttgactctaggaactaataaagacacttgtttagggtctatagaggggtaaaatttcatgtcaaagtcccacctccagcagacttctgtggagttcatcaacctaaaaagagtaaacattcagtacatttagactgacctccttgaaaagatttttctcttgttgtcattaagtagaactacttgttcatggttttgtttccctcttagaagttaccccccaagcgtccagaactccctccaactctaatgagaatgaaagatgagcctgaagtagaagaggaggaggaagaggaagaggaagaagagaaagaaaaggaggagcatgaaaagaaaaaactggaggatggaagcctcagtaggccacagccagagatagagccagaagcagcagtgcaggaaatgaggcctcccacagatctcacacattttaaagaaacccaaacccatggtaatatctttcttctccttcctgtgttgttcagtgggcagttacattgattgtggataggttttaaaaagcaaggccagttcttgtctgtgcatttgactttgtatgtgatatactgactctgtagcaaggaaacatactttcttggtcttcttcctttgaccgccagtcattatttgtcttcattgcaaattaagggcagttatttccaatccattccagaattacagaaaattgaaggctatggaatctgaaaccatagctgctgtggaataatcctgagctgctgccactgtgtgagttggagggcagtggaacagggta

SEQ ID NO: 93374 - DNA, 1038 bp, Homo sapiens
atgtgcttgtctgaaaaagactttatttctctttcattcatgaaacttagttttgttggatacaaaattcttgactaatgtttattctgcttaaggaggctaacaataggaccccaatcccttctgcagttgtaaggtttctggagagaaattcttgtgaataaaacaatccatcttttctttttagcttccaccaacactttcttccaaatatcctgaagatgacccagactactgtgtgtgggtcccacctgaaggtagattgtttttacttttttttcctctaaggttcatttatttatatttttgaataggtaatatagatttaaggttcaacataagaaagttacaagagtatgtagtgataatttgtataccatgtttggatccttattcaaacaaacaactgtttaaaaaaattattagccagtcagataattttgaacactacctggatatttgatgatactaagaaattattttttatttttttaaagtgtgaatgatgttgagttatgttttttggaaaaagtccttgtcttctaggaatatatacggaagtgtttacaggtgtaatgttatctgggttttaccaagtcaaaagaaaggaaaacaattctggctgtgcctcagctactcggttgttttcctcacaagacaaccaattgttgttagtttcttatggatacttatatataaaatgctaagtagagaggagcatctatagaaaaaaaatcataaaagttaacctgctggatcaaaggtataaacattttaaagatattataaattgcattctatagagattgtaccagttttatgctcatacacacacccttaaagcaatgtatgagatacttacttcctcatatgttcatcacagcttgagatttctaatatattagtaactaatataatttagttacttgagatgtctgctttttctatgctaacaaatgttagggtagaaatgaaagagggctgtattttgaaatttcatacaaaaagtaaaatttctaccgtagaataaaccttttt

SEQ ID NO: 93375 - DNA, 1020 bp, Homo sapiens
gaagggcaggtcctagccccagcccttcctatccttgggtttttctgtcagagaagggataccttctagccacttttagttccaggaccttgctccagacaagctggatagtctaggaactgaccattttagcaagtttaatccagagggctggatttatgtcctacttggggcaaaaccaggcatgaactactccttcccatcaaggagcgctgcactccagcagctggctttaatttggattttccaggaccagctgcatttagctggggttggttgggtttcctcaggtctgcctttatcacgcacaccccgtcagaagttaatgcaaccacggcagggagtgaccacaagggggcagtatagacccattacaatgcggtcagcttgcacaaggggctgaaagaagataaaggtttcaaagcagaagaaagagtaagaatcagaaaaaaaggaggattgtgaaaaagttaggagcagcaagctagtttcgctcacagacattcctggacccaagacctggcagcagaaagttagccagagacaccggtcaggcccaaatggtgctcccaactctcctccaaaactgccttttccagtgcttaatttcacttagagaaagtcgctctccatttataatgccaatattctatggaggactttgggcattgcatatttattccttacacactatatttcagctttacagtttacagaggatttttttcacacttgttaaaaaaaaaaatccgaatcccctattagacttaaaaggtaaaaacagatgttaattacctctgtttaaagaaactgaggcactgggcagggtggctaacacctgtaatcccagcattttgggaggctggggcaggtggatcgcctgaggtcaggagttcgagaccagcctggccaatatggtgaaaccccgtctctacaaaaaatacaaaaattagccaggcatggtgacccctgcctgtagtcccagctactcaggctgaagcaggagaatcacttgaaccc

SEQ ID NO: 93376 - DNA, 1021 bp, Homo sapiens
ctttgaaggcaaggactgggtttttattccagtacctgaacagtgaatgaatgaatgaatgaatgagtgagtgtgagcataaagaaagcctgttacatgggagactcagtaggatttcactgaacctgtgaagtaagtaaggctagcaatcagaagcatgttgtgaggtcactggtctgtaggtgtgtgtgtgtgtgtgtgtgtgtatgtgtgtgtttgtgtgtgcagggaaggggcaaggctggaagaacgccgctgtgctggcacagccttcgtcagagccctgaaaggggctgagtgggctctgactcagctctatgactcattcactgtattgctgtctccatcctctgggcacatcctctggaccatttctgctcagcctcaagtggaggaggtgagatttgggccggtacctccggatgactcacctggctaagctggaaggaaggggccgaagccccaccatcctgcacccccttgtcactacccctgtctccctaggggttctcgtgcagacacagacttcacaagtaggttatggctgctccagtaatgaatgacgctctccatcccaacccaaagcattaccccccaatcacgcttcccggctcaaatgccacagtttccccagtcccctcacatggttgtcccctgtgcttcttgtgggcctctgaggtcagctgataaggaagtttacaaggctctcccagaccattggtcattttattcttcttcatctcttacaaacctttttcagtttacaaaatagttttacatcccctttctcatttgattctctcccagaccctaggaagcctggtaggaaggcgaatatccccattcttcagggatggacgttggagctccactaatcctttcactagtaaaggaaaggaagtgaagggcattgaggggacacggaatgttgggaagggcaggctgggcagggacagtggaacagtgggctgggggcatttagtgggacagtgggctggagaatagggacagcactggccag

SEQ ID NO: 93377 - DNA, 1009 bp, Homo sapiens
ttcagggctgcctaagtagatgaaggcatagcttgatttctctgaaaaaggaggactcattccacaggggttgatggtgagtctcctctgagccagctgtggtgctgagtgctgaggtgacggtaaagatgagtagtgcatggatgctcctgcccacggtgagtggatttaagaagagagcacctgatgctgccgagggattacaaaggaaagattcagtgaggcattgcaaaggaaagattcagtgagggattgcaaaggaagggttcagtgagggattgcaaaggaagggttcaccgagggattgcaaaggaagggttcagtgagggattgcaaaggaagggttcagtgagggattgcaaaggaagggttcaccaagtgattgcaaaaggattcactgagggattgcagaaggattcactgagggatttcaaagaaaggattcaccaagggattgcaaatgaaggattcagtgagggattgcaaaggaaggattcactgagggattgcaaaggaagggttcagtgagggatttcaaaggaaggattcagtgagggattgcaaaggaagggttcagtgagggattgcaaaggaaggattcagtgagggattgcaaaggaaggattcactgagggattgcaaaggaagggttcagtgagggattgcaaaggaagggttcactgagggattgcaaaggaagggttcagtgagggattgcaaaggaagggttcactgagggattgcaaaggaagggttcggtgagggattgcaaaggaagggttcagtgagggattgcaaaggaagggttcattgagggattgcaaaggaaggattcactgagggattgcaaaggaaggattcatagaccagaactttgacatgggatctgtccagcagaaaaggtagggtagggcatttttgcagagaatgtgatggacaaacacatgaaggcacagttaataatttaatatggacaaactaagggtggcatccctgtagcagacatggg

SEQ ID NO: 93378 - DNA, 1028 bp, Homo sapiens
agggtggggcccagcaatctgtttcaaccagccctgcaggtcattctatcctcaagttaacactggcctgtgccacagctgctccagtagctgtccacagccatgggagggcgctccaaggccgactttcaccactgggaacctgtcaggcacagcagaaggcaagaaaatgcatgaactgggaattaggcggcagagttctagtcctgccagttctgcaattattggttgagtgatttggagcacattatttaatgtttaacctccctgggcctcagttttctcatctgtaaaatgaggatgatgactaaatgttctcatctctaatttccctttaaattctgttattcagctctcctttggagtaatatgttgtctgtgccaaggatggaatgaaaacagagtatgatggctcatcttgactttttccttacttacaaatggagagccccaaagtccaaatccttggaccagctatcccccaacttcctccttaggggcagaaggtgagagcaagcaaacatttgagttgattcatgaaactttactgggcaaagaatagaaaatgttggtttggaccctccttcactatctggggcccctccacatgagctccttcaccgatccgtctccttcagctgcttccccactgtgactctaccagcccctctctatccccccttcaagcctgagcactttccctgcacccccacctggagttgcccaattcacatgctcttgtttattcactgctcttctgaggaagggtggggttggtgtcagggtgacttactaggtttgacaggggcttggtggcctcatggggagcccctcagacgctggcttcacatggcccctcctgctggcttcacatggacccaacggccctccctggagcccacctcacagtggatgggactgtacctactgggcactggtggggcccagcattcagctgacggctgaaaaaacctccggtctacattgggctaaaagggaggaagaatgtttcttgcccttttgagatg

SEQ ID NO: 93379 - DNA, 1776 bp, Homo sapiens
tggtttctgtagaggtatattctgactctcgttctttctacccttgtgacatatttcatatatgtcttgcctgattgacctcatgtaccaactcaccttccatacagtactgttagctcctagaggacatagacatagacttgtagagctttgtatttcccagagtgccttccacagagtaagtgcttaatatttgttgaatctgtgttgaataattattgtctatcttaattacaaacaaatactgtatgcctcttatgaggcactgtgctgaatgttgaaagcaatgcagtggtgtgtaatatagtcttagatgcttccaggttgttttggaattacatgagaaataaaataacatggtctacatggggagacaagacacatgaaaaaataacaaacagtacaggtattaaaagatctggtgaggcaaacatggactttctgctttggatgagtggaacttaaatgaaatatgaaggggcacaaggttttgcgcattagcaaactaaaagctttagtctctttattttgtcccttcctgaatataatcatttatgccctggaagagagggctgttctgagacagcgatctttacaatttcctcactagccagctgtggttaccagtattttgatattttccccttcctgacttctgctcctcgtgaagggtggatgtctgaggctagtcccgcaatgtggcttgattgttcttattgttttggttaggtcattgcgaagtaactctgtgtagtggagcaaatcctagagatttgaaaccattgaaactgtttcatggaaaacttaggctgtcttacaactgaaccttttagggccaagtgatatctcacaactaatattaccctacagagttctcaaaatgtgccatccccctgtgactgattttagtttatttcgtcagctcgtacataacagcgtactttttaatcttagaaacattctggtgagaatggtgagcgaagctgggacaggtttctgcttcaacaccaagagaaaccgactgcgggaaaaactgactcttttgcattatgatccagttggtaagatctggggaggttaatgcttccaaggcctgttgccccctttgtaggctgaacatctgaactctctggaggtgtttttttagcctctgacactagcattcatttagtaaataggtattgaatgattgttatgatgctatttaacatcccaggtgctgggatacaccaggacacaagacaagtccctgtactcttggcacttagtctagtctgagagggggagaaaagatgacaaattataagtgctgtgagagaaacaatcaggatgctgaggtgtaggatgaagttggagagtggtagggaaagtcacattagatggctaaatcagggaaggtctctccaggaggagatagttaaccgagacctgaaggtgagaaaccagctatgtaaagagaataggtggtagtgttctggaaacagacaagtgtcttaagaaggggacggtatggtgtcctggcatcatctgttcgacagtggctagtatttggttcctgatagaagttaaaggaatatggtttctatatattagtgcagtgggggtaggaaatttgatttttccattttgtgccatccactaaaatgctgtactatatggtaactttaaatggtctcattagatggaagtatttatctagaagagacaagtgttcctaaggccatattatctgctcacaaacaaaaatagagtcagcacctgattgctgttggtgga

SEQ ID NO: 93380 - DNA, 1042 bp, Homo sapiens
actctacattgcctagcacagttctatggacttaaatattttattctttgagttaaaggaataggtgcagtgaatgaatcaaagaattctactcaatatagccttgctctactaaccttaatcagttactcctagtcagggtcatttaaatagtctccagattgcttttcagtgagacaacccccctaccccccgcctttttttaaaccaagtttttagttccctgtagaaaaccatgggggaaatatttcttgtcgtaatatagatgagaaactgttttggttctttactaccatcttgtaatgcattaatgcattgtagtcctccttggagttttaggaggatcaatcctacttacatttcacatgatttgaagtatgttaaaaagatcccttatgtacagtgtattaatatcatagataaattctgttgacaggttaatgattcttaaattcagctgcccatcaattgagtagttttaaaaaatgtagacttcagtccaactctagccctactaaaccagaattaaggtaggagtggaggtgagaatggacttacttagataagctcattcttagtcgtagatagcttgggaatctcatatgcagagtatccatattgactgtagaagaaaaaagctaaaatgtctgtatgatagggacaagtgaggaattgttaggtcatagttgtttaagttcctggatcttccttgggtgattattccatttctggtgttttcttgtttttgttttagcaaagaggaaataggtaggggtgtgtgtgtgtgtgggtgtgtgggtgtgtgtgtgagagagatggaagttaatcgagtgccataaggcattatagaaatatgaaagccttactgctcagcatctagtcttcaatcttttctttttttttttttgagacggagtttcactcttgttgcccaggctggagtgcaatggtgcgatctcggctcactgcaacctctgcctcccgggttcaagtgattctcctgcgccagcctcccgcgtagctgggattacaggcatgcacc

SEQ ID NO: 93381 - DNA, 1128 bp, Homo sapiens
gatacttaataattttctgccacaatttttttttctccctccatagtgaaacaaagagtcctcttcgtggaaaagaaaaaaatacgctccctttaaacggtggattgaaaatgactttgatttataaagagaagactgagggcggggatactgattcagaaatcctgtagcgtgtaataaaagaagaggaaatggcatggaatcactgcctcctgtgatttgaaggccattgtgaaggaaaacaatgcagtgaaagaaagttcttcatattaggacagatatcattgcatcacatttatttatctttctgggtatttttatagcccttaataaaaaatattaaaatagcctgtgctattgtgtcttagtgatgtttttccccactatttgatgttttaaaaatcaaccacattactaaaaaataaccattgttccatgtaataaatgtttccataacaacacttatgtaagagtttccagcctgctccctctgtactcagagaaaaggcagagtaacattccagagtgatcttgaagaaactcccatgtaataacagagatggcaagggggaccaggaatgacaaaaagaggagccttgtaacacaaaccaagagaacctctatttctgatttgtgcttatataattaggaaaaatgccacaggcctatattttcaaacccagatcaccaaagcagtatctaggattttctgggacagctttggattcctttattccctagatttttctttccttttaaaataaaagaaggtatagtgtttcaataaagccactgctaagacttctggggcatggtggtaccacacagctaactagcatggaattctgggagcaatccctaatgttcagatacggacctctctcctgcccagagccatacactttctcactcaggctgttgtttcccacaagttttgaaaattgtccagttttctcctttgtcaagttcccggttgaaaaggatctgctcattttaagatctgttggttcacatcctaccccatttaaagcatttgtgtgggagaatgatacagtgcccaccctgactacaaaataagaagttccttctccatggcccaaacctggctctgagggaaatgtaagagca

SEQ ID NO: 93382 - DNA, 1034 bp, Homo sapiens
tggcatcaacttcttaacatggcacacgaggttccctaaaccacttttccagtttcatctcttacttcctcctattcacttaaggaacttacttcttcctattcacttacgggtctcagtacatggagacacctcggcttggacttttccctagactaactcctatactcatttttggagactcagcttgggtattaacttggccatcacatatttattgcctagcactatgttcaaagcactgtgctgtcccggaaaccaccagtctcaggccctctggctgccccctgccctccccttgagggtagcacgcctgtcttcatcacctccctgtcctgagacctagtgcaaggcctggaccatagctgaggtaggcactgaccgaaccaagaactgtcaggaggatgggtgctgagcgatgaggtgaggagcacacactgtcccaggaacgccctgtaggaggatgacaatggaacagatgcatgaaagttctggtttgccaaattccagttgatagaaaaggggacaagttggaggaaatgatgggtatgaagtgtagctgggaaaaacccccaagtgatgaaagtctccaaggtaagatcttgtcaggcagctctaacagattccagacaatcttgcaagaatgacgtcactaccaagcttcacttgttaggaatccgtacccacgctgaatgagtcactacccaaactgccgagggaccctaacagttacagcgcgtgcattcctccccgatgtcttcatgcattccatctcacaagtagatgccactttcttctcttttcaaaacctctccctacacaaagctattcagagcctacactgtggacatgaattcctcagccatgcttgtggttttagaagccagggaaaagcaaatgggatgaaacatgactaaatcataagtcaatgcattatttcttaaaaaagaatattgccaggggttcaggaaagggagagagggcaaatgtaaaccaccagggtctctgttacctcccaccaccatactggggcc

SEQ ID NO: 93383 - DNA, 1049 bp, Homo sapiens
gacaaagaatgacttttacgttcccaggcccagtcagctagatactcacgcctcagcctcctgcaggcaagaacaaggcagaagccccatttttagaacttggaagagagcgcagagcaagcctggcccctgggccagcctaagtatgagccatctcagcagctggcgcagccctccttgaaacactctcccttgaagaaattctgacctaaacccagtgtagccagcaaggctgaccctgttggtggaatctggtggccccagtatggtggtgggaggtaacagagaccctggtggtttacatttgccctctctccctttcctgaacccctggcaatattcttttttaagaaataatgcattgacttatgatttagtcatgtttcatcccatttgcttttccctggcttctaaaaccacaagcatggctgaggaattcatgtccacagtgtaggctctgaatagctttgtgtagggagaggttttgaaaagagaagaaagtggcatctacttgtgagatggaatgcatgaagacatcggggaggaatgcacgcgctgtaactgttagggtccctcggcagtttgggtagtgactcattcagcgtgggtacggattcctaacaagtgaagcttggtagtgacgtcattcttgcaagattgtctggaatctgttagagctgcctgacaagatcttaccttggagactttcatcacttgggggtttttcccagctacacttcatacccatcatttcctccaacttgtccccttttctatcaactggaatttggcaaaccagaactttcatgcatctgttccattgtcatcctcctacagggcgttcctgggacagtgtgtgctcctcacctcatcgctcagcacccatcctcctgacagttcttggttcggtcagtgcctacctcagctatggtccaggccttgcactaggtctcaggacagggaggtgatgaagacaggcgtgctaccctcaaggggagggcagggggcagccagagggcctgagactggtggtttccgggacagcacag

SEQ ID NO: 93384 - DNA, 1024 bp, Homo sapiens
gaagagacacatctgtcatgtcttccaaactgagctgaggacatctgcagctactgccaccatctcactctagtacaacgggaaaaacagatgtaaaaatagaagtgatatattcaactattaacagtgaggcaaaactgaatatagcagtctgcagaagcactgacgtagaacgggaaatggcttcttctaggcaggctgtctgccttgagtggacaacatgccaactaaagatgtttccagcacccatgtcatccctgactttttaataagggattaggaggaagagaaaagcgagaaggttacaaaccgactgagagcaagtaataccctcctgacagaaaagtgaaggagcccatttgttcagaagaaaatgcctccctgggagctcctcactcgccacgtgaattaccttctctttatcagatttatgaagaggctgcacagctgtgtgcagaacaggtaagaattttaataatgaaagtgctggatgagaggacgaagacagcataaaaaagatgaggaagattctagacccagaaaatcactaccctggttcctgtcagtgtcactgctgctccacctgggggatgctgagagtccattcacgcatattcagcagggcaattcagtggagagtctttatcacgaatatccattcataagtgaattgcttaggtggagcttttttgttgttgtttgaaatataattcatgcatcataaaattcactctttaaaggggtatgctttagtgttctttagtattacccacaagcttgtccgaccattaccactgattccagaacattttcatcaccccaaagaggaactccatactcattagtagtcactctccatccccttccagcaaccatcagttgacttcctgtctctatggatttataatacctattctggatatttcatagaaataaaatcataatatatgacctcttatgcctggcttcttttacttagtagtatgttttcaaggtgcatccatgtcatagcatgaatcagtac

SEQ ID NO: 93385 - DNA, 1055 bp, Homo sapiens
aacattagaatggaatgaaaaattagtatattgaaagagaaattgggagaaaaatatggatcttgttgaaagccccctgattttacagattgtaattggtgtggggaaggtcacagactgaatgagtaggagaggcctcctgaatgccagggcattgcgttttctgctacctgtcattacctctcctaatctgcttccatcttctctggcaaaaacaaacaaaagaaataagtagtctgcaaacatggaaagcaaaaactggaaatttgagaagaggcattatggcccaagagaggcttggaagaattatgtccttaggtgccaaacttacaggtgcaatttatgctaaaattcttggcagtggccctttcctttctcctttcctgcctcccctccaaccttcctttttcttttttttttggtagacttctctttgttgccccaactctttgttaaaattattatatgtgcagaaaagctgaatgaacactctacatttcacctaaacatttgctaacattttgctgtatttgcttttcctcttccctgtatgtatttagttttgtttttgttgaaaagtaagtggaaaaaaaagtattttgttgttgagaataagttgcagacaacatgatgcctcaccccaaatacttcggcatacatctcctaagaggaaacacaataccattatcacacctaggaagattgtcagtaattccatgctatcatctaatatccaagccacattcaaatttccccagttgtccccagaatgtctttcattgatggtttttgtcatcactgttattgctttatttattttcctgtaccagtatctatcaaggttcccattgcattggttgttataaaaaagaagggagacattttctagaaaaacgcatctggaagtggattcaggttacttattttcaccactgtttctgttgacttttgtgtattctaggctgagattttaactggcctcacggtgggcagcgctgcagatgctggggaggctgcattagtgctcttgaaaaggggctgccaggtggtaatca

SEQ ID NO: 93386 - DNA, 1008 bp, Homo sapiens
ggggtaggggcagcctagattccaggtggtagagttgttcctttcaagggcatccacttttgccatttcccatctctctccacttaggtgcacctggaatcactgggccagggccccaggccccagtctggcagccagatgtaccaatagaagcctagtctctgcagaaactcttctctaagagttagatccatcacacacttgaaccctaccttggttgggctggttccaggtgggattaagttgagccagcattcaggctagtggctagggtatgtcaaagtttccccttcttccactggtaggtctcattatctattgtgtccacctcctccatgaagttcttgtacatcttgtcatagaggatgcacaccatattttcctcttcactaggctccagcaactgggccagcagcttgtgcccagctgggtctggagcagcttgtgcccaactgggtccacattgctcagctgggtccgccattgcttcccaggtgacagggagctcgtggtctctgtgaaagatctctggtgatggtcatatcagtgtctctgtgggtagtacttttcacacatgtccaccatgatgtcacatgaagctgatttttcaaggtcctcggtctgcaccctctctgcatcccgtagtctggcaggaggcaaagcaatgtgcatgtcattgtcttgtcacagtgaatggtgcccttgtgtgtctccattcatgatggtgccatgaggttgctgtgggatcatttgggtaacaggatggactctgagacaaccatgcagtgctgggtttggaggggtgttagcagtggtggcagcagcagtaaaagcagaaatgttgtattcttgattctctttctgctttctccttgttagactgttttgccttttgccatctacacaccttgctgttgtttgaccaagctaaagacttgggtataagaatactgagttaacgttctttagtggtaagataaaaaactaagacacttctttggaatagta

SEQ ID NO: 93387 - DNA, 1051 bp, Homo sapiens
tagtatttatcatgtttttgcatcataaaagtatcttttggaattgtcattggcaggtttttataaatatgtttattatatctatctttgtatgtatttacttaagaaattaaaagagtatgtaagtcagaaaaggattctgagaaccaatatagttcaaatggaagattggaattataggtagattggcaggaattcaggacgcgagagaccattactttagatgatctctttagaaggcctgggatttaaaactgagccatactacctttagaagttccaaaggatagactgccacagattatgccagcagtcatgttgcaagattggatgaccccttcaaactggcttgtcaaatttattaatatcttcttgcaaggaatgaatccaagaatatgttggagctacatctggatggaaatgaaatagtgttacaggttctgagcagtcagacagataacctgatgataaattttgggcagtgaactatattgatgttgctgtcaacttagtagagatatcaaaagaacacttggaaagaaataaattaatgtttgttactgttgtgggaaaaccaagatgaatagggagattagaagacatcaaagtaaagcagcttatcttcatatccaaggaccttcagcatctaaagattcttcagaaaagtgtttttcaaactctttgatggaagaacagattaaaaaaaatgtagctggtcaccagctgatacttttgtaaaatataaaaatgaattgctagaagagtgaaatgaaaaagacatgaaatacaaggcttgactcttttattagtagattcatcagatttattcttacacattgctgtaaaagttttaaaattcttatctcattttctgtacttttcttattatggattagtaataatttacagaccagaactggtccatggacctgctctctttgaatagcacgattctagaaagatttctgcattctaacagtccaggagttggccttcttaagaattctatctcagaggggcaacagtagtatgttattgataagtaattcct

SEQ ID NO: 93388 - DNA, 1051 bp, Homo sapiens
ccaaacttttttttttttttttttttttgtgacagaggcttgctctgttgccaggctggagtgcagtggcacgatctcggctcactgcaacttccgcctcctgggttcaagcgattttcctgcctcagcctcccaagtggctggggctacaggcacgtgccaccacgcgcagctaatttttgtatttttagtagagatggggtttcaccacgttggccaggatggtcttgatctcttgacctcatgatttgcccgcctcatcctcccaaaatggtggaattataggcgtgagccaccacgcccggcccaaagtgtttttttaaattatgcaccctgtcttagtcagtttgggttgccataacaaaataccttagacttggtaatttataaacagcagaagtttattgctcacagttctgatggctagaaagtccaggatcatggctctggtagattgtgtctggtgagggcccgttcctcatagatgatgccttctctgtgtccttgcatggcagaagggaaaaggggcagacgagctccctcaggcctcttttataaggacgctaatcctatttatgaggcctccgttttatgacctagtcagctctcaaaggccctacctcttaataccaacacattggggattagattccaataagaattttgaggggccactaacattcagtctatagcacaccccaaattattttattgtgtacctctgctacatgcatatttacttataaaaatatatttatagattataaaacatacataaaatataagctaaaaatgatataaagataaaattaacaacactgtaaaaataatttatattacttatattgtggtattttcacctgccatacctgaaaaagaaatctgaaaaaatatgtagatactaatggaagaaatgcttttgtcgtaaattaagtgtccagaaatgtgagggtctgtctctgaactctttattctgttttactggtttgtctatttttgtaccaacatgagtattttaattactaacatttatagtaaattttgaaatcca

SEQ ID NO: 93389 - DNA, 1081 bp, Homo sapiens
attctattcctctttctacccttctgttttcctttagcccatccgataattttttattactacagtcacaattaggtatcttaatttctaggaactctttcttgcactgtttctcattctcagcatcttgttcttattttatgaatataggtcctttaaattccttcaaagaataaaatttagagattcaaaaaaaatgttttcttctgttatctgaattattttaattttccctagggattatatttttgtttatcatattttttccctcttttatgctatagtttttcttcaaataaaaggtattcatttctgtttaagatagacaataaaatagtgattgggacttctgagtaggtgagcaaggcttatggaatgtgtggatgaatgatgggccagatgtgagtcaactgctctagctctcctcaaatagtttgttctatttcttcattgaatacctgggcatacatacctgatcaccctgtcattttcagggggtacgtatatagactattccgtgaggagcttttgcttactcttcctgttcttagccctgtgtctcattcttgcctccccttacactggataactagaaacttttatgggtttactaggacagatggcttcctcctcatcagtagcctcttcctcacattattacaggtcaaagctttcctctgccctatcttgtcaagtactacacttccatctgcattctgtctctagcaatttgctaaactttctcatctactgattaactactctcctcccttcctcttcatcttcctgttgtttgggattttatctttctgtattcactatcatttaacgggattggagggggtcttagagaagaaatgagtgtgtgtggtcagtccacagtcttgagacaaaaataatgtgacttcacaggcatctttctagtagcatgggtttatgttaggaagcatttgctgttaccctatatcctctcattactataagctcttcatgggaaacctttaataacatttgtgattagtgtattaggactgtcactcatcatataacataattatattctagcaaattattgttggat

SEQ ID NO: 93390 - DNA, 1033 bp, Homo sapiens
ctcctgagtagctgggactacaggcactggccaccatgcccagctaatttttgtatttttagtagagacagggtttcaccatgttggctaggatggtctcgatgtcttgacctagtgatccgcccacctcggcctcccaaagtgctaggattacaggcatgagccaccgcgcttggccagtttaaactatagttctaaccaacgctgaatcaaagtattcagtaatttactagaacttacagtaattttatttcataacttaagctcaataaagttagagatggagactgttgtgtttattaaattaaatctttagtctctagcacagtaaagatattcaattaaatatttgttgaagaaatagaatgaatgcatgcatgcataaattaatgaatctttagtgttcagattttcgttggttgaagtatgtgttataaagaatgtggcattctgttgtatcagccttttgccaacagaaatttgatctttagaagttatttattatacaaggaatttgtaattggaacattgctcttaacaattcagaaaacaggaagaatgtacagtcatttgcagatttggagtctgaatcaattttatctttatatattttactctgccctctgcaagcagattaatgaaaatagcatgtaactaaacttatttttcaaaatattttatgtattggaaaatagtacttctgtaaatctgtttcattgtaagtaaaggaaactgcagttaatgagaatgagaatgagagatgagagagggcgtatttctactcactaattgattcttacagaattatccccattcaaagttaaataattgaaataaaaaagatcagaagattatagtacattaggaatgatattattgtttcctcaggtcttttactgtgaagagacaattgttggccagtaaaagagttgccaatttgtataagattctattgaaaaatgttaaaggatatcctaagtaaagagaagtccttgaatctcacaattgcagaagacacaactcctcctgcaac

SEQ ID NO: 93391 - DNA, 1048 bp, Homo sapiens
atacacgttaaggtctaggatggtgcaactgaagtggctgaaaattttccagctatagcagctattcacataaaaagagccatgagtgtcatataaacacctgtttgtaaatatagccatcctagtcatactctgtagcaattaactctagaagaaattattccatttgtgtttttgtgtactgtatttaaatagggcaaagagtgagcctgtttgctcatactttattcccaatctctagttgagtatctggcatttagagaggtttaataaatgtttgtggaaagaatgagccgtgttcattctttggatctgacaacaatgaggtttgataggaagtgacagaacttaattctgccagttctttgaataatgctgtttatgcagctttgaagagagattattgaaatattgtaagttatattgagcaagtctgtggctagtaaatcaaacagtttgctaacattggttttacatttgaaattatctgtggtttaaacaatttattttaatcaggggctgttttattataagaaacccactggaactaacataaattgaagaatttatttgtctttgtaaggaatcaagtaaagcctatgatgcccaagggcagaaaggacagccaggttctcagggactagaaccgggaactggaaggctggtagacatagtcgccagtcagcatctgtgtccatgtttgtgtctttctcctgcaacatattctattgtcactgtattctaaccgcccctccaccccaaccaacccccgacttctgtttctccccacattgggtagaaatgacttcctgagcccctacatgaggactcaattcaaggccaccagagaggttgtcattgagtttaaattcctgggagagaggatctgattggcagcttgggccaagtgaccacttgtgatcaagttatatggccaggatttctgggtcatgtattatcaacctgattagtagaggttagttttaacacaagataagataagcatagcctggcagatacccagaaaggtatctattaccctgtttca

SEQ ID NO: 93392 - DNA, 1052 bp, Homo sapiens
ttttggctttagcaggacaaaccaaggaataataaaatagcctgtcttgtgatgtatttggtttttcattcgcgctcacaaacctgccactctaatggaagtgctctctatttaggaggctccctagaccagttctcttctagtctgcaagaatgcttgcaaggagagtaggagttaaccatttttactatgacttgcaacagttgagctaagtaaaaagttggatgctgtctagggacttagtattttgcatcatgctgagaggcataattttacttttatttttgtcttttaaaaagattcatttacttaaagattgttattatctagcatttaaggtatttttagaggctaattgtggaggcaggtcacctttgatttagtgaatgttctacaaaatgctcattgaaaggcaagtaaagagtgctaattttctggattagacattctctctccttagatattcaggattcctttgtcttggagttttagaatattttattttcttggaattcatgggttagaagaaatatattaggaatagcaactaatattattaatttaaatttataaagtcagtttaattatagctatgtattatatataatctgtctttggtactgattatagtttattaaaaatgactgatatgattactaaattaacttattgggcattttatggttaggcttatttacatgcattattttattttatcgacacaataactcttaggtcagaatttatatcccactctttaatatcaattttattgaggtagtgtaatttacatataataaaatgtacccactttaagtgtacagttctgtgtgttttggcaattgtaaacacttaaaaccacaccatagtcaagataaagaacatttccattccctaaaggtatagaacatttccttacccacacaaatcggtcccctccaccaccttcctcttaaccctgagccttttcatttctctaaaactgaaacagttttgcctgtttagaattttatataaatggaataatatattatgtagtttttggtatatgg

SEQ ID NO: 93393 - DNA, 1035 bp, Homo sapiens
cagcccaagggctgatttcctgtcagttcctgtgtggtttgcactacatcctctttgcaacagatcagtattttaggtcatccatcataactgctctcctgtaagttcttggcaatttgatctcagtttgcagaaggcagctggcatactttgctaggaagtgcagctggagagctcctgtctcactcttcctaaggccaggaagcacactattgttactcattgctgctttcttcctttaaagaacaaaaaacttcaaactttggcaaattctaaagttactaggtagcaatttgaaattactctgatcgttttgttggtctagggcaaaaacttgagtgatcttttatatcatttgtaaatcttgtctggtttttccataacacagatatgtgcattagtggaagtttcctccccattgcaaatgaagttatgcttgtcttcagagtcacacgggaatttttagttttattttgttttaggctttgattgtcaaggacagtaacatggcctaatttcttctctgtgttttattcccttaacattgagatttttctattcctaatatcagcattgggtaagactatttaccttgggtatgacttgaatatttgcactggattttcaaactatacgaacagagatagttaaagcactttttttggactatttaatgttaaaataaaagtatcgttttagtgtttctgatttctcattccataatgggtgacctatgttgtgagatttagaaaaatgagcaattttcctcctttcttatgactcacaggtcacattttggcaacatgttttttttttcctgtagaatggtgattacctttaccccagttcacctaagagaggaacctgtttataaagaggatacaacctcatgcatgaattattttaaatggtattcttaataatctatgatggcacagatcttttatacttctgagttgtcttcttttcatctttacgaaaaccatatcttctgtagagttaaacaagattattaatgtagctcttggtttcttt

SEQ ID NO: 93394 - DNA, 1052 bp, Homo sapiens
gccaacagaatatgatgcttattatgccgtatgactttcaaggctgggtcataaaaggcaatgaggctttcatcttactctagcaggaatacttttgcttggagccctgcaccactgcataagaagtctgtctatattgaggttgccatgctgtcaggtagccaaactacatgaagaggccacatgtaggtgctgcagttgtcagtttttatcttggaggtttcccagcccaggcatcagaaatgtcagtgaaattgtgttcggcctttcaaactgagcactaccagctgaacaccattgagtgatctcagtcaatgctgtgaggagcagaagaatcacccaactacattctgcctatatttctaacccacagaatctatgagcataagaaaatggttgttttaagcactgagtttggggtagttttgtaggtggcagtagtaattggaatgtagaccctgaagaataggagtggacaagagcctgtaggagggtggaagagatggggagaagagcagagatatagaggttaagtctccagagggagaaggaaaagacaaaaggattaggaaagaaatgggtgaatattgaggagaaagggtgaggaattcacaactgatgacagtaaacagcatttagttttttcaagaattccactggctgctttatatattttatatatatacatataaatgtttataaatgtatatatataacatatatacatatacatatatgcataaacttatatatgtttatatatacacacacatatatatgtatatatgtatatttagtttttttttaatttttattttttatgaagttgaagtagagctcacctgccaagaggtagaaggtctacaaaggcctggctgcttggtggaaagtattgaagatggtatagatgactgacctttagcttcttgcctaacaaatactcttgtgaggaaagacagacagaggcttggcattttgtcattaagtgtgagtggtctgccttccttgggagaatttgcacacagtatacactatcagtgtgaagtactttg

SEQ ID NO: 93395 - DNA, 1051 bp, Homo sapiens
gaaaaaattgggttttcattttcaaatgtacttaaaatgtatttagaaatgaagttatcaaaagattttaactgtagcttttgatttaaataagtacccagttttattttatgaaacagaagggatcagaaagaaatttgatatggtcaaaagcaaatttaattaaaatagaatattagctcttcaagctactattttgctatagtacctcttaagaaacatgggtttgtcagaatttatgtcatcttaataattaactgaactgaaagaactgcatatgtttttagagctaaagaccatttgatgtcatctaatttactacctattgtagcaattgctttagtagtgttcttggtaaatgcatatgtagctactatcattaaaaagaatattatccacgagacaacattacagtgctcattcaaaaaatatttttgtcgtaggaacaaaacaactttattttcttatttgcattgacagttttatggtactgaaaggagctctcagcagaattcttatttgaactaattaaccataccaaaattccttttatagtgttgatctttttgacaagtggaattactagaattaccacagtaatcatctggttgaagaaattgtggataatggcagcagactatagatgaaggaaatcgttgtcccaatatttaaagaaaagaaggagaggccaggcaaggtggctcacgcctgcaatcccagcactttgggaggctgaagcgggtggatcacctgaagtcaggagttcgagaccagcctggccaacatggcaaaaccccgtgtctactaaaaatacagaaattacctgggcttgttggcgcatgcttgtaatcccagctactccagaggctgagggaggagaattgcttgaacctgggaggcagaggttgcggtgagctgagattgcaccactgcattccagcctgggtgacagagaaagactctttctcaaaaaaaaaaaaaaaaaaaaaaaagaaaaagaaaagaaggaaggatatattcttaaaggattcagtaaattgtctgagagcat

SEQ ID NO: 93396 - DNA, 1029 bp, Homo sapiens
ggcatgactggttttgaaatgtgaggacatgagatttgggaggggtcaggggtggaatgatatggcttgtctgtgttcccacccaaatctcatcttgaattcccacatgttgtgggaggtacacagtgggaggtaattgaattgtgggggtagatctttcccatgctgttctcgtgatagtgagtaagtctcatgagatctgatggttctataagggggagtttccctgcacaagctctctgtttgcctgctgccatccatgtaagatgtgacttgcttctccttgccttctgccatgattgtgaggcttccccagccacatgaaactgtgagttctccattaaacctctttgctttgtatattgcccaatcttgggtatgtctttatcagcagcatgaaaacggactaatataggaggtgatctctggaagcacagtgagggggtggggaagagaaagagagggagaaaagccaaaatagggtgcattgaagagtaggttattgctgttgttaagtggggttaaatttcactcacaaccccccagctatgtgaaagtcacttcagtattgtgccagggaagggcaaggaagttgtttacacatccaccctcatccttcattcttagtgtcattcacttccaagtagtccagcctttttatatactggccaagctaccttctaggccaggtaatgcccttatgcagacagatgcagttactggagctggatggccacgatttctggcagtggttctttctcaaactgaggttggggctcgggacgggggaggaggttattttgctctgcaaggagcatttggtaaattctgtggacatttttggtagtgacaactgggggagggaaaaagtgctactggctggcatctagtgggtagagaccagggatgctgcttaatataccgcagttgatatggttgccccctacagcaaagagttatccatccccaaatgtcagtagtcccatggcttagaaactctgttttacaggaattcagagctgcaggtga

SEQ ID NO: 93397 - DNA, 1084 bp, Homo sapiens
tctcactacgatatttcattaaaagaaaaataaatgtaaatacatagtgttctaggagctacacctaaatcaagggtgtgtgaatgtgtatatgggtatgtaaaaatcaagcttacttgctaaattttcccatgtgtttttttttttcaatgttttactatttcatgacaaggatcattactgatttgttttaaaattatatttaattctgaactactttttaaaactacaacaatcatagaaaggttgaaaaagcttactttcttttttatagtgtcacttgcattgtagttattaaagagttgataacaaattgcagtaatgaaacagtttgtgaatatgcattagaagatcactaagactaaaattttctgcagtagaatatttattgctcaataaagtaatgctaatttatagcatttggcttaaaatattgttgttttatgcaccgaaataagtataacaaaaatacaaggttaaaagttcatttaaaacatattacatctgaagatggacaatacccctttctgaattagtctaattttctaagaatcaacaacatgtatattatctctgatacacataagaatcacgtagcttaatttcctgaaaattgtcttattattaaccactgaaagaactaggcatatttaacctggagaagagaagattaaaagaagacctgacagtcatctgcagatggtttggggactatcgtgtagaataatgcttagggtagaactagtgttagtgggtaaaagtgatttgtagctatattttctgtttcaatataagaaagaacttttttcaacgggtaataactgccaaggaacagagtgtggtatctaatgaggcagggaggacattttacatggagatagtcatggaaaattaagtgacctttcttaccttcccttcattccctttgtttccttctttcctaatcagtgtttcctgtagatctgtgctgtccaatatagtcgctgctagccacatgtggtgatggagtctttgaaatgtggctagtctgaattgagatgtgctgttaagtgtgaaatacacatcagatgctaaagtttatatt

SEQ ID NO: 93398 - DNA, 1018 bp, Homo sapiens
gtgctgagattacaggtgtgagccactgcgcctggcctatgtacattttctttatcagattcactcttgatgggcatctaggatgattccaagtctttgctattgtgaatagtgctgcaatgaacatatgagtatatgtgtttttttcatagaatgatttatattcttttgggtatatacacagtaatgggattgcagggttgaatggtagctctattttaagttctttgagaaatctccaaactgctttccacagtggctgaactagtttatgttcccaccaacagtgtgtaagcatttccttttctgtgcagcctcaccagcattttgttattttttgactttttagtaatagccattctgactgatgttagatggtatctcgtggttttgatgtgtatttctctaatgattagtgattgtattagttgtattagtattgaattgtttcttagaaactatgttttcctggcagttattgaaactgatagacaaaatagtatgataatatttcactggtgaggaataaggcaagtatcctgtggacaggctgtgttccttctgtaattagggagtaggagatatggtccactctgcatatctggtaagtgagccttcctgagatggtgctgataccttctaaaaattgtcagctgctaaggcacaagcgtgtaaataaaatctactttgtatttaacatttctgtgatttcatgtatgtgtcatattataaagcactgttgatgtgcattttgaaaggaaggaacttctgcccccattgctcccactgttatagcctggcaagtttcagggagtaatgaaaaataagacttgaaactcttattttgttgttaggtggttgtaacacttcttccttttttttaaacctcgccttatagcacctctgatcctgcttttatttctttgttctcctgcatactcttccattttatgaaaagttggagtaagcagtgtccaggtaatctgtactctgtgttcatatcatctgctccagggtg

SEQ ID NO: 93399 - DNA, 1833 bp, Homo sapiens
catataaatggaatcatataatatgttgtcctttgttactgatctctttgacttagcgtattgttttcaatgaagcatgtattactgttttattttcttattgccaaatacgattacatcgtgtgcatatactgcattttatttatccattcatcagttgatagacttacaggttgttgccgtattttagctattgtaactactgttgtgtggatatttttatttctcttggatatatttctaggaatggaattgcagggtcaaatggtaactctatgtttaactttttgaggaaataccaaactgttttcaaaagtggctgtggcattttacattcttaccagaagtgtatgagtgtttcagtttctccacattctcagcaacacttgctattatgtcttttttattatagccatcctagtgggtatgaagtggtatctcatacccacaaatgaagtggtatcgcactgtagttttgatttgtgctttttttgatggctggtgatactgagcatcttttcatgtgcctattggctatttgtatatatcctttggagaaatgtctattcagatcctttgcccatttaaaaattggattgtcttttattgttcagttgtaagagttctttattctgagcataaaaataaacaaaagacaaagagtcacatccattagtatttattgcttgtatactgtgcattgaacactgttcaatatggaacttgacctcaagaagtctaaattttatggaggtggctgggtgcagtggctcatgacttgtaatcctagtaccctgtctctcaatcaatccatcaataaattttagggaggtaagacgtagatatctaaaagcaaatacaggtagtatataattaaaatgttggaataattgaaacaaaagcaatgctatggggtagttaaatactgtttttcacgtacaatatgtgatgtgagaagagaggatgttcaataaattaagatggagtctccattgtaataaaaaaggaaaattattgtaggttggaattttgggattaaaataatctagaagaagttaagtgatgggtaggttatgctatagctgtcacccaattgcttctttaacttgaacttcttctcttttgctcttttgctccttgctcagccctttccagccacagaggcatccttgccattcctcagacattctaaacacactcccaccttagggccttttcatttgctattgaccattttttatttactctacctgtaacccttcctgcacttacctgaatggcttgttctctcctttcttgaagtgtcattatatcagagaggctttccctgacatccctatgcaaaatagcaatactctcctcagtacattctcatctttgttgtggtctgttttcttcaaagcacttatcatcatttgatgatttttggttgcttgtttggtgtctgtctctgccagggtgaccaactgccttgatttgccctggactgaggggttttctgggatgcaggacattcagagttaaaaaagggcagtcccaggcaaactgggataatgagtcatccttgtcttttcactggattggcagcttcaggagagagtggaatttgttcactgctatatcctggtaatttgaagagtgcctggtatgtaggggtatacaatacatgtttgttagatgaacagatttcctttaaggttctgtatcccttaagggacttgcagctttccaggactagaaaatacactttagattaaaattttaaaaagtagaaaaaaaatttagagaaatttggagggataaaaataaaatcagttaacagaacctctgaaa

SEQ ID NO: 93400 - DNA, 1046 bp, Homo sapiens
aaaacgctatcccgatggatggtgctcgatgcctagacacttttaagtgccttggcctacaacatattttaaaatagaatgttctctcatttttcaaatctccatttggtgcctcatttgagacctgtaaagcacttgtccttagccctgaagctgaacatagtgctcaagacagataagcagaattatagcacagggtgacaagtgtggagatagaggtatatgtacagagtactgtgggaacatggagaggggcactttaccatatccatgtatgtgtggtaagtaccagggacttggaaacatattatttgattttttatgaataatgtatctctcttaggtaactattattaacaaataacatttatacagaagagtgtataaatcacgtgtatagcatggtgaatttccaaaaggtaaacacacctgtgtaagtagcacctagatcaagaaatgatatttccaacatccagaagcctcactcatgtcctgttccatcactatgaccaccttgcctcagagtaaacactatgctgacttatgatgtcatcattatttttgcctctctttgatcttcgtacaaatgaaatcaaactatgtgcttgtcttctttcactcaatgtttatttgtgagtgtcatccatgtagttactttggttgttgttcatgctcattgctgatagtattctattgtatgagcataccacagtttatccattctactattgattgacacttaggttattttcagtttttttgctgttgtgaatattgctactgtgaacattcttgtacatgtcttggttaatgcacatgtatccattcctgatggctgtgtattgaagggtggacttgctgggtcatatagtatagatgataggacagtttgaggtttctcaactttattagtttatcagttagggtccagtcaggagacagaaaccatagcagtaatttgaatagggaaaatttaatatagagaattacttacctaaaggggtaaaggagatctctaaagaatgcaagactagcagttgtaggga

SEQ ID NO: 93401 - DNA, 1053 bp, Homo sapiens
ccagtttattatttttcctattaaacccatcctcatgagttcttttttgtttgtttgtttttcttagatggagtcttgctctgttgcccaggctagagtggagtggctcaatctcggctcactgcaagctccgcctcccgggttcacgccattctcctgcctcagcctcccgagtagctgggactacaggcgcccgccaccacacctggctagtttttttatatttttagtagagatggggtttcaccatgttagccaggatggtctccatctcctgacctcatgatctgcccacctcggcctcccaaagtgctgggattacaggcgtgagccactgcacctggcccctcatgagttcttaattttagagaatatgttcttcagttttacaattctatttgattattttctgtaaattccaattatctggttaacttatcttttcatctatatctaaatggctttctccactttcttgcttgtgttaattgtatttgttttccagtccatgtgagctaattttaatatctggaatatcctttgatttttctgtgtgtgtttcgtttgcttttttcttggttatccatcatgtggttctgtttttggtgtttctggtagttttgagtgaatgtcagacattccagttaaaaaactacagaggctccagataacgcagtcttcttccagagagagggtttactgtcccctctgatagggacataggctgatgtgattggatggtcactttaatccagtcagggtttttgctgagtcgaagctagtttatggctttggtaagagtctgtttacttctggttcacttctgttctgggatagtgctcttcagggttttacttgggagattggagtggccagtgttcctaaacaattctaagtgccttggcccacaacatacttcagaatagaattctctgtcgtttgtcaaatatttaaacacacaagcagtgtggatctcaaattctaaatgttgtcttacaagactgctgattgctttgctctgcttttcagaggcgttttcttaatttttagctt

SEQ ID NO: 93402 - DNA, 1033 bp, Homo sapiens
aaattgtgaggataaagacaacacctatggaagaaatagagtatatttagttgttagtcactctagtactcttcacggtgcttatgttcaataatttcagtgttcttggccttagttctctaatgcgtgttttggaaaatacattatttttattctctgcgtggttacagttttaagagaaaaatggctaattaagattcttttcctttggagggtattcttttcattcctgtcccacttgagggactttccaagatagaaaggaatttgcctactttctttctcttaataaatgaggaagattagatcaagagatgtggtttaaaatttcttcgctctccacttctctcccacctttgtttcctcccatttatccatccccgattcttaagaaagaaacacaagttggaattaagctgggtgatcctagagactcatttgaagtggaaattcaagatggagtggggctgcatactggttaccttcttttaagaggaactgaaaggtaatctatatagcaatttctgatgggcaagaagggacatcacaggcttttgaattttataaatggagccataattataattagctatcattttgggatacttttgcatgttttaggtttaaagcttacttgcctatggaggaaactagacatgtgaagtatgccacctccaaagattctgacaccctggcacaaaattgagatgataaattctgataagattccaccagtaggtcatctcttggtagatatttgaacatgccctagaattcctctgttagttggaagtttggcttacctagcaactgggtgaggctgcctactgaatggcattttgaaaagttcagacttaaaatttcctattttgttttttctccattatgagtcttaccagtcctatcacaaacttttatgggaaagtggtttttcagctacaaaggtatttgtgcattttgcccaagacatatgtcctcctcaagaatatataactgtcatattctgtattgacatgagaatcaggatcatatt

SEQ ID NO: 93403 - DNA, 1051 bp, Homo sapiens
ttctctttttcatagatgcctgctaacttatgcctcctcctcctctttccctgaaggagctttgggcatttttctgtatctcctactcaagagaatggaaagctccaatgccttgtattgccagacctgtttttaaaatatgccctattcttagggagtaactaaaactttatatatcttctgttttctccccttctaggcaaagtggttcaaaccacaaattacctaacaagtaaaagtggtcgtgtagcaatactagaggaatttttatcttgtttagtatagctaaaccatccttgattgggagtgttttccagtgagtttgccttgaatggctaaggagatcaataaagaaattatattttaatggaaggagactggttggtatgtctttaaccatttgtttgaatcacttgaaatgaattcaagttggtaaggtatgttgccaacttatatgtttttataatttttaaaaattgtttggatataggcctgtaacttgccaaataactaaggagaaatgacagaatttaaaaaatataaatcaagacaactaacttttctttttgctctagtagggaatgaggactggtaaggaatacttgaccaagaaatgaaatattgtattttattcttgcttataaatgtttagcaatgctctctgaaggaaatgcatagcaagctatgttaggatcattttaagttctatacggtgctgttatatcctactgatactttgaatttagtcttgaacagctcagaaggagtttctggctattgaggtcaacagatttgccagggaaaactttgtactttacttatcaaatcactttcatatcaagatacccctcttattcactgtatgatgctgaagctcttaccttttcctctgttcatcatctttatctgaacatcctaagacccgtttttcctataaatgaaagaacacttatgaatttccccattgtcatttagttcctataaatcaactcactcagtagagcaaagtaattcctttaaaaaatgcattcctttactttttctttgtttt

SEQ ID NO: 93404 - DNA, 1069 bp, Homo sapiens
cagttttaactggtcttttatttgttacgacttctacagaatcttgcctcctggaatccttcaaatcctgaatgtctcttacttgtggtgaaggaacttgtgcaacaatatcaccaattccaatgtagccgcctccgggagagctcccgcctcatgtttgaataccagacattactggaggagccacagtatggagagaacatggaaatttatgctgggaaaaaaaacaactgggtaaggatttttgagaatggaaaaaaagatgacttcatccataataaaataatcaattcatatgtccatttgtaaatcctagtcatttctttagataaacatggtccaggtagcctatatgtttctcataatttagagtttaaagagaccttaatgtttgtctagttcattgtgtttctcaaagatattacctgggaagtttgtaagattcagagtctcatccccagccccagatattcagcagtcagaggtggagcctgagggcctgcacgtgctaccagcctccatgttgttatgatgtatgtggcttgcaggccacattttgagacactaacaagtttccccctcctttgagtggaagacttctccaatatcccagtcaggtaagagaggtcagtaactctggaagcagctagcttacatggtgccttttatattttctttttgcaacttataattatatgatcctttaaaaaatcaagtcagaccttatcacttctcttcccagaaccttatgtacttctctttttttctctcatggtaaaagccaaagtccttccagtggtataaaaaactctatatggagaaatgcaaatcaaaatcacaatgagataccatctcacaccagttagaatggccataattaaaaagtcaggaaacaacagatgctggagaggttgtggagaaataggaatgcttttacactgttggtgggagtgtaaattagttcaaccattgtggaagacagcgtggtgattcctcaagaatctagaaccagaaataccatttgactcagcaatcccattactggatatatacccaaaggattataaat

SEQ ID NO: 93405 - DNA, 1083 bp, Homo sapiens
cagagtccatttgaagaatcagccttaccagtttgtcacccagctaaagttataatcacttgagtgtttcttagcttttagctgtctaagtggtaagagcagtcaatttcagataaaagcttgtttgttgacaagggaagtgcctctaagaaaggaagtaaaattttcccttacagaacaacctgaacttggactccattctgcacaaaatgtctacctgtcacttctaaaaggagaagaaaactgtcacagctgtgattaccaaaagcaaagcttagacttaataaattgccaaaactcagagtcttgttagtttaagttgcttgccaacgtactataacttgaaaaaaggaaagatgcacatatttattgctaatgctggggaaattgccattaagacagttggcagaaaggctgacattttaacagtcataggttagataattttctgcatctatccaagagaagattttgaccaaggactgacaaaaaaaaaaaatcaaattattctgttcacttggcggcatctaaatgtctcattttcagcttacaggaaagattgctgtgaaagcaatctttgacattacaactgagtgaccataaattgcttgaatagctgttggaaattcaaatataaaaccacatgaaaagtcattatctgaggtagaacaaggatttttcacttgttttgctcttcatttacagtttataacttaattttacattaagattgttttaaaattatcatgtactcagtttcacagaagatgattagcttataggtcataaggaaaatcagtgccagaatgaaaaactgaattcttttttttttttttttttttttttgagacggagtctcgctctgtcgcccaggctggagtgcagtggcgggatctcggctcactgcaagctccgcctcccgggttcacgccattctcctgcctcagcctccagagtagctgggactacaggcgcccgccactacgcccggctaattttttgtatttttagtagagacggggtttcaccgttttagccgggatggtctcgatctcctgacctcgtgatccgcccgcctcggcc

SEQ ID NO: 93406 - DNA, 1040 bp, Homo sapiens
tttccttctacactcccagattctcactgggctaggtgtcccttttataagctcccatttaactctatgctgttattgttgcctctacacttacccctttcaaagtatgaccccttgtacttaaaaacagacctttttaggtttagctgtgtcttgatccaaagaaccacacttaccagagtatgttagttttagagtcatctaggagctcagcataataccaaaaccacaccttttggtaatcttggactgtaacagaaggcaagaattataataggatctcacaaaccttctcccacccaccatgatgagctatttgtagatccttagtggctcttaagtattctcccaagtgttgagttgtgagtagcctgcacataatggcgttcaatactgagaatagctactcagctctgagcatccatcctttttctcaccattggcattcctggtggcacagtggcttctatcactctctctggcttgcctcagctttgattctgtccattcaattctcatttccgccttgtctgtcacagggttaggcttatggtaatgaagaaatgctctgtccttagccagagattggtgtaagttaaaagatgctgtgagcggtaaaacaaacaacatttaggcagatattagttattattattatcttcagagctcaatatatttctgtctgtatttttaaggtttagatcagagttttaaaattagggccataaccttttttgttttttgagacggagtttcgctcttgttgccgaggctggagtgcaatggtgcaatattggctcactgcaaactctgcctcccaggttcaagtgattctcctgcctcagcctcccgagtagctgggactacaggcacgtgccaccacgcccggctaatttttgtattctttagtggagatggggttttaccatgttggccaggctggtctcgatgtcctgaccgtgggtgatctgcctgcattggcctcccaaagtgctgggattacaggcatgagccaccatgcccgggcaagggccagaacc

SEQ ID NO: 93407 - DNA, 1054 bp, Homo sapiens
aaaaacatggaatcaacttaaatgcccatcagtggtagactggatgaaaaaaatgtggtacatatgcacaagtgaatactgtacagccattaaaacaatgagatcatgtcttttgcaacaacagcgatggagctggaggtcattatcctaaggaaactaacacaggaacagaataccaaatactgcatgttcttactcataagtgggagctgaactttgagtatatgtggatacaaaaaagggagaaatagccaccaaggcctaccctagggtggagggtgagaggagggtgaggatcaaaaaactacctgtcaagtactatggttattacctgggtaacaaaataatctgtataccaaaccctgtggcatgcaatacacctgtataacaaacctgcacatgtacccctgaacctaaaataaaagttaaaaaaaagaaaaaatttcattgaaattatgacagagttatgtttactacttaatttttcctctcttctgatttcccttatgtagaattcaaaacttaaatttttacttgccttaagtttccaaatatgatttatggtaattctgacaatggtatatatattttcttagtaaaaatgaagaagtcacaggtagtttcttggaaaaaagaagttacaggtagtttcttggaatgtagattggggtaacccattatggaaaacacaatggaggtttctaaagaaattaaaaatagaactaccagtaatgcctcttctgggcatataaccaaaggaaatgaaatcaccacctcataaagatctctgcacagccatgttcattgcagctttagtcacaagagccaacatatggaaacaacctaattgttcaacagtggttgaatggataaggaaactgtggtacatatgcattttgaaatattattcagtcctaaaaaagaatgagatcttgccatttgccacaacatgggtgagcctggaggatatgatgctaagtggaataagccagacacagaaagaaaagtattgcatgatctcgcttgtatgtagaatcttaaaaaaaatttcaaa

SEQ ID NO: 93408 - DNA, 1032 bp, Homo sapiens
aaagatatgaaagacttttatcctgaaaactacaaaacattgctgagagaaactaatgaagatctaaacaaatggatatgtcatgttcatatgctggaagacttaatctcgtaagatatcagttcttcctaaattggcatatagatctggcacaattctagcaagttgaaatctcagcagaaattgtaaaaattgacaatctgattctaaaatttattttgaaataccaaggacctagaatagcctaaacaattttgaaaaagaagaacaaaattggaggactcacattccctgatttcaaagacttattataaagctccagtaatcaagacagtgtgatgatggtctagaaaaaaatataccagtatagatcattggaacagaatagaatattcagaaatagatccacacatacgtggacaattgatttttgacccaggtgcaaaaggcaattcagagaagaacagataatcttttcaacacatgatgctagaacaattggatatctatatttaaaaaaaaaagagaaaaggcctggtgcggtggctcatgcctgtaatcccagcactttgagaggccgaggcgggcagatcacgaggtcaggagatagcgaccatcctggctaatacggtgaaaccttgtctctactaaaaatacaaaaaattagctgggcgtggtggcgggcgcctgtagtcccagctactcgggaggctgaggcaggagaatgacgtgaacctgggaggcggagcttgcactgagctgagattgtgccactgcactccagcctgagcaacagagtgagactctgtctcaaaaaaaaaaaaaaaaaaagagaaaagaaaagaaacttcaatccatgccttgaaaagacatatatatatatttgttgacatatatatatatatttccatgtaaagtttaactcaaaatggattatagacctaaaagtaaaacctgaaactatacaacttctagaagaaaacgtgataaaatttcaataactttttttttttaaaaacctgtgttctaatt

SEQ ID NO: 93409 - DNA, 1054 bp, Homo sapiens
tttggttttggtccttgaggtttgagaaactattttggctccagctcctataaccagctcttctttggaatctttgagcccctcccatagttttccaataagtaacttttttttatgtgagtatgatttgggttcctgtcacttatgatcaaaaaaatcttgactcatccagtaagccagtaaggcattattatcttcatttttttaagatgaggaaacctaagctcagagaagttgaatgggttacccagggttatcctaactgtatgaactgtatgtggcagggcctggatttcaattcaggtctgtctcactcaaaagcccacgctctttttaccccaagagactaccatggaggcttcctgtagagcaagccgttttcactggatgaagggttgggatttcaatgcttcacatattctttgtagtctctgatacagtggaactgtgaaaatgcttattttttgacaggaactttttagtggagacccatagtagtcctgtcaacaaatctcacctccctttctttctaaaaaagtgacattagcaagttacttggcactgaatggaacttagtttgctactacgtatcttgtgggcatctgcaggctatcttgtaaaatggtggagtaatctaatcttgtttcatttgaagtatattggcctgtccaggaaactttattagcacctctaaacaattacgtcattaaagggcaagacttagaagccttgttaaggctgtgtaagatctgttttccaacttaaatgaagttaagcaaattcccataataattttagaatgattcagtgttttctagttatcgtaaatgatattgcaaaaagctggaaatcaacatgaagctattctttttcatttttcagaatcagccttttgaatgattcctatactctaatgttcaattgatacttgattcattttagaaaattgtcatagacccatatacttgagaattggcatgtgtgaggctgaagttttatgctagtgcacccaggcaatccataattgcagtaaagaaacatatacttgtctggg

SEQ ID NO: 93410 - DNA, 1044 bp, Homo sapiens
gttgagtgtggaatgccagattaaaggatttggatttcatcagtacacattaaagagtcatgtcaggttttaaaacagtcaaggtacaaagtggcaccttaagacttcactggggaaggcacatggagggaaggagcataggttaaaggaggctactggaactagaaatgaagtgatccacaggtagcagtacaaacaggaaggaagggcagatgctgggaagagttgaagctccttatggcagaattggtgtaattcacctttgtattttcttgctttatagcacagtgccctgaacacagtgtatactcagtaagaattttcttttttccttttttaaaaaaatttctttttaaagaaaaaataatatatgcgtgtatgtaaaatgatttaatgataatgtagatgagttcttacattatttgagtggacctcgctttttctacttttttttttaaagaaacactgtgatccacaattgtagcaattaaaatcttaaatctaaaagaaacataaaagggaatataatgctagagctcattctatttttattcagtacatatatattacttagtatgatgagactaccgtaataaagaataggaacagacttctgattatgtaatagcctgcaattatttttatggctattgcattccaatcttcttatgcaatatttacaacctacatatgtagcgagggcacaaaatacaagttctaacaatcctaaccataaatcagaatcaaagcatgcagtataacatttgtgacctcccttggctgctgcagacagcctttgttaagaatacataaaatactgagtttataactctgtggtagatctgggattttaagttataaaacttaatcactctctaccccataattaaagattctgtcaagacaatttgatattagtttaattgtgaagatggtgaaaaactcttatattccattttggaaaaataaaaacacaaaatgttttaaatattgtatgagtgtaatgagaatttcagcagattataactacaaaagattatgatt

SEQ ID NO: 93411 - DNA, 1037 bp, Homo sapiens
aaacgtagtgcagccagccacatagattcgcagactggcaggctggtcacagagcgcctgcttccatccagagtcccttctacatgtaactctccccagggcaaagcgcctgcatgtgcttcttctcacagccctttaagatatacagggcaagtaggagctgcttcttttctagaagaagaacttatccaagcctgtggtgcagacgattgttgtaggcaggctagagccacacttacctgattcccaatttgtacgtaagaccaggcaaggtccactgtgttgagaagatgctttctgtgaatcaaattacttggtacagaaaatgttgctttcagtgtatcttgtggcaactttaacattgtagacatcaccactgaataagatgaatgcgtgggaattgtggatttgaaaacactaaaagtggttatcaggctttagcacatcttaagagtctgcatttccactagcctaattcacactgggcccttctcagcgtttcttaatgctacgctactcccacttcctttcctctgtttccctcacttcagccctaaatgaatttaggttgttgaacagaaatgatcataaatccctttttaagccaaatgaaaagaggcccataatttctttagtttgtttcagacccattacctttcagaaggtcaaacctgcctcattctctaggtgtggacatgatacggataacaaaaaggcatggggatatgttttatcaaatgtcctaaagatgtttttacatgcagtttttaataaaaaacaattatctactatgcataagaactaaagtaataatgtgcaatgcattttgtgctttttaataataaattattagtaatgaagtggagacaacttagagttgattgttttctttggaggtaaggaaacatattgaaactaaacaatagtagctgcctaagatttcatgatgtgacagtggcatattgctatgggggaaaaaaaacaaccatgcacagaagaacaagccattcaccctgatatcagtaatttgaaagtga

SEQ ID NO: 93412 - DNA, 1061 bp, Homo sapiens
atggagcaaataatatttcttcatttatctgtctgtctttaattctgctgtcagactttatgtcatctttgaataagtctctaattttctgatttaaattaatacccatttattgaatttttgtcagaattataaatggggtcttttctactgtgttttctggctacggcccatagtatataggcttgtagtagttttagatggatttttatcctgcaactttgctgaagccatttagctaacactagttattttaagttgattttattgagttctgtaatcatataactttataacttgatgatatagagctatgacatatatcaaatgtattttttcctttttccccatgtttatatttttaattcttgttcctctccaatatctaattgcctattcagtcaagtagctacccttgcttccctatgaactaggaaataaaggaatcagcttactccatgaaagtcgcagccagcacataaatggattaaggtgtaaacgtgatattctctttgggagatgaaatggatcccaagtgagcaatattggacttgttggaatgtgttcacatatgtgaagaaagaatgtatcaaaccaaagctagggaaagaataagaaaaaataatgttagagaatttggcagtaactattccagcattatccaaaataaaggatggtttcgccagtgaattttgaataatgtgaaagtggaggtaaatgcagaaggatgaatgtagatcacagactttaaactgtcttggtattccctttggatatactaacaaggttaggatctcagactctattaaaaggcagttcctctaactccccttgttttgatctcttgttcactcagaaacccacataagcctttctcataggaagataatacactgatcttaggggtttggagtattcattccatccttgtgactgtgatttattattacaaagtaataaattgacttcttacagggaaagaatgcagtaaccatacgaacatagagaattttagtaccaaattaattttgatagtaaactaatgagttagcattctggct

SEQ ID NO: 93413 - DNA, 1319 bp, Homo sapiens
ttttaatgtctaaaacatacttattctcatattttgttacattttaataccatttaagagtagtagaatttggaaggtgacatagagatccacttttatttcattttcatttcaagcccctgtgtctttaaggaaagggctaagctacaacttggtcattctccagatccaagaggaaatggattggagcagttgtgcctttgtagagcagatgttttggttggaaaggctatcagccatctgactcataataaattctcaattccagtaaattcccagttttcagttacagtaggtaggatgcaggaaaacagtgtcttccactttggggtctttgaacttatttcacatgttaccactgttccttgtgcattacaatgtgcgaacagacaaaatactaggggaggttagagcaattccaggaatagactcagtcagttggtgtttttgagagagaccattggaggtaaaccaaagccactgccctctctgacacagtactaaccacaagaaacataactgcattgagttttcttataagttcctatgttaaaataatgattttatataggaatcatgtaataaaataatgattttacaaactgaattatgtcagtttgagtaatctataaacggcctatagttttttgttttgttttatgaggagggtttcctttatccttttcataaaatgctgaaagtaattatatggtcctgatgtgatatctttcattttagagtatttgttttttgggaaaatttactcaatacttgaacttattgagtaaaaaaaaaaaaaaatttactcagtaagcttctcaaagttctagtaaggccttatagccagtgttccagatggatgaagcagaattatgaaagtgatattcaacgtgtcctactttgtattgtgagctgagttgagagaattcattatttacttagtatttttgttttgttttgttttgttttgttttttagacaggttcttgatcctggctcaggctggagtacagtggtgtgatcacatatcactagagccacaatctcctgggttcaattgatcctgccatcttagcctagtagctgacactatagacacatgccaccatgctcggctaatttttgtattttttgtggagatggggttttgccatgttgcccaggctggcctcgaactccagggttcaatccatcctcccatctcagcctcccaaagtgttgggatgacaggcgtgagccactgcacctggcataaagtggtgtcttattatccccactctgtttttatcgaggagtcagtttcttttcaaccatcactg

SEQ ID NO: 93414 - DNA, 1057 bp, Homo sapiens
gagcagtcaaatcatctttgtttatgaaaataataagcaagatagaattaaaaaaaaacttaccctattctgtattgtgacatctagtagtaatgagctcaaaatgtcgcttttggaagacatgggcaggtggcagcagctctgtcctggtgtcctgggctcaccctgtaggaagtagctatttcaagaacattgcagttatcctttcctgacctgacaatcagtgcttcttattttcactgaatatagttagttaatcatagaatggccctaactgtacattattacaggaaggttgatattaccaccttagaatgccatggtcctcattgatgtcctcagagaagccattctccttccttaattaactgagtccatgtaaagatgtcaggtgaatacatttaatttggcacagtgacttctatagcctttagtctttacacatttgttaattttaatttcttgccctgtactttctaaaagtagacattaaaacacataaagcatatacttttaacctattttgaatatctactgtgtgcctggcgcagacaatatcatttattcttggataataagggaagaagaaatggttccttaagttgctcatgatctttgggccatacagtatttagaaactaaatgtagaacaagtaaatatacagtaaatctttcctgcatgtgagtttccaagttttttgtacatttctttgagcactggtgctgagtctcttctttgtgcccaatagcatcctagaggatatagtatcatgattaagaggctagggtctgagtcagcatacatgggttcaaaactcgtcttcaccatttaatctctctgagcctcagtttcttcatctgcaagtgagaataattagttcctaccttacacagttgttacgaagattagagataatgcatatacagctggaagctagtgactattgagtaaacacggaataaatgttagctgatattactgggcctagtaggaagaaggagatctctaccctgccctcaagaaattcacaatctatttggaatataaaatatatat

SEQ ID NO: 93415 - DNA, 1039 bp, Homo sapiens
tttagtagagatggggtttaccgtgttggccaggctggtcttgaactcctgacctcaggtaatccacccacctcggcctcccaaagtgctgggattacaggtgtgagccaccgcgcccggcctgttgcaaaatttttagaaaataatctgtcaaattcttttgaaatgtaaaatgttcataacctttgacccaagaagctcagttttaattctctatttaaaaatataagttccactactaacaaatgcacacacacaaatgtacatacactgagacaagcatacacacacaaaagaatatttattgcagcactatcaagtggccaagaattgtgaacaacctgaagtttgttgctaaggaaatggtttaataaaaaataaatccatgccatggaatattatgtggctatttaaaaagcagttgatagagcgatatgattcctttagggaaaacaaaacagaaggttaaagagctgtttatatgcaaatgtgtatatgtttttatgagcataaagaaagtagtttgaagctacctacacacacagttaatattggttaccttgaaaagtgggggtgagagaggggtggaagagcttttactttataaatttctgtatggtttgacttgttaagacaagcctaaattttgtaatctaaaatttttttttaattttattttattattattatactttaagttttagggtacatgtgcacaatgtgcaggttagttacatatgtatacatgtgccatgctggtgtgctgcacccattaactcgtcatttagcattacgtatatctcctaatgctatccctcccccctccccccaccccacaacagtccccagagtgtgatgttccccttcctgtgtccatgtgttctcattgttcagttcccacctatgagtgagaacatgcggtgtttggttttttgtccttgcgatagtttactgagaatgatgatttccagtttcatccatgtccctacaaaggacatgaactcatcattttttatggctgcatagtattccatggtgt

SEQ ID NO: 93416 - DNA, 1062 bp, Homo sapiens
gtatatgtgattttatttaccaccaaatttgatatcttaacagaatggaaaatttttattttagatgcttaaaatatttttaaaacaatgagaaaaattgtataactaacaggtatagattttaaagaaaaaaattcttgccttgaaaaaaaatccgtatcagtcttctcaaaaaagagaccttccagatctcttaggctgattttgtgtcaggatttaagtaatagaacgtaatagtaaacatggtttaatttagccttactcatgttttctcgagtcactgagataatcctataataaatattgtgctcctggagagtttttttctttagtcctttgataaatagatggtcctgagtatgctaagacagccagctctcaggagaagatatgtatttgattttggtagagagagctgtcttatcctctagggacttgagatgttcgttttactagtctgggagcagggccaaaagggttcttcatgacttagaatggaattctgaaaagtaagttcagcaagttttcattagtgagtttggccttttgtcttgcctgtgcctcccaaaagatcaagagctcagcctttgctttgaaatattacaaaaaagaaccagaacagaatttagttgggggagaaaatcaatcagccccaaaatatcatatttttggaaacattctggtgtagaactcccacctccctagccacttaagttagtgatatctcagtgtttttatctagcttcctttttaggcagaaaatacacatttagaaagaagatgtatataaatctgtgataattcaaatctcactggtacatgtttcttaaacttgtttgacccttaagttctgtcttaaatttattttgagtcttggggaagttctatgccttatttctcttaaatgctatactcctctctacagcataataattagtctaaagctataagatatactatatcttaatttaaaaaatcaggcctagcacctttctgcaaaacatctcaagggttttgtgcagattttttttctgccgtgaagatgagaaattcatgatttcc

SEQ ID NO: 93417 - DNA, 1102 bp, Homo sapiens
ctccatctcaaaaaaaatgagtaaataaaaaataaaaaaaatttattcaacacctcttagtgttttgttgcaggaggactctaggttatccagttagccatattgctagatgtctttctgtattgtgtcttgatgattccagttttctacaaggattgactgggattgcagatgtgctctgaatgacatactagagatattctagctgtgtagctgttgaaatgctttcctgtttgtcttcacttcttgtggttttatattaaacttctatcctttgtgatgacttatctgagctactagcatctctaaacaggactggtaactggtctccctgcatctcctttttccccacttcagtctagttgccacattacagacagagtagtcttctgaaaacacaaatctgatctatcattctcttgcttaaaaacagagtttattacttttccttgtaataaacagagtttattacttttcctcgtaaatgatcactcatcagctttatccaactcaatgcttttcctgcatctctcaggcatatttcttttttttctacctatatctcttccatcttcaagttctagcatttatttctttgtactatcttgaagtctgaactctaagtctctaattcctcctatcctgttgtttcagtgactttccccttcaatcctttatgtcagacacttgatggaagtagaaaccaatgtataaaaaaggtagcttaaggttataaaacagatggtcatcaacactgtgagaccattattccaatatcttccaagtatgaggaccttttattaatgtcaaaaccttttatatgggcataggagaagcgcttgactacaaagaggcaggacaaggcaatttttttagaatggtggaattattctctgttgtcacggtgaatatacaactctacatatttgtcaaaacccatagaactgtatatcacaaagagtaaattttactatgggtaaaaaataaatttcaaaagcatttcatagatccctagggatagaagtaatacttttagcatttcatattaataaatgaattcaaaatgccttttaaatatacttgtattttttaatcacaacag

SEQ ID NO: 93418 - DNA, 1024 bp, Homo sapiens
taatatcatcatatattattccttgaaaaaaacagattatggagcatgatattttaaaattttagatttttgtgttcattcaatatgaaaacccttcagaatatttgtgtgtagatagatattttggtgattggtctttgttatttccaccctggtagagttgttcaccagagattgttcatttacttttttcaaactctttcttaaaagtgtagattaacttggccctgtaatttaatgttaagggtgaaaatggtggaaacaactgaaatgatcatcagtagggaaacaacctaattgtccactgacagattattggataaagaaatatatatatatatataaaacaatggactagtattcagccttcataaaggcaacgtggatgaacctggaagacattatgctaagtgaaataagccaagcatagaaagaaaaatactgcctgatctcacttatatgtggaatctaaacaaaatgtcaaatacacagaaacagagagtacaacagtggttaccaggggtggggaagaggtaggaaaatagggagaagtaggtcaaagaatacaaacttgcagtttgtgtaggatgaataaatctagagatcagatatacagcatgaggactataattaataatgttatattgtatactgaaaatttgctaagagagtagattttatgtgcttttaacacacacacaagtaactatggaaagtgatgaacatattatttgttttactatagtaatcattttactatgtgtatgtatatcaaaaacatcatgttgtataccttaaatatatacaattgaaaaaatgaaaaaacctaaacatcaaaaccatattaactatttctataggaaaatatatgtatgtggatactgatgctggatactactagtggctaataccaatgaacactcatgccacatgtgttaagcgctctatacctgttagctcattcagttctcacaacaaccctatgaggttcgttgccactgttgcccccattttatggtgacaa

SEQ ID NO: 93419 - DNA, 1619 bp, Homo sapiens
agaaatactttactcttattctgtggttgtcaggtccattactttcagatcaagatctcatctcttggaatactgtgtaccgcagaaacagtatcgcattgctcagtctggcacactttaggtttggctctcccactccctggccccttccctgatgtgatgccctttgaatgggctcctcagaggcatgtgctttggtgccacaataaggtaaccaggactgtttattaagcttatgcattttttcaagtgcaggcagccccccactaataagttgcattccaaattgtatgtgtaggttggttatttggactctggaacgtgttttgccatggaaaccatttagtacatagttgggttaccaaggaaactggatgtactgaaggagtccatcaagccatagtgcctgctacatgcagaaccacattttgggggacagaacccaatcctttttctttctttttttgtagctgtcagttgggcagctcgccttgttggaggatgggccaggagctagcagtgatctagctgcagcagattggacctgctcagttcacccagtacaagtccatataccaggagggcccaaaagtcaagtcagatctctctgtaacagacatgcagggcaaacaagagctgtactgtcactcacttctggatcgttacctggaacagcactaagcaacttttcctccttgcttatgaaacccagtccacatcccagagccaggagagctggagccagagtgagcacagtgcacacaaagtgcttgcctttgttcctcgtgttctcaaatatccttgcaataaatgatcatctctccaagtagtctgtgtggacccagtatcacgcaggaaaagccgaccagctcaaactgggtgtggggcttgtccacaaaagcttatggccccatgatctaggttccttattaatagcaatgcattttcctgttatagaatatgtcactcatcacagtaaagagagaatgctaagcccattgtactattccaaagacaaggaatggaaatggtaacagcattattactgtagtgtttttattgtattttaaaaaaattaagccgagtataacttaaatgtttcttgtgcctgtttataaccagtgctgccctgttcccttggtataatggatggtagtctacacactgagtactgggtacgaagactcagctccttggtgttacttccttggaaccttcacctggtgtcctaatcagagtgatggccttcattcccccgtcttgttgtcaccctttggggcttccttagtttagtcctttgtttcctatctttgtatatttgcacaatcacagtagtttaactttacatttatattgtgctttctactttacaaggcacattctctttgcaagctagatagggccggcattgtcatctctgttttccagagttaaaatgaatactcaggcattttaaaggacttgccaaactttcacatccactggcagcagatctggaggtagaacacagggtttccagggcccggttttcctgcgctctttccaccgtatcactccacacgcctgtacagttgccacttcctttagctctgcttatttcttgatgggtggttgttagc

SEQ ID NO: 93420 - DNA, 1037 bp, Homo sapiens
ctacagtgaagtttttctacagtaattcttcaatagtgagttaaaactaattactaatacaagcatgagaataacaataaattagagcaagatagttggaaatgctttgataacatttggtccctttcttaaaattaaaacttttagcatttgctacctatctacctctggatttccctaaatagaaaattcaattcaaatcttttcttggagagaagagtttccaggtctttcttgagatatccaaccccttttggtagtcttcacacacagattttcccccactgttcgtgggcactgacacctcaccagagagtgggcaggtttgcatggggtgacaactggattatttacatggcactgtgaataagtgataagcctagttctgcagggggctgtttttatttcaaaggatgatttaaatctaccatgttagaatatgtaagaataaactcaggtggagatgctttcctgaggcctttaagctataacattctgtctatagcaccccttttctatcccccaaagagccacatctgaaatttagcaatccatttcttcaagatttcaaacttgccttaaacaattgagaatgaagagccatgtgcctctaagagctttgaccacagcccctctgccctgggcctcccagaatttccacaccagatcaacagggctgtggagttttcagggccactgctatcctctggcagcttctcagctcttgctggtggcctcagtaccagctttgatttctctctaggtcaaccctttcccagggaagagttccctcaacttcaagggatctttctcctcctccaagtctaacctccgccttttttgggtttggcgcagggaggggaaattgcaggagctgataacgggaaggaggagctgggagtcttcctcggttttactgtgaaggtgtcttgggtaagtggctggggagacaggaatgggcacaggggatgaactggagagagctcaggatgaatgacactgctcacccattctgaaatcatgctactccaccaaca

SEQ ID NO: 93421 - DNA, 1374 bp, Homo sapiens
gtgaaaacagccacatttggttactttaattaatgcctttaataagtagaggtgttaggctggaaagcattatttttcttacatttctgtgtatgaaatcttatattccttctggtgccttcatttgcctttcctttccttgcccttctttatgtatttttttaaatcattcatagactcagagaatgttcaaaacagcagcaacaacagcaaacttctagctagaagagtcgttaaaaatcatataatcaggtccttttgtttcacaggacaagatacttgagaatagaaaaggttaaataaaagatttcttcaaaatggctcagaaaatgtggctatgggagatatgtcaacagtgtaactattaacagagtttgtatatttgtgttctttttgtcttttcttaagtaaacaagtatatgaatacactttatagttgagaatcagtctttcacagaccctgttttgtatctccgtgctattcctaccttttaaattttattccatttgctttatctgtattcttcctgtatctctcttctctctcttttgcttctgtaaactaatacctttgcaacctaagtaacttaacattacagaaaaataaaattgaagttttaaaaaatcttgaaggtcggcacctcagaaaaggcaggctaaattaaaagataaagaaaaaagtacttggagacttctggaatatttgagttctttttaaaaactacctcaacagctgtagaagtagatagttctttattatcacaatctttaccctccgtttgctcagctgcaagtatatgtttaactagcacaactcaaatggatgatttatggtggcttttgccttacaaataaaatgaagaacagttagttcttaaggtaccaggttaagaatttggagagaaaaggatagggaatttattcatttattcataaataattgatcgatagagaggggtcatctccttatggagtacaccgtattttaatgcaagcagatgagaatcctgatgacttatacaatactgttcttcatcttcatactaaggtgactgagctaaaagtgctgaggtaataaatgtaaaagtgcttaggaaaaatggaaaagccttgtgttaatgatttcttattcaaaacagctcagttctataactatttattgggaatctaaaaacaaatatttgtgtgctgagggccaggtgctggagataatgagctataaagagaaaaggagagacagtgagaaaaaacagcattttctttccttctgggaagaaaagtagaaggatggaaaccctgtaccacacagttccccataccaaccaccagatggggttatcagccacaggcagctcagttgctggtccagagggc

SEQ ID NO: 93422 - DNA, 1010 bp, Homo sapiens
acctcacaccgggacagtaaagacaaagggcacctgaaatgtacatggctctcttcaggatgctttgagaaaccagaacttaagtaacggttaaagtagagactccaaagtcagacagacctggatgtgaatccagcctccaatactaagtagctgggtattctcttagcctcctttttgtcaccttttacccaggcatgaggatagtatccacttcacagttttgaggattaattgaattaaaacatgtgtaatgagactactgtctggcatacactactctatggagtcagtgcccagcgaatgatagctcttcctagctcagccaaccctgcaccgggcttcttcctaagtgctgttatgcacataatctcatttcatttccctaccaaccagccaggtaatgctcttcctcgcacactagagcagtgttagttgaacatttgaatttttaagcatcttgactgaatatgacactgcattggtgacattttgatagctgtcactgcatggtttagttccagcatctttcagcacattcagaagcatcaacctttacatgttggggcttctccaacagcaattatagccacaagtggagaaaagctatacatgttctcataaaatatcatcgagatttgtgtcataggcctctagtgacaaagacatgtttaactgctagatgtcagtttttttccccctttcagataaaattaaactgtggagttaccatttaatccacaagtgtaagaataaattggttttttagtcccaattctgtagaaaatcaaaactagtaccaaatatttttatttataaacatttttattgtgggtgtaggcatatctgtgtgtagacagatagaatgaggtgccccccgaaaaaagacggtggtgtcatcttttgtggccagcctagtgaaatcctcactctcctcagatgcctcccagccggcagccaccctgcttcccccatgaccttcttctgagtgtgaagctctgggtgccagc

SEQ ID NO: 93423 - DNA, 1087 bp, Homo sapiens
cttcatggtttcagattttcccgtatgcttcagtcaggattttattcagcaatcatttattaagtacattcttaagtttggtgagtaccataccactgtactaggtatcaaaagagaaaccctttccccttttattggtttgttcatgttttcacttattttttcatttccttcattcaagaaatatttgtttagctcctactgtgtcccaggtacggttctgggtgcagaggaatcagtgataagcaaaaacagacatcgtctttgccttcaaggaattgccagtgtactgcgggagaaagacgtaaagaattaattgcaattcagggtgatacatactataatagtagggtgttcaagtttctttgaggaatgtgaagggtgtaattggctctgcctcaggcatcaaaaataactttacagattactggacatgtgagaggattctacagagagaggacagcacatacagaggtgaggaggtataaagtatggttggttcggggagcttgatatctgaatgcaaaaacagcagatgcaagaggtgaagctggaaaactaagttgggtagccaagttgttaaggtcattttgcatgccaagtttaaaaatctggagtatgtcttagagaaaatggtgggggaaggggcactgaagctttttttttttttccttgctttttttttttttttttttttttgagacagagccttgctctgtcacccaggctggagtgcagtggtatgatattgtgtcactgcaacctccgcttcctgggttcaagggattctcctgcctcagcctcctgagtagctgggattacaggcatgtgccaccacacccagttaatttttgtatctttagtagagatggggtttcaccatgttggccaggatggtcttgaactcctggcctcaaagtgatccacccacctcagcctcccataatgctgtgattacaggcatgagccgctgtgcccggctacactgaaggcttttaagcagagaaaatgctttggaagtaaattgtgtttgctcaaaattcatatgttgaagccttaaccccctagtacctcagaatataactgt

SEQ ID NO: 93424 - DNA, 1003 bp, Homo sapiens
ctctgagtcaaagtatcacaattagtgtatataaaaagctaggaatattaacttcatctaccaattgccattaaagtaattaatttagctattaatactgaaaataaagaaaaattaaatataagaaatatttcctcctaaaatagctaaaagctatgctccatatctttatgtttgattgatagtatcacatttttaagaagttatttttagatgtttatgaactataagagaatcatataaaaggaatagctgtaaagggggattagagggctttttgttgttattattttgtattttgtcattctaagagattaaacaaagattcatgaatagaagctagaatggaaaagaatttaactttgcaagaaattaatttctcccttacatcttataacgttttttaaagtagagaaaaatcaaataggataaaaggactacagattcttaaaaaatatgtttaagtaaagaacacggtataaaaggatatatgcttcagagtacatttcctccaacccgagtcccctcgtcttccagttccccttcacagaggcagtcagttatgtatgcgtgtccttctatgaatatacaaaggtatgtgaacatatcctttctgtcatttggatggtagcatgctgtacatactacgttgcagtctgctttttaaaatatatatatatatatatcttggagattgtaccatatcagtccatatagattcactagttggttataacagttgtttaatcatccttactgatggatctgagtttactttctgtcttactacaattaatgatgaatatctttgtacatacattgaagactactgttctaatagtcgtgtctgtcaaatgatgaaagatgatgatgggtttctcacatcctgataatacctgatagctttcaaagcacttcctatatgttttttgttttggaatgatctactttcaggaatggttagcgacccactactggaggtggtcaaccactgcgtgcattt

SEQ ID NO: 93425 - DNA, 1020 bp, Homo sapiens
tcacacacacaatcatagctgcacagtgctgtgatgaaacatcactagggtacctccactccccatacagttaggaaactgtggaacagagacatcctcccgtgttcagagtcacacagcctagatagtggcagtggtaggactacaatcatggcagatcagtgctagaaaggctttagagtgtctgtatgtcattcagggttcccagccttgagaagaggacctgctatgcagttactgcggactgcaaattcacatgtacaccaactgttgtttgtagactaaataaataacatctaacatctgtataccgttactttaaaaacgaatgttgactctgctgtgattaataaattggaagtttattttcaactgttactgcatccaaagtaccttttttcattatattttctcactgcacagattcttaaagtatatctgctgttgtttgattagtctgagagaggttttgatgtgtgaagtgtccctcgtgcttgaaaagattgggaagcacacatctagtccaacccttccacttactttacaagatagaccaaagcccatgagggttccctttactgccttagggttgggaagattgtcagtaataaagtagggaccagatcctgattctttaggacccaaaagtgagtgctttgtttttttcttaagtatatcatattaatggttcccattaatccagaacatccctatgaattagaaaaatccacaaaatatggtcaggcgtggtggctcacacctgtaatcccagcactttgggaggccgagtggggtggatcacctgaggtcagaagttcaagaccagcctggccaacatggtgaaaccccatctctactaaaaatacaaaaaaattagctgggcatggtggtgggtgcctgtaatcccagctacttgggaggctgaggcaggagaattgcttgaacctgggaggcagaggttgcagtgagctgagatcgtgccattgcactccagcctaggcaacagagcaagactctatc

SEQ ID NO: 93426 - DNA, 1049 bp, Homo sapiens
ccctctccccccaccccatgacaggccccggtatgtgatgttccccttcctgtgtccaagtgttctcattgttcagttcccacctacgagtaagaacatgcagtgtttggttttttgtccttgcgatagtttgctgagaatgatggtttccatccatgtccctacaaaggacatgaactcatccttttctatggctgcgtagtattccatggtgtatatgtgccatattttcttaatccagtctatcattgatggacatttggattggttccaagtctttgctattgtgaatagtgccacaataaacatacatgtgcatgtgtctttatagcagcatgatttataatcctttccccaggtagtttatgtaggaactatttaatgttaaatgaatcattaggtaaagtgcgtatactacttcatgagatggctttaattaagtcacttattttcttaagactttatcttgataatttttttcttggttcataatgaaatggaaaagatttgtgccttgactatcctgaaacttttatgttactctcacaagtttactgaagctgcaaagaataaataaggctatttaaactatggtgactataacccatttatattgagaaataagcctttcaagaggttaaaaatagcataaaggcaggtacataagatgcttgtcagctaaaaagacccacccaatttaaagtaacattaatatattaaaaccccatttcttatctgagcatatttatagcagaacaaaactccagagataaattcatctgccttcagacagccgtacacctgaactccaggtggatgtttgtgtttgggtctgtttctaggtggaatgatctcatgttctcccttaccacagaattgtgcaacactgatacacacctgtgttttgatctttaaaatctgtcgtggtaacatctcaagtaattttaaatagcttcgtggatgatccagattgcacgtctgccagaaacatccttgggcacagttttggagctgacttggattcctgcaatactaaactcgagtcatat

SEQ ID NO: 93427 - DNA, 1409 bp, Homo sapiens
tggttatatttttaaactatactgagaaggggatagggtcagaacccaataatggacctgaaatcactgaaaataattcttggatattgaagggtaaaatttggcctatgtcttgtaaacagctgcctgtatcccgtaaacaggctcagtcagatgctaacagatatttgtcaaaattgcacatgccagagattgaaacggaaaatggacatgagccattttggagttaggctttcccaacaacaggcctcggggctgtttaggttctgccacctagatacacgggggatggtttcttcagtgttttccttcctcatgagctcccaaaggacaaggaagcaaatccacagctccttgaagccccttagtccctaagctacagttgaacacagcaaacacatatttaatattgtttttatctgcttaattgtaagttagtattgaacacagactagtttcaaagttttatttgcttaactttatgagtcctttcattaaaaaaaggatttctctgcctgggcacaatggctcacgcctgtaatcccaacactttgggaggccaaggcgggaggatcacctgaggtcgggagttcgagaccagcctggccaacatggtgaaaccccgtctccactaaaaatacaaaaattagctggggatggtggtgcgtgcctgtaatcccagctactcaggagtctgaggcaggagaatcacttgaacctggcagttggaggttgcagtgagtcaaaattgtcccactgcactccagtctggcgacagagtgagactccctctcaaaaaaaaaaaaaggatttctcttctgtttgcttatcaatactctaagcattatggatttacaaataaatataaattatagttttcattcccaaagggcttgcaatttagttgggtagataagacatgtacaagaaagaattaaagaatacagcagcatataaaaaattatttaagttttgtggtgcaattagaataaatggtactgattaagtattataggcggtaagagcaaaagagaaaacatcagcatggactagaatctttggatcctggcacatggtagttgcacagaaaatatttgttgaacagaggataggccattaaacaccatttaaaatagcatcaaaaatatgaagtactcagttatacatttgagaaatgatgtacaaaacccatataccaaaaagtataaaagataaattaaagaagacctaaataaatagagaaatatattgtcagtgggccagaagtctcagtattaagatgtcaattcttcccagagtaatcattgatctatagatctacagattaagtagtcaaaaatctcagcagacttttttttttagggattgacaagccgattctaaaatgtatatataaatgccaaggaccg
